United States Patent Application Publication US 2007/0277258 A1 - sequence listing, part 4

SEQ ID NO: 21326 - DNA, 477 bp, Zea mays
  unsure at all n locations
  Clone ID: LIB3152-008-P1-K1-D3
gaannncccgggntcgaccccacgcccgtccggcaacccatagaaaggcacccaatattgtactcaataatcggcacgccannaaatattttgccctcatgtatgcctccnnttggtctttnnctgcaagtgccctgctacccggcgaggcccattttcnnccgcaatggcttcaacannagctcnnctatagcnnttccctntnncttcccccaatacccnntctcaccanngcgatgtnncttcacgtatcgtgaaannatccaattnncttctaccctacannggatccaacaggcnnaatcgcagcaggccatcttaacctttatcancccttgnttcctccaaccaatcatcnagccctattacacgcagttaccctttggtgcatttattggcacaaaacatcagggcacaacaactacaacaactcgtgctagcaaaccttgctgcctactctcagcaacagcagttacc

SEQ ID NO: 21327 - DNA, 382 bp, Zea mays
  Clone ID: LIB3152-008-P1-K1-D4
aaattgcaccaagaaatccatcgagtaggccgtcgacaggggaattaatggcgtcgtcgtctagcagcagccaccgccgcctcatcctcgcagccgccgtcctgctctccgtgctcgcggctgccagcgccagcgccgggacctcctgcgtgccggggtgggccatcccgcacaacccgctcccgagctgccgctggtacgtgaccagccggacctgcggcatcgggccgcgcctcccgtggccggagctgaagaggagatgctgccgggagctggcggacatcccggcgtactgccggtgcacggcgctgagcatcctcatggacggcgcgatcccgccgggcccggacgcgcagctggagggccgcctagaggacctgcc

SEQ ID NO: 21328 - DNA, 362 bp, Zea mays
  unsure at all n locations
  Clone ID: LIB3152-008-P1-K1-D5
gactgcgtgggcggacgcgtgggtgggtncttcagacccattnagctttatctanctccagagcgcagnaagaaccccgatcgacacctatgagggtgtntgctcgttgccctcgctctcctggctctcgctgcgagcgccacctccacgcatacaagcggcggctgcggctgccagccaccgccgccggttcatctaccgccgccggtgcatctgccacctccggttcacctgccacctccggtgcatctcccaccgccggtccacctgccgccgccggtccacctgccaccgccggtccatgtgccgccgccggttcatctgccgccgccaccatgccactaccctactcaaccgccccg

SEQ ID NO: 21329 - DNA, 381 bp, Zea mays
  Clone ID: LIB3152-008-P1-K1-D6
gcaacatagaaagcacaatagtgttccatcaatggcagccaaaatattttgcctccttatgctccttggtctttctgcaagtgctgctacggcgaccattttcccacaatgctcacaagctcctatagcttcccttcttcccccgtacctctcaccagcggtgtcttcggtatgtgaaaacccaattcttcaaccctataggatccaacaggcaatcgcagctggcatcttacctttatcacccttgttcctccaacaatcatcagccctattacagcagttacctttggtgcatttattggcacaaaacatcagggcacaacaactacaacaacttgtgctagcaaaccttgctgcctactctcagcaacaacagtttct

SEQ ID NO: 21330 - DNA, 376 bp, Zea mays
  Clone ID: LIB3152-008-P1-K1-D7
ggggacgaggcgctcgcttttctgtttggctccgcgacgccggctgcacgctgtggcatgttctaccacttgttcctccaggtaggacggctggggaggatgggtctccttattctggacaggatgccaactgtggcaatacccttttgctatcccttgaggagcttgtaaaagatggtctactgatgtcagatgaacttcctgatcctgtggatacagagtatgttgaatttgacactgttgcaaatctgaaagaaccacttattgcaaaggcagcagagaggctcctactaagccatggagagctcagaacacaatatgactgcttcaaaaaaaatccaaatatatcaggttggcttgaagatgcagctctttt

SEQ ID NO: 21331 - DNA, 393 bp, Zea mays
  unsure at all n locations
  Clone ID: LIB3152-008-P1-K1-D8
aaaaaananccgggcgacccacgcgtccgtaactagcaacatttaaagctcaattgtgnaccaacaatggcagccaaaatagggggctttcttatgctccttggtctttctgcaagtgttgctaccgcaaccattttcccacaatgctcacaagctcctatagcttcccttcttcccccatacctctcaccagcggtgtcttcaatgtgtgaaaacccaattgttcaaccctacaggatccaacaggcaatcgcaacaggcatcttaccattatcacccttgttcctacaacaaccgtcagccctattacagcagttacctttggtccatttggtggcacaaaacatcacggcacaacaactacaacaacttgtgctagcaaaccttgctgca

SEQ ID NO: 21332 - DNA, 321 bp, Zea mays
  Clone ID: LIB3152-008-P1-K1-E1
caagtagcgacagctcgacaaagatttgtgagagtgatccggcgctgagaagagatggctaagatcgccgcagccgccgcggcggcggcggcgctgtgcttcgcggccctggtggccgtggccgtctgccaaggcgaggtcgagcggcagaggctcagggacctgcagtgctggcaggaggtccaggagagcccgctcgacgcgtgccgccaggtcctcgcccggcagctaaccggcggcggcgtctgcggcccgttccggtggggcaccgggctccggatgcggtgctgccagcagctccaggacgtgagccgcgagtgc

SEQ ID NO: 21333 - DNA, 274 bp, Zea mays
  Clone ID: LIB3152-008-P1-K1-E10
ccaacaaccaaacaacaaggcgtaccattatattatccctccgtcctactaaaagcgctcatagagagcgcaacaaatgctttcattattccacaatgctcacttgctccaagttctattattacacagtccctcccaccacttactccaaaggctttttaacacccatctcgtcaagcctatcttctacaacatgcaattgctgccagcgtctcacatcaaccaattacccaatttcaacatcaaatacttggctcatttaacaatttcaaat

SEQ ID NO: 21334 - DNA, 376 bp, Zea mays
  Clone ID: LIB3152-008-P1-K1-E2
accaacaagcaacatagaaagtggtttttagtagcaacaatagagcaacaatggagaccaagatattttccctccttatgctccttgctctttctacatgtgttgctaacgcgacaattttccctcaatgctcacaagctcctatagcttccctttttcccccataccttccatcaattatagcttcagtatgtgaaaacccagctcttcaaccatataggcttcaacaagcaatcgcagcaagcaacatacctttatcgcccttgttgtgtcaacaatcgccagccctatctttggtgcagtcattggtacaaaccatcagggcacaacagctgcagcaactcgtgctacctgtgatcaaccaagtagctctggc

SEQ ID NO: 21335 - DNA, 378 bp, Zea mays
  Clone ID: LIB3152-008-P1-K1-E3
caaatactggtggaagactaataattgtttcagatggaatatgggacgctctgtcctcagagagtgctgctcaggcgtgccggggattacgtgcagaactggctgcaaaacttgttgttaagcaagctctgaagacaagtgggctgaaagatgacaccacatgtgtggttgtcgacatcatcccatctgatcattgttcaacaccaccagcattgtctccaaagaaaaatcagaacaagttgaagcatcttatttttggtaaaaggtctcatagttctgttggaaagctcagcaaatctgcttcattgggttcagtggaagaaatattcgaggagggatctgcaatgttggaagaaaggttgggaagtaattttccac

SEQ ID NO: 21336 - DNA, 174 bp, Zea mays
  Clone ID: LIB3152-008-P1-K1-E4
agagccatcgcagctttacggtatacataacctcaacccatatgcttagaacagcatctggcattgattcaagaatggccacaactacaacacgtgtccaactaataagtgtgcgaaccttgtgttacctcgaacaacagttttcattcaataactagatgggggaccctgttt

SEQ ID NO: 21337 - DNA, 351 bp, Zea mays
  unsure at all n locations
  Clone ID: LIB3152-008-P1-K1-E6
agccaaagcaacncagngggctaggtctgttagagncaactaagatactaccatatgatcagctcatgcaagagttggatgtttccaacggtatcgtcagaggcaaactggatcagctgagaagatgctttgaagtacaatttgcagctggaagagatcttacacctgatcagctaaacaacatgatagagatcttatctgactggttgggaacatcagatagcctgttgcatcaaattcaggagaaaatcaagtgggctgacacaatgagtgatgtgaacaagaagcaccagaaagaatttgaagacagagtggaagaggccaaaaaatcaattaagaagttgaacaatt

SEQ ID NO: 21338 - DNA, 374 bp, Zea mays
  Clone ID: LIB3152-008-P1-K1-E7
cggacgcgtgggcagaaacatacttagcgaagcgcactagcaacaacctaacaacaatggctaccaagatattatccctccttgcgcttcttgcgctttttgcgagcgcaacaaatgcgtccattattccacaatgctcacttgctcctagttccattattccacagttcctcccaccagttacttcaatggccttcgaacacccagctgtgcaagcctataggctacaacaagcgattgcggcgagcgtcttacaacaaccaattgcccaattgcaacaacaatccttggcacatctaacaatacaaaccatcgcaacgcaacagcaacaacagttcctaccagcactgagccacctagccatggtgaaccct

SEQ ID NO: 21339 - DNA, 375 bp, Zea mays
  unsure at all n locations
  Clone ID: LIB3152-008-P1-K1-E8
gagaccaactagctacatagaatgtacaatagcgnaccaacaatggcagccaaaatattttgcctccttatgctccttggtctttctgcaagtgctgctacggcgaccattttcccgcaatgctcgcaagctcctatagcttcccttcttcccccgtacctctcaccagcggtgtcttcggtatgtgaaaacccaattcttcaaccctacaggatccaacaggcaatcgcagctggcatcttacctttatcacccttgttcctccaacaatcatcagccctattacaacagttacctttggtgcatttattggcacaaaacattagggcacaacaactacaacaacttgtgctagcaaaccttgctgcctactct

SEQ ID NO: 21340 - DNA, 373 bp, Zea mays
  unsure at all n locations
  Clone ID: LIB3152-008-P1-K1-F1
tggcaccnnnctcttacccaactgnncaacaatgtgcgttgcctattcaaaaccaacttnngctttgacaannnacccagcanngcgttctatccaaccnnatcccatcattngnngtggtgccncnntcttttnnagatttnncttatcgacgttatangnnttcaataannntaaacgttttttcggtctcggatcgttnnaaaanannaaaaaaaannnaaaaaaaaaaaaggggccggcccgcttctttagaggatctcannagcttatcgtacccgcgntgtcatgcganncgtctatagcttctttcttatttagtgtnncacctaaatnnntcaattcactcggcccccgtcgttttacaaaacgt

SEQ ID NO: 21341 - DNA, 370 bp, Zea mays
  Clone ID: LIB3152-008-P1-K1-F10
cgcgcgtctccggtcccgtccgtaataacactgatccgatccacgccggccggcgatggagctcatcaagtccagggcgaccgtgtgcgcgctcctcctggcgctgctcctgctctcacactacgacggcgggacgacgacgacgatggtggcggaggcccgggtgtgcatgggcaagagccagcaccactcgttcccctgcatttccgaccgcctctgcagcaacgagtgcgtcaaggaggacggcgggtggaccgccggctactgccaccttcgctactggaggtgccagaaggcgtgcttagcaaagctctttaaacacccttggcttgccagaactgaactctagtaggactaagtaacacccttg

SEQ ID NO: 21342 - DNA, 371 bp, Zea mays
  Clone ID: LIB3152-008-P1-K1-F2
cagcattcagaaacacaccaagcgaagcgcactagcaacaacctaacaacaatggctaccaagatattagccctccttgcgcttcttgcccttttagtgagcgcaacaaatgcgttcattattccacagtgctcacttgctcctagtgccattattccacagttcctcccaccagttacttcaatgggcttcgaacatccagccgtgcaagcctacaggctacaactagcgcttgcggcgagcgtcttacaacaaccaattgcccaattgcaacaacaatccttggcacatctaaacctacaaaccatcgcaacgcaacagcaacaacagtttctgccatcactgagccacctagccgtggtgaaccctgt

SEQ ID NO: 21343 - DNA, 376 bp, Zea mays
  Clone ID: LIB3152-008-P1-K1-F3
gtgaaaacccaattgttcaaccctacaggatccaacaggcaatcgcaacaggcatcttaccattatcacccttgttcctccaacaaccgtcagccctattacagcagttacctttggtccatttggtggcacaaaacatcagggcacaacaactacaacaacttgtgctagcaaaccttgctgcatactctcagcaacatcagtttcttccattcaaccaactggctgcattgaactctgctgcttatttgcaacaacaattaccattcagccagctagttgctgcctacccccagcaatttcttccattcaaccaactagcagcattgaactctgctgcttatttacagcagcaacaactactaccattcagcca

SEQ ID NO: 21344 - DNA, 376 bp, Zea mays
  Clone ID: LIB3152-008-P1-K1-F4
gcaaagcggcagtgcgtagagaggatcgttgaacagaacagcatgaagatggtcatcgttctcgtcgtgtgcctggctctgtcagctgccagcgcctctgcaatgcagatgccctgcccctgcgcggggctgcagggcttgtacggcgctggcgccggcctgacgacgatgatgggcgccggcgggctgtacccctacgcggagtacctgaggcagccgcagtgcagcccgctggcggcggcgccctactacgccgggtgtgggcagacgagcgccatgtaccagccgctccggcaacagtgctgccagcagcagatgaggatgatggacgtgcagtccgtcgcgcagcagctgcagatgatgatgcagcttgagc

SEQ ID NO: 21345 - DNA, 327 bp, Zea mays
  Clone ID: LIB3152-008-P1-K1-F5
cccacgcgtccgcccacgcgtccgtttacgcgtccgtagctagcagatcaaacaagtagcgacagctcgacaaagatttgtgagagtgatccggcgctgagaagagatggctaagatcgccgcagccgccgcggcggcggcggcgctgtgcttcgcggccctggtggccgtggccgtctgccaaggcgaggtctagcggcagaggctcagggacctgcagtgctggcaggaggtccaggagagcccgctcgacgcgtgccgccaggttcttgaccggcagctaaccggcggtggcgtctgcggcccgttcccggggggcaccgggct

SEQ ID NO: 21346 - DNA, 385 bp, Zea mays
  Clone ID: LIB3152-008-P1-K1-F6
gagcattcagaaacacaccaagctttcgcactagcaacgacctaacaacaatggctaccaagatattagccctccttgcgcttcttgccctttttgtgagcgcaacaaatgcgttcattattccacaatgctcacttgctcctagtgccattattccacagttcctcccaccagttacttcaatgggcttcgaacacctagctgtgcaagccaacatgcaacaacaagcgcttgcggcgagcgtcttacaacaaccaattgcccaattgcaacaacaatccttgccacatctaacaatacaagccatcacaacgcaacagcaacaacagttcctaccagcactgagccacctagccatggtgaaccctgccgcctacttgcaaga

SEQ ID NO: 21347 - DNA, 368 bp, Zea mays
  Clone ID: LIB3152-008-P1-K1-F7
gcaacatagaaagtggaatctagtttcaacaatagagcaacaatggagaccaagatattttccctccttatgctccttgctctttctacatgtgttgctaacgcgacaattttccctcaatgctcacaagctcctatagcttccctttttcccccataccttccatcaattatagcttcagtatgtgaaaacccagctcttcaaccatataggcttcaacaagcaatcgcagcaagcaacatacctttatcgcccttgttgtgtcaacaatcgccagccctatctttggtgcagtcattggtacaaaccatcagggcacaacagctgcagcaactcgggctacctgtgatcaaccaagtagctttggc

SEQ ID NO: 21348 - DNA, 90 bp, Zea mays
  Clone ID: LIB3152-008-P1-K1-F9
gggtctacagaccattagctttatttactccagagcgcagaagaacccgagcgacactatgagggtgttgtttgtcacccttcttcttct

SEQ ID NO: 21349 - DNA, 369 bp, Zea mays
  Clone ID: LIB3152-008-P1-K1-G1
agcattcagaaacacaccaagcgaatctacctagcaacgacttaacaacaatggctaccaagatattagccctccttgcgcttcttgccctttttgtgagcgcaacaaatgcgttcattattccacaatgctcacttgctcctagtgccattataccacagttcctccgaccagttacttcaatgggcttcgaacacctagctgtgcaagcctacaggctacaacaagcgcttgcggcgagcgtcttacaacaaccaattaaccaattgcaacaacaatccttggcacatctaaccatacaaaccatcgcaacacaacagcaacaacagttcctaccagcactgagccaactagatgtggtgaaccctg

SEQ ID NO: 21350 - DNA, 375 bp, Zea mays
  Clone ID: LIB3152-008-P1-K1-G10
attgagaccaactagcaacatttttagcacaatagtgtaccaacaatggcagccaaaatattttgcctccttatgctccttggtctttctgcaagtgctgctacggcgaccattttcccgcaatgctcgcaagctcctatagcttcccttcttcccccgtacctctcaccagcggtgtcttcggtatgtgaaaacccaattcttcaaccctacaggatccaacaggcaatcgcagctggcatcttacctttatcacccttgttcctccaacaatcatcagccctattacaacagttacctttggtgcatttattggcacaaaacattaaggcacaacaactacaacaacttgtgctagcaaaccttgctgcctac

SEQ ID NO: 21351 - DNA, 374 bp, Zea mays
  Clone ID: LIB3152-008-P1-K1-G2
caacaatggcagccaaaatattttgcctccttatgctccttggtctttctgcaagtgctgctacggcgaccattttcccacaatgctcacaagctcctatagcttcccttcttcccccgtacctctcaccagcggtgtcttcggtatgtgaaaacccaattcttcaaccctataggatccaacaggcaatcgcagctggcatcttacctttatcacccttgttcctccaacaatcatcagccctattacagcagttacctttggtgcatttattggcacaaaacatcagggcacaacaactacaacaacttgtgctagcaaaccttgctgcctactctcagcaacaaccagttcttccattcaaccaactagct

SEQ ID NO: 21352 - DNA, 374 bp, Zea mays
  Clone ID: LIB3152-008-P1-K1-G3
gtggaatccagtagcaacaatagatcaacaatggcgaccaagatattttccctccttatgctccttgctctttctgcatgtgttgctaacgcgacaattttccctcaatgctcacaagctcctatagcttcccttcttcccccataccttccatcaatgatagcttcagtatgtgaaaacccagctcttcaaccctataggctccaacaagcaatcgcagcaagcaacatacctttatcacccttgtttcaacaatcgccagccctatctttggtgcagtcattggtacaaaccatcagggcacagcagctgcagcaactcgtgctacctgtgatcaaccaagtagctctggcaaacctttctccctactctca

SEQ ID NO: 21353 - DNA, 386 bp, Zea mays
  Clone ID: LIB3152-008-P1-K1-G4
caccaagcgaagcgcactagcaacaacctaacaacaatggctaccaagatattatccctccttgcgcttcttgcgctttttgcgagcgcaacaaatgcgtccattattccacaatgctcacttgctcctagttccattattccacagttcctcccaccagttacttcaatggccttcgaacacccagctgtgcaagcctataggctacaacaagcgattgcggcgagcgtcttacaacaaccaattgcccaattgcaacaacaatccttggcacatctaacaatacaaaccatcgcaacgcaacagcaacaacagttcctaccagcactgagccacctagccatggtgaaccctgtcgcctacttgcaacagcagctgcttgcatt

SEQ ID NO: 21354 - DNA, 378 bp, Zea mays
  Clone ID: LIB3152-008-P1-K1-G5
gctcctatagctgcccttcttcctttatttcttccatcaatgaccgcttcagtatgtgaaaacccagcccttcaaccctacaggctccaacaagcaatcgcaacaagcaacttacctttatcacccctgttctttcaacaatcgccagccctatctttggtgcagtcattggtacaaaccatcagggcacaacagctgcagcaactcgtgctaccagtgatcagccaagtagctctggcaaacctttctccctactctcagcaacaacaatttcttccattcaaccaactgtctacactgaaccctgctgcttatttgcagcaacaacaactactaccattcagccagctagctactgcctactctcagcagcaacaa

SEQ ID NO: 21355 - DNA, 402 bp, Zea mays
  unsure at all n locations
  Clone ID: LIB3152-008-P1-K1-G6
ccgggncggacccacgccgtccgcaactagcaacatacatagggaagttcactagcaacatcttagcaccaatgggagccaagatttttgccctccttgccctccttgctctttcagcaagcgctgctacctcgacttttattccacaatgctcacaacaatacctctctccggcgacagccgtgggatttcaatacccaactatacaatcctacatggtacaagaggccatccaagcaagcatcttacggtcattagcattaaccctccaacaaccatatgctctattgcaacagccatccttagtgcatctgtatctccaaagaatcgcggcacaacaactacaacaacagttgctaccaacaatcaatcaagtagttgcagcgaaccttgctgcttacc

SEQ ID NO: 21356 - DNA, 374 bp, Zea mays
  Clone ID: LIB3152-008-P1-K1-G7
gataccaactagcaacatacattgttaagtacactagcaacatcttagcaccaatgggagccaagatttttgccctccttgccctccttgctctttcagcaagcgctgctacctcgacttttattccacaatgctcacaacaatacctctctccggcgacagccgtgggatttcaatacccaactatacaatcctacatggtacaagaggccatccaagcaagcatcttacggtcattagcattaaccctccaacaaccatatgctctattgcaacagtcatccttagtgcatctgtatcttcaaagaatcgcggcacaacaactacaacaacagttgctaccaacaatcaatcaagtagttgcagcgaacctt

SEQ ID NO: 21357 - DNA, 304 bp, Zea mays
  unsure at all n locations
  Clone ID: LIB3152-008-P1-K1-G9
anncagaaacacaccaagcgttttctctctagcaacaacctaacaacaatggctgccaagatattagccctccttgcgctttttgcccttttagtgagcgcaacaaatgcgttcattattccacagtgctcacttgctcctagtgccattattccacagttcctcccaccagttacttcaatgggcttcgaacattcagccgtgcaagcctacatgctacaactagcgcttgcggtgagcgtcttacaacaaccaattgcccaattgcaacaacaattcttggcacatctaaacctacaaacca

SEQ ID NO: 21358 - DNA, 395 bp, Zea mays
  unsure at all n locations
  Clone ID: LIB3152-008-P1-K1-H1
ggaaggaanggcccgacccacgcgtgcggaccaacaaggaacataaaaagggggattcaatagcaacaatagagcaacaatggcgaccaagatattttccctccttatgctccttgctctttctgcatggggttgctaacgcgacaattttccctcaatgctcacaagctcctatagcttcccttcttcccccataccttccatcaatgatagcttcagtttgtgaaaacccagctcttcaaccctataggctccaacaagcaatcgcagcaggcaacatacctttatcacccttgtttcaacaatcgccagccatatcttgggtgcagtcattggcacaaaccatcagggcacagcagttgcagcaactcgtgctacctgtgaacaaccaagta

SEQ ID NO: 21359 - DNA, 381 bp, Zea mays
  Clone ID: LIB3152-008-P1-K1-H10
ccaacaagcaacatacaacgtttttttctagtagcatcaatagagcaacaatggcggccaatatattttccatccttatgctccttgctctttctgcatgtgttgctaacgcgaccatttgacctcaatactcacaagctcctatagctgcccttcttccaccataccttccatcaatgaccgcttcaatatgtgaaaacccagcccttcaacccttcaggctccaacacgcattcgtgaccagcaacttacctttatcactcctgttcttttaacaatagccaggagtatctttgttgcactcattggtacaaaccatacaagctacacagctgcatctactcgagctactcagtgatcagccaagtaattttaccacac

SEQ ID NO: 21360 - DNA, 292 bp, Zea mays
  Clone ID: LIB3152-008-P1-K1-H11
gcgaggcgacgatcggacctttgttgtaagcggtaagcccaccggctcaacagcgggctgcagatccccccaccccccacgcaactccatctcctctccgcctccacctgcacccatcgagcaccgaacggcggcggcatggagactggtggcgaggagttcgcgatcggcgtggtgatctccgcgaagaccaccctgggggaggagttcgagggccagatcgtcgcctttgaccgcccctacaaccttctcgttatccatgagggcctcgatagggcggacaggggtgagc

SEQ ID NO: 21361 - DNA, 360 bp, Zea mays
  Clone ID: LIB3152-008-P1-K1-H2
ccggtcgcccaccgtcgattttgagcttcagaaacacaccaagctaacacattacacaacctaacaacaatggctaccaagatattatccctccttgcgcttttgcgctttttgcgagcgcaacaaatgcgttcattattccacaatgctacttgctcaagttccattattacacagttcctcccccagttacttaatgggcttcgaacacccagctgtgcaagcctataggctaaacaagcaattgcgcgagcgtttacaacaaccaatttccaagtgaacaacaatccttggcacattaacaatacaaaccatcgcaacgcaacagcaacaacaatttctaccagcactgagccacct

SEQ ID NO: 21362 - DNA, 373 bp, Zea mays
  Clone ID: LIB3152-008-P1-K1-H3
accaccaccactggacgtcagcctatcatttagctcatcgactccagattggagaactcgacaccatgaaggtgctgatcgttgcccttgctctcctggcgctcgctgcgagcgccgcctccagtacaagcggcggctgtggctgccagacaccaccgtttcatctaccgcctccgttctatatgccgcctccgttctatctgccgccgcagcagcagccgcagccatggcaataccccactcaaccaccgcagctaagcccgtgccagcagttcggatcctgcggcgtcggcagcgtcggcagcccgttcctgggccagtgcgtcgagttcctgaggcaccagtgcagcccggcggcgacgccctacggctc

SEQ ID NO: 21363 - DNA, 400 bp, Zea mays
  Clone ID: LIB3152-008-P1-K1-H4
ggtcgaccacgcgtccgggtactactccttcggtccgtcctcatttcttcctttccttggcctcgactcctcccgacgtgatcgctccagagaaaatttcgcgggtttagacaaacagcgattgggatcgagatcggggcaacatgagcaaggtgttcgagggctacgagcgccagtactgcgaggcgtccgccttcctcacccgcaaatgcaccgccgccgccgccctacagggagagaagctgaagcagaaggcggcggagatccaatccggcatcgatggcgctgaggcactgataaggaagatggatcttgaagcaagaaacctgcaaccaagcattagagctgatctcctagtaaagatcagggagtacaagtcagatcttaataaccttaaggg

SEQ ID NO: 21364 - DNA, 384 bp, Zea mays
  Clone ID: LIB3152-008-P1-K1-H5
gaaagtggaatacagtagcaacaattgagtaacaatggcggccaagatattttccatccttatgctccttgctctttctgcatgtgttgctaacgcgaccatttttcctcaatactcacaagctcctatagctgcccttcttcccccataccttccatcaatgaccgcttcagtatgtgaaaacccagcccttcaaccctacaggctccaacaagcaatcgcaacaagcaacttacctttatcacccctgttctttcaacaatcgccagccctatctttggtgcagtcattggtacaaaccatcagggcacaacagctgcagcaactcgtgctaccagtgatcagccaagtagctctggcaaacctttctccctactctcagca

SEQ ID NO: 21365 - DNA, 388 bp, Zea mays
  Clone ID: LIB3152-008-P1-K1-H6
gaccacgcgtccggcaagaggtgcgtcttcgatggttgtagttaaggcgcagagggtagcacacctctgtgcaaagcacatggtggcgggaagcggtgcatgtttgaaggaggtggtgtctgtgcaaaaagtgtgcacggggctactgaatattgcgtggcgcatggaggaggaaagcgctgttccgtgcccggctgcaccaagagtgctcgtggccgcactgactgctgtgtgaagcacggtggcggcaagcggtgcacatggggcacaggctgtgaaaagttctcccgtggcaagagtggcttctgtgcggcacatggtaccttgatggccaggcagcgagaacaagaggcggcgaagaatgtaggaagcatgattggaccaggtc

SEQ ID NO: 21366 - DNA, 374 bp, Zea mays
  Clone ID: LIB3152-008-P1-K1-H7
caacaagcaacatagaaagtggaatccagtagcaacaatagagcaacaatggcgaccaagatattttccctccttatgctccttgctctttctgcatgtgttgctaacgcgacaattttccctcaatgctcacaagctcctatagcttcccttcttcccccataccttccatcaatgatagcttcagtatgtgaaaacccagctcttcaaccctataggctccaacaagcaatcgcagcaagcaacatacctttatcacccttgtttcaacaatcgccagccctatctttggtgcagtcattggtacaaaccatcagggcacagcagctgcagcaactcgtgctacctgtgatcaaccaagtagctctggcaaa

SEQ ID NO: 21367 - DNA, 375 bp, Zea mays
  Clone ID: LIB3152-008-P1-K1-H8
gaccaacaagcaacatagaaagtggtaatacagtagcaacaatagagcaacaatggcggccaagatattttccatccttatgctccttgctctttctgcatgtgttgctaacgcgaccatttttcctcaatactcacaagctcctatagctgcccttcttcccccataccttccatcaatgaccgcttcagtatgtgaaaacccagcccttcaaccctacaggctccaacaagcaatcgcaacaagcaacttacctttatcacccctgttctttcaacaatcgccagccctatctttggtgcagtcattggtacaaaccatcagggcacaacagctgcagcaactcgtgctaccagtgatcagccaagtagctct

SEQ ID NO: 21368 - DNA, 379 bp, Zea mays
  Clone ID: LIB3152-008-P1-K1-H9
catccacaacaacatcatccacatttacaacaacatcaaccaccaccacaacatgaccagcagcagcaacaccaacaacaacaagttcacatgcaaccacaaaaacatcagcaacaacaagaagttcatgttcaacaacaacaacaacaaccgcagcaccaacaacaacaacaacaacagcaccaacaacaacatcaatgtgaaggccaacaacaacatcaccaacaatcacaaggccatgtgcaacaacacgaacagagccatgagcaacaccaaggacagagccatgagcaacaacatcaacaacaatttcagggtcatgacaagcagcaacaaccacaacagcctcagcaatatcagcagggccaggaaaaatcac

SEQ ID NO: 21369 - DNA, 340 bp, Zea mays
  Clone ID: LIB3152-009-P1-K1-A10
gagcaacaaaggagaccaagagggggggggtccttatgctccttgctctttctacatgtgttgttaacgcgacaattttccctcaatgctcacaagctcctatagcttccctttttcccccataccttccatcaattatagcttcagtatgtgaaaacccagctcttcaaccatataggcttcaacaagcaatcgcagcaagcaacatacctttatcgcccttgttgtgtcaacaatcgccagccctatctttggtgcagtcattggtacaaaccatcagggcacaacagctgcagcaactcgtgctacctgtgatcaaccaagtagcttctggctaacc

SEQ ID NO: 21370 - DNA, 331 bp, Zea mays
  Clone ID: LIB3152-009-P1-K1-A12
ggaatccagtagcaacaatagatttacaatggcgaccaagatattttccctccttatgctccttgctctttctgcatgtgttgctaacgcgacaattttccctcaatgctcacaagctcctatagcttcccttcttcccccataccttccatcaatgatagcttcagtatgtgaaaacccagctcttcaaccctataggctccaacaagcaatcgcagcaagcaacatacctttatcacccttgtttcaacaatcgccagccctatctttggtgcagtcattggtacaaaccatcagggcacagcagctgcagcaactcgtgctacctgtg

SEQ ID NO: 21371 - DNA, 409 bp, Zea mays
  unsure at all n locations
  Clone ID: LIB3152-009-P1-K1-A2
cggaaccggagggtcgacccaggcgtacgagcaagcatcttacggncattagcattaaccctccaacaaccatatgctctattgcaacagccatccttagtgcatctgtatctccaaagaatcgcggcacaacaactacaacaacagttgctaccaacaatcaatcaagtagttgcagcgaaccttgctgcttacctccagcaacaacagtttcttccattcaatcaactagatggggtgaaccctgctatctacttgcaggcacaacagctactaccatttaaccaacttgtcgggagcccttatgccttcttactgcaacaacagcttctaccattccatctgcaagctgtggcaaacattgctgctttcttgagacaacaacatttgttgccattttacccacagg

SEQ ID NO: 21372 - DNA, 293 bp, Zea mays
  Clone ID: LIB3152-009-P1-K1-A3
aaatactactaccatttagccagctagctacagcaagccgtgcttccttcttgacacaacaacagttgctgccgttctaccagcagtttgcggctaaccccgcaaccctcttacaactacaacaattgttgccctttgtccaacttgctttgacaaacccagcagcctcctaccaacaacacatcattggtggtgccctcttttagattgcttattagatgtaattcaataataaagttttttggatgatgtatgtggccaaccagaaataaaaagttacatttccagattct

SEQ ID NO: 21373 - DNA, 378 bp, Zea mays
  Clone ID: LIB3152-009-P1-K1-A4
cccacgcgtccgattttgagcattcagaaacacaccaagcgaagcgcactagcaacaacctaacaacaatggctaccaagatattatccctccttgcgcttcttgcgctttttgcgagcgcaacaaatgcgtccattattccacaatgctcacttgctcctagttccattattccacagttcctcccaccagttacttcaatggccttcgaacacccagctgtgcaagcctataggctacaacaagcgattgcggcgagcgtcttacaacaaccaattgcccaattgcaacaacaatccttggcacatctaacaatacaaaccatcgcaacgcaacagcaacaacagttcctaccagcactgagccacctagccatgg

SEQ ID NO: 21374 - DNA, 371 bp, Zea mays
  Clone ID: LIB3152-009-P1-K1-A5
cagaaacacaccaagcgaagcacattagctacaacctaacaacaatggctaccaagatattatccctccttgcgcttcttgcgctttttgcgagcgcaacaaatgcgttcattattccacaatgctcacttgctccaagttccattattacacagttcctcccaccagttacttcaatgggcttcgaacacccagctgtgcaagcctataggctacaacaagcaattgcggcgagcgtcttacaacaaccaatttcccagttgcaacaacaatccttggcacatctaacaatacaaaccatcgcaacgcaacagcaacaacaattcctaccagcactgagccacctagccatggtgaaccctgccgcctac

SEQ ID NO: 21375 - DNA, 410 bp, Zea mays
  Clone ID: LIB3152-009-P1-K1-A7
cggacggaatcggagggtcggcccagacctacgcgcacgcatcatacggtaacgaccgttcacctgccgacgccggtccacctgccaccgccggtccatgtgccgccgccggttcatctgccgccgccaccatgccactaccctactcaaccgccccggcctcagcctcatccccagccacacccatgcccgtgccaacagccgcatccaagcccgtgccagctgcagggaacctgcggcgttggcagcaccccgatcctgggccagtgcgtcgagttcctgaggcatcagtgcagcccgacggcgacgccctactgctcgcctcagtgccagtcgttgcggcagcagtgttgccagcagctcaagcaggtggagccgcagcaccggtaccaggcgatcttcggcttggt

SEQ ID NO: 21376 - DNA, 376 bp, Zea mays
  Clone ID: LIB3152-009-P1-K1-A8
gcgaagcgcactagcaacaacctaacaacaatggctaccaagatattagccctccttgcgcttcttgcccttttagtgagcgcaacaaatgcgttcattattccacagtgctcacttgctcctagtgccattattccacagttcctcccaccagttacttcaatgggcttcgaacatccagccgtgcaagcctacaggctacaactagcgcttgcggcgagcgtcttacaacaaccaattgcccaattgcaacaacaatccttggcacatctaaacctacaaaccatcgcaacgcaacagcaacaacagtttctgccatcactgagccacctagccgtggtgaaccctgtcgcctacttgcaacagcagctacttg

SEQ ID NO: 21377 - DNA, 361 bp, Zea mays
  Clone ID: LIB3152-009-P1-K1-A9
gtgcatctcccaccgccggtccacctgccgccgccggtccacctgccaccgccggtccatgtgccgccgccggttcatctgccgccgccaccatgccactaccctactcaaccgccccggcctcagcctcatccccagccacacccatgcccgtgccaacagccgcatccaagcccgtgccagctgcagggaacctgcggcgttggcagcaccccgatcctgggccagtgcgtcgagttcctgaggcatcagtgcagcccgacggcgacgccctactgctcgcctcagtgccagtcgttgcggcagcagtgttgccagcagctcaagcaggtggagccgcaacaccggtaccaggcgatct

SEQ ID NO: 21378 - DNA, 372 bp, Zea mays
  Clone ID: LIB3152-009-P1-K1-B1
ctcatcgactccagattggagaactcgacaccatgaaggtgctgatcgttgcccttgctctcctggcgctcgctgcgagcgccgcctccagtacaagcggcggctgtggctgccagacaccaccgtttcatctaccgcctccgttctatatgccgcctccgttctatctgccgccgcagcagcagccgcagccatggcaataccccactcaaccaccgcagctaagcccgtgccagcagttcggatcctgcggcgtcggcagcgtcggcagcccgttcctgggccagtgcgtcgagttcctgaggcaccagtgcagcccggcggcgacgccctacggctcgccacagtgccaggcgctgcagcagcagtgct

SEQ ID NO: 21379 - DNA, 343 bp, Zea mays
  Clone ID: LIB3152-009-P1-K1-B11
cgcagcaccggtaccaggcgatcttcggcttggtcctccagtccatcctgcagcagcagccgcaaagcggccaggtcgcggggctgttggcggcgcagatagcgcagcaactgacggcgatgtgcggcctgcagcagccgactccatgcccctacgctgctgccggcggtgtcccccactgaagaaactatgtgctgtagtatagccgctggctagctagctagttgagtcatttagcggcgatgattgagtaataatgtgtcacgcatcaccatgggtggcagtgtcagtgtgagcaatgccctgattggacaattgaattgaaaagaaaaagttttgttcc

SEQ ID NO: 21380 - DNA, 109 bp, Zea mays
  Clone ID: LIB3152-009-P1-K1-B12
attttcagcattcagaaacacaccaagcgaagcgaattacaacaaccttacaacaatgggtaccaagatattagcccttcttgcgcttttggccttttagagagcgcaa

SEQ ID NO: 21381 - DNA, 377 bp, Zea mays
  Clone ID: LIB3152-009-P1-K1-B2
aagcacaatagtgtaccaacaatggcagccaaaatattttgcctccttatgctccttggtatttctgcaagtgctgctacggcgaccattttcccgcaatgctcacaagctcctatagcttcccttcttcccccgtacctctcaccagcggtgtcttcggtatgtgaaaacccaattcttcaaccctacaggatccaacaggcaatcgcagctggcatcttacctttatcacccttgttcctccaacaatcatcagccctattacagcagttacctttggtgcatttattggcacaaaacatcagggcacaacaactacaacaacttgtgctagcaaaccttgctgcctactctcagcaacagcagtttcttccatt

SEQ ID NO: 21382 - DNA, 368 bp, Zea mays
  Clone ID: LIB3152-009-P1-K1-B3
tggacgtcagcctagcaattagctcatcgactccagattggagaactcgacaccatgaaggtgctgatcgttgcccttgctctcctggcgctcgctgcgagcgccgcctccagtacaagcggcggctgtggctgccagacaccaccgtttcatctaccgcctccgttctatatgccgcctccgttctatctgccgccgcagcagcagccgcagccatggcaataccccactcaaccaccgcagctaagcccgtgccagcagttcggatcctgcggcgtcggcagcgtcggcagcccgttcctgggccagtgcgtcgagttcctgaggcaccagtgcagcccggcggcgacgccctacggctcgccaca

SEQ ID NO: 21383 - DNA, 158 bp, Zea mays
  unsure at all n locations
  Clone ID: LIB3152-009-P1-K1-B4
gttctagatcgcgagggcggccgcctttttttttttttttttnttattttttttggggggtttttttcttaaacaactggaacagttgctgcccttagtccaacttgttttgacaaacccagtagttttttaccaacaacacatcattgggggcatct

SEQ ID NO: 21384 - DNA, 338 bp, Zea mays
  Clone ID: LIB3152-009-P1-K1-B6
attgagaccaacaggcaacatagaaagtggaatccagtagcaacaatagagcaacaatggagaccaagatattttccctccttatgctccttgctctttctacatgtgttgctaacgcgacaattttccctcaatgctcacaagctcctatagccttcctttttcccccataccttccataaattatagcttcagtattgtgaaaaccagctcttcaaccatataggcttcaacaagcaaatgcagcaagcaccatacctttatcgcccttgttgtgtcaacaatcgccagccctatctttggtgcagtcattggtacaaaccatcagggcacaacag

SEQ ID NO: 21385 - DNA, 373 bp, Zea mays
  Clone ID: LIB3152-009-P1-K1-B7
aatattttgagcattcaaaaacacacaaagggaagtgcactagcaacttcctaacaacaatggctaccaagatattagccctccttgcgctcctttccctttcagtgagcgcaacaactgcattcattattccacaatgctcacttgctcctaatgccattattccacagttcctcccatcagttacatcaatgggcatcgaacaccctattgtgcaagcctataggctacaacaagcgcttgcggcgagcgtcttacaacaaccgtttgcccaattacaacaacaatccttggcacatctaaccatacaaaccatcgcaacacaactagagcaacagtttgtgcccgcattgagccaactagccgcagtgaa

SEQ ID NO: 21386 - DNA, 371 bp, Zea mays
  Clone ID: LIB3152-009-P1-K1-B8
gaaacacaccaagcgaaacgcacttttcacaacctaacaacaatggctaccaaggtgttattcctgcttgcgctgcttgcccttttagtgagcgcatcatatgccttcattatttcacagtgctcacttgcttctagtgccattattccacagttccttccatcagttacttcaatgggcttcgaacatccagtcgtgcaagcctacaggctacaactagcgcttgccgccagcgtattacaacaaccaattgcccaattgcaacaacaatacttggcacatctaaacctacaaaccatcgtaacgcaacagtaacaacagtttctgacatcactgagccacctagtcgtggtgaaccctgtcagctactt

SEQ ID NO: 21387 - DNA, 362 bp, Zea mays
  Clone ID: LIB3152-009-P1-K1-B9
caatccagatcagcaaagcgtgtctagttcgtagagaggatcgtcgaacagaacagcatgaagatggtcatcgttctcgtcgtgtgcctggctctgtcagctgccagcgcctctgcaatgcagatgccctgcccctgcgcggggctgcagggcttgtacggcgctggcgccggcctgacgacgatgatgggcgccggcgggctgtacccctacgcggagtacctgaggcagccgcagtgcagcccgctggcggcggagccctactacgccgggtgtgggcagacgagcgccatgtaccagccgttccggcaacagtgctgccagcagctgatgaggatgatggacgtgcagtcctacgcgca

SEQ ID NO: 21388 - DNA, 371 bp, Zea mays
  Clone ID: LIB3152-009-P1-K1-C1
caacaagcaacatagaaagtggaatccagtagcaacaatagagcaacaatggcgaccaagatattttccctccttatgctccttgctctttctgcatgtgttgctaacgcgacaattttccctcaatgctcacaagctcctatagcttcccttcttcccccataccttccatcaatgatagcttcagtatgtgaaaacccagctcttcaaccctataggctccaacaagcaatcgcagcaagcaacatacctttatcacccttgtttcaacaatcgccagccctatctttggtgcagtcattggtacaaaccatcagggcacagcagctgcagcaactcgtgctacctgtgatcaaccaagtagctctggc

SEQ ID NO: 21389 - DNA, 159 bp, Zea mays
  Clone ID: LIB3152-009-P1-K1-C11
ataaatacatgccactcacatggttctcctccatcttccaagtcaccaacgcggattgcaccaagaaatccatcgagaggccgtcgacaggggaattaatggcgtcgtcgtctagcagcagccaccgccgccttatcctcgcagccgccgccctgtttt

SEQ ID NO: 21390 - DNA, 375 bp, Zea mays
  Clone ID: LIB3152-009-P1-K1-C3
ctccagattggagaactcgacaccatgaaggtgctgatcgttgcccttgctctcctggcgctcgctgcgagcgccgcctccagtacaagcggcggctgtggctgccagacaccaccgtttcatctaccgcctccgttctatatgccgcctccgttctatctgccgccgcagcagcagccgcagccatggcaataccccactcaaccaccgcagctaagcccgtgccagcagttcggatcctgcggcgtcggcagcgtcggcagcccgttcctgggccagtgcgtcgagttcctgaggcaccagtgcagcccggcggcgacgccctacggctcgccacagtgccaggcgctgcagcagcagtgctgccaccagatc

SEQ ID NO: 21391 - DNA, 114 bp, Zea mays
  Clone ID: LIB3152-009-P1-K1-C4
acaccaagcgaagcgcactagcaacaacctaacaacaatggctaccaagatattagccctccttgcgcttcttgcccttttagtgagcgcaacaaatgcgttcattatttccac

SEQ ID NO: 21392 - DNA, 134 bp, Zea mays
  Clone ID: LIB3152-009-P1-K1-C5
gcacaatagtgtaccaacaatggcttccataaaattttgcctccttatgctcctgggtctttctgcaagtgctgctacggcgaccattttcccgaaatgctcgcaagctcctataagcttccccttttcccccc

SEQ ID NO: 21393 - DNA, 372 bp, Zea mays
  Clone ID: LIB3152-009-P1-K1-C7
caaacaagtagcgacagctcgacaaagatttgtgagagtgatccggcgctgagaagagatggctaagatcgccgcagccgccgcggcggcggcggcgctgtgcttcgcggccctggtggccgtggccgtctgccaaggcgaggtcgagcggcagaggctcagggacctgcagtgctggcaggaggtccaggagagcccgctcgacgcgtgccgccaggtcctcgaccggcagctaaccggcggcggcgtcggcggcccgttccggtggggcaccgggctccggatgcggtgctgccagcagctccaggacgtgagccgcgagtgccgctgcgccgccatccggagcatggtcaggggctacgaggaggccat

SEQ ID NO: 21394 - DNA, 126 bp, Zea mays
  Clone ID: LIB3152-009-P1-K1-C8
cagcgttctaccaacaacccatcattggtggtgccctcttttagatttcttatgagttatagttcaataataaagttttttgtctgatgtttgtggcttcccagaaataagaaagtacatttctag

SEQ ID NO: 21395 - DNA, 376 bp, Zea mays
  Clone ID: LIB3152-009-P1-K1-D1
caactagcaacatataaagcacaattttgtaccaacaatggcagccaaaatattttgcttccttatgctccttggtctttctgcaagtgttgctaccgcaaccattttcccacaatgctcacaagctcctatagcttcccttcttcccccatacctctcaccagcggtgtcttcaatgtgtgaaaacccaattgttcaaccctacaggatccaacaggcaatcgcaacaggcatcttaccattatcacccttgttcctccaacaaccgtcagccctattacagcagttacctttggtccatttggtggcacaaaacatcagggcacaacaactacaacaacttgtgctagcaaaccttgctgcatactctcagcaa

SEQ ID NO: 21396 - DNA, 280 bp, Zea mays
  Clone ID: LIB3152-009-P1-K1-D12
gacccacacgtccggcacaaaactgtactcaaccattgcttccaaaacacacagccaccatacgggccggagtatttcaaaaagtgctgctcccccaaccatcaacccgcaatgcacacaagctactatagcttcccttcttcccccatacctctcaccaacggagtcttctgaatgcagaaaacccaattattcaaccctacaagatccaacaagcaatcacatctggcatcttacctttaacacccatgtacctccaacaatcatcaatcctattaca

SEQ ID NO: 21397 - DNA, 373 bp, Zea mays
  Clone ID: LIB3152-009-P1-K1-D2
caacaacttgtgctagcaaaccttgctgcatactctcagcaacatcagtttcttccattcaaccaactggctgcattgaactctgctgcttatttgcaacaacaattaccattcagccagctagttgctgcctacccccagcaatttcttccattcaaccaactagcagcattgaactctgctgcttatttacagcagcaacaactactaccattcagccagctagctgatgtgagccctgctgccttcttgacacaacaacagttgttgccgttctacctgcacgctatgcctaacgctggcaccctcttacaactgcaacaattgctgccattcaaccaacttgctttgacaaactcaacagtgttctacc

SEQ ID NO: 21398 - DNA, 352 bp, Zea mays
  Clone ID: LIB3152-009-P1-K1-D3
caatccagatcagcaaagcggcagttcgtagagaggatcgtcgaacagaacagcatgaagatggtcatcgttctcgtcgtgtgcctggctctgtcagctgccagcgcctttgcaatgcagatgccctgcccctgcgcggggctgcagggcttgtacggcgctggcgcccgccttaccaccattattggcgcccgcgggctgtacccctacgcggagtacctgaggcagccgcagtgcaacccgcttgcgggggggccctacttcccccggtgtgggcagacaagcgccatgtaccaaccgcttcggcaacaatgctttgcccaaccaattagggttattggcctgcaattcc

SEQ ID NO: 21399 - DNA, 170 bp, Zea mays
  Clone ID: LIB3152-009-P1-K1-D4
gcaattagctcatcgactccagattggagaactcgacaccatgaaggtgctgatcgttgcccttgctctcctggcgctcgctgcgagcgccgcctccagtacaagcggcggctgtggctgccagacaccaccgtttcatctaccgcctccgttctatatgccggcttcgg

SEQ ID NO: 21400 - DNA, 352 bp, Zea mays
  Clone ID: LIB3152-009-P1-K1-D5
gcacaatagtgtaccaacaatggcagcctaaatattttgcctccttatgctccttggtctttctgcaagtgctgctacggcgaccattttcccacaatgctcacaagctcctatagcttcccttcttcccccgtacctctcaccagcggtgtcttcggtatgtaaaaacccaattcttcaaccctataggatccaacaggcaatcgcagctggcattttacctttatcacccttgttcctccaacaatcatcagccctattacagcagttacctttggtgcattaattggcacaaaacattagggcccaacaactacaacaacttgggctagcaaaccttgttgcctacttt

SEQ ID NO: 21401 - DNA, 371 bp, Zea mays
  Clone ID: LIB3152-009-P1-K1-D6
attcagaaacacaccaagcgaagctcactatcaacaacctaacaacaatggctgcgcaagatattagccctccttgcgcttcttgcccttttagtgagcgcaacaaatgcgttcattattccacagtgctcacttgctcctagtgccattattccacagttcctcccaccagttacttcaatgggctttgaacattcaagccgggcaggcttccaggttccaactagcgctggcggagagcgtcttacaacaaccaattgcccaattgcaacaacaatccttggcacatctaaacctacaaaccatcgcaacgcaacagcaacaacagtttctgccatcactgagccacctagccgtggtgaaccctgtcg

SEQ ID NO: 21402 - DNA, 371 bp, Zea mays
  Clone ID: LIB3152-009-P1-K1-D7
agaccattagctttatctactccagtagcgcagaagaacccgatcgacaccatgggggtgttgctcgttgccctcgctctcctggctctcgctgcgagcgccacctccacgcatacaagcggcggctgcggctgccagccaccgccgccggttcatctaccgccgccggtgcatctgccacctccggttcacctgccacctccggtgcatctcccaccgccggtccacctgccgccgccggtccacctgccaccgccggtccatgtgccgccgccggttcatctgccgccgccaccatgccactaccctactcaaccgccccggcctcagcctcatccccagccacacccatgcccgtgccaacagccgca

SEQ ID NO: 21403 - DNA, 372 bp, Zea mays
  Clone ID: LIB3152-009-P1-K1-D8
gcaagaagcgcctggccaaacatgtgttggatgtgacaggtgttacgattgatccaactagccttttcgatatacagattaagcgcatacatgagtacaagagacagctcctaaacatattgggagctgtttacagatacaaaaaattaaagggaatgagtgcagaagagaagcagaaggtcacaccgcgcactgtcatgataggagggaaagcgtttgcaacatacactaatgccaaaagaatagtgaaattggtgaatgatgttggtgctgttgtgaacaatgatcccgaagttaacaaatatctgaaggttgtctttatcccaaattacaatgtatcagtggctgaagtgcttattcctggtagcgaat

SEQ ID NO: 21404 - DNA, 312 bp, Zea mays
  Clone ID: LIB3152-009-P1-K1-D9
gcattcacaaacacaccaatttttttttcacaagcaacaacctaacaacaggggcggccaatatattagtccgttcgggctctatatgcctcttttagtgagcgcaacaaatgctttcattattccacagtgctcacttgcttctagtgcctatattacacagttcctttcaccagtttacttgaatgggcttcgaacatcctgccttgcaagtttacaggctacaactagcgcttgcggagagcgttttacaattaccaattgcccaattgcaatcacaatactttggtacatttaaacctacaaaccatc

SEQ ID NO: 21405 - DNA, 356 bp, Zea mays
  Clone ID: LIB3152-009-P1-K1-E10
gaccaactagcaacataaaattactatagtgtaccaacaatggcagccaggagaggtttgtctccttatgctccttggtctttctgcaagtgctgctacggcgaccattttcccgcaatgctcgcaagctcctatagcttcccttcttcccccgtacctctcaccagcggtgtcttcggtatgtgaaaacccaattcttcaaccctacaggatccaacaggcaatcgcagctggcatcttacctttatcacccttgttcctccaacaatcatcagccctattacaacagttacctttggtgcatttattggcacaaaacatcatggcacaacaactacaacaacttgtgctagcaa

SEQ ID NO: 21406 - DNA, 365 bp, Zea mays
  Clone ID: LIB3152-009-P1-K1-E11
attttgagcattcagaaacacaccaagcgaagcgcactagcaacaacctaacaacaatggctaccaagatattatccctccttgcgcttcttgcgctttttgcgagcgcaacaaatgcgtccattattccacaatgctcacttgctcctagttccattattccacagttcctcccaccagttacttcaatggccttcgaacacccagctgtgcaagcctataggctacaacaagcgattgcggcgagcgtcttacaacaaccaattgcccaattgcaacaacaatccttggcacatctaacaatacaaaccatcgcaacgcaacagcaacaacagttcctaccagcactgagccacctagccatg

SEQ ID NO: 21407 - DNA, 369 bp, Zea mays
  Clone ID: LIB3152-009-P1-K1-E12
aacacaccgagcgaagcgctctatctactacctaacaccaagggctaccaagatattagccctccttgcgcttctggcccttttagagagcgcaacaaatgcgcacattattccacagggctcacttgctcctagtgccattattccacagttcctcccaccagttacgttaatgggctttgaacatacagccgtgcaagcctacaggctacaactagcgcttgcggcgagcgtcttactacaaccaattgcccaattgcaacaacaatccttggcacatctaaacctacaaaccatcccaacgcatcagcaacaacagtttgtgccatcactgagccacctagccgtggtgaaccctgtcggctactt

SEQ ID NO: 21408 - DNA, 369 bp, Zea mays
  Clone ID: LIB3152-009-P1-K1-E2
actagttctagatcgcgagcgccgcccttttttttttttttttttttttatcaagataaatctcaatcaatatattgattatttctaggaaacacatgccggtatgagggcaccattgttgagtacatctcatatgtaatctaaaagatggcacctccaacgatgggttgctgcaaggcagggttcatcaaagagaactggttgtatggcagcaattgttgctgctgcaggaagttagcgaccaatgggttagccactgctagtggattaagtaactgttgtcgctgttgtaggtacacagcagagttcgacacagccagttggttgaatggaagcaactgttgcaagtaggcagtagggtttgccaca

SEQ ID NO: 21409 - DNA, 369 bp, Zea mays
  Clone ID: LIB3152-009-P1-K1-E3
gcaacatagaaagtggaatccagtatcaactatagagcaacaatggagaccaagatattgtccctccttatgctccttgctctttctacatgtgttgctaacgcgacaattttccctcaatgctcacaagctcctatagcttcccttttttcccccataccttccatcaattatagcttcagtatgtgaaaacccagctcttcaaccatataggcttcaacaagcaatcgcagcaagcaacatacctttatcgcccttgttgtgtcaacaatcgccagccctatctttggtgcagtcattggtacaaaccatcagggcacaacagctgcagcaactcgtgctacctgtgatcaaccaagtagctctggc

SEQ ID NO: 21410 - DNA, 389 bp, Zea mays
  unsure at all n locations
  Clone ID: LIB3152-009-P1-K1-E4
acccacgcgtnccgagcgaagcacattagccaacaaccctaacaacaatggnctaccaagatattattccctccttgcgcttcttgcgctttttgcgagcgcaacaaatgcgttcattattccacaatgctcacttgctccaagttccattattacacagttcctcccaccagttacttcaatgggcttcgaacacccagctgtgcaagcctataggctacaacaagcaattgcggcgagcgtcttacaacaaccaatttcccagttgcaacaacaatccttggcacatctaacaatacaaaccatcgcaacgcaacagcaacaacaattcctaccagcactgagccacctagccatggtgaaccctgccgcctacttgcaacagcagt

SEQ ID NO: 21411 - DNA, 298 bp, Zea mays
  unsure at all n locations
  Clone ID: LIB3152-009-P1-K1-E5
tccttatgctcacttggtcctttctgcaagtggctgcttaccgcaacccattttcccacaatggctcacaagnctcctatnagcttcctttcttcccccatacctctcaccagcggtgtcttcagtatgtgaaaacccaattcttcaaccctacaggatccaacaggcaatcgcagcaggcatcttacctttatcacccttgttcctacaacaaccgtgagccctattacagcagttacctttggtgcatttgttggcacaaaacatcaaggcacaacaactacaacaacttgtgcta

SEQ ID NO: 21412 - DNA, 353 bp, Zea mays
  Clone ID: LIB3152-009-P1-K1-E6
aacacacggagcgatgcgctctctttactagatcacacactggggaccaagaagttttgccttcctagggcccttggtctttctggatggggcgacaacggcacacattatcctacaagggtcacatgctcctatagctccccttcttccgccatacctttcatcaatgatagcttcagtatgtgaaaacccagctcttgaaccctataggctccaacaagcaagtcgcaggaagcaacatacctttatcacccttgtttcaacaatcgccagccgtatctacggtgctgggatcggttcacaccatcaaggcacagcagctgcagcaactcgtgctacctgtgatcaaccaa

SEQ ID NO: 21413 - DNA, 371 bp, Zea mays
  Clone ID: LIB3152-009-P1-K1-E7
tcggtggcacaaaacatcagggctcaactctacaacaacttgtgctagcaaaccttgctgcatactctcagcaacatcagtttcttccattcaaccaactggctgcattgaactctgctgcttatttgcaacaacaattaccattcagccagctagttgctgcctacccccagcaatttcttccattcaaccaactagcagcattgaactctgctgcttatttacagcagcaacaactactaccattcagccagctagctgatgtgagccctgctgccttcttgacacaacaacagttgttgccgttctacctgcacgctatgcctaacgctggcaccctcttacaactgcaacaattgctgccattcaac

SEQ ID NO: 21414 - DNA, 369 bp, Zea mays
  Clone ID: LIB3152-009-P1-K1-E9
tagcaattagctcatcgacttcagattggagaactcgacaccatgaaggtgctgatcgttgcccttgctctcctggcgctcgctgcgagcgccgcctccagtacaagcggcggctgtggctgccagacaccaccgtttcatctaccgcctccgttctatatgccgcctccgttctatctgccgccgcagcagcagccgcagccatggcaataccccactcaaccaccgcagctaagcccgtgccagcagttcggatcctgcggcgtcggcagcgtcggcagcccgttcctgggccagtgcgtcgagttcctgaggcaccagtgcagcccggcggcgacgccctacggctcgccacagtgccaggcgctg

SEQ ID NO: 21415 - DNA, 371 bp, Zea mays
  Clone ID: LIB3152-009-P1-K1-F1
gcagggcccgagtcaagctgaccgaaaataccatttttaaacgaatcattatggacactaacagcacagatccatttaatggtctctatgtgggagcatttagtccatatggaccagaaattgtgcagcttcgtcggaagttcggccactggaacagtactgatgacgttgagtttttcgagtatgtcgaagcagtaaagttgactggtgatctgagtgttcctgctggccagataacgttccgtgctaagattgggaagggcaagcgacttgagaatcgaggagcatatccagaggaatttggtgtgattgccagttacaaaggtcagggtagaatagctcagcctggattcaaaaatcctcgatgggtg

SEQ ID NO: 21416 - DNA, 239 bp, Zea mays
  Clone ID: LIB3152-009-P1-K1-F10
aacagttgctgcctttctaccagcagtttgcggctaaccccgcaaccctcttacaactacaacaattgttgccctttgtccaacttgctttgacaaacccagcagcctcctaccaacaacacatcattggtggtgccctcttttagattgcttattagttgtaattcaataataaagttttttggatgatgtatgtggccaaccagaaataagaagttacatttccagattctaatgtg

SEQ ID NO: 21417 - DNA, 314 bp, Zea mays
  Clone ID: LIB3152-009-P1-K1-F11
ggcaaaacggggataccgagtggtttttataaatcgctataaaatgatggcaaggtttcatcatcaacgggttccactagtaattttggtgtgtggaactgcctgtactggaaaatcaacaattgctacacaacttgctcagaggctcaatttgcctaatgttttgcagacggacatggtgtatgagctgctgtggacatcaacagatgcgccacttactttagttcctgtgtgggctcgcgattttaattcacctgaagagcttatcactgaattttgcagataatgcacagttgtacgcaagggtttggctg

SEQ ID NO: 21418 - DNA, 368 bp, Zea mays
  Clone ID: LIB3152-009-P1-K1-F12
aaagcggcagtgcgtagagaggatcgtcgaacagaacagcatgaagatggtcatcgttctcgtcgtgtgcctggctctgtcagctgccagcgcctctgcaatgcagatgccctgcccctgcgcggggctgcagggcttgtacggcgctggcgccggcctgacgacgatgatgggcgccggcgggctgtacccctacgcggagtacctgaggcagccgcagtgcagcccgctggcggcggcgccctactacgccgggtgtgggcagacgagcgccatgtaccagccgctccggcaacagtgctgccagcagcagatgaggatgatggacgtgcagtccgtcgcgcagcagctgcagatgatgatgcagc

SEQ ID NO: 21419 - DNA, 371 bp, Zea mays
  Clone ID: LIB3152-009-P1-K1-F3
attttcagcattcataaacacaccattcgaagcgcactagcaacaacctaacagcggtggctaccaagatattagccctccttgcgcttcttgcccttttagtgagcgcaacaaatgcgttcattattccacagtgctcacttgctcctagtgccattattccacagttcctcccaccagttacttcaatgggcttcgaacatccagccgtgcaagcctacaggctacaactagcgcttgcggcgagcgtcttacaacaaccaattgcccaattgcaacaacaatccttggcacatctaaacctacaaaccatcgcaacgcaacagcaacaacagtttctgccatcactgagccacctagccgtggtgaac

SEQ ID NO: 21420 - DNA, 371 bp, Zea mays
  Clone ID: LIB3152-009-P1-K1-F4
cagaccattagctttatctactccagagcgcagaagaacccgatcgacaccatgagggtgttgctcgttgccctcgctctcctggctctcgctgcgagcgccacctccacgcatacaagcggcggctgcggctgccagccaccgccgccggttcatctaccgccgccggtgcatctgccacctccggttcacctgccacctccggtgcatctcccaccgccggtccacctgccgccgccggtccacctgccaccgccggtccatgtgccgccgccggttcatctgccgccgccaccatgccactaccctactcaaccgccccggcctcagcctcatccccagccacacccatgcccgtgccaacagccgca

SEQ ID NO: 21421 - DNA, 372 bp, Zea mays
  Clone ID: LIB3152-009-P1-K1-F5
gttgctgagagtaggcagcaacagcagtttcttccattcaaccaactagctgcattgaactctgcttcttatttgcaacaacaacaactaccattcagccagctacctgttgcctacccccagcaatttcttccattcaaccaactggcagcattgaactctcctgcttatttacagcagcaacaactactaccattcagccagctagctggtgtgagccctgctaccttcttgacacaaccacagttgttgccgttctaccagcacgctgcgcctaacgctggcaccctcttacaactgcaacaattgctgccattcaaccaacttgctttgacaaacctagcagtgttctaccaacaacccatcattggt

SEQ ID NO: 21422 - DNA, 165 bp, Zea mays
  Clone ID: LIB3152-009-P1-K1-F7
cgagctgcctcccttttttttttttgaaggcggggggggggccaaatactttattatgatgcatatattattggtcataccacacatgataatgtgtgtcgttttactgctatattacatatatagatagagagggttggttatgtgtttttttttaaatattat

SEQ ID NO: 21423 - DNA, 362 bp, Zea mays
  Clone ID: LIB3152-009-P1-K1-F8
ccaactagcaacatagaaagtacattattgtaccaacaatggcagccaagagaggttgcctccttatgctccttggtctttctgcaagtgctgctacggcgaccattttcccgcaatgctcgcaagctcctatagcttcccttcttcccccgtacctctcaccagcggtgtcttcggtatgtgaaaacccaattcttcaaccctacaggatccaacaggcaatcgcagctggcatcttacctttatcacccttgttcctccaacaatcatcagccctattacaacagttacctttggtgcatttattggcacaaaacatcagggcacaacaactacaacaacttgtgctagcaaaccttgct

SEQ ID NO: 21424 - DNA, 334 bp, Zea mays
  Clone ID: LIB3152-009-P1-K1-F9
caacatagaaagcacaataggtggccgacattgtcatccaaaatattttgcctacttatgctccttggtctttctgcaagtgttgctaccgcaaccattttcccacaatgctcacaagctcctatagcttcccttcttcccccatacctttcaccagcggtgtcttcaatgtgtgaaaacccaattgttcaaccctacactatccaacaagcaatcctaacatgcatcttaccattatcacccatgtttcttcaacaaccttcagccctattacagcatatacctttggtccatttggtggcacaaaacattatggcacaacaacttcaacaac

SEQ ID NO: 21425 - DNA, 370 bp, Zea mays
  Clone ID: LIB3152-009-P1-K1-G1
cgccagagcaagtgggttggatgcaagtagctgctgttgcaagtaggcgacagtttatgccagcgctcagtcaactagccatggtgaaccctgtcgcctacctacaacagcaacaattgctttcatctagcccgctcgctgtgggcaatgcacctacgtacctacaacaacagttgctgcaacagattgtaccagctctgactcagctagctgtggcaaaccctactgcctacttgcaacagttgcttccattcaaccaactggctgtgtcgaactctgctgtgtacctacaacagcgacaacagttacttaatccactagcagtggctaacccattggtcgctaacttcctgcagcagcaacaattgct

SEQ ID NO: 21426 - DNA, 372 bp, Zea mays
  Clone ID: LIB3152-009-P1-K1-G10
cgcacacacacacaaccagttctttcccaaatccacccgtcggcacctgggcttcaagatgcagatctttgtgaaaaccctgaccggcaagactatcaccctcgaggtggagtcgtctgacaccattgacaacgttaaggccaagatccaggacaaggagggcatccccccagaccagcagcggctcatcttcgctggcaaacagcttgaggacgggcgcacgcttgctgactacaacatccagaaggagagcaccctccaccttgtgctccgcctcaggggaggcatgcagatctttgtgaaaaccctgaccggcaagactatcaccctcgaggtggagtcctctgacaccattgacaacgtcaaggccaa

SEQ ID NO: 21427 - DNA, 132 bp, Zea mays
  Clone ID: LIB3152-009-P1-K1-G11
caacaacccatcattcctttttccttttcaaacaacgcttataaattatggctcgataattaatttctttggatgacctttcaccctccccataaataacaaagtacatctctagattctacaaaaaataac

SEQ ID NO: 21428 - DNA, 374 bp, Zea mays
  Clone ID: LIB3152-009-P1-K1-G2
agcagatcaaacaagtagcgacagctcgacaaagatttgtgagagtgatccggcgctgagaagagatggctaagatcgccgcagccgccgcggcggcggcggcgctgtgcttcgcggccctggtggccgtggccgtctgccaaggcgaggtcgagcggcagaggctcagggacctgcagtgctggcaggaggtccaggagagcccgctcgacgcgtgccgccaggtcctcgaccggcagctaaccggcggcggcgtcggcggcccgttccggtggggcaccgggctccggatgcggtgctgccagcagctccaggacgtgagccgcgagtgccgctgcgccgccatccggagcatggtcaggggctacgaggag

SEQ ID NO: 21429 - DNA, 371 bp, Zea mays
  Clone ID: LIB3152-009-P1-K1-G3
ctcctcgcctcctctccctagtcttcacgacgcaagggagagtgacggaaagcgacgcggcgcgagcgaggagggccaaggcgaagaggggaagcaccgcaccaggacccttgttcgccgccgccgcctctgatctccgcgaggttgtcaggattcaatatgtcgaccagcacattcgctacttcctgcacgctgttgggcaatgttagaacaacgcaggcctcccagacagcggtgaagagcccttcgtctctaagcttcttcagccaagttacgaaggttccaagcctgaagacctccaagaaactggatgacttcgccatggctgcatacaaggtgaagcttgtcgggcctgaaggtgaagagcacga

SEQ ID NO: 21430 - DNA, 349 bp, Zea mays
  Clone ID: LIB3152-009-P1-K1-G4
attcagaaacacaccaagcgaagcgtactagcaacgacctaacaacaatggctgccaagatattagccctccttgcgcttcttgccctttttgtgagcgcaacaaatgcgttcattattccacaatgctcacttgctcctagtgccattattccacagttccttccaccagttacttcaatgggcttcgaacacctagctgtgcaagccaacatgcaacaacaagcgcttgcggcgagcgttttacaacaaccaattgcccaattgcaacaacaatccttgccacatctaacaatacaagccattacaacgcaacagcaacaacaggttctaccagcactgagccacct

SEQ ID NO: 21431 - DNA, 374 bp, Zea mays
  Clone ID: LIB3152-009-P1-K1-G5
aattagctcatcgactccagattggtagaactcgacaccatgaaggtgctgatcggtgcccttgctctcctggcgctcgctgcgagcgccgcctccagtacaagcggcggctgtggctgccagacaccaccgtttcatctaccgcctccgttctatatgccgcctccgttctatctgccgccgcagcagcagccgcagccatggcaataccccactcaaccaccgcagctaagcccgtgccagcagttcggatcctgcggcgtcggcagcgtcggcagcccgttcctgggccagtgcgtcgagttcctgaggcaccagtgcagcccggcggcgacgccctacggctcgccacagtgccaggcgctgcagcagca

SEQ ID NO: 21432 - DNA, 383 bp, Zea mays
  Clone ID: LIB3152-009-P1-K1-G6
accacgcgtccggaattcattccacccccgtctccttcgatttgacggaccaccgggccagcagcgggggggatcgtgtcagcagccatggtgaaggcctaccccacggtgaacgaggactacctcaaggcggtcgacaaggccaagcgtaagctccgcggcctcatcgccgagaagaattgcgccccgctcatgctccgcctcgcatggcactccgcgggcaccttcgatgtggccaccaaaaccgggggccccttcggcaccatgaagaaccccgccgagcaggcgcacggagccaacgccggactggaaattgccatcaggctgctagagcccatcaaggagcagttccccatcctatcctacgctgacttttaccagct

SEQ ID NO: 21433 - DNA, 362 bp, Zea mays
  Clone ID: LIB3152-009-P1-K1-G7
agcgttgatactcctgatgaatttggctccgttgctgctcgatttcttgatacttatcgtgggtcacttagatcatagatccaatggccatggtgtgtactcggttctgattataacaactatgatttaattctgggctacaagatttagattctactgatgatgcgttaagataccctttggccgcgactaaaatataaaagaacccatgtgcttttcttaaattaacccgccgttcacacttgaggtaaagttattaaatctaggttaaaatatttgtaaattaaacccttaactttctgaaattgaaacacgcggtctgatggttattaaaaagatgtatattaaatatttaatgattt

SEQ ID NO: 21434 - DNA, 360 bp, Zea mays
  Clone ID: LIB3152-009-P1-K1-G8
attccttggccggctccgcgctcgtgctctcgttgggatcgttgtcagttcaggtacggtggcgatgaggtcgtccgtggcccgcctgattcgctcctcctctgcctcgccctcccgtctcagtggaaatgcattcttcggcaatgccacacccagtgatcagaggcacattgagaagccttttaaagtgaaggaggcagaacctgtgaatgtgacaaaaccttcaccacacaagctgctggttctaggaggaagtggtttcgttggatcacacgtttgcaaagaggctttggacaaaggtttagttgtctctagtcttaatagatcgggaaagccatccttaaatgaaccttgggctga

SEQ ID NO: 21435 - DNA, 372 bp, Zea mays
  Clone ID: LIB3152-009-P1-K1-G9
caacatagaaagcacaatagtgtaccaacaatggcagccaaaatattttgcctccttatgctccttggtatttctgcaagtgctgctacggcgaccattttcccgcaatgctcacaagctcctatagcttcccttcttcccccgtacctctcaccagcggtgtcttcggtatgtgaaaacccaattcttcaaccctacaggatccaacaggcaatcgcagctggcatcttacccttatcacccttgttcctccaacaatcatcagccctattacagcagttacctttggtgcatttattggcacaaaacatcagggcacaacaactacaacaacttgtgctagcaaaccttgctgcctactctcagcaacag

SEQ ID NO: 21436 - DNA, 319 bp, Zea mays
  Clone ID: LIB3152-009-P1-K1-H1
acggaccgggaaggaatggccggaccgacccacgcgtacgcagaaacaaatctacaacatggttcaatccataatccaggaggagcaacaacaacaaccatgtgagttatgtggatctcaacaagctactcaaagtgcggtggcaatcttgacagcagcacaatacctaccatcaatgtgcggcttgtaccactcatactaccaaaataatccatgcagcagcaatgacattagtggtgtttgcaattgaagaattgtgtctacctagccgttatactcctataacggtgttaagcaataaagtaccatacattatgat

SEQ ID NO: 21437 - DNA, 220 bp, Zea mays
  Clone ID: LIB3152-009-P1-K1-H10
acaatggcagctagggaaggttgccttcttatgctccttgggctttctgcaagtgctgctacggcgaccattttaccacaatgctcacaagctcctaaagcttcccttctttccccgtccctctcaccaacggtgtcttcgggatgtgaaaacccaatatttcaaccctacaggatccaacaggcaatcgcagctggcattttacctttattacccttgt

SEQ ID NO: 21438 - DNA, 367 bp, Zea mays
  Clone ID: LIB3152-009-P1-K1-H11
caactagcaacatagaaagcacaatagtgtaccaacaatggcagctaaaatattttgcctccttatgctccttggtctttctgcaagtgctgctacggcgaccattttcccacaatgctcacaagctcctatagcttcccttcttcccccgtacctctcaccaacggtgtcttcggtatgtgaaaacccaattcttcaaccctacaggatccaacaggcaatcgcagctggcatcttacctttatcacccttgttcctccaacaatcatcagccctattacagcagttacctttggtgcatttattggcacaaaacatcagggcacaacaactacaacaacttgtgctagcaaaccttgctgcctac

SEQ ID NO: 21439 - DNA, 372 bp, Zea mays
  Clone ID: LIB3152-009-P1-K1-H2
tagaaagtggaatccagtagcaacattagagcaacaatggagaccaagatattttccctccttatgctccttgctctttctacatgtgttgctaacgcgacaattttccctcaatgctcacaagctcctatagcttccctttttcccccataccttccatcaattatagcttcagtatgtgaaaacccagctcttcaaccatataggcttcaacaagcaatcgcagcaagcaacatacctttatcgcccttgttgtgtcaacaatcgccagccctatctttggtgcagtcattggtacaaaccatcagggcacaacagctgcagcaactcgtgctacctgtgatcaaccaagtagctctggcaaacctttct

SEQ ID NO: 21440 - DNA, 376 bp, Zea mays
  Clone ID: LIB3152-009-P1-K1-H3
gagggcaggaagaccgaagaccgagccgtgcgggggctcgggacgggaacgggacaggaccccaaaatctcagatccttcctgcccgcccgcccgtgcccgtcgacgcgtcgttcttgccggccgcgccccacctccgccctctcctccttcagggggatcggatacgccacaggctgcgcgatggtgctgtgggtcttcggctacggctccctcatctggaaccccggcttcgacttcgacgacaaaatcctcggcttcatcaagggctacaagcgcacctttaatctcgcttgcattgaccacagaggcacaccggagcatccggcgaggacctgcacgcttgaaaccgacgacgaggccatatgctggggaat

SEQ ID NO: 21441 - DNA, 373 bp, Zea mays
  Clone ID: LIB3152-009-P1-K1-H4
gttaaacgaatggactttggaacttaaggccatggctgataggatcattaacatgaggcaacaactatttaatgcgctgaaatccagaggaacccctggtgattggagccatatcattaagcaaattgggatgtttactttcactgggctgaatagcgaacaagtcgcattcatgaggcaggaataccacatttatatgacatctgatgggaggatcagcatggccggtttgagcatgaggactgtgccccatcttgcagatgccatacacgctgcagttactcaactgaaatgaggatagtatcgcagctttcgtgaataaaacctgaatcacccacaacaatgttctaagtactcagccagtggtatttac

SEQ ID NO: 21442 - DNA, 374 bp, Zea mays
  Clone ID: LIB3152-009-P1-K1-H6
gctagcaaaccttgctgcctactcttagcatcagcagtttcttccattcaaccagctaggttcattgaactctgcttcttatttgcaacaacaacaactaccattcagccagctacctgctgcctacccccagcaatttcttccattcaaccaactagcagcattgaactctcctgcttatttacagcagcaacaactactaccattcagccagctagctggtgtgagccctgctaccttcttgacacaaccacagttgttgccgttctaccagcacgttgcgcctaacgctggcaccctcttacaactgcaacaattgctgccattcaaccaacttgctttgacaaacccagcagtgttctaccaacaaccca

SEQ ID NO: 21443 - DNA, 338 bp, Zea mays
  Clone ID: LIB3152-009-P1-K1-H7
caacaacctaacaacaatggctaccaggatattagccctccttgcgcttcttgcccttttagtgagcgcaacaaatgcgttcattattccacagtgctcacttgctcctagtgccattattccacagttcctcccaccagttacttcaatgggcttcgaacatccagccgtgcaagcctacaggctacaactagcgcttgcggcgagcgtcttacaacaaccaattgcccaattgcaacaacaatccttggcacatctaaacctacaaaccatcgcaacgcaacagcaacaacagtttctgccatcactgagccacctagccgtggtgaaccctgtcg

SEQ ID NO: 21444 - DNA, 365 bp, Zea mays
  Clone ID: LIB3152-009-P1-K1-H8
ctcgtgacaaggaaactagccttccataaaggttatgcttttgctgagtatgaaagagaggagattgcccagtatgccattaagctattttctggccttgttcgacttcataataaaacacttagatttgcgatctctgggcaagacaaaccctcattaaatggcaatattcctgtaactcctagtttgaactctgtaccacagccaaagccttctcatcaacatatgaggtctagtgatatccctttgccacaacatacagcaatgagtggcaggagtgctgggtatggtatctcacaaaatcattcatatgacacttacactcaagcaccgtcaagtgggttaccgagtagaggactaagcaa

SEQ ID NO: 21445 - DNA, 328 bp, Zea mays
  Clone ID: LIB3152-010-P1-K1-A10
cagaaacacaccaagcgaatttttttttcatcaacctaacaacaatggctaccaagatattatccctccttgcgcttcttgcgctttttgcgagcgcaacaaatgcgttcattattccacaatgctcacttgctccaagctccattattacacagttcctcccaccagttacttcaatgggcttcgaacacccagctgtgcaagcctataggctacaacaagcaattgctgcgagcgtcttacaacaaccaattttcgagtttcaacaacaatccttggcacatctaacaatacaaaccatcggaacccaacaactacaacaaattcc

SEQ ID NO: 21446 - DNA, 373 bp, Zea mays
  Clone ID: LIB3152-010-P1-K1-A11
atcgacaccatgagggtgttgctcgttgccctcgctctcctggctctcgctgcgagcgccacctccacgcatacaagcggcggctgcggctgccagccaccgccgccggttcatctaccgccgccggtgcatctgccacctccggttcacctgccacctccggtgcatctcccaccgccggtccacctgccgccgccggtccacctgccaccgccggtccatgtgccgccgccggttcatctgccgccgccaccatgccactaccctactcaaccgccccggcctcagcctcatccccagccacacccatgcccgtgccaacagccgcatccaagcccgtgccagctgcagggaacctgcggcgttggcagca

SEQ ID NO: 21447 - DNA, 303 bp, Zea mays
  Clone ID: LIB3152-010-P1-K1-A12
attcagaaacacaccaagtcgtggtttttttgcaacaacctaacaacaatggctaccaagatattatatcctccttgcgcttcttgcgctttttgcgagcgcaacaaatgcgtccattatttcacaatgctcacttgctcctagttccattattccacagttccttccaccagttacttcaatggcctttgaacacccagctgatcaagcctataggctacaacatgtgattgcggcgagcgtcttacaacaaccaatcgcccaattgcaacaacaatccttggcatatgtaacaatgcaaat

SEQ ID NO: 21448 - DNA, 372 bp, Zea mays
  Clone ID: LIB3152-010-P1-K1-A2
gagaccaactagcaacatagaaagctcaatagtgtaccaacaatggcagccaaaatattttgcttccttatgctccttggtctttctgcaagtgctgctaccgcaaccattttcccacaatgctcacaagctcctatagcttcctttcttcccccatacctctcaccagcggtgtcttcagtatgtgaaaacccaattcttcaaccctacaggatccaacaggcaatcgcagcaggcatcttacctttatcacccttgttcctccaacaaccgtcagccctattacagcagttacctttggttcatttgttggcacaaaacatcaaggcacaacaactacaacaacttgtgctaggaaaccttgcttgctac

SEQ ID NO: 21449 - DNA, 377 bp, Zea mays
  Clone ID: LIB3152-010-P1-K1-A3
gttcaacaacaacaacaacaaccgtatcattaacaacaacaacaacaacagcaccaacaacaacatcaatgtgaaggccaacaacaacatcaccaacaatcacaaggccatgtgcaacaacacgaacagagccatgagcaacaccaaggacagagccatgagcaacaacatcaacaacaatttcagggtcatgacaagcaggaacaaccacaacagcctcagcaatatcagcagggccaggaaaaatcacaacagcaacaatgtcattgccaggagcagcaacagactacaaggtgcagctataactactatagcagtagctcaaatctaaaaaattgtcatgaattcctaaagcagcagtgcagccctttggtaat

SEQ ID NO: 21450 - DNA, 193 bp, Zea mays
  Clone ID: LIB3152-010-P1-K1-A4
cgaggaggccatgccgcctctggagtaaggctggtggccatgggggcggcagcagcagccttcgtcgcagggaggaggaggaggacaggggggctactactacccttgcagccgggcaggagagggataccaaacgcagatgtattcaccgtgttgttccggcaccaccgggccaaggatcggtcgtgtgagg

SEQ ID NO: 21451 - DNA, 376 bp, Zea mays
  Clone ID: LIB3152-010-P1-K1-A5
gctacttcgctcagtccaatgtgcttggataccctgacactggcggtcaggttgtgtacattctggatcaagtccgtgctttggagaatgagatgcttctgaggattaagcagcaaggccttgatatcactccgaagatcctcattgttaccaggctgttgcctgatgctgctgggactacgtgcggtcagcggctggagaaggtcattggtactgagcacacagacatcattcgcgttccgttcagaaatgagaatggcatcctccgcaagtggatctctcgttttgatgtctggccatacctggagacatacactgaggatgtttccagtgaaataatgaaagaaatgcaggccaagcctgaccttatcattgg

SEQ ID NO: 21452 - DNA, 378 bp, Zea mays
  Clone ID: LIB3152-010-P1-K1-A6
aaacacaccaagcgaagcgcactagcaacaacctaacaacaatggctaccaagatattagccctccttgcgcttcttgcccttttagtgagcgcaacaaatgcgttcattattccacagtgctcacttgctcctagtgccattattccacagttcctcccaccagttacttcaatgggcttcgaacatccagccgtgcaagcctacaggctacaactagcgcttgcggcgagcgtcttacaacaaccaattgcccaattgcaacaacaatccttggcacatctaaacctacaaaccatcgcaacgcaacagcaacaacagtttctgccatcactgagccacctagccgtggtgaaccctgtcgcctacttgcaacagc

SEQ ID NO: 21453 - DNA, 320 bp, Zea mays
  Clone ID: LIB3152-010-P1-K1-A7
agaccaacaagcaacatattttgttttatacagtagcaacaatagagcaacaatggcggccaagatattttccatccttatgctccttgctctttctgcatgtgttgctaacgcgaccatttttcctcaatactcacaagctcctatagctgcccttcttcccccataccttccatcaatgaccgcttcagtatgtgaaaacccagcccttcaaccctacaggctccaacaagcaatcgcaacaagcaacttacctttatcacccctgttctttcaacaatcgccagccctatctttggtgcaagcattggtacaaacca

SEQ ID NO: 21454 - DNA, 167 bp, Zea mays
  Clone ID: LIB3152-010-P1-K1-A9
tcgatgcgagcgtataatacgttttgttttttatgaacgagctacaccaatgggacggcttgtttttgtgaaggcggattcgaggatgaggaaagcgcaaagctacttaatgtgactgagagagacttataatcagaaggattacaacatgtgctcataaagccata

SEQ ID NO: 21455 - DNA, 376 bp, Zea mays
  Clone ID: LIB3152-010-P1-K1-B1
gcaacatagaaagcacaatagtgtaccaactatggcagccaaaatattttgcttccttatgctccttggtctttctgcaagtgttgctaccgcaaccattttcccacaatgctcacaagctcctatagcttcccttcttcccccatacctctcaccagcggtgtcttcaatgtgtgaaaacccaattgttcaaccctacaggatccaacaggcaatcgcaacaggcatcttaccattatcacccttgttcctccaacaaccgtcagccctattacagcagttacctttggtccatttggtggcacaaaacatcagggcacaacaactacaacaacttgtgctagcaaaccttgctgcatactctcagcaacatcag

SEQ ID NO: 21456 - DNA, 368 bp, Zea mays
  Clone ID: LIB3152-010-P1-K1-B10
agaaagcacaatagtgtaccttcattggcagccaaaatattttgcctccttatgctccttggtctttctgcaagtgctgctacggcgaccattttcccgcaatgctcgcaagctcctatagcttcccttcttcccccgtacctctcaccagcggtgtcttcggtatgtgaaaacccaattcttcaaccctacaggatccaacaggcaatcgcagctggcatcttacctttatcacccttgttcctccaacaatcatcagccctattacaacagttacctttggtgcatttattggcacaaaacatcagggcacaacaactacaacaacttgtgctagcaaaccttgctgcctactctcagcaacagca

SEQ ID NO: 21457 - DNA, 301 bp, Zea mays
  Clone ID: LIB3152-010-P1-K1-B11
aactagcaacatagaaagctttttgtggttccaacaatggcagccaaagtatgcggcttgcttatgctccatgggctttctgcaagggctgctaccgtaaccattttcccacaatgctcacatgctgctatagctgcctttcttcccccatacctttcaccagtgtagtcttcagtatgtgaaaacccaatgcttctaccctacttgatccaactggtcattgcagcaggcatcttaccttcttcaccctttggcttccaacaaccgtcagacctattacagcagtttcctttggtgcatt

SEQ ID NO: 21458 - DNA, 314 bp, Zea mays
  Clone ID: LIB3152-010-P1-K1-B2
ccatcacggaggccgacctaaacaatattgagccatgggacctcccgagcaaggcgaagatgggcgagaaagagtggtacttcttctaccagaaggaccgcaagtacccgacggggctgagggcgaaccgggccaccgaggccggttactggaaggcgacgggcaaggacaaggaggtctacaacgccgcggaaggggtggcggtactggtcggcatgaagaagacgctcgtcttctacaggggcagggcttccaggggtgacaagacaaactgggtcatgcacgagtacaggctcgaaggcagcggcaggttt

SEQ ID NO: 21459 - DNA, 373 bp, Zea mays
  Clone ID: LIB3152-010-P1-K1-B3
agaaagcacaatagtgtaccaacaatggcagccaaaatattttgcctccttatgctccttggtatttctgcaagtgctgctacggcgaccattttcccgcaatgctcacaagctcctatagcttcccttcttcccccgtacctctcaccagcggtgtcttcggtatgtgaaaacccaattcttcaaccctacaggatccaacaggcaatcgcagctggcatcttacctttatcacccttgttcctccaacaatcatcagccctattacagcagttacctttggtgcatttattggcacaaaacatcagggcacaacaactacaacaacttgtgctagcaaaccttgctgcctactctcagcaacagcagtttc

SEQ ID NO: 21460 - DNA, 379 bp, Zea mays
  Clone ID: LIB3152-010-P1-K1-B4
gcaacatagaaagcacaatagtgttttaacaatggcagctaaaatattttgcctccttatgctccttggtctttctgcaagtgctgctacggcgaccattttcccacaatgctcacaagctcctatagcttcccttcttcccccgtacctctcaccaacggtgtcttcggtatgtgaaaacccaattcttcaaccctacaggatccaacaggcaatcgcagctggcatcttacctttatcacccttgttcctccaacaatcatcagccctattacagcagttacctttggtgcatttattggcacaaaacatcagggcacaacaactacaacaacttgtgctagcaaaccttgctgcctactctcagcaacagcagttt

SEQ ID NO: 21461 - DNA, 379 bp, Zea mays
  Clone ID: LIB3152-010-P1-K1-B5
caacaagcaacatagaaagtggaattcagttgcaacaatagagcaacaatggagaccaagatattttccctccttatgctccttgctctttctacatgtgttgctaacgcgacaattttccctcaatgctcacaagctcctatagcttccctttttcccccataccttccatcaattatagcttcagtatgtgaaaacccagctcttcaaccatataggcttcaacaagcaatcgcagcaagcaacatacctttatcgcccttgttgtgtcaacaatcgccagccctatctttggtgcagtcattggtacaaaccatcagggcacaacagctgcagcaactcgtgctacctgtgatcaaccaagtagctctggcaaacc

SEQ ID NO: 21462 - DNA, 257 bp, Zea mays
  Clone ID: LIB3152-010-P1-K1-B6
ctcgctagctctgcatcatccgtcgttctggtgagcgagcgagcgagtgagagacctagctagactgaccggccgccggcaggccgagaacgaagcgcgtgtttgtgcatgagccatggcggaccagcagcagccacagcagcagccgcaggagatggacgttgatcgtaccggtggcctcgaactgcctccagggttccgcttccacccgagcgactttgagattgtcaacgactaccttacgaaaaaagggcacg

SEQ ID NO: 21463 - DNA, 185 bp, Zea mays
  Clone ID: LIB3152-010-P1-K1-B7
attctgagcatccacaaacttatcttctgttgcttccgagcaccgacttagcagctttgtcttccaagataacaggacctccttgcgtcccttgtcctatttgcgagcgcaataattgcgtcgcattagttcacaaagtttacatgcttctagcgcctttttactacagctctctcgaccagtta

SEQ ID NO: 21464 - DNA, 374 bp, Zea mays
  Clone ID: LIB3152-010-P1-K1-C1
ctttctgcatgtgttgctaacgcgacaattttccctcaatgctcacaagctcctatagcttcccttcttcccccataccttccatcaatgatagcttcagtatgtgaaaacccagctcttcaaccctataggctccaacaagcaatcgcagcaagcaacatacctttatcacccttgtttcaacaatcgccagccctatctttggtgcagtcattggtacaaaccatcagggcacagcagctgcagcaactcgtgctacctgtgatcaaccaagtagctctggcaaacctttctccctactctcagcaacaacaatttcttccattcaaccaactgtctacattgaaccgtgctgcttatttgcagcaacaact

SEQ ID NO: 21465 - DNA, 330 bp, Zea mays
  Clone ID: LIB3152-010-P1-K1-C10
aggacgcgtgggaagcaacttttttctcttattaacaacaacttcttacattaaattaattggccgcactgatccccgctgcttattagcagcagcgaatactactaccatttagccagctagctgcagcaagccgtgcttccttcttgtcacatctacagttgctgtctttataccagcagcttgaggttatccccgcaaccctcttacaactactgcaattgatgtcgttttgtcaacttgttttgacaaacctatgtgactccttccaacaacacaatcatggaggtgcccctctttttgactgcttaattagttgtaatttcaatc

SEQ ID NO: 21466 - DNA, 372 bp, Zea mays
  Clone ID: LIB3152-010-P1-K1-C11
attttcagcattcagaaactttttttgtcgaagcgcactagcaacaacctaacaacaatggctaccaagatattagccctccttgcgcttcttgcccttttagtgagcgcaacaaatgcgttcattattccacagtgctcacttgctcctagtgccatttttccacagttcctcccatcagttacttcaatgggcttagaacatccagccgtgcaagcctacaggctacatctagtgcttgcggcgagcgttttacaacaaccaattgcccaatggcaacaacaattcttgggtcatctaaacctacaattcattgcaacgcattatcaactacagttttttgtcatcactgagccacctaatcgtggtgaa

SEQ ID NO: 21467 - DNA, 374 bp, Zea mays
  Clone ID: LIB3152-010-P1-K1-C2
atcgaccatcatcacagatcatccttagagaccatcttccgtgtaagagacaagagagtgggagagaggggggatatatggcagacatcgcgttgctggtgacggagcagttcgacaagaagctgaagcgaggcgcccccggcgaggacatcggcggcggcgccggcgaatataggaggaacttcggggccgtggccaaggtgtggagctcgtgggtggagtccgccgccgccgcgtccggggtgaggttcagcgtcgcggtgcacctggagcccaagaccgcgctcgccctggccgtcgacgacggcctcttttccgcctagctagctagctagctactagtgtcgcctagctgcttccaggccctttttctg

SEQ ID NO: 21468 - DNA, 150 bp, Zea mays
  Clone ID: LIB3152-010-P1-K1-C3
ctgtagtatagccgctggctagctttctagttgagtcatttagcggcgatgattgagtaataatgtgtcacgcatcaccatgggtggcagtgtcagtgtgagcaatgacctgaatgaacaattgaaatgaaaagaaaaaagtattgttcc

SEQ ID NO: 21469 - DNA, 378 bp, Zea mays
  Clone ID: LIB3152-010-P1-K1-C4
gcaaagcggcagtgcgtaaagaggttcgtttaacagaacagcatgaagatggtcatcgttctcgtcgtgtgcctggctctgtcagctgccagcgcctctgcaatgcagatgccctgcccctgcgcggggctgcagggcttgtacggcgctggcgccggcctgacgacgatgatgggcgccggcgggctgtacccctacgcggagtacctgaggcagccgcagtgcagcccgctggcggcggcgccctactacgccgggtgtgggcagacgagcgccatgtaccagccgctccggcaacagtgctgccagcagcagatgaggatgatggacgtgcagtccgtcgcgcagcagctgcagatgatgatgcagcttgagcgg

SEQ ID NO: 21470 - DNA, 374 bp, Zea mays
  Clone ID: LIB3152-010-P1-K1-C5
caacaggcaacatagaaggtggaattcagtagcaacaatagagcaacaatggagaccaagatattttccctccttatgctccttgctctttctacatgtgttgctaacgcgacaattttccctcaatgctcacaagctcctatagcttccctttttcccccataccttccatcaattatagcttcagtatgtgaaaacccagctcttcaaccatataggcttcaacaagcaatcgcagcaagcaacatacctttatcgcccttgttgtgtcaacaatcgccagccctatctttggtgcagtcattggtacaaaccatcagggcacaacagctgcagcaactcgtgctacctgtgatcaaccaagtagctctggc

SEQ ID NO: 21471 - DNA, 379 bp, Zea mays
  Clone ID: LIB3152-010-P1-K1-C6
cagaaccacaccaagcgaagcacattagtttcaacctaacaacaatggctaccaagatattatccctccttgcgcttcttgcgctttttgcgagcgcaacaaatgcgttcattattccacaatgctcacttgctccaagttccattattacacagttcctcccaccagttacttcaatgggcttcgaacacccagctgtgcaagcctataggctacaacaagcaattgcggcgagcgtcttacaacaaccaatttcccagttgcaacaacaatccttggcacatctaacaatacaaaccatcgcaacgcaacagcaacaacaattcctaccagcactgagccacctagccatggtgaaccctgccgcctacttgcaaca

SEQ ID NO: 21472 - DNA, 367 bp, Zea mays
  Clone ID: LIB3152-010-P1-K1-C7
cctatggatgtcaatgctgttgtgttctaccttgcgatcgtgttggcgggatatgtggttgtctcaattgcagacagttttgctgcacctgcaatatcaatgaggttgaagttatcagaagcgaaggcaatttttactcaggattacatccttcgtgatgacaaagaactaccattgtacagtagagttgtggaggctaaggcccctatggcaattgtgattccttgaagggggtctttgctaataaagggactacgtgttgacgacctttcctggcaagatttcctttgaagggttaatcataccgaggctgtaaattacactggccgtaaccaacctgcctattcattcaccaatattctatttt

SEQ ID NO: 21473 - DNA, 364 bp, Zea mays
  Clone ID: LIB3152-010-P1-K1-D1
agaccattagctttatctactccagagcgcagaagaacccgatcgacaccatgagggtgttgctcgttgccctcgctctcctggctctcgctgcgagcgccacctccacgcatacaagcggcggctgcggctgccagccaccgccgccggttcatctaccgccgccggtgcatctgccacctccggttcacctgccacctccggtgcatctcccaccgccggtccacctgccgccgccggtccacctgccaccgccggtccatgtgccgccgccggttcatctgccgccgccaccatgccactaccctactcaaccgccccggcctcagcctcatccccagccacacccatgcccgtgccaaca

SEQ ID NO: 21474 - DNA, 280 bp, Zea mays
  Clone ID: LIB3152-010-P1-K1-D11
gacccacgcgaccggtcatatagatcgtttgcgtttgctttttcaaaacacgaacctacaatggtatggcatctttggatcgtgtaaccttggtatggtaagagccgcttgacaggaagtcgagcgttcgggcgcaagatgcgttgtctggcatgctgttccttgaccatttgtgctgctagtatgtactgttataagctgccctagaagttgcagcaaacctttttatgaacctttgtatttccattacctgctttggatcaactatatctgtcattct

SEQ ID NO: 21475 - DNA, 373 bp, Zea mays
  Clone ID: LIB3152-010-P1-K1-D12
caaagccactatctattgggtatctttattcagttgctgagttgaagagtggcgcctattctaaagatacaactaacatatctctgcatgccacgtcaacatctgcaacctccaaaatatctgttatccatgataatgctttgccaaatgcattacttggtacagttgaatatgagttgccccatgtgcctccatggtttttttcatgctggtagccagaagctttatggggttcttgctggaataattagacttgttggcctatcaacagtgtcaggatagcatactcatacagtaatattgttgcatgtcgctcttaacaaatttcattcaggaaccgggccatgttgatgttcaaaagagttgccagaag

SEQ ID NO: 21476 - DNA, 372 bp, Zea mays
  Clone ID: LIB3152-010-P1-K1-D2
gggtcttcagaccattagctttatctacttcagagcgcagaagaacccgatcgacaccatgagggtgttgctcgttgccctcgctctcctggctctcgctgcgagcgccacctccacgcatacaagcggcggctgcggctgccagccaccgccgccggttcatctaccgccgccggtgcatctgccacctccggttcacctgccacctccggtgcatctcccaccgccggtccacctgccgccgccggtccacctgccaccgccggtccatgtgccgccgccggttcatctgccggcgccaccatgccactaccctactcaaccgccccggcctcagcctcatccccagccacacccatgcccgtgccaaca

SEQ ID NO: 21477 - DNA, 437 bp, Zea mays
  unsure at all n locations
  Clone ID: LIB3152-010-P1-K1-D3
cggaannncccgggnntcgacccacnngcgtccgnnagccaactagnanntgtggtgaacaccttgtcgtttctatcttgcaacagacaggtgggcttggcatccaactctcactttgctctggcgaannacgtagctgcatacccaaccaacanatcaacaattgcaacctagtttctgcctagcgctcagtcaactatgccattggtgaaccctgccgcctacctacaacagcaacaactgctttcatctagccctctcgttgtgggtaatgcacctacatacctgcaacaacaattgctgcaacagattgtaccagctctgactcagctagctgtggcaaaccctgctgcctacttgcaacagctgcttccattcaaccaactgactgtgtcgaactctgctgcgtacctacaacagcgacaacagttacttaa

SEQ ID NO: 21478 - DNA, 373 bp, Zea mays
  Clone ID: LIB3152-010-P1-K1-D5
caatagtgtaccaacaatggcagccaaaatattttgcctccttatgctccttggtctttctgcaagtgctgctacggcgaccattttcccgaaatgctcgcaagctcctatagcttcccttcttcccccgtacctctcaccagcggtgtcttcggtatgtgaaaacccaattcttcaaccctacaggatccaacaggcaatcacagctggcatcttacctttatcacccttgttcctccaacaatcatcagccctattacatcagttacctttggtgcatttattggcacaaaacatcagggcacaacaactacaacaacttgtgctagcaaaccttgctgcctactctcagcaacagcagtttcttccattc

SEQ ID NO: 21479 - DNA, 376 bp, Zea mays
  Clone ID: LIB3152-010-P1-K1-D6
cccacgcgtccgcaaagcggcagtgcgtatagaggatcgtcgaacagaacagcatgaagatggtcatcgttctcgtcgtgtgcctggctctgtcagctgccagcgcctctgcaatgcagatgccctgcccctgcgcggggctgcagggcttgtacggcgctggcgccggcctgacgacgatgatgggcgccggcgggctgtacccctacgcggagtacctgaggcagccgcagtgcagcccgctggcggcggcgccctactacgccgggtgtgggcagacgagcgccatgtaccagccgctccggcaacagtgctgccagcagcagatgaggatgatggacgtgcagtccgtcgcgcagcagctgcagatgatgat

SEQ ID NO: 21480 - DNA, 369 bp, Zea mays
  Clone ID: LIB3152-010-P1-K1-D8
ctagcaacatagaaagcacattagtttaccaacaatggcagccaaaatattttgcctccttatgctccttggtctttctgcaagtgctgctacggcgaccattttcccgcaatgctcgcaagctcctatagcttcccttcttcccccgtacctctcaccagcggtgtcttcggtatgtgaaaacccaattcttcaaccctacaggatccaacaggcaatcgcagctggcatcttacctttatcacccttgttcctccaacaatcatcagccctattacaacagttacctttggtgcatttattggcacaaaacatcagggcacaacaactacaacaacttgtgctagcaaaccttgctgcctactctca

SEQ ID NO: 21481 - DNA, 374 bp, Zea mays
  Clone ID: LIB3152-010-P1-K1-D9
ggaggaacacccagctgtgcttgcttataggctacaacaagcaattgcggcgagcgtcttacaacaaccaatttcccagttgcaacaacaatccttggcacatctaacaatacaaaccatcgcaacgcaacagcaacaacaattcctaccagcactgagccacctagccatggtgaaccctgccgcctacttgcaacagcagttgcttgcatcaaacccacttgctctggcaaacgtagttgcaaaccagccacaacaacagctgcaacagtttctgccagcgctcagtcaactagccatggtgaaccctgccgcctacctacaacagcaacaactgctttcatctagcccgctcgctgtggccaatgcaccta

SEQ ID NO: 21482 - DNA, 365 bp, Zea mays
  unsure at all n locations
  Clone ID: LIB3152-010-P1-K1-E1
gcaacatagaaagtggaatccagtagcaacaatagagcaacaatggcgaccaagatattttccctccttatgctccttgctctttctgcatgtgttgctaacgcgacaattttctctcaatgctcacaagctcctatagcttcccttcttcccccataccttccatcaatgatagcttcagtatgtgaaaacccagctcttcaaccctataggctccaacaagcaatcgcagcaagcaacatacctttatcacccttgtttcaacaatcgccagccctatctttggtgcagtcattggtacaaaccatcagggcacagcaagccgtgcttncttcttgacacagcaacagttgctgcctttctac

SEQ ID NO: 21483 - DNA, 400 bp, Zea mays
  Clone ID: LIB3152-010-P1-K1-E11
gaaaggaaggaccgggacgacccacgcagacggaagaaatagtcaggagcctttgtgttttttttactgaaactacagatgcggccgttccatttacaagtagtggcaaacattgctgattactcgcaacaacaacaattgctgacattttacccaaatgttgtgggaaacattaacgcctttttgcaacatcaacagaagctgccattctacccacaggatgtggtaaacaatgtcgtctttttacaacaacaacaattgctcgcatttagcctaactagcttttgactaatcctaccaccttataacagcagtccaccattggtggagctcatttatagatttgtttatgcttaatactgttataataatattattattactgatatgtgcaactttt

SEQ ID NO: 21484 - DNA, 376 bp, Zea mays
  Clone ID: LIB3152-010-P1-K1-E12
caacatagaaagtggaatccagtatcaacaatagagcaacaatggcgaccaagatattttccctccttatgctccttgctctttctgcatgtgttgctaacgcgacaattttccctcaatgctcacaagctcctatagcttcccttcttcccccataccttccatcaatgatagcttcagtatgtgaaaacccagctcttcaaccctataggctccaacaagcaatcgcagcaagcaacatacctttatcacccttgtttcaacaatcgccagccctatctttggtgcagtcattggtacaaaccatcagggcacagcagctgcagcaactcgtgctacctgtgatcaaccaagtagctctggcaaacctttctca

SEQ ID NO: 21485 - DNA, 374 bp, Zea mays
  Clone ID: LIB3152-010-P1-K1-E2
tctagaagcgcccctctccctctctctctttctcttcgccgtccgaagctccgcaccccaatctaatcgacacctcgccgagatgggccgcaagttcttcgtcggtggcaactggaaatgcaatggaaccacagatcaggtcgagaagattgtcaaaaccctgaatgaaggacaggttcccccttcagatgttgtggaggtcgttgtcagccctccttatgtcttccttcctgtggtcaagagccagctgcgccaagagttccatgttgcggctcagaactgctgggttaagaagggaggtgctttcaccggtgaagtcagtgctgagatgctcgtcaaccttggtgttccctgcgtcattcttggacactctg

SEQ ID NO: 21486 - DNA, 376 bp, Zea mays
  Clone ID: LIB3152-010-P1-K1-E3
cctggaagctatcttggccatcggtacgagcgtagggagcgtgggaggttccatagaggctatggtggtgggcgtgatgagtattacggcaatggcggcggcgggtatggctaccgcaggtctccgcctcccatgtactcttcctacagggagagtcgggattattatccctcctacaaggacagccgggactaccctccctacagggacggcagggactactctcctccccacagggaccctcgggactactacgaaagcaggggtggccggggctactcgccgcctccttatggtggtggtaggtcaaggagggaccgatcggtttcaccgtatcggatgccagaaaggggctacggtggaggccgccgggtgg

SEQ ID NO: 21487 - DNA, 373 bp, Zea mays
  Clone ID: LIB3152-010-P1-K1-E4
gcgattgcggcgagcgtcttacatcttctttttgcccaattgcaacaacaatccttggcacatctaacaatacaaaccatcgcaacgcaacagcaacaacagttcctaccagcactgagccacctagccatggtgaaccctgtcgcctacttgcaacagcagctgcttgcatccaacccacttgctctagcaaacgtagttgcaaaccagcaacaacaacaactgcaacagtttctgccagcgcttagtcaactagccatggtgaaccctggcggctacctacaacagcaacaactgctttcatttagcccgctcgctggggccaatgcacctacatacctgcaacaagaattgttgcaacagattgtaccag

SEQ ID NO: 21488 - DNA, 373 bp, Zea mays
  Clone ID: LIB3152-010-P1-K1-E5
aatattttgagcattcagaaacacaccaagcgaagcacattagcaacaacctaacaacaatggctaccaagatattatccctccttgcgctgcgctttttgcgagcgcaacaaatgcgttcattattccacaatgctcacttgctccaagttccattattacacagttcctcccaccagttacttcaatgggcttcgaacacccagctgtgcaagcctataggctacaacaagcaattgcggcgagcgtcttacaacaaccaatttcccagttgcaacaacaatccttggcacatctaacaatacaaaccatcgcaacgcaacagcaacaacaattcctaccagcactgagccacctagccatggtgaaccct

SEQ ID NO: 21489 - DNA, 373 bp, Zea mays
  Clone ID: LIB3152-010-P1-K1-E6
agaaagcacaatagtgtaccaacaatggctgtcaaaatattttgcctccttatgctccttggtctttctgcaagtgctgctacggcgaccattttcccgcaatgctcgcaagctcctatagcttcccttcttcccccgtacctctcaccagcggtgtcttcggtatgtgaaaacccaattcttcaaccctacaggatccaacaggcaatcgcagctggcatcttacctttatcacccttgttcctccaacaatcatcagccctattacaacagttacctttggtgcatttattggcacaaaacatcagggcacaacaactacaacaacttgtgctagcaaaccttgctgcctactctcagcaacagcagtttc

SEQ ID NO: 21490 - DNA, 369 bp, Zea mays
  Clone ID: LIB3152-010-P1-K1-E7
agaaagtggaatccagtagcaacaatagagcaacaatggcgaccaagatattttccctccttatgctccttgctctttctgcatgtgttgctaacgcgacaattttccctcaatgctcacaagctcctatagcttcccttcttcccccataccttccatcaatgatagcttcagtatgtgaaaacccagctcttcaaccctataggctccaacaagcaatcgcagcaagcaacatacctttatcacccttgtttcaacaatcgccagccctatctttggtgcagtcattggtacaaaccatcagggcacagcagctgcagcaactcgtgctacctgtgatcaaccaagtagctctggcaaacctttctc

SEQ ID NO: 21491 - DNA, 376 bp, Zea mays
  Clone ID: LIB3152-010-P1-K1-F1
ggagaatcaaactattcaaagcgtgcttggcacatctactcgagactatctcatttcaaacaagggagacaaggtacccatctctgagcttgaggggaagtatgttggtctttgctttgtggtggatggctttccaccactcgctgaattcactgaggtgcttgctaagatctatgagaaactcaaagaagtgggagagaaatttgaagttgtagctgtatccttggacagtgaagagtcatcatttaatgagagttttgcaaagatgccttggcttgcaattcctcaaggtgacattaagtgtcagacgctggttcgttactttgagcttagttctcttccaacactagttctgattggccctgatgggaagaca

SEQ ID NO: 21492 - DNA, 349 bp, Zea mays
  unsure at all n locations
  Clone ID: LIB3152-010-P1-K1-F10
taacatanaaagtggaatcttttggtgattcttagagcaacaatggcgaccaagatatttttcctacttatgctccttgctctatctgcatgtgttgctaacgcgacaattttccctcaatgctcacaagctcctatagctttccttcttcccccataccttccattaatgatagcttcagtatgtgaaaacccagctcttcaaccctataggctccaacaagcaatcgcagcaagcaacatacctttatcacccttgtttcaacaattgccagacctatctttggtgcagccattggttcaaaccatcagggcacagcacctgtagtaactcgtgctacctgtgatca

SEQ ID NO: 21493 - DNA, 377 bp, Zea mays
  Clone ID: LIB3152-010-P1-K1-F12
gcagatcgttctgctgggcacgggtaagaagaagttcgagcgcatgctcatgagcgccgaggagaagttcccaggcaaggtgcgcgccgtggtcaagttcaacgcggcgctggcgcaccacatcatggccggcgccgacgtgctcgccgtcaccagccgcttcgagccctgcggcctcatccagctgcaggggatgcgatacggaacgccctgcgcctgcgcgtccaccggtggactcgtcgacaccatcatcgaaggcaagaccgggttccacatgggccgcctcagcgtcgactgtaacgtcgtggagccggcggacgtcaagaaggtggccaccacattgcagcgcgccatcaaggtggtcggcacgccggcgt

SEQ ID NO: 21494 - DNA, 376 bp, Zea mays
  unsure at all n locations
  Clone ID: LIB3152-010-P1-K1-F2
ntgccacctccggttcacctgcctttttttgtgcatctcccaccgccggtccaggtgccgtcgccggtccacctgccaccgccggtccatgtgccgccgccggttcatctgccgccgccaccatgccactaccctactcaaccgccccggcctcagcctcatccccagccacacccatgcccgtgccaacagccgcattcaagcccgtgccagctgcagggaacctgcggcgttggcagcaccccgatcctgggccagtgcgtcgagtttctgaggcatcagtgcagcccgacggcgacgccctactgctcgcctcagtgccagtcgttgcggcagcagtgttgccagcagctcatgcaggtggagccgcagcacc

SEQ ID NO: 21495 - DNA, 240 bp, Zea mays
  Clone ID: LIB3152-010-P1-K1-F3
tcttgacacagcaacagttgctgcctttctaccagcagtttgcggctaaccccgcaaccctcttacaactacaacaattgttgccctttgtccaacttgctttgacaaacccagcagcctcctaccaacaacacatcattggtggtgccctcttttagattgcttattagttgtaattcaataataaagttttttggatgatgtatgtggccaaccagaaataagaagttacatttccag

SEQ ID NO: 21496 - DNA, 368 bp, Zea mays
  unsure at all n locations
  Clone ID: LIB3152-010-P1-K1-F4
nagcaattagctcatcgactccagattggtgaactcgacaccatgaaggtgctgatcgttgcccttgctctcctggcgctcgctgcgagcgccgcctccagtacaagcggcggctgtggctgccagacaccaccgtttcatctaccgcctccgttctatatgccgcctccgttctatctgccgccgcagcagcagccgcagccatggcaataccccactcaaccaccgcagctaagcccgtgccagcagttcggatcctgcggcgtcggcagcgtcggcagcccgttcctgggccagtgcgtcgagttcctgaggcaccagtgcagcccggcggcgacgccctacggctcgccacagtgccaggcgct

SEQ ID NO: 21497 - DNA, 347 bp, Zea mays
  Clone ID: LIB3152-010-P1-K1-F5
agcgaacgggcggttgcggttgccagccacctttgtctgtttatctaccgccgccggtgcatctgccacctccggttcacctgccacctccggtgcatctaccaccgccggaccacctgccgccgccggtccacctgccaccgccggtccatgtgccgccgtcggttcatctgccgccgccaccatgccactaccctactcaaccgccccggccttagccttatccccagccacacccatgcccgtgccaacagccgcatccaagcccgtgccagctgcagggaacctgcggcgttggcagcacccctatcctgggccagtgcgtttagttcctgaggcatcattgc

SEQ ID NO: 21498 - DNA, 372 bp, Zea mays
  Clone ID: LIB3152-010-P1-K1-F6
cccacgcgtccggaaacacaccatgcgaagtacattagcaacaacctaacaacaatggctaccaagatattatccctccttgcgcttcttgcgctttttgcgagcgcaacaaatgcgttcattattccacaatgctcacttgctccaagttccattattacacagttcctcccaccagttacttcaatgggcttcgaacacccagctgtgcaagcctataggctacaacaagcaattgcggcgagcgtcttacaacaaccaatttcccagttgcaacaacaatccttggcacatctaacaatacaaaccatcgcaacgcaacagcaacaacaattcctaccagcactgagccacctagccatggtgaaccct

SEQ ID NO: 21499 - DNA, 371 bp, Zea mays
  Clone ID: LIB3152-010-P1-K1-F7
accaactagcaacatagaatgcacattagtgtaccaacaatggcagccaaaatattttgcttccttatgctccttggtctttctgcaagtgctgctaccgcaaccattttcccacaatgctcacaagctcctatagcttcctttcttcccccatacctctcaccagcggtgtcttcagtatgtgaaaacccaattcttcaaccctacaggatccaacaggcaatcgcagcaggcatcttacctttatcacccttgttcctccaacaaccgtcagccctattacagcagttacctttggtgcatttgttggcacaaaacatcaaggcacaacaactacaacaacttgtgctaggaaaccttgctgcctactc

SEQ ID NO: 21500 - DNA, 374 bp, Zea mays
  Clone ID: LIB3152-010-P1-K1-F8
cagaaacacaccaagcgaatttcactagcaacaacctaacaacaatggctaccaagatattatccctccttgcgcttcttgcgctttttgcgagcgcaacaaatgcgtccattattccacaatgctcacttgctcctagttccattattccacagttcctcccaccagttacttcaatggccttcgaacacccagctgtgcaagcctataggctacaacaagcgattgcggcgagcgtcttacaacaaccaattgcccaattgcaacaacaatccttggcacatctaacaatacaaaccatcgcaacgcaacagcaacaacagttcctaccagcactgagccacctagccatggtgaaccctgtcgcctacttg

SEQ ID NO: 21501 - DNA, 373 bp, Zea mays
  Clone ID: LIB3152-010-P1-K1-F9
tgggattgacaggttggaaaaattaattattgggggcagaaagcaggagaaagctttgagaaataggtgctttggtggtagagttgctgcaactacacaatgtattcttacctcagatgcttgtcctgaaactcttcattctcaaacacagtcctctaggaaaaattatgctgatgcaaaccgtgtatctgctatcattttgggcggaggcactggatctcagctctttcctctgacaagcacaagagctacgcctgctgtacctgttggaggatgttacaggcttattgatatccctatgagtaactgcttcaacagtggtataaataagatatttgtgatgagtcagttcaattctacttcgcttaaccgc

SEQ ID NO: 21502 - DNA, 377 bp, Zea mays
  Clone ID: LIB3152-010-P1-K1-G1
gcaacatagaaagcacaatagtgtaccaactatggcagccaaaatattttgcttccttatgctccttggtctttctgcaagtgctgctaccgcaaccattttcccacaatgctcacaagctcctatagcttcctttcttcccccatacctctcaccagcggtgtcttcagtatgtgaaaacccaattcttcaaccctacaggatccaacaggcaatcgcagcaggcatcttacctttatcacccttgttcctccaacaaccgtcagccctattacagcagttacctttggtgcatttgttggcacaaaacatcaaggcacaacaactacaacaacttgtgctaggaaaccttgctgcctactctcagcaacagcagt

SEQ ID NO: 21503 - DNA, 242 bp, Zea mays
  unsure at all n locations
  Clone ID: LIB3152-010-P1-K1-G12
tctagatcgcgagcgccgcccttntttttttttttttttttttttttttgggggggttttttttttttttttggggnngggggggggttgcgggggtgtcatccatttacaaacccaaccctggggcaaaaccacaaaaaaaaggggcaaaaggggagggggggaaaaccggccccaaggggggggcaacaaaaaaaaggaccccaccccccccggggggggaaggggggggaaagccccgc

SEQ ID NO: 21504 - DNA, 378 bp, Zea mays
  Clone ID: LIB3152-010-P1-K1-G2
caacaagcaacatagaaagtggaattcagttgcaacaatagagcaacaatggagaccaagatattttccctccttatgctccttgctctttctacatgtgttgctaacgcgacaattttccctcaatgctcacaagctcctatagcttccctttttcccccataccttccatcaattatagcttcagtatgtgaaaacccagctcttcaaccatataggcttcaacaagcaatcgcagcaagcaacatacctttatcgcccttgttgtgtcaacaatcgccagccctatctttggtgcagtcattggtacaaaccatcagggcacaacagctgcagcaactcgtgctacctgtgatcaaccaagtagctctggcaaac

SEQ ID NO: 21505 - DNA, 373 bp, Zea mays
  Clone ID: LIB3152-010-P1-K1-G3
gcatttattggcacaaaacatcagggcacatcaactacaacaacttgtgctagcaaaccttgctgcctactctcagcaacagcagtttcttccattcaaccaactagctgcattgaactctgcttcttatttgcaacaacaactactaccattcagccagctagctggtgtgagccctgctaccttcttgacacaaccacagttgttgccgttctaccagcacgctgcgcctaacgctggcaccctcttacaactgcaacaattgctgccattcaaccaacttgctttgacaaacctagcagtgttctaccaacaacccatcattggtggtgccctcttttagatttcttatgagttatagttcaataataaa

SEQ ID NO: 21506 - DNA, 370 bp, Zea mays
  unsure at all n locations
  Clone ID: LIB3152-010-P1-K1-G5
gggngacccacgcgnncggcattcaaaaacacaccaagcgatgtgtattatctacaacctaacaacaatgggggccgggatattagccctccgtgcgcttcttgcccttaaagtgagcgcaacaaatgcgttcattattccacagggctcacttgctcctagtgccattattccacagttcctcccaccagttacttcaatgggcttcgaacatccagccgtgcaagcctacaggctacaactagcgcttgcggcgagcgtcttacaacaaccaattgcccaattgcaacaacaattcttggcacatttaaacctacaaaaccatcgtaatgcaacatcaacaaccagttttgtcattactgattcacct

SEQ ID NO: 21507 - DNA, 373 bp, Zea mays
  Clone ID: LIB3152-010-P1-K1-G7
ctcccaccgccggtccacctgccgtcgccggtccacctgccaccgccggtccatgtgccgccgccggttcatctgccgccgccaccatgccactaccctactcaaccgccccggcctcagcctcatccccagccacacccatgcccgtgccaacagccgcatccaagcccgtgccagctgcagggaacctgcggcgttggcagcaccccgatcctgggccagtgcgtcgagttcctgaggcatcagtgcagcccgacggcgacgccctactgctcgcctcagtgccagtcgttgcggcagcagtgttgccagcagctcatgcaggtggagccgcagcaccggtaccaggcgatcttcggcttggtcctccagt

SEQ ID NO: 21508 - DNA, 349 bp, Zea mays
  Clone ID: LIB3152-010-P1-K1-G8
gcaagcgatgatcgagcagttcgtttacttcgtcatccggccgcctcgtgcagagtacaatccagatcagtatttatgggagccagagttcactcttgccggaaggaagtataaaaggctagatttggagcttacgaatgaaagaagtcagaccttaaagtgcagccactatgttcctgctgtcatcccagaaaacacttcccttccatgtgtagtctactgccatgggaatagtggatgcagagcagatgcaaatgaagccgctgtcatacttcttccttcaaatatcaccctttttacacttgactttgcgggatcagggctatcaagtggagattatgtcagcctt

SEQ ID NO: 21509 - DNA, 375 bp, Zea mays
  Clone ID: LIB3152-010-P1-K1-G9
caactagcaacatagaaagcacaattgtgtaccaacaatggcagccaaaatattttgcttccttatgctccttggtctttctgcaagtgttgctaccgcaaccattttcccacaatgctcacaagctcctatagcttcccttcttcccccatacctctcaccagcggtgtcttcaatgtgtgaaaacccaattgttcaaccctacaggatccaacaggcaatcgcaacaggcatcttaccattatcacccttgttcctccaacaaccgtcagccctattacagcagttacctttggtccatttggtggcacaaaacatcagggcacaacaactacaacaacttgtgctagcaaaccttgctgcatactctcagca

SEQ ID NO: 21510 - DNA, 358 bp, Zea mays
  Clone ID: LIB3152-010-P1-K1-H11
agcattcttaaacacactttgttttgctcactagcaacaacctaacaggaatggttaccaagatattatccctccttgcgcttcttgcgctttttgcgagcgcaacaaatgcgtccattattccacaatgctcacttgctcctagttccattattccacagttcctcccaccagttacttcaatggcctttgaacacccagctgtgcaagcctatatgctacaacaagcgattgcggcgagcgtcttacaacaaccaattggccaattgcaacaacaatccttggcacatctaacaatacaaaccattgcaacgcaacagcaacaacagtttctaccagcacttagccacctagccat

SEQ ID NO: 21511 - DNA, 379 bp, Zea mays
  Clone ID: LIB3152-010-P1-K1-H3
ctctccccgcgggccgccagaggcaatttcgccctcgattcgaccccgattcgtccgcccgcgaccgggattccctccgccaagcgcggatctgaacgctgcgctccgtgtcgtcgctcgaatccgccatgaagggggccaaatccaagggcgccgccaaggccgatgccaagctggcggtgaagagcaagggggcggagaagcccgccaagggcaggaaggggaaggccggcaaggaccccaacaagcctaagagggctcccagcgctttcttcgtgttcatggaggaatttcgcaaggagttcaaggagaagaaccctaagaacaagtctgtcgctgcggtgggaaaagctgctggcgacaggtggaaatccctgag

SEQ ID NO: 21512 - DNA, 329 bp, Zea mays
  unsure at all n locations
  Clone ID: LIB3152-010-P1-K1-H4
gaacgcgagcgccgccctntntntttaacaccccaaaaccacaaaaaagggaaaaataaaaaaaaaaaaccccttcactaaacaaaaaccaaaaaaaccaacccccaaacaaacacaggggaaaagccggggaagaaaaccccacaaaaatgccccaaagcaaaccagccccaatggcgcggcaccaaacaacaggccccccaccaaccccgggggagtatgtggggacaccccccgcccaatctaattttttactatcttgccccccgcgggggatagagccccgcaaaaaaatgcccgtacccagggggcgggcggacccccccccc

SEQ ID NO: 21513 - DNA, 367 bp, Zea mays
  Clone ID: LIB3152-010-P1-K1-H8
caactagcaacatagaaagctcttttttgtaccaacaatggcagccaaaatattttgccttcttatgctccttggtctttctgcaagtgctgctacggcgaccattttcccacaatgctcacaagctcctatagcttcccttcttcccccgtacctctcaccagcggtgtcttcggtatgtgaaaacccaattcttcaaccctataggatccaacaggcaatcgcagctggcatcttacctttatcacccttgttcctccaacaatcatcagccctattacagcagttacctttggtgcatttattggcacaaaacatcaaggcacaacaactacaacaacttgtgctagcaaaccttgctgcctac

SEQ ID NO: 21514 - DNA, 363 bp, Zea mays
  Clone ID: LIB3152-010-P1-K1-H9
gcaacatagaaagcacaattttgtttcaacaatggcagccaaaatatttggcctccttatgctccttggtatttctgcaagtgctgctacggcgaccattttcccgcaatgctcacaagctcctatagcttcccttcttcccccgtacctctcaccagcggtgtcttcggtatgtgaaaacccaattcttcaaccctacaggatccaacaggcaatcgcagctggcatcttacctttatcacccttgttcctccaacaatcatcagccctattacagcagttacccttggtgcatttattggcacaaaacatcagggcacaacaactacaacaacttgtgctagcaaaccttgcttgctactc

SEQ ID NO: 21515 - DNA, 349 bp, Zea mays
  Clone ID: LIB3152-012-P1-K1-A10
ggaaagatctgatctggggggtgagagagcaggaggagaaagccaagccattgccctcccctcttgaaggcttggagcttggttctacatcctcttctcttcccctccgtctctctctctctctctctctctctatttggtttgcttgcttgcctctactagactctagtcgtcgggtccggccatggccaccatcctggagaacatccagaaggcgaggttcctgccgaccaggccgctcaaggacgagctgcccaccttccagggcggcggcaagagcaaggaggagagccacctcatgggcctgaggaagcggctgtccagctttctccgcaagatccagcccatc

SEQ ID NO: 21516 - DNA, 372 bp, Zea mays
  Clone ID: LIB3152-012-P1-K1-A11
attattgagaccaactagcaacatttaaagcacaatagtgtaccaacaatggcagccaaaatattttgcctccttatgctccttggtctttctgcaagtgctgctacggcgaccattttcccgcaatgctcgcaagctcctatagcttcccttcttcccccgtacctctcaccagcggtgtcttcggtatgtgaaaacccaattcttcaaccctacaggatccaacaggcaatcgcagctggcatcttacctttatcacccttgttcctccaacaatcatcagccctattacaacagttacctttggtgcatttattggcacaaaacatcagggcacaacaactacaacaacttgtgctagcaaaccttgct

SEQ ID NO: 21517 - DNA, 370 bp, Zea mays
  Clone ID: LIB3152-012-P1-K1-A12
cggcagtgcgtagagaggatcgtctaacagaacagcatgaagatggtcatcgttctcgtcgtgtgcctggctctgtcagctgccagcgcctctgcaatgcagatgccctgcccctgcgcggggctgcagggcttgtacggcgctggcgccggcctgacgacgatgatgggcgccggcgggctgtacccctacgcggagtacctgaggcagccgcagtgcagcccgctggcggcggcgccctactacgccgggtgtgggcagacgagcgccatgtaccagccgctccggcaacagtgctgccagcagcagatgaggatgatggacgtgcagtccgtcgcgcagcagctgcagatgatgatgcagcttgagc

SEQ ID NO: 21518 - DNA, 303 bp, Zea mays
  Clone ID: LIB3152-012-P1-K1-A2
caggcatcttacctttatcacccttgttccttcaacaaccgtcagccctattacagcagttacctttggtgcatttgttggcacaaaacatcaaggcacaacaactacaacaacttgtgctaggaaaccttgctgcctactctcagcaacagcagtttcttccattcaaccaactggctgcattgaactctgctgcttatttgcaacaacaactaccattcagtcagctagctgctgcctacccccagcaatttcttccattcaaccaactggcagcattgaactctgctgcttatttacaac

SEQ ID NO: 21519 - DNA, 252 bp, Zea mays
  Clone ID: LIB3152-012-P1-K1-A3
ttcagcattcagaaacacaccaagcgaagcgcactagcaacaacctaacaacaatggctaccaagatattagccctccttgcgcttcttgcccttttagtgagcgcaacaaatgcgttcattattccacagtgctcacttgctcctagtgccattattccacagttcctcccaccagttacttcaatgggcttcgaacatccagccgtgcaagcctacaggctacaactagcgcttgcggcgagcgtcttac

SEQ ID NO: 21520 - DNA, 373 bp, Zea mays
  Clone ID: LIB3152-012-P1-K1-A4
agcaaaccttgctgcctactctcatcaacagcagtttcttccattcaaccaactagctgcattgaactctgcttcttatttgcaacaacaacaactaccattcagccagctacctgttgcctacccccagcaatttcttccattcaaccaactggcagcattgaactctcctgcttatttacagcagcaacaactactaccattcagccagctagctggtgtgagccctgctaccttcttgacacaaccacagttgttgccgttctaccagcacgctgcgcctaacgctggcaccctcttacaactgcaacaattgctgccattcaaccaacttgctttgacaaacctagcagtgttctaccaacaacccatc

SEQ ID NO: 21521 - DNA, 377 bp, Zea mays
  Clone ID: LIB3152-012-P1-K1-A5
attgagaccaactagcaacatagatagcacaatagtgtaccaacaatggcagccaaaatattttgcttccttatgctccttggtctttctgcaagtgttgctaccgcaaccattttcccacaatgctcacaagctcctatagcttcccttcttcccccatacctctcaccagcggtgtcttcaatgtgtgaaaacccaattgttcaaccctacaggatccaacaggcaatcgcaacaggcatcttaccattatcacccttgttcctccaacaaccgtcagccctattacagcagttacctttggtccatttggtggcacaaaacatcagggcacaacaactacaacaacttgtgctagcaaaccttgctgcatactc

SEQ ID NO: 21522 - DNA, 206 bp, Zea mays
  Clone ID: LIB3152-012-P1-K1-A7
tgctcatcccctgctggcccgttctcagtcccagtgagaggctccatgaagatcctggtcgcggtgaagcgggtggtggactacgctgtcaaagtgcgcgtgaggccggacgggaggggcgtggagacggccaacgtgaagatgtccatgaatccattctgcgagatcgccgttgaggaggcgctgcggctccgggaggccggcgt

SEQ ID NO: 21523 - DNA, 339 bp, Zea mays
  Clone ID: LIB3152-012-P1-K1-A9
caacaagcaacatagaaagtggaatccagtagcaacaatagagcaacaatggagaccaagatattttccctccttatgctccttgctctttctacatgtgttgctaacgcgacaattttccctcaatgctcacaagctcctatagcttccctttttcccccataccttccatcaattatagcttcagtatgtgaaaacccagctcttcaaccatataggcttcaacaagcaatcgcagcaagcaacatacctttatcgcccttgttgtgtaacaatcgccagccctatctttggtgcagtcattggtacaaaccatcaaggcacaacaagctgagcaac

SEQ ID NO: 21524 - DNA, 332 bp, Zea mays
  Clone ID: LIB3152-012-P1-K1-B1
cggacgcgtgggtgagcattcagaaacacaccaagcgaagctacctagcaacgacttaacaacaatggctaccaagatattagccctccttgcgcttcttgccctttttgtgagcgcaacaaatgcgttcattattccacaatgctcacttgctcctagtgccattataccacagttcctccgaccagttacttcaatgggcttcgaacacctagctgtgcaagcctacaggctacaacaagcgcttgcggcgagcgtcttacaacaaccaattaaccaattgcaacaacaatccttggcacatctaaccatacaaaccatcgcaacacaac

SEQ ID NO: 21525 - DNA, 379 bp, Zea mays
  Clone ID: LIB3152-012-P1-K1-B10
aactagcaacatagaaagcacaatagtgtaccaacaatggcagccaaaatattttgcctccttatgctccttggtctttctgcaagtgctgctacggcgaccattttcccgaaatgctcgcaagctcctatagcttcccttcttcccccgtacctctcaccagcggtgtcttcggtatgtgaaaacccaattcttcaaccctacaggatccaacaggcaatcacagctggcatcttacctttatcacccttgttcctccaacaatcatcagccctattacatcagttacctttggtgcatttattggcacaaaacatcagggcacaacaactacaacaacttgtgctagcaaaccttgctgcctactcttagcaacagc

SEQ ID NO: 21526 - DNA, 376 bp, Zea mays
  Clone ID: LIB3152-012-P1-K1-B11
ctgggtcttcagaccattagctttatctactccagagcgcagaagaacccgatcgacaccatgagggtgttgctcgttgccctcgctctcctggctctcgctgcgagcgccacctccacgcatacaagcggcggctgcggctgccagccaccgccgccggttcatctaccgccgccggtgcatctgccacctccggttcacctgccaccttcggtgcatctcccaccgccggtccacctgccgccgccggtccacctgccaccgccggtccatgtgccgccgccggttcatctgccgccgccaccatgccactaccctactcaaccgccccggcctcagcctcattctcaagcccacccatgcccgtgccaacagc

SEQ ID NO: 21527 - DNA, 328 bp, Zea mays
  Clone ID: LIB3152-012-P1-K1-B12
catcaatcatcattcatcttagtattataggcaccaaatcaaatctgcaacatcaattatctaactccaaaaaccatgaagctggtgcttgtggttcttgctttcattgctttagtatcaagtgtttcttgtacacagacaggcggctgcagctgtggtcaacaacaaagccatgagcagcaacatcatccacaacaacatcatccacaaaaacaacaacatcaaccaccaccacaacatcaccagcatcagcaacaccaacaacaacaagttcacatgcaaccacaaaaacatcagcaacaacaagaagtcattgttcaacaacaac

SEQ ID NO: 21528 - DNA, 269 bp, Zea mays
  Clone ID: LIB3152-012-P1-K1-B3
gcaacatagaaagtggaatacagttgcaacattagagcaacaatggcggccaagatattttccatccttatgctccttgctctttctgcatgtgttgctaacgcgaccatttttcctcaatactcacaagctcctatagctgcccttcttcccccataccttccatcaatgaccgcttcagtatgtgaaaacccagcccttcaaccctacaggctccaacaagcaatcgcaacaagcaacttacctttatcaccccctgttttttcaac

SEQ ID NO: 21529 - DNA, 135 bp, Zea mays
  Clone ID: LIB3152-012-P1-K1-B4
caccagcaaccctaccacctacacaggtccgatatactcttgctctgcctttaggagcgccaacgcatttacaggtatgtctaggctattacagtctcacgtcttaatgggctgacatcgcggcagcctcagtca

SEQ ID NO: 21530 - DNA, 356 bp, Zea mays
  Clone ID: LIB3152-012-P1-K1-B5
ggacgtcagcctagcaattagctcatcgactccagattggagaactcgacaccatgaaggtgctgatcgttgcccttgctctcctggcgctcgctgcgagcgccgcctccagtacaagcggcggctgtggctgccagacaccaccgtttcatctaccgcctccgttctatatgccgcctccgttctatctgccgccgcagcagcagccgcagccatggcaataccccactcaaccaccgcagctaagcccgtgccagcagttcggatcctgcggcgtcggcagcgtcggcagcccgttcctgggccagtgcgtcgagttcctgaggcaccagtgcagcccggcggcgacgccctac

SEQ ID NO: 21531 - DNA, 378 bp, Zea mays
  Clone ID: LIB3152-012-P1-K1-B6
ctcaagtgctacgagaaccccaagcacaaggtcaccgctgtccccgccgacgaagaagagatctgcggtgccactttcaaggtggtggaagggtctactgtcctgacggcgctgcactgatcgatcatcagctggcggaggcgatgcgacgatgatgcagaactttgtacatgcgtggtgggtgtgtaacatagtgtggctggcaacaagccatgctcatgcaaaccgatgaatctatctctgtatcatgcatcgatctcggttgcttgctagtcccgactccagactccagacatggctatatatagctggtgctaattaaataggagtttaatcgtcaaaaattttattttttttatatattttttattatttttt

SEQ ID NO: 21532 - DNA, 88 bp, Zea mays
  unsure at all n locations
  Clone ID: LIB3152-012-P1-K1-B7
gcgaggggcggggcgggcagggagaagaaggctaagaaaangcggatggaggacgacgggagggggagggacactgggaaggngaggg

SEQ ID NO: 21533 - DNA, 140 bp, Zea mays
  Clone ID: LIB3152-012-P1-K1-B8
cccacgcgtccgcccacgcgtccttttttagattgcttatgagtttgtcaaagcaagttggttgaatggcagtaattgttgcagttgtaagagggtgccagcgttaggcgcagcgtgcaggttgaacggtaacaactgtt

SEQ ID NO: 21534 - DNA, 321 bp, Zea mays
  Clone ID: LIB3152-012-P1-K1-B9
caacaagcaacatagaaagtggaatccagtagcaacaatagagcaacaatggcgaccaagatattttccctccttatgctccttgctctttctgcatgtgttgctaacgcgacaattttccctcaatgctcacaagctcctatagcttcccttcttcccccataccttccatcaatgatagcttcagtatgtgaaaacccagctcttcaaccctataggctccaacatgcaatcgcaacatgcaacatacctttatcaccccttgttcaacaatcgccagccctatctttggtgcagtcattggtacaaaccaataaggca

SEQ ID NO: 21535 - DNA, 278 bp, Zea mays
  Clone ID: LIB3152-012-P1-K1-C1
agaaagtggaatccagtagcaacaatagagcaacaatggcgaccaagatattttccctccttatgctccttgctctttctgcatgtgttgctaacgcgacaattttccctcaatgctcacaagctcctatagcttcccttcttcccccataccttccatcaatgatagcttcagtatgtgaaaacccagctcttcaaccctataggctccaacaagcaatcgcagcaagcaacatacctttatcacccttgtttcaacaatcgccagccctatctttg

SEQ ID NO: 21536 - DNA, 320 bp, Zea mays
  Clone ID: LIB3152-012-P1-K1-C10
agaaacacaccaagcgaatcacattttcaacaacctaacaacaatggctaccaagatattatccctccttgcgcttcttgcgctttttgcgagcgcaacaaatgcgttcattattccacaatgctcacttgctccaagttccattattacacagttcctcccaccagttacttcaatgggcttcgaacacccagctgtgcaagcctataggctacaacaagcaattgcggcgagcgtcttacaacaaccaattttccagttgcaacaacaatccttggcacatttaacaattcaaaccatcgtaacgcatcagcaacaac

SEQ ID NO: 21537 - DNA, 373 bp, Zea mays
  Clone ID: LIB3152-012-P1-K1-C11
gtgaagtacactagcaacatcttatcaccaatgggagccaagatttttgccctccttgccctccttgctctttcagcaagcgctgctacctcgacttttattccacaatgctcacaacaatacctctctccggcgacagccgtgggatttcaatacccaactatacaatcctacatggtacaagaggccatccaagcaagcatcttacggtcattagcattaaccctccaacaaccatatgctctattgcaacagccatccttagtgcatctgtatctccaaagaatcgcggcacaacaactacaacaacagttgctaccaacaatcaatcaagtagttgcagcgaaccttgctgcttacctcaagcacaaca

SEQ ID NO: 21538 - DNA, 355 bp, Zea mays
  Clone ID: LIB3152-012-P1-K1-C12
caagcaacatagaaagtggaatccattagcaacaatagagcaacaatggagaccaagatattttccctccttatgctccttgctctttctacatgtgttgctaacgcgacaattttccctcaatgctcacaagctcctatagcttccctttttcccccataccttccatcaattatagcttcagtatgtgaaaacccagctcttcaaccatataggcttcaacaagcaatcgcagcaagcaacatacctttatcgcccttgttgtgtcaacaatcgccagccctatctttggtgcagtcattggtacaaaccatcagggcacaacagctgcagcaactcgtgctacctgtgatca

SEQ ID NO: 21539 - DNA, 249 bp, Zea mays
  Clone ID: LIB3152-012-P1-K1-C2
atcgactccagattggagaactcgacaccatgaaggtgctgatcgttgcccttgctctcctggcgctcgctgcgagcgccgcctccagtacaagcggcggctgtggctgccagacaccaccgtttcatctaccgcctccgttctatatgccgcctccgttctatctgccgccgcagcagcagccgcagccatggcaataccccactcaaccaccgcagctaagcccgtgccagcagttcggatcctgcg

SEQ ID NO: 21540 - DNA, 334 bp, Zea mays
  Clone ID: LIB3152-012-P1-K1-C4
attttaagcattcagaaacacaccaagcgatgcgcactagcaacaacctaacaacaatggctaccaagatattagccctccttgcgcttcttgcccttttagtgagcgcaacaaatgcgttcattattccacagtgctcacttgctcctagtgccattattccacagttcctcccaccagttacttcaatgggcttcgaacatccagccgtgcaagcctacaggctacaactagcgcttgcggcgagcgtcttacaacaaccaattgcccaattgcaacaacaatccttggcacatttaaacctacaaaccatcgcaacgcaacagcaacaaca

SEQ ID NO: 21541 - DNA, 377 bp, Zea mays
  Clone ID: LIB3152-012-P1-K1-C5
attgagaccaactagcaacatagaaagcacaatagtgtaccaacaatggcagccaaaatattttgcttccttatgctccttggtctttctgcaagtgttgctaccgcaaccattttcccacaatgctcacaagctcctatagcttcccttcttcccccatacctctcaccagcggtgtcttcaatgtgtgaaaacccaattgttcaaccctacaggatccaacaggcaatcgcaacaggcatcttaccattatcacccttgttcctccaacaaccgtcagccctattacagcagttaccttttggccatttggtggcacaaaacatcagggcacaacaactacaacaacttgtgctagcaaaccttgctgcatactt

SEQ ID NO: 21542 - DNA, 347 bp, Zea mays
  Clone ID: LIB3152-012-P1-K1-C6
aaaatattttgcttccttatgctccttggtctttctgcaagtgctgctaccgcaaccattttcccacaatgctcacaagctcctatagcttcctttcttcccccatacctctcaccagcggtgtcttcagtatgtgaaaacccaattcttcaaccctacaggatccaacaggcaatcgcagcaggcatcttacctttatcacccttgtttctccaacaaccgccagccctattacagcagatacctttggtgcatttggtggcacaaaacatcaaggcacaacaactacaacaacttgtgctaggaaaccttgctgcctactctcagtaacagcagtttttttcatc

SEQ ID NO: 21543 - DNA, 289 bp, Zea mays
  unsure at all n locations
  Clone ID: LIB3152-012-P1-K1-C7
nttcgatcagaccctattacagctgttacttttggtgcatttattggcacaaaacatcggggcacaacaactacaacaactcgtgctagcaaaccttgctgtctactctcagcaacagcagttacctttggtgcatttgttggcacaaaacattagggcacaacaactacaacaactcgtgctagcaaaccttgctgcctactcttagcaacaacagtttttgccattcaaccaactagctgcattgaacttttgttgttatttgcagcatcaacatcttctaccattt

SEQ ID NO: 21544 - DNA, 271 bp, Zea mays
  Clone ID: LIB3152-012-P1-K1-C8
acgcaaaaacacaccttgctattcgcattatcaacgacctaacaacattggctacggagatatttgccctccttgcgcttattgccctttttgtgagcgcaacaaatgcgttcattattccacattgctcacttgctcctagtgccattattccacagtatctcccaccagatacttcaatgggctttcgaacacctatctgagcaagctaacatgctactacaagcgttttgctgtgaactttttacaacaaccaattgccaattgtaac

SEQ ID NO: 21545 - DNA, 310 bp, Zea mays
  Clone ID: LIB3152-012-P1-K1-D1
cagaaacacaccaagcgaagctacctagcaacgacttaacaacaatggctaccaagatattagccctccttgcgcttcttgccctttttgtgagcgcaacaaatgcgttcattattccacaatgctcacttgctcctagtgccattataccacagttcctccgaccagttacttcaatgggcttcgaacacctagctgtgcaagcctacaggctacaacaagcgcttgcggcgagcgtcttacaacaaccaattaaccaattgcaacaacaatccttggcacatctaaccatacaaaccattgcaacaca

SEQ ID NO: 21546 - DNA, 285 bp, Zea mays
  unsure at all n locations
  Clone ID: LIB3152-012-P1-K1-D10
caacatacatagtgaatatcactttttacancnnagcaccaatgggagccaagatttttgccctccttgccctccttgctctttcagcaagcgctgctacctttacttttattccacaatgctcacaacaatacctttctccggctactgccgtttgatttcaatacccaactatacaatccttcatggatcaagacgccatccattcactcattttacggttcattagaattaacccttcaacatccatatgctctattgtaactgtcatccttagtgcatttt

SEQ ID NO: 21547 - DNA, 288 bp, Zea mays
  Clone ID: LIB3152-012-P1-K1-D11
cgtgagtaaaatgtgtactatgcttagctcgccgagcaggcggagagggtcgaggagatggttgagttcatggagaaggtattcaagactgttgacttggaggagctcactgtggaggagcgaaaccttcttgttgttgcatacaataactttattggagcccgccgctccttatggcgcatcattttcttcatcgagcataaggaggatggccaaggtcttgatgtcctagtttcactcattaaggattattttggcaagattgatactgagctgatcatagatctg

SEQ ID NO: 21548 - DNA, 286 bp, Zea mays
  Clone ID: LIB3152-012-P1-K1-D2
agaccaactagcaacatagaaagcacaatagtgtaccaacaatggcagccaaaatattttgcctccttatgctccttggtctttctgcaagtgctgctacggcgaccattttcccgaaatgctcgcaagctcctatagcttcccttcttcccccgtacctctcaccagcggtgtcttcggtatgtgaaaacccaattcttcaaccctacaggatccaacaggcaatcacagctggcatcttacctttatcacccttgttcctccaacaatcatcaagcctattaca

SEQ ID NO: 21549 - DNA, 286 bp, Zea mays
  Clone ID: LIB3152-012-P1-K1-D3
cggacgcgtgggcggacgcgtggggccttctgcgcctccatttcggcctctgtcccttgcaagttcagtctcgcctccaaccatgggtaaagagaagtcccacatcaacattgtggttattggccatgtcgactctggcaagtcgaccaccacaggacaccttatctacaagcttggaggcattgacaagcgtgtgatcgagaggtttgagaaggaagctgctgaaatgaacaagcggtccttcaagtacgcctgggtgctcgacaagctcaaggctgagcgtgag

SEQ ID NO: 21550 - DNA, 328 bp, Zea mays
  Clone ID: LIB3152-012-P1-K1-D4
gctcccccggttccccttctctgctcgccatcttttgctctccgcttggctcgtcaatcacctcctacgctccacacgccgccggcgactacaactgcttctgccgtggagaagaagggtttggggagaagacaacctaaatcaattggatctgggagtatcagatctaaaaagtcaggttttcatcaaggtagaaaaagaaacttttctgttcggtcatggctttctcaactgcagcagctgttttgcttaatgagaacatgcatattcatataggaaacattgttgatgcaccaagtgccaaacctctgtaattaattatcctaaa

SEQ ID NO: 21551 - DNA, 209 bp, Zea mays
  Clone ID: LIB3152-012-P1-K1-D5
atgaagatggtcatcgttctcgtcttgtgcctggctctgtcagctgccagcgcctctgcaatgcagatgccctgcccctgcgcggggctgcagggcttgtacggcgctggcgccggcctgacgacgatgatgggcgccggcgggctgtacccctacgcggagtacctgaggcagccgtagtgcagtccgctggtggtggtgccctacta

SEQ ID NO: 21552 - DNA, 377 bp, Zea mays
  Clone ID: LIB3152-012-P1-K1-D7
atttgcaacaacaacatttaccattcagccagctacctgttgcctacgcccagcaatttcttccattcaaccaactggcagcattgaactctcctgcttatttacagcagcaacaactactaccattcagccagctagctggtgtgagccctgctaccttcttgacacaaccacagttgttgccgttctaccagcacgctgcgcctaacgctggcacccttttacaactgcaacaaattgctgccattcaacccaacttgttttgaccaaaccctagcagtgtttctacccaacaacccattcaattgggtgggtggccctttttttaaggattttcttaatggaggttattgggtcaaataattaaaaagtttttt

SEQ ID NO: 21553 - DNA, 164 bp, Zea mays
  Clone ID: LIB3152-012-P1-K1-D8
tcgcgcaaagcggccaggattcggggttgttggcggcgcagatagcgcaggaactgacggcgatgtgcggcctgcagcatccgactccatgcccctacgctgctgccggcggtgtcccccactgaagaaactatgtgctgttgtttagtcgctggctagctagc

SEQ ID NO: 21554 - DNA, 275 bp, Zea mays
  Clone ID: LIB3152-012-P1-K1-D9
ttttgagcattcagaaacacaccatgcgaagctacctagcaacgacttaacaacaatggctaccaagatattagccctccttgcgcttcttgccctttttgtgagcgcaacaaatgcgttcattattccacaatgctcacttgctcctagtgccattataccacagttcctccgaccagttacttcaatgggctttgaacacctagctgtgcaagcctacaggctacaacaagcgcttgcggcgagcgttttacaacaaccaattaaccaattgc

SEQ ID NO: 21555 - DNA, 293 bp, Zea mays
  Clone ID: LIB3152-012-P1-K1-E1
agaaagtggaatccagtagcaacaatagagcaacaatggcgaccaagatattttccctccttatgctccttgctctttctgcatgtgttgctaacgcgacaattttccctcaatgctcacaagctcctatagcttcccttcttcccccataccttccatcaatgatagcttcagtatgtgaaaacccagctcttcaaccctataggctccaacaagcaatcgcagcaagcaacatacctttatcacccttgtttcaacaatcgccagccctatctttggtgcaagcattggta

SEQ ID NO: 21556 - DNA, 279 bp, Zea mays
  Clone ID: LIB3152-012-P1-K1-E10
gccaggtcgcggggctgttggcggtgcagatagcgcagcaactgacggcgatgtgcggcctgcagcagccgactccatgcccctacgctgctgccggcggtgtcccccactgaagaaactatgtgctgtagtatagccgctggctagctagctagttgagtcatttagcggcgatgattgagtaataatgtgtcacgcatcaccatgggtggcagcgtcagtgtgagcaatgacctgaatgaacaattgaaatgtaaagaaaaaagtattgttccaaaa

SEQ ID NO: 21557 - DNA, 341 bp, Zea mays
  Clone ID: LIB3152-012-P1-K1-E2
atcggatacgccacaggctgcgcgatggtgctgtgggtcttcggctacggctccctcatctggaaccccggcttcgacttcgacgacaaaatcctcggcttcatcaagggctacaagcgcacctttaatctcgcttgcattgaccacagaggcacaccggagcatccggcgaggacctgcacgcttgaaaccgacgacgaggccatatgctggggaattgcatattgtgtcaagggtggtccagaaaaagagctaaaagcaatacagtacttggagagaagagagtgtgagtacgaccagaaaatattcatttgtttctacaagggaagggaaccctttga

SEQ ID NO: 21558 - DNA, 279 bp, Zea mays
  Clone ID: LIB3152-012-P1-K1-E3
gcaattagctcatcgactccagattggagaactcgacaccatgaaggtgctgatcgttgcccttgctctcctggcgctcgctgcgagcgccgcctccagtacaagcggcggctgtggctgccagacaccaccgtttcatctaccgcctccgttctatatgccgcctccgttctatctgccgccgcagcagcagccgcagccatggcaataccccactcaaccaccgcagctaagcccgtgccagcagttcggatcctgcggcgtcggcagcgtcggcag

SEQ ID NO: 21559 - DNA, 286 bp, Zea mays
  Clone ID: LIB3152-012-P1-K1-E4
aacaactactaccattcagccagctagctggtgtgagccctgctaccttcttgacacaaccacagttgttgccgttctaccagcacgttgcgcctaacgctggcaccctcttacaactgcaacaattgctgccattcaaccaacttgctttgacaaacccagcagtgttctaccaacaacccatcattggtggtgccctcttttagatttcttatgagttatagttcaataataaagttttttatctgatgtttgtggcttcccagaaataagaaagtacatttct

SEQ ID NO: 21560 - DNA, 301 bp, Zea mays
  Clone ID: LIB3152-012-P1-K1-E6
aattagctcatcgactccagattgtatatctttacaccatgaaggtgctgatcgttgcccttgctctcctggcgctcgctgcgagcgccgccttcagtacaagcggcggttgtggctgccagacaccaccgtttcatctaccgccttcgttctatttgccgccttcgatctatctgccgtcgcatcatcattcgcagccatggcaataccccactcaaccaccgctgcttatcccgtgccagcagttctgatcctgcggtgttcgtagcgttcgtagcccgtttcttgggctagagcgttt

SEQ ID NO: 21561 - DNA, 132 bp, Zea mays
  Clone ID: LIB3152-012-P1-K1-E7
cttcagaccattagctttatctatttcagagcgcagaagaacccgatcgacaccatgagggtgttgctcgttgccctcgctctcctggctctcgctgcgagcgccaccttcacgcatacaagcggtggttgt

SEQ ID NO: 21562 - DNA, 380 bp, Zea mays
  Clone ID: LIB3152-012-P1-K1-E8
atttagccagctagctgcagcaagtcgtgcttccttcttgacacagcaacagtggctgcctttctaccagcagtttgcggctaaccccgcaaccctcttacaactacaacaattgtagccctttgtccaacttgctttgacaaacccagcagcctcctaccaacaacacatcattggtggtgccctcttttagattgcttattagttgtaattcaaatataaaggtttttggatgatgtttgtggccaaccagaaataagaagttacattttcgtttatttttatattgatttttcttttttttttttcattatttttatatctttttatattatatatttttatcttatataatatattttttttttatatttttattt

SEQ ID NO: 21563 - DNA, 296 bp, Zea mays
  Clone ID: LIB3152-012-P1-K1-F1
ccaatccagatcagcaaagcggcagtgcgtagagaggatcgtcgaacagaacagcatgaagatggtcatcgttctcgtcgtgtgcctggctctgtcagctgccagcgcctctgcaatgcagatgccctgcccctgcgcggggctgcagggcttgtacggcgctggcgccggcctgacgacgatgatgggcgccggcgggctgtacccctacgcggagtacctgaggcagccgcagtgcagcccgctggcggcggcgccctactacgccgggtgtgggcagaccagcgccatgtacc

SEQ ID NO: 21564 - DNA, 335 bp, Zea mays
  Clone ID: LIB3152-012-P1-K1-F12
tcgattgataccaactagtattatatttagcacaatagtgtaccaacaggggcaggcaaaatattttgcctccttatgctccttggtctttctgcaagtgctgctacggcgaccattttcccacaatgctcacaagctcctatagcttcccttcttcccccgtacctctcaccagcggtgttttcggtatgtgaaaacccaattcttcaaccctataggatccaacaggcaatcgtagctggcattttactcttatcacccttgttcctccaacaatcattagtccttatttcatgtatttaccctttggtgcaatttattggtaccaaaacata

SEQ ID NO: 21565 - DNA, 62 bp, Zea mays
  Clone ID: LIB3152-012-P1-K1-F2
ctacactggtccagaatatctcttgctcttgcgctttgcagcgccaagctctattcacatgc

SEQ ID NO: 21566 - DNA, 284 bp, Zea mays
  Clone ID: LIB3152-012-P1-K1-F3
acgcgattcggtcaccacctcgcacataagccatatgaccaacatggcgccaaaatttgctcttatgcttggattttgaagtgctgtcgcaccatttccgatgctacagcttatgcttcttttcccgccttaccacggtttcgtggaaaaccattttacctacagaccacagcacgagtgcatttaccttataccctgtctcacatatagctatcagagtccttgggcttatggcaaacatagccacactcacactggctgcaactgtgctcttagaacgagtt

SEQ ID NO: 21567 - DNA, 195 bp, Zea mays
  Clone ID: LIB3152-012-P1-K1-F4
atcatcctcgtcctcatccgcccttgggagctaacaagcaagcaagcaaacgggcgaggagctggatagaggccggcgactcgaagcaaccgccgatcggagccgcggctgaggaggaggagcaagctcgagatggcgggtctcgtcggaggcagcacggtgcgggcggagcacgtcttggccaacgtcggtgga

SEQ ID NO: 21568 - DNA, 379 bp, Zea mays
  Clone ID: LIB3152-012-P1-K1-F5
cggacgcgtgggttcagaaacacatttagcttagcgcactagcaacaacctaacaacaatggctaccaagatattatccctccttgcgcttcttgcgctttttgcgagcgcaacaaatgcgtccattattccacaatgctcacttgctcctagttccattattccacagttcctcccaccagttacttcaatggccttcgaacacccagctgtgcaagcctataggctacaacaagcgattgcggcgagcgtcttacaacaaccaattgcccaattgcaacaacaattcttggcacatttaacaatacaaaccatcgcaacgcaacagcaacaacagtttctaccagcactgagccacctagccatggtgaaccctgtt

SEQ ID NO: 21569 - DNA, 337 bp, Zea mays
  unsure at all n locations
  Clone ID: LIB3152-012-P1-K1-F6
attttgagcattcagaaacacacttttcgattttcatnagcaacaacctaacagcgaatggctaccaagatattatccctccttgcgcttcttgcgctttttgcgagcgcaacaaatgcgttcattattccacaatgctcacttgctccaagtttcattattacacagcttctcccaccagttacttcaatgggctttgaacacccagctgtgcaagcctataggctacatcaagcaattgcggctagcgttttacaacaaccaattttccagttgcatcaactatccttggctacattttatcattcaaaccattttaattcatttataacaacaa

SEQ ID NO: 21570 - DNA, 231 bp, Zea mays
  unsure at all n locations
  Clone ID: LIB3152-012-P1-K1-F7
aaaannggaaaanccggacgacccacgcatccggagcattcataaacacatttagcgtatcgcactagcaacgacctaacgacaagggttaccaatatattagccctccttgctcttcttgccctttttgagagctcatcaaattgcttcattcttacacaatgctcacttgctccttatgccattatttcacattttctcctaccaagatacttttaatggcttttgaac

SEQ ID NO: 21571 - DNA, 302 bp, Zea mays
  Clone ID: LIB3152-012-P1-K1-F8
agcaacatagaaagcacattagttgttccaacaatggcagccaaaatatgttgcctccttatgctccttggtctttctgcaagtgctgctacggcgaccattttcccgcaatgctcgcaagctcctatagcttcccttcttcccccgtacctctcaccagcggtgtcttcggtatgtgaaaaacccaattcttcaaccctacaggatccaacaggcaatcgcagctggcatttaacctttatcacccttgtttcttcaaccatcattagtccctattacaaccatttaacctttgggtgcat

SEQ ID NO: 21572 - DNA, 370 bp, Zea mays
  Clone ID: LIB3152-012-P1-K1-G10
caacaagcaacatagaatgtggaattcagtagcaacaatagagcaacgatggagaccaagatattttccctccttatgctccttgctctttctacatgtgttgctaacgcgacaattttccctcaatgctcacaagctcctatagcttccctttttcccccataccttccatcaattatagcttcagtatgtgaaaacccagctcttcaaccatataggcttcaacaagcaatcgcagcaagcaacatacctttatcgcccttgttgtgtcaacaatcgccagccctatctttggtgcagtcattggtacaaaccatcagggcacaacagctgcagcaactcgtgctacctgtgatcaaccaagtagctc

SEQ ID NO: 21573 - DNA, 255 bp, Zea mays
  Clone ID: LIB3152-012-P1-K1-G11
atttcgggaattcaatagcaactttttattatcaatggagaccaagatatggtcgctccttatgctctttgctctttctacatgtgttgctaacgcgatcaatttccctcaatgcttacatgctcctatagctccccttcatcctccataccttccatcaattatagcctcagtttgtgaaaacccagcatcttaaccatatatgctataacatgcatccgcatcaagcaacatacttttatcgcccttgttgtg

SEQ ID NO: 21574 - DNA, 383 bp, Zea mays
  Clone ID: LIB3152-012-P1-K1-G12
gaccacgcgttcggacaagtcatatctagttatagtatctcccttgagaagcatttgagggaggagccatgtctgaggagaagcaccaccaccacctgtttcaccaccgcaagccagaggaggagggcgcctccggcgaggtcgactacgagaagaaggagaagcaccacaagcacatggagaagctcggcgagctcggcgccatcgccgccggcgcgtacgccctgcacgagaagcacaaggccaagaaggacccagagaacgagcacgggcaccgggtcaaggaggaggtggccgccgtcgccgtcgtgggctccgtcggcttcgctttccacgagcaccacgagaagaaggactcctagaagcacgcccacaactgatcc

SEQ ID NO: 21575 - DNA, 100 bp, Zea mays
  Clone ID: LIB3152-012-P1-K1-G2
gaggctgtcgcaccatttccaaagtccagtctatgcttcttttcccgaccttacacggtttgtggaaacccattaaccctacgccaacgcatacgtggca

SEQ ID NO: 21576 - DNA, 376 bp, Zea mays
  Clone ID: LIB3152-012-P1-K1-G3
ttttgagcattcaaaaacacaccatgcgaattgcactagcaacaacctaacaacaatggctaccaagatattatccctccttgcgcttcttgcgctttttgcgagcgcaacaaatgcgtccattattccacaatgctcacttgctcctagttccattattccacagttcctcccaccagttacttcaatggccttcgaacacccagctgtgcaagcctataggctacaacaagcgattgcggcgagcgtcttacaacaaccaattgcccaattgcaacaacaatccttggcacatctaacaatacaaaccatcgcaacgcaacagcaacaacagttcctaccagcactgagccacctagccatggtgaaccctgtc

SEQ ID NO: 21577 - DNA, 379 bp, Zea mays
  Clone ID: LIB3152-012-P1-K1-G4
gcacaatagtgtaccaacaatggcttccaaaatattttgcttccttatgctccgtggtctttctgcaagtgttgctaccgcaaccattttcccacaatgctcacaagctcctatagcttcccttcttcccccatacctctcaccagcggtgtcttcaatgtgtgaaaacccaattgttcaaccctacaggatccaacaggcaatcgcaacaggcatcttaccattatcacccttgttcctccaacaaccgtcagccctattacagcagttacctttggtccatttggtggcacaaaacatcagggcacaacaactacaacaacttgtgctagcaaaccttgctgcatactcttagcaacatcagtttcttccattcaac

SEQ ID NO: 21578 - DNA, 368 bp, Zea mays
  Clone ID: LIB3152-012-P1-K1-G5
gccaaatcgtgtgttcaccgtggctgacgaacctgccggatcacctaaccgatgcggcggctcccgatgggcctgtaccgactccagagacatgcaacccgtatgccgttcgagcttggccctcgtgcggccacagccggaggtaccccccgcgcgcgcgggcgcggacacagtcactgagtgctacgcgcgggacaccacgactagccgagtctgcttatggtgcgcggcttcggtgcggcgattgcgcgcagacacattacacggaggacgtacgaccgatccggtggagccgaacatggacgggccagagctacaagaacttgaggtagcagacgtcggtgtatactctcaagagcttgaggttc

SEQ ID NO: 21579 - DNA, 376 bp, Zea mays
  Clone ID: LIB3152-012-P1-K1-G6
gcaacatagaaagtggaatccagttgcaacaatagagcaacaatggagaccaagatattttccctccttatgctccttgctctttctacatgtgttgctaacgcgacaattttccctcaatgctcacaagctcctatagcttccctttttcccccataccttccatcaattatagcttcagtatgtgaaaacccagctcttcaaccatataggcttcaacaagcaatcgcagcaagcaacatacctttatcgcccttgttgtgtcaacaatcgccagccctatctttggtgcagtcattggtacaaaccatcagggcacaacagctgcagcaactcgtgctacctgtgatcaaccaagtagctctggcaaaccttt

SEQ ID NO: 21580 - DNA, 349 bp, Zea mays
  Clone ID: LIB3152-012-P1-K1-G7
cggacgcgtgggttttgtgcatttttaaacacaccaagcgaagcgcactagcagcgacctaacaacaatggctaccaagatattagccctccttgcgcttcttgccctttttgtgagcgcaacaaatgcgttcattattccacaatgctcacttgctcctagtgccattattccacagttcctcccaccagttacttcaatgggcttcgaacacctagctgtgcaagccaacatgcaacaacaagcgctttgcggtgagcgtcttacaacaaccaattgctcaattgctacaacaattcttgccacatttaacaatacaagccattacaacgcaacagcaacaacagtt

SEQ ID NO: 21581 - DNA, 321 bp, Zea mays
  Clone ID: LIB3152-012-P1-K1-G8
gctgcctacccccagcaatttctttcattcaaccaactggcagcattgaactcgcctgcttatttacagcagcaacaactactaccattcagccagctagctggtgtgagccctgctaccttcttgatacaaccacagttgttgccgttctaccagcacgctgcgcctaacgctggcaccctcttacaactgcaacaattgctgccattcaaccaacttgctttgacaaacccagcagcgttctaccaacaacccatcattggtggtgccctcttttagatttcttatgagttatagttcaataataaagttttttgtctg

SEQ ID NO: 21582 - DNA, 375 bp, Zea mays
  Clone ID: LIB3152-012-P1-K1-G9
gctgcattgaactctgcttcttatttgcaacaacaacaactaccattcagccagctacctgttgcctacccccagcaatttcttccattcaaccaactggcagcattgaactctcctgcttatttacagcagcaacaactactaccattcagccagctagctggtgtgagccctgctaccttcttgacacaaccacagttgttgccgttctaccagcacgctgcgcctaacgctggcaccctcttacaactgcaacaattgctgccattcaaccaacttgctttgacaaacctagcagtgttctaccaacaacccatcattggtggtgccctcttttagatttcttatgagttatagttcaataataaagttttt

SEQ ID NO: 21583 - DNA, 384 bp, Zea mays; identical to SEQ ID NO: 21198
  Clone ID: LIB3152-012-P1-K1-H1

SEQ ID NO: 21584 - DNA, 373 bp, Zea mays
  Clone ID: LIB3152-012-P1-K1-H10
catcagggcacaacagctgcagcatctcgtgctacctgtgatcaaccaagtagctctggcaaacctttctccctactctccgcaacaacaatttcttccattcaaccaactgtctacactgaaccctgctgcttatttgcagcaacaactattaccatttagccagctagctactgcctactctcaacaacaacaacttcttccatttaaccaattggccgcactgaaccccgctgcttatttgcagcagcaaatactactaccatttagccagctagctacagcaagccgtgcttccttcttgacacaacaacagttgctgccgttctaccagcagtttgcggctaaccccgcaaccctcttacaactacaa

SEQ ID NO: 21585 - DNA, 330 bp, Zea mays
  Clone ID: LIB3152-012-P1-K1-H12
tgcaccaataatggcagccagaatatggtgccttattatgctccttggtctttccgcaagtgctgctacggcgagcattttcccgcaatgctcacaagctcctatagcttcccttcttcccccatacctctcaccagcgatgtcttcagtatgttgaaaattcaattcttctaccctacaggatccaacaggcaatcgcagcaggcatcttacctttatcacccttgttcctccaacaatcatcagtcctattacagcagttacctttggtgcatttattggcacaaaacattagggcacaacaacctacacatcttttgcttgcaaacc

SEQ ID NO: 21586 - DNA, 385 bp, Zea mays
  Clone ID: LIB3152-012-P1-K1-H2
attagctcatcgactccagattggagaactcgacaccatgaaggtgctgatcgttgcccttgctctcctggcgctcgctgcgagcgccgcctccagtacaagcggcggctgtggctgccagacaccaccgtttcatctaccgcctccgttctatatgccgcctccgttctatctgccgccgcagcagcagccgcagccatggcaataccccactcaaccaccgcagctaagcccgtgccagcagttcggatcctgcggcgtcggcagcgtcggcagcccgttcctgggccagtgcgtcgagttcctgaggcaccagtgcagcccggcggcgacgccctacggctcgccacagtgccaggcgctgcagcagcagtgctgccaccag

SEQ ID NO: 21587 - DNA, 248 bp, Zea mays
  Clone ID: LIB3152-012-P1-K1-H3
gcggcagtgcgtaaagaggatcgttgaacataacagcatgaagatggtcatcgttctcgtcgtgtgcctggctctgtcagctgccagcgcctctgcaatgcagatgccctgcccctgcgcggggctgcagggcttgtacggcgctggcgccggcctgacgacgatgatgggcgccggcgggctgtacccctacgcggagtacctgaggcagtcccagtgccatccgctggcggcggtgccctactacg

SEQ ID NO: 21588 - DNA, 379 bp, Zea mays
  Clone ID: LIB3152-012-P1-K1-H4
gaaacacaccaagcgaagcgcactatcaacatcctaacaacaatggctaccaagatattagccctccttgcgcttcttgcccttttagtgagcgcaacaaatgcgttcattattccacagtgctcacttgctcctagtgccattattccacagttcctcccaccagttacttcaatgggcttcgaacatccagccgtgcaagcctacaggctacaactagcgcttgcggcgagcgtcttacaacaaccaattgcccaattgcaacaacaatccttggcacatctaaacctacaaaccatcgcaacgcaacagcaacaacagtttctgccatcactgagccacctagccgtggtgaaccctgtcgcctacttgcaacagc

SEQ ID NO: 21589 - DNA, 173 bp, Zea mays
  Clone ID: LIB3152-012-P1-K1-H5
gcggcagtgcgtagagaggatcgtttaacataacagcatgaagatggtcatcggtctcgtcgtgtgcctggctctgtcagctgccagcgcctctgcaatgcagatgccctgcccctgcgcggggctgcagggcttgtacggcgctggcgccggcctgacgactatgatgggcg

SEQ ID NO: 21590 - DNA, 317 bp, Zea mays
  Clone ID: LIB3152-012-P1-K1-H6
gcaattagctcatcgactccagattggagaactcgacaccatgaaggtgctgagcgttgcccttgctctcctggcgctcgctgcgagcgccgcctccagtacaagcggcggctgtggctgccagacaccaccgtttcatctaccgcctccgttctatatgccgcctccgttctatctgccgccgcagcagcagccgcagccatggcaataccccactcaaccaccgcagctaagcccgtgccagcagttcggatcctgcggcgtcagcagcgtcggcagcccgtttctgggccagtgctgcgagttcctgaggcacc

SEQ ID NO: 21591 - DNA, 238 bp, Zea mays
  Clone ID: LIB3152-012-P1-K1-H7
ggcggcggcgccgggaagtctaagttgacgccgaacctggcggtggacggcgagggcacgcgcacgctcaaccgcactgtgctgcagcgcctctacccggtcgttgaggatattctcatcaccgtggctcacgttacgctgtacgactttgacaccgatgtcaaccagtggagactgatggacgtggatgggttgctcttcttcgttaagatgaattgtttaactcatatttcatttt

SEQ ID NO: 21592 - DNA, 376 bp, Zea mays
  Clone ID: LIB3152-012-P1-K1-H8
ctctgactcagctagctgtggcaaaccctactgcctacttgcaacagttgcttccattcaaccaactggctgtgtcgaactctgctgtgtacctacaacagcgacaacagttacttaatccactagcagtggctaacccattggtcgctaacttcctgcagcagcaacaattgctgccatacaaccagttctctttgatgaaccctgccttgcagcaacccatcgttggaggtgccatcttttagattacatatgagatgtactcaacaatggtgccctcataccggcatgtgtttcctagaaataatcaatatattgattgagatttatcttggaaaatataataactttttatcttttttattttttttatttt

SEQ ID NO: 21593 - DNA, 270 bp, Zea mays
  Clone ID: LIB3152-012-P1-K1-H9
ccgttctaccagcagtttgtggcttaccccgcaacccttttacaactgcaacagttgctgtcctttgtccaacttgctttgacaaacccagcagccttctaccaacaacacatcattggcggtgccctcttttagattgcttattagttgtcattcaataatgaagttttttggctgatgtatgtggcctcctagaaataagaagttatatttccaattataatattatatatataataaataataattatcttttttttatatatttaa

SEQ ID NO: 21594 - DNA, 363 bp, Zea mays
  Clone ID: LIB3152-014-P1-K1-A1
ggtgcatgagggggggcaaaacatctaggcacaccaactacaacaactagaggaagcaaacttagctgaatactgtcaacaccattagattcatccattcaaccaactgggtgcagtgaactgtgatggttattggcaacaacagtgaccattcagccagatgggcgctggctacccccagcaataacttccatgaaaccaactatgcaggatagaactatgctgctcattcacagctgctacaactactaccattgatccaggtagctgatgtgagccctgctgtcttctcgacacaacaacaggcggtggcgggctacctgcacgctatgcctaacgctggaactctcttacaacagcaac

SEQ ID NO: 21595 - DNA, 340 bp, Zea mays
  Clone ID: LIB3152-014-P1-K1-A11
cagcattcaaaaacacaccatgcgtagtgcactagcaacaacctaacaacagggggtaccaatatattagccctccttgcgcttcttgcccttttagtgagcgcaacaaatgcgttcattatttcacagtgctcacttgctcctagtgccattatttctctgtttcttccaccagttactttaatgggcttcgaacattcaaacgtgcaagcctacatgttacaacttgtgcttgcggcgagcgttttacaacaaccatattgtctaattgcaacaacatttcttggcacatttatatccttccaaaccttttttactccttcatacaacatctgttttt

SEQ ID NO: 21596 - DNA, 307 bp, Zea mays
  Clone ID: LIB3152-014-P1-K1-A12
ctcctgcttatttacagcagcaacaactactaccattcagccagctagctggtgtgagccctgctaccttcttgatacaaccacagttgttgccgttctaccagcacgctgcgcctaacgctggcaccctcttacaactgcaacaattgctgccattcaaccaacttgctttgacaaacccagcagcgttctaccaacaacccatcattggtggtgccctcttttagatttcttatgagttatagttcaataataaagttttttgtctgatgtttgtggcttcccagaaataagaaagtacatttct

SEQ ID NO: 21597 - DNA, 275 bp, Zea mays
  Clone ID: LIB3152-014-P1-K1-A2
ggcgcccgcctgctacgacgcgctgttcgcacgcctcgtcgagcgcgccgagttcagggcctgcttcacgagcggtttctcaatctctgccgcacggcttggattaccagatgttggtctcatctcgtacggggaaatgatcgatcaggggcgtctgatgactgaagcagtttcaatccctgtgatcggtgatgcggataatggttacggaaactgtatgaatgttaagaggacagtgaaaggatttattaatgctggctttgctggaattattc

SEQ ID NO: 21598 - DNA, 383 bp, Zea mays
  Clone ID: LIB3152-014-P1-K1-A3
cagaaacacaccaagcgaagcacattagctacaacctaacaacaatggctaccaagatattatccctccttgcgcttcttgcgctttttgcgagcgcaacaaatgcgttcattattccacaatgctcacttgctccaagttccattattacacagttcctcccaccagttacttcaatgggcttcgaacacccagctgtgcaagcctataggctacaacaagcaattgcggcgagcgtcttacaacaaccaatttcccagttgcaacaacaatccttggcacatctaacaatacaaaccatcgcaacgcaacagcaacaacaattcctaccagcactgagccacctagccatggtgaaccctgccgcctacttgcaacagcag

SEQ ID NO: 21599 - DNA, 296 bp, Zea mays
  Clone ID: LIB3152-014-P1-K1-A4
tttcagcattcagaaacacaccaagttattcgcactagcaacaacctaacaacaatggctaccaagatattagccctccttgcgcttcttgcccttttagtgagcgcaacaaatgcgttcattattccacagtgctcacttgctcctagtgccattattccacagttcctcccaccagttacttcaatgggcttcgaacatccagccgtgcaagcctacaggctacaactagcgcttgcggcgagcgttttacaacaaccaattgcccaattgcaacaacaatccttgggacattt

SEQ ID NO: 21600 - DNA, 351 bp, Zea mays
  Clone ID: LIB3152-014-P1-K1-A5
cggacgcgtgggagaaagcacaattttgtaccaacaatggcagccaaaatattttgcctccttatgctccttggtctttctgcaagtgctgctacggcgaccattttcccgcaatgctcgcaagctcctatagcttcccttcttcccccgtacctctcaccagcggtgtcttcggtatgtgaaaacccaattcttcaaccctacaggatccaacaggcaatcgcagctggcatcttacctttatcacccttgttccttcaacaatcatcagccctattacaacagttaccttttggtgcatttattggcacaaaacatcagggcacaacaactacaacaacttgtgctagc

SEQ ID NO: 21601 - DNA, 351 bp, Zea mays
  Clone ID: LIB3152-014-P1-K1-A6
gatcagcaaagcggcagtgcgtagagaggatcgtcgaacagaacagcatgaagatggtcatcgttctcgtcgtgtgcctggctctgtcagctgccagcgcctctgcaatgcagatgccctgcccctgcgcggggctgcagggcttgtacggcgctggcgccggcctgacgacgatgatgggcgccggcgggctgtacccctacgcggagtacctgaggcagccgcagtgcagcccgctggcggcggcgccctactacgccgggtgtgggcagacgagcgccatgtaccagccgctccggcaacagtgctgccagcagcagatgaggatgatggacgtgcagtccgtcgcgc

SEQ ID NO: 21602 - DNA, 354 bp, Zea mays
  Clone ID: LIB3152-014-P1-K1-A7
caagcaattgcggcgagcgttttatttcaaccaatttcccagatgcaacaacaatgcttggcacatctaacaatacaaaccatcgcaacgcaacagcaacaacaattcctaccaggactgtgccacctagccatggtggaccctggcggcttcttggaaacagaagttgcttgcataaaacccacttgctctggcaaacgtagttgcaaaccagccacaacaacagtgtgaacagtttctgccagcgctcagtcaactagccatggtgaaccctgccgtctacctacaacagcaacaactgtttttatctagcccgctcggtgtggacaatgcacctacatacctgcaacaaca

SEQ ID NO: 21603 - DNA, 363 bp, Zea mays
  Clone ID: LIB3152-014-P1-K1-A8
attgagaccaactagcaacattgaaagcacaatagtgtaccaacaatggcagcgaaaatattttgcctccttatgctccttggtctttctgcaagtgctgctacggcgaccattttcccacaatgctcacaagctcctatagcttcccttcttcccccgtacctctcaccagcggtgtcttcggtatgtgaaaacccaattcttcaaccctataggatccaacaggcaatcgcagctggcatcttacctttatcacccttgttcctccaacaatcatcagccctattacagcagttacctttggtgcatttattggcacaaaacatcatggcacaacaactacaacaacttgtgctagcaaac

SEQ ID NO: 21604 - DNA, 387 bp, Zea mays
  unsure at all n locations
  Clone ID: LIB3152-014-P1-K1-B1
cgcagaaacacanccaagcgaagcgcactagcaacgacctaacaacaatggctaccaagatattagccctccttgcgcttcttgccctttttgtgagcgcaacaaatgcgttcattattccacaatgctcacttgctcctagtgccattattccacagttcctcccaccagttacttcaatgggcttcgaacacctagctgtgcaagccaacatgcaacaacaagcgcttgcggcgagcgtcttacaacaaccaattgcccaattgcaacaacaatccttgccacatctaacaatacaagccatcacaacgcaacagcaacaacagttcctaccagcactgagccacctagccatggtgaaccctgccgcctacttgcaagagcagc

SEQ ID NO: 21605 - DNA, 381 bp, Zea mays
  Clone ID: LIB3152-014-P1-K1-B10
gcaacatagaaagtggaatacagtatcaacaatagagcaacaatggcggccaagatattttccatccttatgctccttgctctttctgcatgtgttgctaacgcgaccatttttcctcaatactcacaagctcctatagctgcccttcttcccccataccttccatcaatgaccgcttcagtatgtgaaaacccagcccttcaaccctacaggctccaacaagcaatcgcaacaagcaacttacctttatcacccctgttctttcaacaatcgccagccctatctttggtgcagtcattggtacaaaccatcagggcacaacagctgcagcaactcgtgctaccagtgatcagccaagtagctctggcaaacctttctccc

SEQ ID NO: 21606 - DNA, 382 bp, Zea mays
  Clone ID: LIB3152-014-P1-K1-B11
cgcactagcaacaacctaacaacaatggctaccaagatattagccctccttgcgcttcttgcccttttagtgagcgcaacaaatgcgttcattattccacagtgctcacttgctcctagtgccattattccacagttcctcccaccagttacttcaatgggcttcgaacatccagccgtgcaagcctacaggctacaactagcgcttgcggcgagcgtcttacaacaaccaattgcccaattgcaacaacaatccttggcacatctaaacctacaaaccatcgcaacgcaacagcaacaacagtttctgccatcactgagccacctagccgtggtgaaccctgtcgcctacttgcaacagcagctacttgcatccaacccac

SEQ ID NO: 21607 - DNA, 187 bp, Zea mays
  Clone ID: LIB3152-014-P1-K1-B12
tcggtaacattcatagagaagttctattatctacatctaagcaccaagggcagtcgagagttttgcccttcttgcgctccccgctcattcagcaagtgttgctaccgggacaattattccacattgctcacaacaatacctctctccaaagacagctgcaagaactgaataccctactatacaatat

SEQ ID NO: 21608 - DNA, 386 bp, Zea mays
  Clone ID: LIB3152-014-P1-K1-B2
attgagaccaactagcaacatagaaagcacaatagtgtaccaacaatggcagctaaaatattttgcctccttatgctccttggtctttctgcaagtgctgctacggcgaccattttcccacaatgctcacaagctcctatagcttcccttcttcccccgtacctctcaccaacggtgtcttcggtatgtgaaaacccaattcttcaaccctacaggatccaacaggcaatcgcagctggcatcttacctttatcacccttgttcctccaacaatcatcagccctattacagcagttacctttggtgcatttattggcacaaaacatcagggcacaacaactacaacaacttgtgctagcaaaccttgctgcctactctcagcaaca

SEQ ID NO: 21609 - DNA, 386 bp, Zea mays
  Clone ID: LIB3152-014-P1-K1-B3
gaaacacaccaagcgaagctacctatcaacgacttaacaacaatggctaccaagatattagccctccttgcgcttcttgccctttttgtgagcgcaacaaatgcgttcattattccacaatgctcacttgctcctagtgccattataccacagttcctccgaccagttacttcaatgggcttcgaacacctagctgtgcaagcctacaggctacaacaagcgcttgcggcgagcgtcttacaacaaccaattaaccaattgcaacaacaatccttggcacatctaaccatacaaaccatcgcaacacaacagcaacaacagttcctaccagcactgagccaactagatgtggtgaaccctgtcgcctacttgcaacagcaggtgct

SEQ ID NO: 21610 - DNA, 385 bp, Zea mays
  Clone ID: LIB3152-014-P1-K1-B4
aattagctcatcgactccagattggagaactcgacaccatgaaggtgctgatcgttgcccttgctctcctggcgctcgctgcgagcgccgcctccagtacaagcggcggctgtggctgccagacaccaccgtttcatctaccgcctccgttctatatgccgcctccgttctatctgccgccgcagcagcagccgcagccatggcaataccccactcaaccaccgcagctaagcccgtgccagcagttcggatcctgcggcgtcggcagcgtcggcagcccgttcctgggccagtgcgtcgagttcctgaggcaccagtgcagcccggcggcgacgccctacggctcgccacagtgccaggcgctgcagcagcagtgctgccacca

SEQ ID NO: 21611 - DNA, 366 bp, Zea mays
  Clone ID: LIB3152-014-P1-K1-B6
gttcacatcaacattgtggtcattggccatgtcgactccggcaagtccacaaccaccggccacctcatctacaagcttggaggcattgacaagcgtgtcatcgagaggtttgagaaggaggctgccgagatgaacaagaggtccttcaagtacgcctgggtccttgacaagctcaaggccgagcgcgagaggggcatcaccattgacattgccctgtggaagtttgagacaaccaagtactactgcaccgtgattgatgcccctgggcaccgtgacttcatcaagaacatgatcaccggcacctcccaggctgattgtgcggtgctcatcattgactccaccactggtggcttcgaggctggtatc

SEQ ID NO: 21612 - DNA, 383 bp, Zea mays
  Clone ID: LIB3152-014-P1-K1-B7
aaacacaccaagcgaagcacattagcaacaacctaacaacaatggctaccaagatattatccctccttgcgcttcttgcgctttttgcgagcgcaacaaatgcgttcattattccacaatgctcacttgctccaagttccattattacacagttcctcccaccagttacttcaatgggcttcgaacacccagctgtgcaagcctataggctacaacaagcaattgcggcgagcgtcttacaacaaccaatttcccagttgcaacaacaatccttggcacatctaacaatacaaaccatcgcaacgcaacagcaacaacaattcctaccagcactgagccacctagccatggtgaaccctgccgcctacttgcaacagcagttg

SEQ ID NO: 21613 - DNA, 72 bp, Zea mays
  Clone ID: LIB3152-014-P1-K1-B8
taacaaatcaagtattcaccatttttattaggctcccaaccaaagctgcaacggggactttctaacttctac

SEQ ID NO: 21614 - DNA, 385 bp, Zea mays
  Clone ID: LIB3152-014-P1-K1-C1
ttttgagcattcagaaacacaccaagcgaagctacctagcaacgacttaacaacaatggctaccaagatattagccctccttgcgcttcttgccctttttgtgagcgcaacaaatgcgttcattattccacaatgctcacttgctcctagtgccattataccacagttcctccgaccagttacttcaatgggcttcgaacacctagctgtgcaagcctacaggctacaacaagcgcttgcggcgagcgtcttacaacaaccaattaaccaattgcaacaacaatccttggcacatctaaccatacaaaccatcgcaacacaacagcaacaacagttcctaccagcactgagccaactagatgtggtgaaccctgtcgcctacttg

SEQ ID NO: 21615 - DNA, 324 bp, Zea mays
  Clone ID: LIB3152-014-P1-K1-C11
tcggcaacatacctttatcaccctttgttcatcaatcgccagccctatctttggtgcagtcattggtacaaaccatcaaggcacattatctgcagcaactcgtgctacctgcgatcaatcaagttgcacaggcaaaccttgctttctactttttttttactacatttttttttatttaaccaactgtttacattgaaccgtgctgcttatttgcaagtacaactattaccattttttctgctagcaactgtctactcttagtatcatcaactttattcattttaccaattggtcgcattgtactcccgtgttttatttgtagca

SEQ ID NO: 21616 - DNA, 378 bp, Zea mays
  Clone ID: LIB3152-014-P1-K1-C2
caacatagaaagcacaatagtgtaccaacaatggcagctaaaatattttgcctccttatgctccttggtctttctgcaagtgctgctacggcgaccattttcccacaatgctcacaagctcctatagcttcccttcttcccccgtacctctcaccaacggtgtcttcggtatgtgaaaacccaattcttcaaccctacaggatccaacaggcaatcgcagctggcatcttacctttatcacccttgttcctccaacaatcatcagccctattacagcagttacctttggtgcatttattggcacaaaacatcagggcacaacaactacaacaacttgtgctagcaaaccttgctgcctactctcagcaacagcagttt

SEQ ID NO: 21617 - DNA, 331 bp, Zea mays
  Clone ID: LIB3152-014-P1-K1-C3
tctaagcttgcctgttcatttattactgagagcaagtgtaatagtgatatagttaatgctaaggtagaggtgagaagagagttatgctgttgtagtggttagaagagaagagtgcaatcaacgagctcagcatttttgtgtgtgtgtagctttctgaactagataacaaagactatgtatgtttttttgtttagctttctgaactaggttcgctctaaaaatctacaatctgaaccaagtacaatggcaggatagattgtatagaaaatctatagatttttatagttcaattcagaatcactttctactaaaaaaaaaaaaaattttaaaa

SEQ ID NO: 21618 - DNA, 378 bp, Zea mays
  Clone ID: LIB3152-014-P1-K1-C4
gcgaagcgcactagcaacaacctaacaacaatggctaccaagatattatccctccttgcgcttcttgcgctttttgcgagcgcaacaaatgcgtccattattccacaatgctcacttgctcctagttccattattccacagttcctcccaccagttacttcaatggccttcgaacacccagctgtgcaagcctataggctacaacaagcgattgcggcgagcgtcttacaacaaccaattgcccaattgcaacaacaatccttggcacatctaacaatacaaaccatcgcaacgcaacagcaacaacagttcctaccagcactgagccacctagccatggtgaaccctgtcgcctacttgcaacagcagctgcttgca

SEQ ID NO: 21619 - DNA, 374 bp, Zea mays
  Clone ID: LIB3152-014-P1-K1-C5
attttgagcattcagaaacacaccaagcgaagcacattagcaacaacctaacaacaatggctaccaagatattatccctccttgcgcttcttgcgctttttgcgagcgcaacaaatgcgttcattattccacaatgctcacttgctccaagttccattattacacagttcctcccaccagttacttcaatgggcttcgaacacccagctgtgcaagcctataggctacaacaagcaattgcggcgagcgtcttacaacaaccaatttcccagttgcaacaacaatccttggcacatctaacaatacaaaccatcgcaacgcaacagcaacaacaatttctaccagcactgagccacctagccatggtgaaccct

SEQ ID NO: 21620 - DNA, 382 bp, Zea mays
  Clone ID: LIB3152-014-P1-K1-C6
caacaagctgccccgcagcaacgaacactaaccttggcagaacgaagctgaagtagttcgttgtgaacccagtatggcaaacgcgccgaggatcctggccctcggcctgctagcgctcctgtgcgctgccgccggcccggccgccgcgcagaactgcggctgccagcctaacttctgctgcagcaagttcggctactgcggcacgaccgacgcctactgcggcgacgggtgccagtcgggcccgtgccgctcgggcggcggcggcggcggaggcggaggcggaggcggaggcagtggcggtgcgaacgtggctaacgtggtcagcgacgcgttcttcaacggcatcaagaaccaggccgggagcgggtgcgagggcaagaac

SEQ ID NO: 21621 - DNA, 378 bp, Zea mays
  Clone ID: LIB3152-014-P1-K1-C7
agcaacatagaaagcacaatagtgtaccaacaatggcagctaaaatattttgcctccttatgctccttggtctttctgcaagtgctgctacggcgaccattttcccacaatgctcacaagctcctatagcttcccttcttcccccgtacctctcaccaacggtgtcttcggtatgtgaaaacccaattcttcaaccctacaggatccaacaggcaatcgcagctggcatcttacctttatcacccttgttcctccaacaatcatcagccctattacagcagttacctttggtgcatttattggcacaaaacatcagggcacaacaactacaacaacttgtgctagcaaaccttgctgcctactctcagcaacagcagt

SEQ ID NO: 21622 - DNA, 381 bp, Zea mays
  Clone ID: LIB3152-014-P1-K1-C8
ggagaagttccttggaactataccaatgatgttcaacgttgttatcctttctcctcatggctacttcgctcagtccaatgtgcttggataccctgacactggcggtcaggttgtgtacattctggatcaagtccgtgctttggagaatgagatgcttctgaggattaagcagcaaggccttgatatcactccgaagatcctcattgttaccaggctgttgcctgatgctgctgggactacgtgcggtcagcggctggagaaggtcattggtactgagcacacagacatcattcgcgttccgttcagaaatgagaatggcatcctccgcaagtggatctctcgttttgatgtctggccatacctggagacatacactgagga

SEQ ID NO: 21623 - DNA, 383 bp, Zea mays
  Clone ID: LIB3152-014-P1-K1-D1
caactagcaacatagaaagcacaattttgtaccaacaatggcagccaaaatattttgcttccttatgctccttggtctttctgcaagtgttgctaccgcaaccattttcccacaatgctcacaagctcctatagcttcccttcttcccccatacctctcaccagcggtgtcttcaatgtgtgaaaacccaattgttcaaccctacaggatccaacaggcaatcgcaacaggcatcttaccattatcacccttgttcctccaacaaccgtcagccctattacagcagttacctttggtccatttggtggcacaaaacatcagggcacaacaactacaacaacttgtgctagcaaaccttgctgcatactctcagcaacatcagt

SEQ ID NO: 21624 - DNA, 379 bp, Zea mays
  Clone ID: LIB3152-014-P1-K1-D12
caacaagcaacatataaagtgttttcattagcaacaatagagcaacaatggcgaccaagatattttccctccttatgctccttgctctttctgcatgtgttgctaacgcgacaattttccctcaatgctcacaagctcctatagcttcccttcttcccccataccttccatcaatgatagcttcagtatgtgaaaacccagctcttcaaccctataggctccaacaagcaatcgcagcaagcaacatacctttatcacccttgtttcaacaatcgccagccctatctttggtgcagtcattggtacaaaccatcagggcacagcagctgcagcaactcgtgctaccttgtatcaaccaagtagctctggcaaacctttc

SEQ ID NO: 21625 - DNA, 315 bp, Zea mays
  Clone ID: LIB3152-014-P1-K1-D2
gaactagcaacatagaaagcacacttgtgtattaacactggcagccaaaatatggcggtgccttatgctccttggtcgtgctgcaagtgttgctaccgcaaccattttcccacaatgctcacaagctcctaaagcttcccttcttcccccatacctctcaccagcggtgtcttcaatgtgtgaaaacccaattgttcaaccctacacgatccaacaggcaatcgcaacaggcatcttaccactatcacccttggtcctacaacatctcgtagccctattacagcagctaccttgggtctcatttggtggcacaaa

SEQ ID NO: 21626 - DNA, 384 bp, Zea mays
  Clone ID: LIB3152-014-P1-K1-D3
attgagaccaacaagcaacatagaaagtggaatccagtagcaacaatagagcaacaatggcgaccaagatattttccctccttatgctccttgctctttctgcatgtgttgctaacgcgacaattttccctcaatgctcacaagctcctatagcttcccttcttcccccataccttccatcaatgatagcttcagtatgtgaaaacccagctcttcaaccctataggctccaacaagcaatcgcagcaagcaacatacctttatcacccttgtttcaacaatcgccagccctatctttggtgcagtcattggtacaaaccatcagggcacagcagctgcagcaactcgtgctacctgtgatcaaccaagtagctctggcaaacc

SEQ ID NO: 21627 - DNA, 393 bp, Zea mays
  unsure at all n locations
  Clone ID: LIB3152-014-P1-K1-D4
gacccaggggnncggggaagcgcactagcaacaacctaactttaatggctaccaagacattatccctccttgcgcttcttgcgctttttgcgagcgcaacaaatgcgttcattattccacaatgctcacttgctcctagttccattattgcacagttcctcccaccagttacttcaatggcctttgaacacccagctgggcaagcctataggctacaacaagcgattgcggagagcgtcttacaacaaccaattgcccaattgcaacaacaatccttggcacatttaacaatacaaaccatcgcaacgcaacagcaacaacagttcctaccagcactgagccacctagccatggtgaaccctgtcgcctacttgcaacaacagctgcttgcat

SEQ ID NO: 21628 - DNA, 182 bp, Zea mays
  unsure at all n locations
  Clone ID: LIB3152-014-P1-K1-D6
cccgggcggacccacgcgtccggaccattagctttatctactccagatcgtataagaacccgatcgacaccatgagggtgttgctcgtngccctcgctctcctggctctcgctgcgagcgccacctccacgcatacaagcggcggctgcgaaagccatcctcctaccccagttaatctacct

SEQ ID NO: 21629 - DNA, 302 bp, Zea mays
  Clone ID: LIB3152-014-P1-K1-D7
gcagatgaagcggcagccaccacactctcgcagcggcgacgactcgccggccggcgagagaggaagcgacggagggttgaagaaggggaaggggagagggaggtggggcggcgggagtcggaggcggaacgatcagcggctgggcggcggctggttttttttttttctcaattttttttttttttatcttttttttttttcccatttatattcttttttttccacattcttttttttttttctcctcactttttttttttttgcttcaaatatttttttttttttttctgttcaactttttt

SEQ ID NO: 21630 - DNA, 371 bp, Zea mays
  Clone ID: LIB3152-014-P1-K1-D8
cggacgcgtgggctcgcccagcagcagggagcagccatgccaggggaccacggctccaagggcgacatctccttcgccggacgcttcacggccagcgccatcgcagcatgcttcgcagagatatgtaccatcccgctcgacacggccaaggtcaggcggcactacgagctgctggtggaggacgtcgacggcatcgagtcgggccgcgtcccgcttccggcgtacgcggctgacggcgctgccgaggaagggggcggtggcgggaagaagggaagtggcggaggagggacccatggggacaaggggtcggcgaagtccgccgagcaggagcgtaggaagggcatcgcctggacagaggacgagcacagatt

SEQ ID NO: 21631 - DNA, 381 bp, Zea mays
  Clone ID: LIB3152-014-P1-K1-D9
tgagcattcagaaacacaccatgctaagcgcactagcaacgacctaacaacaatggctaccaagatattagccctccttgcgcttcttgccctttttgtgagcgcaacaaatgcgttcattattccacaatgctcacttgctcctagtgccattattccacagttcctcccaccagttacttcaatgggcttcgaacacctagctgtgcaagccaacatgcaacaacaagcgcttgcggcgagcgtcttacaacaaccaattgcccaattgcaacaacaatccttgccacatctaacaatacaagccatcacaacgcaacagcaacaacagttcctaccagcactgagccacctagccatggtgaaccctgccgcctactt

SEQ ID NO: 21632 - DNA, 384 bp, Zea mays
  unsure at all n locations
  Clone ID: LIB3152-014-P1-K1-E1
gcatatcattgctggagctggtgagcttcatcttgagatttgcctgaaggatctgcaggaggacttcatgggtggtgctgaaattattgtttccccacccgncgnctccttccgtgaaacggttcttgagaagtcctgccgnactgncatgagcaagtctcccaacaagcacaaccgnctgtacatggaagcgcgccccttggaggagggtctcgctgaggccatcgatgacggccgtattggcccacgtgatgatccgnnngtgcgctcccagatcctctctcaggagtttgggtgggacaaggacctggccaagaagatttggtgttttggacctgagaccactggcccgaacatggttgtagatatgtgcaagggagtgca

SEQ ID NO: 21633 - DNA, 380 bp, Zea mays
  Clone ID: LIB3152-014-P1-K1-E10
caactagcaacatacatagtgaagtacactagcaacatcttagcaccaatgggagccaagatttttgccctccttgccctccttgctctttcagcaagcgctgctacctcgacttttattccacaatgctcacaacaatacctctctccggcgacagccgtgggatttcaatacccaactatacaatcctacatggtacaagaggccatccaagcaagcatcttacggtcattagcattaaccctccaacaaccatatgctctattgcaacagccatccttagtgcatctgtatctccaaagaatcgcggcacaacaactacaacaacagttgctaccaacaatcaatcaagtagttgcagcgaaccttgctgcttacct

SEQ ID NO: 21634 - DNA, 378 bp, Zea mays
  Clone ID: LIB3152-014-P1-K1-E11
gctttatctactccagagcgcttattaacccgatcgacaccatgagggtgttgctcgttgccctcgctctcctggctctcgctgcgagcgccacctccacgcatacaagcggcggctgcggctgccagccaccgccgccggttcatctaccgccgccggtgcatctgccacctccggttcacctgccacctccggtgcatctcccaccgccggtccacctgccgccgccggtccacctgccaccgccggtccatgtgccgccgccggttcatttgccgccgccaccatgccactaccctacttaaccgccccgggctcagtcttatccccagccacacccattcccgtgccaacagtcgaattcaagctccgtccatc

SEQ ID NO: 21635 - DNA, 381 bp, Zea mays
  Clone ID: LIB3152-014-P1-K1-E12
agaaagcacaatagtgtaccatcaatggcagccaaaatattttgcctccttatgctccttggtatttctgcaagtgctgctacggcgaccattttcccgcaatgctcacaagctcctatagcttcccttcttcccccgtacctctcaccagcggtgtcttcggtatgtgaaaacccaattcttcaaccctacaggatccaacaggcaatcgcagctggcatcttacctttatcacccttgttcctccaacaatcatcagccctattacagcagttacctttggtgcatttattggcacaaaacatcagggcacaacaactacaacaacttgtgctagcaaaccttgctgcctactctcagcaacagcagtttctttcattc

SEQ ID NO: 21636 - DNA, 385 bp, Zea mays
  Clone ID: LIB3152-014-P1-K1-E2
gagcattcagaaacacaccaagcgaagctcactagcaacgacctaacaacaatggctaccaagatattagccctccttgcgcttcttgccctttttgtgagcgcaacaaatgcgttcattattccacaatgctcacttgctcctagtgccattattccacaattcctcccaccagttacttcaatgggcttcgaacacctagctgtgcaagcctacatgctacaacaagcgcttgcggcgagcgtcttacaacaaccaattgaccaattgcaacaacaatccttggcacatctaaccatacaaaccatcgcaacgcaacagcaacaacagttcctaccagcactgagccaactagctgtggtgaaccctatcgcctacttgcaat

SEQ ID NO: 21637 - DNA, 385 bp, Zea mays
  Clone ID: LIB3152-014-P1-K1-E3
cggacgcgtgggaaagcacaatagtgtaccaacaatggcagccaaaatattttgcctccttatgctccttggtatttctgcaagtgctgctacggcgaccattttcccgcaatgctcacaagctcctatagcttcccttcttcccccgtacctctcaccagcggtgtcttcggtatgtgaaaacccaattcttcaaccctacaggatccaacaggcaatcgcagctggcatcttacctttatcacccttgttcctccaacaatcatcagccctattacagcagttacctttggtgcatttattggcacaaaacatcagggcacaacaactacaacaacttgtgctagcaaaccttgctgcctactctcagcaacagcagtttctt

SEQ ID NO: 21638 - DNA, 380 bp, Zea mays
  Clone ID: LIB3152-014-P1-K1-E4
cgcaatcaaccaccaaagcaatcgaaaagcaaccctgcaagtgcaggcaaagaggggcgcgaccaaacagatccaatccaatggcgatggcaccgtccgcagcatgcgtcgtctcgttccccgcccgcccggcggcgtccacggccgggccccgcgccgccgcgggcaccggggcggtccacgctgtcgcggggtcggcggagggagccaagtggtgggcgccgctgctggggtggtcggggaaggccgactacctggaggccccggcgccggcgcaggatgaggcgccgcggaggcagttcgtgggggtgatgacggaggagaaggcccgggagctgcgggcgcggatggcgcatactgagtactttcatgaccccatg

SEQ ID NO: 21639 - DNA, 385 bp, Zea mays
  Clone ID: LIB3152-014-P1-K1-E5
attgagaccaactagcaacatagaaagctcaatattgtaccaataatggcagccaaaatattttgcctcattatgctccttggtctttctgcaagtgctgctacggcgagcattttcccgcaatgctcacaagctcctatagcttcccttcttcccccatacctctcaccagcgatgtcttcagtatgtgaaaatccaattcttctaccctacaggatccaacaggcaatcgcagcaggcatcttacctttatcacccttgttcctccaacaatcatcagccctattacagcagttacctttggtgcatttattggcacaaaacatcagggcacaacaactacaacaactcgtgctagcaaaccttgctgcctactctcagcaac

SEQ ID NO: 21640 - DNA, 376 bp, Zea mays
  Clone ID: LIB3152-014-P1-K1-E7
ggcgaacgtagttgcaaaccattattaacaacagctacaacagtttctgccaacgctcagtcaactagccatggtgaaccctgccgcctacgtacaacaacaacaactgctttcatctagcccgctcgctgtgggcaatgcacctacatacctgcaacaacaattgttgcaacagattgtaccagctctgactcaactagctgtggcaaaccctgttgcctacttgcaacagctgcttccattcaaccaactgactctgtcgaactctgctgcgtacctacaacagcgacaacagttacttaatccattggtagtggctaacccattggtcgccgcctttctacagcagcaacaattgctgtcatacaaccagttc

SEQ ID NO: 21641 - DNA, 381 bp, Zea mays
  unsure at all n locations
  Clone ID: LIB3152-014-P1-K1-E8
agaaagcacaatagtgtaccaacaatggcagccaaaatattttgcctccttatgctccttggtctttctgcaagtgctgctacggcgaccattttcccgcaatgctcgcaagctcctatagcttcccttcttcccccgtacctctcaccagcggtgtcttcggtatgtgaaaacccaattcttcaaccctacaggatccaacaggcaatcgcagctggcatcttacctttatcacccttgttcctccaacaatcatcagccctattacaacagttacctttggtgcatttattggcacaaaacatcaaggcacaacaactacaacaacttgtgctagcaaaccttgctgnctactctcagcaacagcagtttcttccattc

SEQ ID NO: 21642 - DNA, 232 bp, Zea mays
  Clone ID: LIB3152-014-P1-K1-E9
tcgagcagccgcagccatggcaattccttttcaaccaccgtactaagcccgtgccagcagtttggatcctgcgggggcggcagcgtcgtagcccgttcctgggccagtgcgtctagtttctgaggcaccagtgcagcggcggtgactccctacggtcgcacagtgccaggcgctgtatgatagtgctgtcaccagatcaggcaggtggagccgttgcaccggttccagtcga

SEQ ID NO: 21643 - DNA, 385 bp, Zea mays
  Clone ID: LIB3152-014-P1-K1-F1
tgcgttcattattccacagtgctcacttgctcctagtgccattattccacagttcctcccaccagttacttcaatgggcttcgaacatccagccgtgcaagcctacaggctacaactagcgcttgcggcgagcgtcttacaacaaccaattgcccaattgcaacaacaatccttggcacatctaaacctacaaaccatcgcaacgcaacagcaacaacagtttctgccatcactgagccacctagccgtggtgaaccctgtcgcctacttgcaacagcagctacttgcatccaacccacttgctctggcgaacgtagctgcataccagcaacaacaacgtctgcaacagtttatgccagcgctcagtcaactagccatggtgaac

SEQ ID NO: 21644 - DNA, 307 bp, Zea mays
  Clone ID: LIB3152-014-P1-K1-F10
ccaactagcaacatagaaagttcatttgtgtaccaacaatggcagccaaaatattttgcttccttatgctccttggtctttctgcaagtgctgctaccgcaaccattttcccacaatgctcacaagctcctatagcttcctttcttcccccataccttttaccagcggtgtctacagtttgtgaaaacccaatttttcaaccctacaggatccaacaggcaatcgcagcaggcatcttacctttatcacccttgtttctccaacaaccgttagtcctatttacagcagtttaccttggtgcatttgt

SEQ ID NO: 21645 - DNA, 386 bp, Zea mays
  Clone ID: LIB3152-014-P1-K1-F11
attttgagcattcagaaacacaccatgcgaagcgcactagcaacgacctaacaacaatggctaccaagatattagccctccttgcgcttcttgccctttttgtgagcgcaacaaatgcgttcattattccacaatgctcacttgctcctagtgccattattccacagttcctcccaccagttacttcaatgggcttcgaacacctagctgtgcaagccaacatgcaacaacaagcgcttgcggcgagcgtcttacaacaaccaattgcccaattgcaacaacaatccttgccacatctaacaatacaagccatcacaacgcaacagcaacaacagttcctaccagcactgagccacctagccatggtgaaccctgccgcctacttg

SEQ ID NO: 21646 - DNA, 346 bp, Zea mays
  Clone ID: LIB3152-014-P1-K1-F12
cagaaacacaccaagcgaagctcattagcaacaacctaacaacaatggctaccaagatattatccctccttgcgcttcttgcgctttttgcgagcgcaacaaatgcgttcattattccacaatgctcacttgctccaagttccattattacacagttcctcccaccagttacttcaatgggcttcgaacacccagctgtgcaagcctataggctacaacaagcaattgcggcgagcgtcttacaacaaccaatttcccagttgcaacaacaatccttggcacatctaacaatacaaaccatcgcaacgcaacagcaacaacaatttctaccagcactgagccacct

SEQ ID NO: 21647 - DNA, 384 bp, Zea mays
  unsure at all n locations
  Clone ID: LIB3152-014-P1-K1-F2
cccacgcgtncgattttgagcattcagaaacacaccaagcgaagcacattagcaacaacctaacaacaatggctaccaagatattatccctccttgcgcttcttgcgcttgttgcgagcgcaacaaatgcgttcattattccacaatgctcacttgctccaagttccattattacacagttcctcccaccagttacttcaatgggcttcgaacacccagctgtgcaagcctataggctacaacaagcaattgcggcgagcgtcttacaacaaccaatttcccagttgcaacaacaatccttggcacatctaacaatacaaaccatcgcaacgcaacagcaacaacaattcctaccagcactgagccacctagccatggtgaacc

SEQ ID NO: 21648 - DNA, 385 bp, Zea mays
  Clone ID: LIB3152-014-P1-K1-F3
caacaagcaacatagaaagtggaatccagtagcaacaatagagcaacaatggcgaccaagatattttccctccttatgctccttgctctttctgcatgtgttgctaacgcgacaattttccctcaatgctcacaagctcctatagcttcccttcttcccccataccttccatcaatgatagcttcagtatgtgaaaacccagctcttcaaccctataggctccaacaagcaatcgcagcaagcaacatacctttatcacccttgtttcaacaatcgccagccctatctttggtgcagtcattggtacaaaccatcagggcacagcagctgcagcaactcgtgctacctgtgatcaaccaagtagctctggcaaacctttctccct

SEQ ID NO: 21649 - DNA, 387 bp, Zea mays
  Clone ID: LIB3152-014-P1-K1-F4
gcgcaacaaatgcgttcattattccacagtgctcacttgctcctagtgccattattccacagttcctcccaccagttacttcaatgggcttcgaacatccagccgtgcaagcctacaggctacaactagcgcttgcggcgagcgtcttacaacaaccaattgcccaattgcaacaacaatccttggcacatctaaacctacaaaccatcgcaacgcaacagcaacaacagtttctgccatcactgagccacctagccgtggtgaaccctgtcgcctacttgcaacagcagctacttgcatccaacccacttgctctggcgaacgtagctgcataccagcaacaacaacgtctgcaacagtttatgccagcgctcagtcaactagcca

SEQ ID NO: 21650 - DNA, 281 bp, Zea mays
  Clone ID: LIB3152-014-P1-K1-F5
gcgccacagtaatcgagagtgctcttccatgtcgaggtggtgtaggtgtttggcggagcagccggggcgttggaatctgaggaggagaagatggtggtgctggtggtggccactacgtctgacccgtcgttcattgtgcccgccgtcgcctttctctacatgcccggatggtccaccggccctgccatttttgaagcgatggagtgttttactaatgggaatgctccattactggagctttcatgtaccattgttccagatgatgattttgaccagctttt

SEQ ID NO: 21651 - DNA, 332 bp, Zea mays
  Clone ID: LIB3152-014-P1-K1-F6
aaaataatgaaacaattctagtgtttgatttgggaggcggaacctttgatgtatctgtattggaagttggtgatggtgtgtttgaggtgctttccacatctggtgacacacaccttggtggtgatgacttcgataagagaatagtagattggcttgctagcaacttcaagaaagatgaacgtattgatcttctgaaggataaacaatcccttcagaggcttacttgcgcaacctagaacgctaagatggaactgtcaaccctgacacaggccaatattagcccaccattcattactgctaccgctgacgggcctaaacacatcacagcaacc

SEQ ID NO: 21652 - DNA, 373 bp, Zea mays
  Clone ID: LIB3152-014-P1-K1-F7
cccacgcgtccgcccacgcgttcgtccacgcgtccgcccacgcgtccgcccacgcgtgcgcccacgcgttcgcccacgcgttcgcggacgcgtgggctgagaaaacacttaccatggaggtagctggagatcctggcaaaattgctgtagtgcagaggaatctatggaaatttggaatcaaagaaatttgcaggacaggaaaaattgctttgagacgtgaaaggattggtgcaacagcccggttctggcgattttctgttgctttttacccagacctgattgaggcgttgtcgaaaaattcacttacattttgtaataggacagttattggtatgtttggttaaccatccaatgctgggggtgattgttatcc

SEQ ID NO: 21653 - DNA, 366 bp, Zea mays
  Clone ID: LIB3152-014-P1-K1-F8
ttcttcccccataccttccattaatgtccgcttcagtatgtgaaaacccagcccttcaaccctacaggctccaacaagcaatcgcaacaagcaacttacctttatcacccctgttctttcaacaatcgccagccctatctttggtgcagtcattggtacaaaccatcagggcacaacagctgcagcaactcgtgctaccagtgatcagccaagtagctttggcaaacctttctccctactctcagtaacaacaatttttttcattcaaccaactgtctacactgaaccctgctgcttatttgcagcaacaacaactactaccattcagccaggtagcttctggcttcttttaagaaaaacaatttt

SEQ ID NO: 21654 - DNA, 372 bp, Zea mays
  Clone ID: LIB3152-014-P1-K1-F9
cggacgcgtgggcggacgcgtgggctgcaggcgttgattcggaagtatgctcctgtcgccattgtcattggggtagtattgatgctgttttggctcaagaacaagatatggtgattgtacagtacgaaggatactgggccctgttacaacacctgagaagaacagatggagataaaaaccaggtctattctggaacaagaagatgctttggtgacttgtatcccgtatctgcccattcaagcgattacttaagctgcccttttgctccttcctataagctagtatcaaagtgaattcgttggagtgcagacctgataagagcatttccggaagtctttcaaaatttcactctaaattggcattttgagagtc

SEQ ID NO: 21655 - DNA, 373 bp, Zea mays
  Clone ID: LIB3152-014-P1-K1-G1
gcacaatagtgtaccaacaatggcagccataatattttgcttccttatgctccttggtctttctgcaagtgctgctaccgcaaccattttcccacaatgctcacaagctcctatagcttcctttcttcccccatacctctcaccagcggtgtcttcagtatgtgaaaacccaattcttcaaccctacaggatccaacaggcaatcgcagcaggcatcttacctttatcacccttgttcctccaacaaccgtcagccctattacagcagttacctttggtgcatttgttggcacaaaacatcaaggcacaacaactacaacaacttgtgctaggaaaccttgctgtctactctcagcaacagcagtttctttca

SEQ ID NO: 21656 - DNA, 384 bp, Zea mays
  Clone ID: LIB3152-014-P1-K1-G10
agcattcagaaacacaccaagcgatgcacattagcaacaacctaacaacaatggctaccaagatattatccctccttgcgcttcttgcgctttttgcgagcgcaacaaatgcgttcattattccacaatgctcacttgctccaagttccattattacacagttcctcccaccagttacttcaatgggcttcgaacacccagctgtgcaagcctataggctacaacaagcaattgcggcgagcgtcttacaacaaccaatttcccagttgcaacaacaatccttggcacatctaacaatacaaaccatcgcaacgcaacagcaacaacaattcctaccagcactgagccacctagccatggtgaaccctgccgcctacttgcaac

SEQ ID NO: 21657 - DNA, 297 bp, Zea mays
  Clone ID: LIB3152-014-P1-K1-G11
accgattttgagcattcaaaaacactccttgttaagcgcactagcaacaacctagcgggagatgtttaccaatatattagccctccttgcgcttcttgccttatttgtgagcgcaacatatgcgatcataatatccacattgctcacttgcttctagtgccaaaaaatcacattatcttccaccatttttttcaaagatgattttaacacccaactgtttataaacaaaatactataactagcgcattgtgtaagcgttttacaacaaccaatttcccaatttgcatcaacaatcct

SEQ ID NO: 21658 - DNA, 416 bp, Zea mays
  unsure at all n locations
  Clone ID: LIB3152-014-P1-K1-G2
attgaggaccaacagagcaacattagaaagtgtgtaatccaggtagcaacaaataggagcaaccaatggcggaaccaagaataatttttccctcctttatggctcccttgctcttttcttgcaatgtgtttgctaaacgcggacaaattttnccctcaaatggctcacaaagctccctataagcttccccttcttccccccataccttccatcaatgatagcttcagtatgtgaaaacccagctcttcaaccctataggctccaacaagcaatcgcagcaagcaacatacctttatcacccttgtttcaacaatcgccagccctatctttggtgcagtcattggtacaaaccatcagggcacagcagctgcagcaactcgtgctacctgtgatcaaccaagtagctctggcaaacc

SEQ ID NO: 21659 - DNA, 384 bp, Zea mays
  Clone ID: LIB3152-014-P1-K1-G3
attttgagcattcagaaacacaccaagctaagcacattagcaacaacctaacaacaatggctaccaagatattatccctccttgcgcttcttgcgctttttgcgagcgcaacaaatgcgttcattattccacaatgctcacttgctccaagttccattattacacagttcctcccaccagttacttcaatgggcttcgaacacccagctgtgcaagcctataggctacaacaagcaattgcggcgagcgtcttacaacaaccaatttcccagttgcaacaacaatccttggcacatctaacaatacaaaccatcgcaacgcaacagcaacaacaattcctaccagcactgagccacctagccatggtgaacccttgcgcctact

SEQ ID NO: 21660 - DNA, 388 bp, Zea mays
  Clone ID: LIB3152-014-P1-K1-G4
ggcaatcgcagcaggcatcttacctttatcacccttgttcctccaacaatcatcagccctattacagcagttacctttggtgcatttattggcacaaaacatcagggcacaacaactacaacaactcgtgctagcaaaccttgctgcctactctcagcaacagcagttacctttggtgcatttgttggcacaaaacatcagggcacaacaactacaacaactcgtgctagcaaaccttgctgcctactctcagcaacaacagtttctgccattcaaccaactagctgcattgaactctgctgcttatttgcagcaacaacaactactaccattcagccagctagctgctgcctacccccggcaatttcttccattcaaccaactggca

SEQ ID NO: 21661 - DNA, 329 bp, Zea mays
  Clone ID: LIB3152-014-P1-K1-G5
gtcctcgcgctcagtgtcatttgcttttttcggcagcagccatggcgtcggtgcagctgtctgggccgcgggtggtggcggctgcgaaaccggctgcgttgggcgggctcctactgacgccgtcccttgcggtgccaaaggggcggagaaccatggggctcgtggtgagggccgccacggtcgtgtgacctaagtatacatccataaaaccatcgggagacagagtactcgtgaagatcaagacctctgaggctaaatctgatggagggattttacttacagtatcagttcagacaagaccacaaggaggggaaactgttgcggctgga

SEQ ID NO: 21662 - DNA, 175 bp, Zea mays
  Clone ID: LIB3152-014-P1-K1-G6
aaaaaaaaaataagtttaataaaagagaaaaaaaaaaaaaaaggggtgggagaaaaaaaaaaggaggaggaaaaaaaaagtggtaaaaaaaaaaaaaataagaaagaaaaaaaaataaggagaaaaaaaaagagaagaagaaaaaaaagaaatagaaaaaaagaatagatggagg

SEQ ID NO: 21663 - DNA, 356 bp, Zea mays
  Clone ID: LIB3152-014-P1-K1-G7
ttttgagcattcagaaacacaccaatcgaagcacattagcaacaacctaacaacaatggctaccaagatattatccctccttgcgcttcttgcgctttttgcgagcgcaacaaatgcgttcattattccacaatgctcacttgctccaagttccattattacacagttcctcccaccagttacttcaatgggcttcgaacacccagctgtgcaagcctataggctacaacaagcaattgcggcgagcgtcttacaacaaccaatttcccagttgcaacaacaatccttggcacatctaacaatacaaaccatcgcaacgcaacagcaacaacaatttctaccagcactgagccacc

SEQ ID NO: 21664 - DNA, 378 bp, Zea mays
  Clone ID: LIB3152-014-P1-K1-G8
cagaaacacaccaagcgaagcacatttgcaacaacctaacaacaatggctaccaagatattatccctccttgcgcttcttgcgctttttgcgagcgcaacaaatgcgttcattattccacaatgctcacttgctccaagttccattattacacagttcctcccaccagttacttcaatgggcttcgaacacccagctgtgcaagcctataggctacaacaagcaattgcggcgagcgtcttacaacaaccaatttcccagttgcaacaacaatccttggcacatctaacaatacaaaccatcgcaacgcaacagcaacaacaattcctaccagcactgagccacctagccatggtgaaccctgccgcctacttgcaac

SEQ ID NO: 21665 - DNA, 381 bp, Zea mays
  Clone ID: LIB3152-014-P1-K1-G9
agtttgctgagctcattaccaagatcgacaggcggtctggcaaggagcttgagaaggagccaaagttcctgaagaacggtgatgctggtatggtgaagatgataccaaccaagcccatggtggtggagacattctcagcgtatcctcccctcggtaggtttgctgtccgtgacatgaggcagacggttgctgttggagttatcaagagtgtggagaagaaggacccgaccggcgccaaggtgaccaaggcggctgccaagaagaaatgatgcgatcctgcgcctgctttagcaatacctagttttcatcatcacaagttttgtttgtgatcgttgctgttatcgtgtgaactgttgagatctgttagcatgtgcactttta

SEQ ID NO: 21666 - DNA, 402 bp, Zea mays
  unsure at all n locations
  Clone ID: LIB3152-014-P1-K1-H1
gaaacacanccnnnagcgaagctacctatcatctgacttaacaacccaatggctaccaagatatgtagccctccttggcgcttcttggccctttttgtgaagcgcnnaacaaatgcgttcattattnnncacaatgctcactttgctcctagtgccattataccacagnnttcctccgaccagttacttcaatgggcttcgaacacctagctgtgcaagcctacaggctacaacaagcgcttgcggcgagcgtcttacaacaaccaattaaccaattgcaacaacaatccttggcacatctaaccatacaaaccatcgcaacacaacagcaacaacagttcctaccagcactgagccaactagatgtggtgaaccctgtcgcctacttgcaacagcaggtgc

SEQ ID NO: 21667 - DNA, 353 bp, Zea mays
  Clone ID: LIB3152-014-P1-K1-H10
aacccatccatcattttagctgttgatacaaagagaagggaatggccgagataaccctagagccgagtgatcttatggcgcaaacaaacaaaagaatagtgccaaagttcactgaaatcttccccgtggaggacgcgaactacccttacagcgccttcatcgcgtcggtccggaaagacgtgatcaaacactgcaccgaccataaagggatcttccagcccgtgctgccaccggagaagaaggtcccggagctatggttctacacagagctcaaaactaggaccagctccatcacgctcgccatacgcatggacaacctgtacctcgtgggcttcaggaccccgggcgggtgt

SEQ ID NO: 21668 - DNA, 404 bp, Zea mays
  Clone ID: LIB3152-014-P1-K1-H2
cggggcggaccaacccgtccgttttttcccccgtacctttaaccagtggtgtcttcggtatgtgaaaacccaattcttcaaccctataggatccaacaggcaatcgcagctggcatcttacctttatcacccttgttcctccaacaatcatcagccctattacagcagttacctttggtgcatttattggcacaaaacatcagggcacaacaactacaacaacttgtgctagcaaaccttgctgcctactctcagcaacaacagtttcttccattcaaccaactagctgcattgaactctgcttcttatttgcaacaacaacaactaccattcagccagctatctgctgcctacccccagcaatttcttccattcaaccaactgacagctttgaactctcctgc

SEQ ID NO: 21669 - DNA, 333 bp, Zea mays
  Clone ID: LIB3152-014-P1-K1-H3
caacaatggcagccaaaataacctgcgtccttattcgcctgggaaatcccacaaggggggaccctataagacccaaccggccatctcagacgagcatcttacctttatcacccttgctcctacaacaaataattagccttattacagaaattacattttgctgcatttattggcacaaaacatcatggcacaacaacttcaacaacttgagctaccaaaccaagctgtctacttttagaaacaatactttcctcgattcaactaacaagctgtatcttactccgcctcttttttacaacaacaaacaactatctattcaaaacagcttttttc

SEQ ID NO: 21670 - DNA, 386 bp, Zea mays
  Clone ID: LIB3152-014-P1-K1-H4
cggacgcgtgggttcagtcagctagctgctgcctacccccagcaatttcttccattcaaccaactggcagcattgaactctgctgcttatttacaacagcaacagctaccaccattcagccagctagctgatgtgagccctgttgccttcttgacacaacaacagttgttgccgttctacctgcacgctgcgcctaacgctggcaccctcttacaactgcaacaattgctgccattcaaccaacttgctttgacaaacccaacagcgttctaccaacaacccatcattggtggtgccctcttttagattgcttatgagttatagttcaataatgaagttttttggatgatgtttggggcttcccagaaataagaaagtacatttct

SEQ ID NO: 21671 - DNA, 394 bp, Zea mays
  Clone ID: LIB3152-014-P1-K1-H5
gcaacatagaaagcacaatattgttccaattatggcagccaaaatattttgcctcattatgctccttggtctttctgcaagtgctgctacggcgagcattttcccgcaatgctcacaagctcctatagcttcccttcttcccccatacctctcaccagcgatgtcttcagtatgtgaaaatccaattcttctaccctacaggatccaacaggcaatcgcagcaggcatcttacctttatcacccttgttcctccaacaatcatcagccctattacagcagttacctttggtgcatttattggcacaaaacatcagggcacaacaactacaacaactcgtgctagcaaaccttgctgcctactctcagcaacagcagttacctttggtgcatttg

SEQ ID NO: 21672 - DNA, 371 bp, Zea mays
  Clone ID: LIB3152-014-P1-K1-H7
ctccaccctcgagtaatagattagattgctcgcatctttttcttgttcgttcttcgattgcgcacaggaaacgatcttcgtgatcaggccgatctcgcatcagcaaggtcggtaaccacagggagttggttcagcaattgcattggcgcctcgggcttgctcgtcgtagtcggatcgcaagggtcaacttccgccaaatcggaattatctctactcgccgaaagatcgggcacctcagctacatcaattggtatcagatttccaggttgatcggtgagtttatcgagtgtttttttttcctacagtccacaaaaccacataaaaattcaggttagaccttatcccagcacccttttgagcctcacactttc

SEQ ID NO: 21673 - DNA, 379 bp, Zea mays
  Clone ID: LIB3152-014-P1-K1-H8
attgagaccaactagcaacatataatgcacaatagtgtaccaacaatggcagccaaaatattttgcctccttatgctccttggtctttctgcaagtgctgctacggcgaccattttcccgaaatgctcgcaagctcctatagcttcccttcttcccccgtacctctcaccagcggtgtcttcggtatgtgaaaacccaattcttcaaccctacaggatccaacaggcaatcacagctggcatcttacctttatcacccttgttcctccaacaatcatcagccctattacatcagttacctttggtgcatttattggcacaaaacatcagggcacaacaactacaacaacttgtgctagcaaaccttgctgcctaccccc

SEQ ID NO: 21674 - DNA, 362 bp, Zea mays
  Clone ID: LIB3152-014-P1-K1-H9
gggtcttcagaccattagctttatctactccagagcgcagaagaacccgatcgacaccatgagggtgttgctcgttgccctcgctctcctggctctcgctgcgagcgccaccttcacgcatacaagcggcggctgcggctgccagccaccgccgccggttcatctaccgccgccggggcatctgccacctccggttcacctgccacctccggtgcatctcccaccgccggtccacctggcgtcgtcggttcacctgccaccgtcggtccatgtgccgccgccggttcatctgccgtcgccaccatgccactaccctacttaaccggcccgggcttagccttattcccagccacacccatgcc

SEQ ID NO: 21675 - DNA, 390 bp, Zea mays
  Clone ID: LIB3152-015-P1-K1-A1
aaattccggggcggaccaacccgtccgttaaaagcgcccctctccctctttttttttctcttcgccgtccgaagctccgcaccccaatctaatcgacacctcgccgagatgggccgcaagttcttcgtcggtggcaactggaaatgcaatggaaccacagatcaggtcgagaagattgtcaaaaccctgaatgaaggacaggttcccccttcagatgttgtggaggtcgttgtcagccctccttatgtcttccttcctgtggtcaagagccagctgcgccaagagttccatgttgcggctcagaactgctgggttaagaagggaggtgctttcaccggtgaagtcagtgctgagatgctcgtcaaccttggtgttccctgggtcattctt

SEQ ID NO: 21676 - DNA, 374 bp, Zea mays
  Clone ID: LIB3152-015-P1-K1-A10
cccacgcgtccgcaacaagcaacatttaaagtggaatccagtagcaacaatagagcaacaatggagaccaagatattttccctccttatgctccttgctctttctacatgtgttgctaacgcgacaattttccctcaatgctcacaagctcctatagcttccctttttcccccataccttccatcaattatagcttcagtatgtgaaaacccagctcttcaaccatataggcttcaacaagcaatcgcagcaagcaacatacctttatcgcccttgttgtgtcaacaatcgccagccctatctttggtgcagtcattggtacaaaccatcagggcacaacagctgcagcaactcgtgctacctgtgatcaacca

SEQ ID NO: 21677 - DNA, 357 bp, Zea mays
  Clone ID: LIB3152-015-P1-K1-A11
tcttcctgtcagtagtagagtgaggttgttgcagcgagtgggagacaaggggagatggtgaagggagcgcaagggagcgatgcggcggcggcgggcggcgaggtggaggagaacatggcggcgtggctggttgccaagaacaccctcaagatcatgcccttcaagctcccgcccgtcggcccttatgatgtccgcgtgcgcatgaaggcagtggggatttgcggcagcgatgtgcactacctaagggagatgcgcatcgcgcacttcgtggtgaaggagccgatggtgatcgggcacgagtgcgcgggcgtggtcgaggaggtgggcgctcgcgtgacgcacctgtccgtgggcgac

SEQ ID NO: 21678 - DNA, 384 bp, Zea mays
  Clone ID: LIB3152-015-P1-K1-A12
cagaaacacaccaagcgaagcgcactagcaacaacctaacaacaatggctaccaagatattagccctccttgcgcttcttgcccttttagtgagcgcaacaaatgcgttcattattccacagtgctcacttgctcctagtgccattattccacagttcctcccaccagttacttcaatgggcttcgaacatccagccgtgcaagcctacaggctacaactagcgcttgcggcgagcgtcttacaacaaccaattgcccaattgcaacaacaatccttggcacatctaaacctacaaaccatcgcaacgcaacagcaacaacagtttctgccatcactgagccacctagccgtggtgaaccctgtcgcctacttgcaacagcagc

SEQ ID NO: 21679 - DNA, 374 bp, Zea mays
  Clone ID: LIB3152-015-P1-K1-A2
ctggaagctgggctggcgaagctgagttcttttggcttggataggatgtcagatgctcatgtcctaacaagagctgaacagtttgcgaagcaacaaaagattaagatatgggagaactatgtcgagggtgagaatgcttcaaatggatccacacctgaatcgaaacaaaaggaaatcctcaaggttgtcgtcactgaagttcttggtggtgggaagttttatgttcagacagtgggtgaccagagggtggcttcaattcaacagcagcttgcatctttgaaacttaaagatgcaccagtcattggtgcctttaatcctgtgaagggagagatagtcctctcacaatttagccttgacaacttctggaacagagc

SEQ ID NO: 21680 - DNA, 338 bp, Zea mays
  Clone ID: LIB3152-015-P1-K1-A3
cgggaaagaccggggcgggcccaacccgtccggcaacaactactaccattcagccagttagctggtgtgagccctgctaccttcttgatacaaccacagttgttgccgttctacctgcacgctgcgcctaacgctggcaccctcttacaactgcaacaattgctgccattcaaccaacttgctttgacaaacccaacagcgttctaccaacaacccatcattggtggtgccctcttttagattgcttatgagttatagttcaataatgaagttttttggatgatgtttgtggcttcccagaaataagaaagtacatttcttgaaaaaaaaacattttt

SEQ ID NO: 21681 - DNA, 386 bp, Zea mays
  unsure at all n locations
  Clone ID: LIB3152-015-P1-K1-A5
gtggaatacagtagcaacaatagagcaacaatggcggccaagatattttccatccttatgctccttgctctttctgcatgtgttgctaacgcgaccatttttcctcaatactcacaagctcctatagctgcccttcttcccccataccttccatcaatgaccgcttcagtatgtgaaaacccagcccttcaaccctacaggctccaacaagcaatcgcaacaagcaacttacctttatcacccacgcgttcgcccacgcgtncggccgtctgccttctgcgcctccatttcggcctctgtcccttgcaagttcaatctcacctccaaccatgggtaaagagaagtcccacatcaacattggtgttattggccacgttgactctggc

SEQ ID NO: 21682 - DNA, 415 bp, Zea mays
  Clone ID: LIB3152-015-P1-K1-A6
ggaaaaaccggggcggcccaagccgtccgcccacgcgtccgattttgagcatttttttacacaccaagcgaagcacattagcaacaacctaacaacaatggctaccaagatattatccctccttgcgcttcttgcgctttttgcgagcgcaacaaatgcgttcattattccacaatgctcacttgctccaagttccattattacacagttcctcccaccagttacttcaatgggcttcgaacacccagctgtgcaagcctataggctacaacaagcaattgcggcgagcgtcttacaacaaccaatttcccagttgcaacaacaatccttggcacatctaacaatacaaaccatcgcaacgcaacagcaacaacaattcctaccagcactgagccacctagccatggtgaaccct

SEQ ID NO: 21683 - DNA, 216 bp, Zea mays
  unsure at all n locations
  Clone ID: LIB3152-015-P1-K1-A7
cgacccacgcgttcggccatgcgccgncgacgtcgtttattttgaggtgtgggcaggactgatgggctggccggtgggggacgggaaagagctgtttgcacgcgggctgctgggtgtcgagctcggccccgatgacgttccgccgtttgcagcaaagctatactcgtgccttgagtcaattcgggcatcactgtgacattttgaggttctggagga

SEQ ID NO: 21684 - DNA, 381 bp, Zea mays
  Clone ID: LIB3152-015-P1-K1-A8
cagaaacacaccaagcgaagctacctagcaacgacttaacaacaatggctaccaagatattagccctccttgcgcttcttgccctttttgtgagcgcaacaaatgcgttcattattccacaatgctcacttgctcctagtgccattataccacagttcctccgaccagttacttcaatgggcttcgaacacctagctgtgcaagcctacaggctacaacaagcgcttgcggcgagcgtcttacaacaaccaattaaccaattgcaacaacaatccttggcacatctaaccatacaaaccatcgcaacacaacagcaacaacagttcctaccagcactgagccaactagatgtggtgaaccctgtcgcctacttgcaacagc

SEQ ID NO: 21685 - DNA, 349 bp, Zea mays
  Clone ID: LIB3152-015-P1-K1-A9
aagtaattaacagaaaatatattttatcattgaaaatgagttccgttgttgggggtgctactggtagggagaataagacatcatggcctgaggtggtgggcatgtccatcaaggaggcaagagagatcattcttaaagacatgcccaatgctaacattcaagttctaccggttggctcgcttgtgacccaggactttcgccctgatcgtgttcgcatcttcgttgatattgttgcccagactccaacagttggctgacaaggagatgccttatctatagtccaaataaacaaagcctacttttatgtatcatggctaataaatcctacatttcttggttattcttgatt

SEQ ID NO: 21686 - DNA, 371 bp, Zea mays
  Clone ID: LIB3152-015-P1-K1-B1
gaaagaccggggcggaccacacccttcgggcccaactagcaacatacaaggcacattattgtaccaacaatggcagctaaaatattttgcctccttatgctccttggtctttctgcaagtgctgctacagcgaccattttcccacaatgctcacaagctcctatagcttcccttcttcccccgtacctctcaccaacggtgtcttcggtatgtgaaaacccaattctataactcctacaggatccaacaggcaatctcagatggcattttacctttatcaccctagaaccatctactatcatgaaacctattaccgtagttgcttttggtgcatctatgggcacagaacatcaacgcccaacaccttcgat

SEQ ID NO: 21687 - DNA, 379 bp, Zea mays
  Clone ID: LIB3152-015-P1-K1-B10
gtggagtcttcagacaccatcgactacgtcaaggccaagatccaggacaaggagggcattcccccagaccagcagcggctcatctttgctggaaagcagcttgaggacgggcgcacgctggccgactacaacatccagaaggagagcaccctccacttggtgctgcgcctcaggggaggcatgcagatcttcgtgaagaccctgactggcaagactatcaccctcgaggtggagtcttcagacaccatcgacaacgtcaaggccaagatccaggacaaggagggcatcccaccggaccagcagcgtttgatcttcgctggcaagcagctggaggatggccgcacccttgcggattacaacatccagaaagagagcaccc

SEQ ID NO: 21688 - DNA, 381 bp, Zea mays
  Clone ID: LIB3152-015-P1-K1-B11
ttgagaccaactagcaacatagaaagcacaatagtgtaccaacaatggcagctaaaatattttgcctccttatgctccttggtctttctgcaagtgctgctacggcgaccattttcccacaatgctcacaagctcctatagcttcccttcttcccccgtacctctcaccaacggtgtcttcggtatgtgaaaacccaattcttcaaccctacaggatccaacaggcaatcgcagctggcatcttacctttatcacccttgttcctccaacaatcatcagccctattacagcagttacctttggtgcatttattggcacaaaacatcagggcacaacaactacaacaacttgtgctagcaaaccttgctgcctactctcagc

SEQ ID NO: 21689 - DNA, 376 bp, Zea mays
  Clone ID: LIB3152-015-P1-K1-B12
tgacagatcagcaaagcggcagtgcgtagagaggatcgtcgaacagaacagcatgaagatggtcatcgttctcgtcgtgtgcctggctctgtcagctgccagcgcctctgcaatgcagatgccctgcccctgcgcggggctgcagggcttgtacggcgctggcgccggcctgacgacgatgatgggcgccggcgggctgtacccctacgcggagtacctgaggcagccgcagtgcagcccgctggcggcggcgccctactacgccgggtgtgggcagacgagcgccatgtaccagccgctccggcaacagtgctgccagcagcagatgaggatgatggacgtgcagtccgtcgcgcagcagctgcagatgatgatg

SEQ ID NO: 21690 - DNA, 380 bp, Zea mays
  Clone ID: LIB3152-015-P1-K1-B2
caacaagcaacatagaaagtggaatccagtagcaacaatagagcaacaatggcgaccaagatattttccctccttatgctccttgctctttctgcatgtgttgctaacgcgacaattttccctcaatgctcacaagctcctatagcttcccttcttcccccataccttccatcaatgatagcttcagtatgtgaaaacccagctcttcaaccctataggctccaacaagcaatcgcagcaagcaacatacctttatcacccttgtttcaacaatcgccagccctatctttggtgcagtcattggtacaaaccatcagggcacagcagctgcagcaactcgtgctacctgtgatcaaccaagtagctctggcaaacctttc

SEQ ID NO: 21691 - DNA, 385 bp, Zea mays
  Clone ID: LIB3152-015-P1-K1-B3
gcacaatagtgtaccaacaatggcagccaaaatattttgcttccttatgctccttggtctttctgcaagtgttgctaccgcaaccattttcccacaatgctcacaagctcctatagcttcccttcttcccccatacctctcaccagcggtgtcttcaatgtgtgaaaacccaattgttcaaccctacaggatccaacaggcaatcgcaacaggcatcttaccattatcacccttgttcctccaacaaccgtcagccctattacagcagttacctttggtccatttggtggcacaaaacatcagggcacaacaactacaacaacttgtgctagcaaaccttgctgcatactctcagcaacatcagtttcttccattcaaccaactg

SEQ ID NO: 21692 - DNA, 384 bp, Zea mays
  Clone ID: LIB3152-015-P1-K1-B4
ttagcaacatagaaagcacaatagtgtaccaacaatggcagctaaaatattttgcctccttatgctccttggtctttctgcaagtgctgctacggcgaccattttcccacaatgctcacaagctcctatagcttcccttcttcccccgtacctctcaccaacggtgtcttcggtatgtgaaaacccaattcttcaaccctacaggatccaacaggcaatcgcagctggcatcttacctttatcacccttgttcctccaacaatcatcagccctattacagcagttacctttggtgcatttattggcacaaaacatcagggcacaacaactacaacaacttgtgctagcaaaccttgctgcctactctcagcaacaagcagttct

SEQ ID NO: 21693 - DNA, 383 bp, Zea mays
  Clone ID: LIB3152-015-P1-K1-B5
ctagcaacatagaaagcacaatagtgtaccaacaatggcagctaaaatattttgcctccttatgctccttggtctttctgcaagtgctgctacggcgaccattttcccacaatgctcacaagctcctatagcttcccttcttcccccgtacctctcaccaacggtgtcttcggtatgtgaaaacccaattcttcaaccctacaggatccaacaggcaatcgcagctggcatcttacctttatcacccttgttcctccaacaatcatcagccctattacagcagttacctttggtgcatttattggcacaaaacatcagggcacaacaactacaacaacttgtgctagcaaaccttgctgcctactctcagcaacagcaagttc

SEQ ID NO: 21694 - DNA, 374 bp, Zea mays
  Clone ID: LIB3152-015-P1-K1-B6
ctctgctgcttatttgcaacaacaattaccattcagccagctagttgctgcctacccccagcaatttcttccattcaaccaactagcagcattgaactctgctgcttatttacagcagcaacaactactaccattcagccagctagctgatgtgagccctgctgccttcttgacacaacaacagttgttgccgttctacctgcacgctatgcctaacgctggcaccctcttacaactgcaacaattgctgccattcaaccaacttgctttgacaaactcaacagtgttctaccaacaacccatcattggtggtgccctcttttagattgcttatgagttatagttcaataatgaaagttttttggatgatgttt

SEQ ID NO: 21695 - DNA, 383 bp, Zea mays
  Clone ID: LIB3152-015-P1-K1-B7
ataccaactagcaacatacatagtgaagtacactagcaacatcttagcaccaatgggagccaagatttttgccctccttgccctccttgctctttcagcaagcgctgctacctcgacttttattccacaatgctcacaacaatacctctctccggcgacagccgtgggatttcaatacccaactatacaatcctacatggtacaagaggccatccaagcaagcatcttacggtcattagcattaaccctccaacaaccatatgctctattgcaacagccatccttagtgcatctgtatctccaaagaatcgcggcacaacaactacaacaacagttgctaccaacaatcaatcaagtagttgcagcgaaccttgctgcttacc

SEQ ID NO: 21696 - DNA, 338 bp, Zea mays
  Clone ID: LIB3152-015-P1-K1-B8
attttcagcattcagaaacacaccaagcgaagcgcactagcaacaacctaacaacaatggctaccaagatattagccctccttgcgcttcttgcccttttagtgagcgcaacaaatgcgttcattattccacagtgctcacttgctcctagtgccattattccacagttcctcccaccagttacttcaatgggcttcgaacatccagccgtgcaagcctacaggctacaactagcgcttgcggcgagcgtcttacaacaaccaattgcccaattgcaacaacaatccttggcacatctaaacctacaaaccatcgcaacgcaacagcaacaacagttt

SEQ ID NO: 21697 - DNA, 381 bp, Zea mays
  Clone ID: LIB3152-015-P1-K1-B9
aacacaccaagcgaagcgcactagcaacaacctaacaacaatggctaccaagatattagccctccttgcgcttcttgcccttttagtgagcgcaacaaatgcgttcattattccacagtgctcacttgctcctagtgccattattccacagttcctcccaccagttacttcaatgggcttcgaacatccagccgtgcaagcctacaggctacaactagcgcttgcggcgagcgtcttacaacaaccaattgcccaattgcaacaacaatccttggcacatctaaacctacaaaccatcgcaacgcaacagcaacaacagtttctgccatcactgagccacctagccgtggtgaaccctgtcgcctacttgcaacagcagct

SEQ ID NO: 21698 - DNA, 405 bp, Zea mays
  Clone ID: LIB3152-015-P1-K1-C1
cggggcggaccaacgcgtccgaacagtttctgccagcgctcagtcaactagccatggtgaaccctgccgcctacctacaacagcaacaactgctttcatctagccctctcgttgtgggtaatgcacctacatacctgcaacaacaattgctgcaacagattgtaccagctctgactcagctagctgtggcaaaccctgctgcctacttgcaacagctgcttccattcaaccaactgactgtgtcgaactctgctgcgtacctacaacagcgacaacagttacttaatccactagcagtgcctaacccattggtcactgccttcctacagcagcaacaattgctaccatacagccagttctctttgatgaaccctgccttgtcgtggcagcaacccatcgttggag

SEQ ID NO: 21699 - DNA, 383 bp, Zea mays
  Clone ID: LIB3152-015-P1-K1-C10
gcgcgtacgtcggccgtgaccagatcggctgagccaaggccatggcggaaccggccctcctcccgccggaccccttcgcggacctccccttccccgaatttcaggcgcccatcgacggcgacagcttcgcgcttgaggacttcgatctggaggatctggacctggacgtggacttcgacctcgacctcttcggctcggacgggcaaccctcgcaaccgcccccgctcgcgacctcgtcctcctcggccgggtctccggttggaggctcgtcctcttccggtgccgtcggggacggcggagggctgaggaatgaggagtcttcggagtcgtcttcgaggagcgcgagcggcacggatggcagcggcaaggggaagggggaggag

SEQ ID NO: 21700 - DNA, 358 bp, Zea mays
  Clone ID: LIB3152-015-P1-K1-C11
tgcctgtgcacttctccatcaccattactgggtcttcagaccattagctggatggtactccagagcgcagaagaacccgatcgacaccatgagggtgttgctcgttgccctcgctctcctggctctcgctgcgagcgccacctccacgcatacaagcggcggctgcggctgccagccaccgccgccggttcatctaccgccgccggtgcatctgccacctccggttcacctgccacctccggtgcatctcccaccgccggtccacctgccgccgccggtccacctgccaccgccggtccatgtgccgccgccggttcatctgccgtcgccaccatgccactaccctacttaaccgccc

SEQ ID NO: 21701 - DNA, 380 bp, Zea mays
  Clone ID: LIB3152-015-P1-K1-C12
caaagcggcagtgcgtagagtggtttttcgaacagaacagcatgaagatgggcggggttctcgtcgtgtgcctggctctgtcagctgccagcgcctctgcaatgcagatgccctgcccctgcgcggggctgcagggcttgtacggcgctggcgccggcctgacgacgatgatgggcgccggcgggctgtacccctacgcggagtacctgaggcagccgcagtgcagcccgctggcggcggcgccctactacgccgggtgtgggcagacgagcgccatgtaccagccgctccggcaacagtgctgccagcagcagatgaggatgatggacgtgcagtccgtcgcgcagcaactgcagatgatgatgcaacttgagcgtgcc

SEQ ID NO: 21702 - DNA, 386 bp, Zea mays
  Clone ID: LIB3152-015-P1-K1-C2
gaccaacaagcaacatagaaagtggaatccagtagcaacaatagagcaacaatggagaccaagatattttccctccttatgctccttgctctttctacatgtgttgctaacgcgacaattttccctcaatgctcacaagctcctatagcttccctttttcccccataccttccatcaattatagcttcagtatgtgaaaacccagctcttcaaccatataggcttcaacaagcaatcgcagcaagcaacatacctttatcgcccttgttgtgtcaacaatcgccagccctatctttggtgcagtcattggtacaaaccatcagggcacaacagctgcagcaactcgtgctacctgtgatcaaccaagtagctctggcaaacctttc

SEQ ID NO: 21703 - DNA, 383 bp, Zea mays
  Clone ID: LIB3152-015-P1-K1-C3
aacacaccaagcgaagcacattagcaacaacctaacaacaatggctaccaagatattatccctccttgcgcttcttgcgctttttgcgagcgcaacaaatgcgttcattattccacaatgctcacttgctccaagttccattattacacagttcctcccaccagttacttcaatgggcttcgaacacccagctgtgcaagcctataggctacaacaagcaattgcggcgagcgtcttacaacaaccaatttcccagttgcaacaacaatccttggcacatctaacaatacaaaccatcgcaacgcaacagcaacaacaattcctaccagcactgagccacctagccatggtgaaccctgccgcctacttgcaacagcagttgc

SEQ ID NO: 21704 - DNA, 386 bp, Zea mays
  Clone ID: LIB3152-015-P1-K1-C4
gcaacatagaaagcacaatagtgtaccaacaatggcagctaaaatattttgcctccttatgctccttggtctttctgcaagtgctgctacggcgaccattttcccacaatgctcacaagctcctatagcttcccttcttcccccgtacctctcaccaacggtgtcttcggtatgtgaaaacccaattcttcaaccctacaggatccaacaggcaatcgcagctggcatcttacctttatcacccttgttcctccaacaatcatcagccctattacagcagttacctttggtgcatttattggcacaaaacatcagggcacaacaactacaacaacttgtgctagcaaaccttgctgcctactctcagcaacagcagtttcttccat

SEQ ID NO: 21705 - DNA, 388 bp, Zea mays
  Clone ID: LIB3152-015-P1-K1-C5
atattttcagcattcagaaacacaccaagcgaagcgcactagcaacaacctaacaacaatggctaccaagatattagccctccttgcgcttcttgcccttttagtgagcgcaacaaatgcgttcattattccacagtgctcacttgctcctagtgccattattccacagttcctcccaccagttacttcaatgggcttcgaacatccagccgtgcaagcctacaggctacaactagcgcttgcggcgagcgtcttacaacaaccaattgcccaattgcaacaacaatccttggcacatctaaacctacaaaccatcgcaacgcaacagcaacaacagtttctgccatcactgagccacctagccgtggtgaaccctgtcgcctacttg

SEQ ID NO: 21706 - DNA, 377 bp, Zea mays
  Clone ID: LIB3152-015-P1-K1-C6
gcccgttccaagttggttgtggctggtggggctcgggcgaaggcctgggcctctttagacctgaagcggcaggcatggcgtgaggctggcttcacagagcagcgatcactgcccgccggtccacctgccgccgccggtccacctgccaccgccggtccatgtgccgccgccggttcatctgccgccgccaccatgccactaccctactcaaccgccccggcctcagcctcatccccagccacacccatgcccgtgccaacagccgcatccaagcccgtgccagctgcagggaacctgcggcgttggcagcaccccgatcctgggccagtgcgtcgagttcctgaggcatcagtgcagcccgacggcgacgccctact

SEQ ID NO: 21707 - DNA, 383 bp, Zea mays
  Clone ID: LIB3152-015-P1-K1-C7
aatattttcagcattcagaaacacaccaagcgaagcgcactagcaacaacctaacaacaatggctaccaagatattagccctccttgcgcttcttgcccttttagtgagcgcaacaaatgcgttcattattccacagtgctcacttgctcctagtgccattattccacagttcctcccaccagttacttcaatgggcttcgaacatccagccgtgcaagcctacaggctacaactagcgcttgcggcgagcgtcttacaacaaccaattgcccaattgcaacaacaatccttggcacatctaaacctacaaaccatcgcaacgcaacagcaacaacagtttctgccatcactgagccacctagccgtggtgaaccctgtcgcc

SEQ ID NO: 21708 - DNA, 382 bp, Zea mays
  Clone ID: LIB3152-015-P1-K1-C8
acgccggcctcagcctcatccccagccacacccatgcccgtgccaacagccgcatccaagcccgtgccagctgcagggaacctgcggcgttggcagcaccccgatcctgggccagtgcgtcgagttcctgaggcatcagtgcagcccgacggcgacgccctactgctcgcctcagtgccagtcgttgcggcagcagtgttgccagcagctcaggcaggtggagccgcagcaccggtaccaggcgatcttcggcttggtcctccagtccatcctgcagcagcagccgcaaagcggccaggtcgcggggctgttggcggcgcagatagcgcagcaactgacggcgatgtgcggcctgcagcagccgactccatgcccctacgct

SEQ ID NO: 21709 - DNA, 381 bp, Zea mays
  Clone ID: LIB3152-015-P1-K1-C9
gtcagcctagcaattagctcatcgactccagattggagaactcgacaccatgaaggtgctgatcgttgcccttgctctcctggcgctcgctgcgagcgccgcctccagtacaagcggcggctgtggctgccagacaccaccgtttcatctaccgcctccgttctatatgccgcctccgttctatctgccgccgcagcagcagccgcagccatggcaataccccactcaaccaccgcagctaagcccgtgccagcagttcggatcctgcggcgtcggcagcgtcggcagcccgttcctgggccagtgcgtcgagttcctgaggcaccagtgcagcccggcggcgacgccctacggctcgccacagtgccaggcgctgcagca

SEQ ID NO: 21710 - DNA, 365 bp, Zea mays
  Clone ID: LIB3152-015-P1-K1-D1
aaaaccgggcgcccagccttccaagggggcctggaaagatccatgcttgtggacatgatgctcacacaacgatgcttgttggggcagctaaattgcttcatgctcggaaggatgatctgaagggtaccgtgaagcttgtcttccagccaggagaagaaggctacggcggcgcttaccatgttctcagagaaggtgtcctggatgacgtgtctgccattttcggcttgcatgtggatccaggacttcctgtaggcaccgtttcgtccaggccagggccgtttctagcagcagcaggtagatttctggtgacggtcactggaaaaggcagacatgcttgatggtcacacgatgctgtggatcccatt

SEQ ID NO: 21711 - DNA, 52 bp, Zea mays
  unsure at all n locations
  Clone ID: LIB3152-015-P1-K1-D10
cggaannncccgggnncgacccacgccgtccgcannacatcatccaacaaca

SEQ ID NO: 21712 - DNA, 380 bp, Zea mays; identical to SEQ ID NO: 18616
  Clone ID: LIB3152-015-P1-K1-D11

SEQ ID NO: 21713 - DNA, 372 bp, Zea mays
  Clone ID: LIB3152-015-P1-K1-D12
aaacaagtagcgacagctcgacatttatttgtgagagtgatccggcgctgagaagagatggctaagatcgccgcagccgccgcggcggcggcggcgctgtgcttcgcggccctggtggccgtggccgtctgccaaggcgaggtcgagcggcagaggctcagggacctgcagtgctggcaggaggtccaggagagcccgctcgacgcgtgccgccaggtcctcgaccggcagctaaccggcggcggcgtcggcggcccgttccggtggggcaccgggctccggatgcggtgctgccagcagctccaggacgtgagccgcgagtgccgctgcgccgccatccggagcatggtcaggggctacgaggaggccatg

SEQ ID NO: 21714 - DNA, 384 bp, Zea mays
  Clone ID: LIB3152-015-P1-K1-D2
aacacaccaagcgaagcacattagcaacaacctaacaacaatggctaccaagatattatccctccttgcgcttcttgcgctttttgcgagcgcaacaaatgcgttcattattccacaatgctcacttgctccaagttccattattacacagttcctcccaccagttacttcaatgggcttcgaacacccagctgtgcaagcctataggctacaacaagcaattgcggcgagcgtcttacaacaaccaatttcccagttgcaacaacaatccttggcacatctaacaatacaaaccatcgcaacgcaacagcaacaacaattcctaccagcactgagccacctagccatggtgaaccctgccgcctacttgcaacagcagttgct

SEQ ID NO: 21715 - DNA, 383 bp, Zea mays
  Clone ID: LIB3152-015-P1-K1-D3
gcaccataaaaggtggaatacagtagcaacaatagagcaacaatggcggccaagatattttccatccttatgctccttgctctttctgcatgtgttgctaacgcgaccatttttcctcaatactcacaagctcctatagctgcccttcttcccccataccttccatcaatgaccgcttcagtatgtgaaaacccagcccttcaaccctacaggctccaacaagcaatcgcaacaagcaacttacctttatcacccctgttctttcaacaatcgccagccctatctttggtgcagtcattggtacaaaccatcagggcacaacagctgcagcaactcgtgctaccagtgatcagccaagtagctctggcaaacctttctcccta

SEQ ID NO: 21716 - DNA, 380 bp, Zea mays
  Clone ID: LIB3152-015-P1-K1-D4
gcaattagctcatcgactccagattggagaactcgacaccatgaaggtgctgatcgttgcccttgctctcctggcgctcgctgcgagcgccgcctccagtacaagcggcggctgtggctgccagacaccaccgtttcatctaccgcctccgttctatatgccgcctccgttctatctgccgccgcagcagcagccgcagccatggcaataccccactcaaccaccgcagctaagcccgtgccagcagttcggatcctgcggcgtcggcagcgtcggcagcccgttcctgggccagtgcgtcgagttcctgaggcaccagtgcagcccggcggcgacgccctacggctcgccacagtgccaggcgctgcagcagcagtgct

SEQ ID NO: 21717 - DNA, 374 bp, Zea mays
  unsure at all n locations
  Clone ID: LIB3152-015-P1-K1-D5
cggtcgcccagcgtccggagcattcagaaacacaccaagcgatgcacattagcaacaacctaacaacaatggctaccaagatattatccctccttgcgcttcttgcgctttttgcgagcgcaacaaatgcgttcattattccacaatgctacttgcttaagttccattanacacagttcctcccaccagttacttcaatgggcttcgaacacccagctgtgcaagcctataggctacaacaagcaattgcggcgagcgtcttacaacaaccaatttcccagttgcaacaacaatccttggcacatctaacaatacaaaccatcgcaacgcaacagcaacaacaattcctaccagcactgagccacctagccatg

SEQ ID NO: 21718 - DNA, 384 bp, Zea mays
  Clone ID: LIB3152-015-P1-K1-D6
caactagcaacatagaaagcacaatagtgtaccaacaatggcagccaaaatattttgcttccttatgctccttggtctttctgcaagtgctgctaccgcaaccattttcccacaatgctcacaagctcctatagcttcctttcttcccccatacctctcaccagcggtgtcttcagtatgtgaaaacccaattcttcaaccctacaggatccaacaggcaatcgcagcaggcatcttacctttatcacccttgttcctccaacaaccgtcagccctattacagcagttacctttggtgcatttgttggcacaaaacatcaaggcacaacaactacaacaacttgtgctaggaaaccttgctgcctactctcagcaacagcagtt

SEQ ID NO: 21719 - DNA, 382 bp, Zea mays
  Clone ID: LIB3152-015-P1-K1-D7
gcaacatagaaagcacaatagtgtaccaacaatggcagccaaaatattttgcttccttatgctccttggtctttctgcaagtgctgctaccgcaaccattttcccacaatgctcacaagctcctatagcttcctttcttcccccatacctctcaccagcggtgtcttcagtatgtgaaaacccaattcttcaaccctacaggatccaacaggcaatcgcagcaggcatcttacctttatcacccttgttcctccaacaaccgtcagccctattacagcagttacctttggtgcatttgttggcacaaaacatcaaggcacaacaactacaacaacttgtgctaggaaaccttgctgcctactctcagcaacagcagtttctt

SEQ ID NO: 21720 - DNA, 381 bp, Zea mays
  Clone ID: LIB3152-015-P1-K1-D8
cgtgaacccgccgccgacgcagcagcaggagacgcgccaaggagagcccgcaaggaggcgactatgagggccaagtggaagaagaagcgcatgaggaggctgaagaggaagcgccgaaagatgaggcagagatccaagtaggctgatggggattgtggatggtggtgtcggcatagttgtgttacgtttcttcgatgcgtgagttcatggagagatgtcacatcctagttcgtcgtcaccgtttgccatgggtccaatggctcgtcttggaaacctgcacttcagtaggccatctatcgtggtttctagctatatccagagttttgtgctaagacaaatcagtcagtcgttttgtgaacctattatgatggagctttattt

SEQ ID NO: 21721 - DNA, 378 bp, Zea mays
  unsure at all n locations
  Clone ID: LIB3152-015-P1-K1-D9
aaccaattggccgcactgaaccccgctgcttatttgcagcagcaaatactactaccatttagccagctagctgcagcaagccgtgcttccttcttgacgcagcaactgttgctgtcttantaccancattttgcgggtaaccccgcaacccttttacaactacaacaattgttgccctttgtccaacttgctttgacaaacccagcagtcttctaccaacaacacatcattggtggtgcccttttttagattgcttattagttgtaattcaataataaagtgttttggatgatgtatgtggccaaccataaatatgaagttacattttcaatattataaataaaaaaaattttagggctgtcgttttaaaagatccaa

SEQ ID NO: 21722 - DNA, 412 bp, Zea mays
  Clone ID: LIB3152-015-P1-K1-E1
gggggaaaaatcgggggggacacaccgcctggcggaaatgcactaccaccaacctatcatcaatggctaccaagatattagccctccttgcgcttcttgcccttttagtgagcgcaacaaatgcgttcattattccacagtgctcacttgctcctagtgccattattccacagttcctcccaccagttacttcaatgggcttcgaacatccagccgtgcaagcctacaggctacaactagcgcttgcggcgagcgtcttacaacaaccaattgcccaattgcaacaacaattcttggcacatctaaacctacaaaccatcgcaacgcaacagcaacaacagtttctgccatcactgagccacctagccgtggtgaaccctgtcgcctactttcaacagcagctacttgcatc

SEQ ID NO: 21723 - DNA, 381 bp, Zea mays
  Clone ID: LIB3152-015-P1-K1-E11
tgagaccaacaagcaacatagaaagtggaatccagtagcaacaatagagcaacaatggcgaccaagatattttccctccttatgctccttgctctttctgcatgtgttgctaacgcgacaattttccctcaatgctcacaagctcctatagcttcccttcttcccccataccttccatcaatgatagcttcagtatgtgaaaacccagctcttcaaccctataggctccaacaagcaatcgcagcaagcaacatacctttatcacccttgtttcaacaatcgccagccctatctttggtgcagtcattggtacaaaccatcagggcacagcagctgcagcaactcgtgctacctgtgatcaaccaagtagctctggcaaac

SEQ ID NO: 21724 - DNA, 373 bp, Zea mays
  Clone ID: LIB3152-015-P1-K1-E12
gcaacatagaaagtggaatccagtttcaacaatagagcaacaatggagaccaagatattttccctccttatgctccttgctctttctacatgtgttgctaacgcgacaattttccctcaatgctcacaagctcctatagcttccctttttcccccataccttgcatcaattatagcttcagtatgtgaaaacccagctcttcaaccatataggcttcaacaagcaatcgcagcaagcaacatacctttatcgcccttgttgtgtcaacaatcgccagccctatctttggtgcagtcattggtacaaaccatcatggcacaacagctgcagcaactcgtgctacctgtgatcaaccaagtagctctggcaaacc

SEQ ID NO: 21725 - DNA, 383 bp, Zea mays
  Clone ID: LIB3152-015-P1-K1-E2
attatttagaccaactagcaacatagaaagcacaatagtgtaccaacaatggcagccaaaatattttgcctccttatgctccttggtatttctgcaagtgctgctacggcgaccattttcccgcaatgctcacaagctcctatagcttcccttcttcccccgtacctctcaccagcggtgtcttcggtatgtgaaaacccaattcttcaaccctacaggatccaacaggcaatcgcagctggcatcttacctttatcacccttgttcctccaacaatcatcagccctattacagcagttacctttggtgcatttattggcacaaaacatcagggcacaacaactacaacaacttgtgctagcaaaccttgctgcctactctca

SEQ ID NO: 21726 - DNA, 383 bp, Zea mays
  Clone ID: LIB3152-015-P1-K1-E3
tttacaccttcgaccacacagaggagtcgcccgttggtccgatgagatttaccaacagaccctggcaagacaagatgtgtgtgaattgtgcgtcgataaacatcctatctgtcaagattgcatgctcggatatcgacttccccatccaagtctatggcaccgttgttgccagggactgcatcgactacaagtgtgtttacctcttccgccgagataatgaccattgccaactcatcagctctaatgaagaatcattgatcttgactggcccaaaacggggacttgcattgtggtacggtgctgattatgttcagactgatctctgggtcaaggatcgtcaagggcattgcaaacaattcagtaaggggatcgtgaggatccca

SEQ ID NO: 21727 - DNA, 381 bp, Zea mays
  Clone ID: LIB3152-015-P1-K1-E4
aagaaaaccggaagtgcgtaaaggggatcgtcgaacaaaacaacatgaaaatggtcatcgttctcgtcgtgtgcctggctctgtcagctgccagcgcctctgcaatgcagatgccctgcccctgcgcggggctgcagggcttgtacggcgctggcgccggcctgacgacgatgatgggcgccggcgggctgtacccctacgcggagtacctgaggcagccgcagtgcagcccgctggcggcggcgccctactacgccgggtgtgggcagacgagcgccatgtaccagccgctccggcaacagtgctgccagcagcagatgaggatgatggacgtgcagtccgtcgcgcagcagctgcagatgatgatgcagcttgagcgtg

SEQ ID NO: 21728 - DNA, 385 bp, Zea mays
  Clone ID: LIB3152-015-P1-K1-E5
cggacgcgtgggtgggtcttcagaccattagctttatctactccagagcgcagaagaacccgatcgacaccatgagggtgttgctcgttgccctcgctctcctggctctcgctgcgagcgccacctccacgcatacaagcggcggctgcggctgccagccaccgccgccggttcatctaccgccgccggtgcatctgccacctccggttcacctgccacctccggtgcatctcccaccgccggtccacctgccgccgccggtccacctgccaccgccggtccatgtgccgccgccggttcatctgccgccgccaccatgccactaccctactcaaccgccccggcctcagcctcatccccagccacacccatgcccgtgccaaca

SEQ ID NO: 21729 - DNA, 424 bp, Zea mays
  unsure at all n locations
  Clone ID: LIB3152-015-P1-K1-E6
cgggtccgaacccacgccgnntccggcagagnttgttctagcccaaaacatgatgctaatatgctagcaggcatttgcagattcgagttgggagaaaaaaccaaagtcntttgcaagcactttgtagagacccgaggattcggcaaaccaggactccaaaaaggagcagggactcatagatattgaggatcccacaagccaagatgctgcaaaagagccaaatcaaagtacaagtgaccaatctccttttgagcaattagctcttccagcaccaccagtgtcaaatggcgcagcaacaaaatctgaccttggcattgatcttctgagctgggatgatacccctgctacagcacaaaatgcactagctcttgttcctgtcacagatcctattgctgactcgacttcatcgaatcaaaatgcacta

SEQ ID NO: 21730 - DNA, 380 bp, Zea mays
  Clone ID: LIB3152-015-P1-K1-E7
ggaatccagtagcaacaatagagcaacaatggcgaccaagatattttccctccttatgctccttgctctttctgcatgtgttgctaacgcgacaattttccctcaatgctcacaagctcctatagcttcccttcttcccccataccttccatcaatgatagcttcagtatgtgaaaacccagctcttcaaccctataggctccaacaagcaatcgcagcaagcaacatacctttatcacccttgtttcaacaatcgccagccctatctttggtgcagtcattggtacaaaccatcagggcacagcagctgcagcaactcgtgctacctgtgatcaaccaagtagctctggcaaacctttctccctactctcagcaacaac

SEQ ID NO: 21731 - DNA, 382 bp, Zea mays
  Clone ID: LIB3152-015-P1-K1-E8
cagaaacacaccaagcgaagcgcactagcaacaacctaacaacaatggctaccaagatattatccctccttgcgcttcttgcgctttttgcgagcgcaacaaatgcgtccattattccacaatgctcacttgctcctagttccattattccacagttcctcccaccagttacttcaatggccttcgaacacccagctgtgcaagcctataggctacaacaagcgattgcggcgagcgtcttacaacaaccaattgcccaattgcaacaacaatccttggcacatctaacaatacaaaccatcgcaacgcaacagcaacaacagtttctaccagcactgagccacctagccatggtgaaccctgtcgcctacttgcaacagca

SEQ ID NO: 21732 - DNA, 178 bp, Zea mays
  unsure at all n locations
  Clone ID: LIB3152-015-P1-K1-F1
cgcaaattgcaccaagaaatccatcgagaggccgncgacaggggaattaatggcgtcgtcgtctagcagcagccaccgccgcctcatcctcgcagccgccgtcctgctctccgtgctcgcggctgccagcgccagcgccgggacctcctgcgtgccggggtgggccatcccgcacaac

SEQ ID NO: 21733 - DNA, 380 bp, Zea mays
  Clone ID: LIB3152-015-P1-K1-F10
gcattcagaaacacaccaagcgaagcgcactagcaacaacctaacaacaatgggtaccaagatattatccctccttgcgcttcttgcgctttttgcgagcgcaacaaatgcgtccattattccacaatgctcacttgctcctagttccattattccacagttcctcccaccagttacttcaatggccttcgaacacccagctgtgcaagcctataggctacaacaagcgattgcggcgagcgtcttacaacaaccaattgcccaattgcaacaacaatccttggcacatctaacaatacaaaccatcgcaacgcaacagcaacaacagttcctaccagcactgagccacctagccatggtgaaccctgtcgcctacttgc

SEQ ID NO: 21734 - DNA, 455 bp, Zea mays
  unsure at all n locations
  Clone ID: LIB3152-015-P1-K1-F11
gaacggaannncccggagtcgacccacgccgtccgcaaagtaggcanngtgcgtagagatggatctgtcgaacacgaacccagcatgaagatgggtcgatgcgttctctgtcgtgtggcctgnngctctgtcagctgcnncagcgcctctgcaatgctagatgcccctgcctcctgcgccggggnctgacagggacttgtaccgtgcgcttggcgctcggcctgacgaccgatgattgggctgtccggcgggctgtaccccctactgcggagtactctgaggggcagccgcagtgcagcccgctggcggcggcgccctactacgccgggtgtgggcagacgagcgccatgtaccagccgctccggcaacagtgctgccagcagcagatgaggatgatggacgtgcagtccgtcgcgcaacagctgcaaatgatgatgcagcttgagcgtgccgct

SEQ ID NO: 21735 - DNA, 263 bp, Zea mays
  Clone ID: LIB3152-015-P1-K1-F12
accgccaatccgggcgacccacgcgtcagaaagggaatccatacaacaatgacactggaccaaatatttcctcttactccttgctcttctgatggtgtaacgcgacaatttcctaatgctacgcttatcttccttttcccataccttcaaagatgtcagatgtgaaaacccactttaaccctatagctcaacagcatgagagacatcctataccctgtcaacaatcgcgcctatttgggcagcatgtcaaaccatagccacac

SEQ ID NO: 21736 - DNA, 386 bp, Zea mays
  Clone ID: LIB3152-015-P1-K1-F2
gagaccaacaagcaacatagaaagtggaatccagtagcaacaatagagcaacaatggagaccaagatattttccctccttatgctccttgctctttctacatgtgttgctaacgcgacaattttccctcaatgctcacaagctcctatagcttccctttttcccccataccttccatcaattatagcttcagtatgtgaaaacccagctcttcaaccatataggcttcaacaagcaatcgcagcaagcaacatacctttatcgcccttgttgtgtcaacaatcgccagccctatctttggtgcagtcattggtacaaaccatcagggcacaacagctgcagcaactcgtgctacctgtgatcaaccaagtagctctggcaaacctt

SEQ ID NO: 21737 - DNA, 384 bp, Zea mays
  Clone ID: LIB3152-015-P1-K1-F3
cttgtttcaacaatcgccagccctatctttggtgcagtcattggtacaaaccatcagggcacagcagctgcagcaactcgtgctacctgtgatcaaccaagtagctctggcaaacctttctccctactctcagcaacaacaatttcttccattcaaccaactgtctacattgaaccgtgctgcttatttgcagcaacaactattaccattcagccagctagctactgcctactctcagcaacaacaacttcttccatttaaccaattggccgcactgaaccccgctgcttatttgcagcagcaaatactactaccatttagccagctagctgcagcaagccgtgctttcttcttgacacagcaacagttgctgcctttctacca

SEQ ID NO: 21738 - DNA, 386 bp, Zea mays
  Clone ID: LIB3152-015-P1-K1-F4
gcaacatagaaagtggaatccagtagcaacaatagagcaacaatggagaccaagatattttccctccttatgctccttgctctttctacatgtgttgctaacgcgacaattttccctcaatgctcacaagctcctatagcttccctttttcccccataccttccatcaattatagcttcagtatgtgaaaacccagctcttcaaccatataggcttcaacaagcaatcgcagcaagcaacatacctttatcgcccttgttgtgtcaacaatcgccagccctatctttggtgcagtcattggtacaaaccatcagggcacaacagctgcagcaactcgtgctacctgtgatcaaccaagtagctctggcaaacctttctccctactc

SEQ ID NO: 21739 - DNA, 388 bp, Zea mays
  Clone ID: LIB3152-015-P1-K1-F5
gccacctccggttcacctgccacctccggtgcatctcccaccgccggtccacctgccgccgccggtccacctgccaccgccggtccatgtgccgccgccggttcatctgccgccgccaccatgccactaccctactcaaccgccccggcctcagcctcatccccagccacacccatgcccgtgccaacagccgcatccaagcccgtgccagctgcagggaacctgcggcgttggcagcaccccgatcctgggccagtgcgtcgagtttctgaggcatcagtgcagcccgacggcgacgccctactgctcgcctcagtgccagtcgttgcggcagcagtgttgccagcagctcaggcaggtggagccgcagcaccggtaccaggcgatc

SEQ ID NO: 21740 - DNA, 385 bp, Zea mays
  Clone ID: LIB3152-015-P1-K1-F6
gagccacctagccgtggtgaaccctgttgcctacttgcaacagcagctacttgcgtccaacccacttgctctggcgaacgtagctgcataccagcaacaacaacgtctgcaacagtttatgccagcgctcagtcaactagccatggtgaaccctgtcgcctacctacaacagcaacaattgctttcatctagcccgctcgctgtgggcaatgcacctacgtacctacaacaacagttgctgcaacagattgtaccagctctgactcagctagctgtggcaaaccctactgcctacttgcaacagttgcttccattcaaccaactggctgtgtcgaactctgctgtgtacctacaacagcgacaacagttacttaatccactagca

SEQ ID NO: 21741 - DNA, 378 bp, Zea mays
  Clone ID: LIB3152-015-P1-K1-F7
gcaacatagaaagtggaatccagtttcaacaatagagcaacaatggagaccaagatattttccctccttatgctccttgctctttctacatgtgttgctaacgcgacaattttccctcaatgctcacaagctcctatagcttccctttttcccccataccttccatcaattatagcttcagtatgtgaaaacccagctcttcaaccatataggcttcaacaagcaatcgcagcaagcaacatacctttatcgcccttgttgtgtcaacaatcgccagccctatctttggtgcagtcattggtacaaaccatcagggcacaacagctgcagcaactcgtgctacctgtgatcaaccaagtagctctggcaaacctttct

SEQ ID NO: 21742 - DNA, 334 bp, Zea mays
  Clone ID: LIB3152-015-P1-K1-F8
ctccaacaatcatcagccctattattgcagttacctttggtgcatttattggcgcaaaacatcagggcacaacaactacaacaactcgtgctagcaaaccttgctgcctactctcagcaacagcagttacctttggtgcatttgttggcacaaaacatcagggcacaacaactacaacaactcgtgctagcaaaccttgctgcctactctcagcaacaacagtttctgccattcaaccaactagctgcattgaactctgctgcttatttgcagcaacaacaactactaccattcagccagctagctgctgcctaccctcggcaatttcttccat

SEQ ID NO: 21743 - DNA, 363 bp, Zea mays
  Clone ID: LIB3152-015-P1-K1-F9
tacaacaacagttgctaccaacaatcaatcaagtagttgcagcgaaccttgctgcttacctccagcaacaacagtttcttccattcaatcaactagatggggtgaaccctgctatctacttgcaggcacaacagctactaccatttaaccaacttgtcgggagcccttatgccttcttactgcaacaacagcttctaccattccatctgcaagctgtggcaaacattgctgctttcttgagacaacaacatttgttgccattttacccacaggttgtgggaaacattaatgccttcttgcaacagcaacaattgctaccattctacccacagaatgtggcaaacattgttgccttcttacaac

SEQ ID NO: 21744 - DNA, 407 bp, Zea mays
  Clone ID: LIB3152-015-P1-K1-G1
aaaaaccggggcggacccacgcgtccgcaacaagcaacatagaaagtggaatccagtagcaacaatagagcaacaatggcgaccaagatattttccctccttatgctccttgctctttctgcatgtgttgctaacgcgacaattttccctcaatgctcacaagctcctatagcttcccttcttcccccataccttccatcaatgatagcttcagtatgtgaaaacccagctcttcaaccctataggctccaacaagcaatcgcagcaagcaacatacctttatcacccttgtttcaacaatcgccagccctatctttggtgcagtcattggtacaaaccatcatggcacagcagctgcagcaactcgtgctacctgtgatcaaccaagtagctctggcaaacctttc

SEQ ID NO: 21745 - DNA, 56 bp, Zea mays
  Clone ID: LIB3152-015-P1-K1-G10
cccgcttccttcttgacacaacaacaattgaaatgaaaagaaaaaagtattgttcc

SEQ ID NO: 21746 - DNA, 385 bp, Zea mays
  Clone ID: LIB3152-015-P1-K1-G11
gcaacatagaaagcacaatagtgttccaacaatggcagccaaaatatttggccgccttatgctcctcggtatttctgcaagtgctgctacggcgaccattttcccgcaatgctcacaagctcctatagcttcccttcttcccccgtacctctcaccagcggtgtcttcggtatgtgaaaacccaattcttcaaccctacaggatccaacaggcaatcgcagctggcatcttacctttatcacccttgttcctccaacaatcatcagccctattacagcagttacctttggtgcatttattggcacaaaacatcagggcacaacaactacaacaacttgtgctagcaaaccttgctggctactctcagcaacagcagtttcttcca

SEQ ID NO: 21747 - DNA, 91 bp, Zea mays
  Clone ID: LIB3152-015-P1-K1-G12
acaacatctacggtcaaacatagctagaacagatcccgcccaaaactcttgtggacctatacctccacccatggctgcctccaccttcaac

SEQ ID NO: 21748 - DNA, 383 bp, Zea mays
  Clone ID: LIB3152-015-P1-K1-G2
ctaggaagcaagggaatcacatcgccatggcagccaagatgtttgcattgtttgcgctcctagctctttgtgcaaccgccactagtgctacccatatcccagggcacttgtcaccactactgatgccattggctaccatgaacccatggatgcagtactgcatgaagcaacagggggttgccaacttgctagcgtggccgaccctgatgctgcagcaactgttggccttaccgcttcagccgtgccagatgccaatgatgatgccaggtatgatgccaccgatgacaatgatgccgatgccgaatatgatgccatcgatgatggtgccgactatgatgtcaccaataacgatagctagtatgatgccaccgatgatgatgcca

SEQ ID NO: 21749 - DNA, 384 bp, Zea mays
  Clone ID: LIB3152-015-P1-K1-G3
agctttcaaaaacacaccaagcgaagcacattagcaacaacctaacaacaatggctaccaagatattatccctccttgcgcttcttgcgctttttgcgagcgcaacaaatgcgttcattattccacaatgctcacttgctccaagttccattattacacagttcctcccaccagttacttcaatgggcttcgaacacccagctgtgcaagcctataggctacaacaagcaattgcggcgagcgtcttacaacaaccaatttcccagttgcaacaacaatccttggcacatctaacaatacaaaccatcgcaacgcaacagcaacaacaattcctaccagcactgagccacctagccatggtgaaccctgccgcctacttgcaac

SEQ ID NO: 21750 - DNA, 386 bp, Zea mays
  Clone ID: LIB3152-015-P1-K1-G4
gcaacatagaaagcacaatagtgtaccaacaatggcagccaaaatattttgcctccttatgctccttggtctttctgcaagtgctgctacggcgaccattttcccgcaatgctcgcaagctcctatagcttcccttcttcccccgtacctctcaccagcggtgtcttcggtatgtgaaaacccaattcttcaaccctacaggatccaacaggcaatcgcagctggcatcttacctttatcacccttgttcctccaacaatcatcagccctattacaacagttacctttggtgcatttattggcacaaaacatcagggcacaacaactacaacaacttgtgctagcaaaccttgctgcctactctcagcaacagcagtttcttccat

SEQ ID NO: 21751 - DNA, 386 bp, Zea mays
  Clone ID: LIB3152-015-P1-K1-G6
attgagaccaactagcaacatagaaagcacaatagtgtaccaacaatggcagccaaaatattttgcctccttatgctccttggtctttctgcaagtgctgctacggcgaccattttcccgaaatgctcgcaagctcctatagcttcccttcttcccccgtacctctcaccagcggtgtcttcggtatgtgaaaacccaattcttcaaccctacaggatccaacaggcaatcacagctggcatcttacctttatcacccttgttcctccaacaatcatcagccctattacatcagttacctttggtgcatttattggcacaaaacatcagggcacaacaactacaacaacttgtgctagcaaaccttgctgcctactctcagcaaca

SEQ ID NO: 21752 - DNA, 381 bp, Zea mays
  Clone ID: LIB3152-015-P1-K1-G7
caacaagcaacatagaaagtggaatccagtagcaacaatagagcaacaatggcgaccaagatattttccctccttatgctccttgctctttctgcatgtgttgctaacgcgacaattttccctcaatgctcacaagctcctatagcttcccttcttcccccataccttccatcaatgatagcttcagtatgtgaaaacccagctcttcaaccctataggctccaacaagcaatcgcagcaagcaacatacctttatcacccttgtttcaacaatcgccagccctatctttggtgcagtcattggtacaaaccatcagggcacagcagctgcagcaactcgtgctacctgtgatcaaccaagtagctctggcaaacctttct

SEQ ID NO: 21753 - DNA, 375 bp, Zea mays
  Clone ID: LIB3152-015-P1-K1-G8
cggacgcgtgggtttgagcattcataaacacaccaagcgaagcgcactagcaacaacctaacaacaatggctaccaagatattatccctccttgcgcttcttgcgctttttgcgagcgcaacaaatgcgtccattattccacaatgctcacttgctcctagttccattattccacagttcctcccaccagttacttcaatggccttcgaacacccagctgtgcaagcctataggctacaacaagcgattgcggcgagcgtcttacaacaaccaattgcccaattgcaacaacaatccttggcacatctaacaatacaaaccatcgcaacgcaacagcaacaacagttcctaccagcactgagccacctagccatg

SEQ ID NO: 21754 - DNA, 379 bp, Zea mays
  Clone ID: LIB3152-015-P1-K1-G9
agcgaagcgcactagcaacgacctaacaacaatggctaccaagatattagccctccttgcgcttcttgccctttttgtgagcgcaacaaatgcgttcattattccacaatgctcacttgctcctagtgccattattccacagttcctcccaccagttacttcaatgggcttcgaacacctagctgtgcaagccaacatgcaacaacaagcgcttgcggcgagcgtcttacaacaaccaattgcccaattgcaacaacaatccttgccacatctaacaatacaagccatcacaacgcaacagcaacaacagttcctaccagcactgagccacctagccatggtgaaccctgccgcctacttgcaagagcagctgcttgca

SEQ ID NO: 21755 - DNA, 194 bp, Zea mays
  unsure at all n locations
  Clone ID: LIB3152-015-P1-K1-H1
ccctaattgttggcttaattgccagtcgttgcggcagcagtgttgccagcagctcaggcaggtggagccgcancaccggtaccaggcgatcttcggcttggtcctccagtccatcctgcagcagcagccgcaaagcggccaggtcgcggggctgttggcggcgcaaatagcgcagcaactgacggcgatgtgcg

SEQ ID NO: 21756 - DNA, 107 bp, Zea mays
  Clone ID: LIB3152-015-P1-K1-H10
gggaaagccaagatagtattatcaatagaaacctagcttcaagaatgtcgtgactatatatatgtatgatattaagacgagatttgataagggtggcatagcaagtc

SEQ ID NO: 21757 - DNA, 387 bp, Zea mays
  Clone ID: LIB3152-015-P1-K1-H2
agcaacatagaatgcacaatagtgtaccaacaatggcagccaaaatattttgcctccttatgctccttggtctttctgcaagtgctgctacggcgaccattttcccgaaatgctcgcaagctcctatagcttcccttcttcccccgtacctctcaccagcggtgtcttcggtatgtgaaaacccaattcttcaaccctacaggatccaacaggcaatcacagctggcatcttacctttatcacccttgttcctccaacaatcatcagccctattacatcagttacctttggtgcatttattggcacaaaacatcagggcacaacaactacaacaacttgtgctagcaaaccttgctgcctactctcagcaacagcagtttcttccat

SEQ ID NO: 21758 - DNA, 387 bp, Zea mays
  Clone ID: LIB3152-015-P1-K1-H4
gcaccataaaaggcacattagtgttccatcaatggcagccaaaaaatttggcctcctgatgctcctgggtatttctgcaagtgctgctacggcgaccattttcccgcaatgctcacaagctcctatagcttcccttcttcccccgtacctctcaccagcggtgtcttcggtatgtgaaaacccaattcttcaaccctacaggatccaacaggcaatcgcagctggcatcttacctttatcacccttgttcctccaacaatcatcagccctattacagcagttacctttggtgcatttattggcacaaaacatcagggcacaacaactacaacaacttgtgctagcaaaccttgctgcctactctcagcaacagcagtttctttcatt

SEQ ID NO: 21759 - DNA, 67 bp, Zea mays
  unsure at all n locations
  Clone ID: LIB3152-015-P1-K1-H5
aaaaacgggcgacccacgcgnccggcaacatataaagtacaataaagttttttttatacaaacaaaa

SEQ ID NO: 21760 - DNA, 381 bp, Zea mays
  Clone ID: LIB3152-015-P1-K1-H7
ttgagaccaactagcaacatagaaagcacaatagtgtaccaacaatggcagccaaaatattttgcctccttatgctccttggtctttctgcaagtgctgctacggcgaccattttcccgcaatgctcgcaagctcctatagcttcccttcttcccccgtacctctcaccagcggtgtcttcggtatgtgaaaacccaattcttcaaccctacaggatccaacaggcaatcgcagctggcatcttacctttatcacccttgttcctccaacaatcatcagccctattacaacagttacctttggtgcatttattggcacaaaacatcagggcacaacaactacaacaacttgtgctagcaaaccttgctgcctactctcagc

SEQ ID NO: 21761 - DNA, 279 bp, Zea mays
  Clone ID: LIB3152-015-P1-K1-H8
agctcttgtcccctattaccttgatgaaaaaactgggtggggtttggagatctgtgatcttaagaaacaactcgaagatgctcggtcaaaaggcattgatgttagggccttggtggttatcaattcaggaaatcctactgggcatgttttttctttttacaaccaatttttttttagtgtatttctgtaaaaatccaggttctagaacctttactcttgtatcatgatttctattgagaattttttttattttctttcattatattttttttttttttt

SEQ ID NO: 21762 - DNA, 384 bp, Zea mays
  unsure at all n locations
  Clone ID: LIB3152-015-P1-K1-H9
caacaagcaacatagaaagtggaattcagtagcaacaatagagcaacaatggcgaccaagatattttccctccttatgctccttgctctttctgcatgtgttgctaacgcgacaattttccctcaatgctcacaagctcctatagcttcccttcttcccccataccttccatcaatgatagcttcagnatgtgaaaacccagctcttcaaccctataggctccaacaagcaatcgcagcaagcaacatacctttatcacccttgtttcaacaatcgccagccctatctttggtgcagtcattggtacaaaccatcagggcacagcagctgcagcaactcgtgctacctgtgatcaaccaagtagctcttgcaaacctttcttcc

SEQ ID NO: 21763 - DNA, 390 bp, Zea mays
  Clone ID: LIB3152-016-P1-K1-A1
attttgagcattcaaaaacacacaaagggaagtgcactagcaacttcctaacaacaatggctaccaagatattagccctccttgcgctcctttccctttcagtgagcgcaacaactgcattcattattccacaatgctcacttgctcctaatgccattattccacagttcctcccatcagttacatcaatgggcatcgaacaccctattgtgcaagcctataggctacaacaagcgcttgcggcgagcgtcttacaacaaccgtttgcccaattacaacaacaatccttggcacatctaaccatacaaaccatcgcaacacaactagagcaacagtttgtgcccgcattgagccaactagccgcagtgaaccctgtctcctacttgcaac

SEQ ID NO: 21764 - DNA, 386 bp, Zea mays
  Clone ID: LIB3152-016-P1-K1-A10
cttctatcagtaccatcaatcatcattcatcttagtagtataggcaccaaatcaaatctgcaacatcaattatctaactccaaaaaccatgaagctggtgcttgtggttcttgctttcattgctttagtatcaagtgtttcttgtacacagacaggcggctgcagctgtggtcaacaacaaagccatgagcagcaacatcatccacaacaacatcatccacaaaaacaacaacatcaaccaccaccacaacatcaccagcagcagcaacaccaacaacaacaagttcacatgcaaccacaaaaacatcagcaacaacaagaagttcatgttcaacaacaacaacaacaaccgcagcaccaacaacaacaacaacaacagcaccaac

SEQ ID NO: 21765 - DNA, 236 bp, Zea mays
  unsure at all n locations
  Clone ID: LIB3152-016-P1-K1-A11
gcgcaacaaangcgttcattattcttcaatgctcacaatcttctagtggggtgtgtttcatttcctctcaccatctacttcaatgcgctttgatcacctatctgtgctagccaacttgttacaacaagctcttgcgtctatcgttcttacaacaaccaatttcccaattgcatcatcattcctagccacatctaacaatacaatccttttcatctcaacaactacatcagttccta

SEQ ID NO: 21766 - DNA, 378 bp, Zea mays
  unsure at all n locations
  Clone ID: LIB3152-016-P1-K1-A12
cagaaacacaccaagcgaatcgcactagcaacaacctaacaacaatggctgccaggatattagccctccttgcgcttcttgcccttttagtgagcgcaacaaatgcgttcattattccacagngctcacttgctcctagtgccattattccacagttcctcccaccagttacttcaatgggcttcgaacatccagccgtgcaagcctacaggctacaactagcgcttgcggcgagcgttttacaacaaccaattgcccaattgcaacaacaatccttggcacatctaaacctacaaaccatcgcaacgcaacagcaacaacagtttctgccatcactgagccacctagccgtggtgaaccctgtctgctacttgcaac

SEQ ID NO: 21767 - DNA, 379 bp, Zea mays
  Clone ID: LIB3152-016-P1-K1-A2
agaaagtggaatccagtagcaacaatagagcaacaatggagaccaagatattttccctccttatgctccttgctctttctacatgtgttgctaacgcgacaattttccctcaatgctcacaagctcctatagcttccctttttcccccataccttccatcaattatagcttcagtatgtgaaaacccagctcttcaaccatataggcttcaacaagcaatcgcagcaagcaacatacctttatcgcccttgttgtgtcaacaatcgccagccctatctttggtgcagtcattggtacaaaccatcagggcacaacagctgcagcaactcgtgctacctgtgatcaaccaagtagctctggcaaacctttctccctactc

SEQ ID NO: 21768 - DNA, 268 bp, Zea mays
  Clone ID: LIB3152-016-P1-K1-A4
ctgcgattcctctcccctcgcctcctcgtctccccctaggggatcgtcggagaggaatcgcaaagagggccgtctcatccgagttaaggaagccatggagcacaaggaggctgggtgccaggcccccgagggacccatcctctgcatcaataactgtggcttcttcggcagcgcggcgaccatgaacatgtgctctaagtgccacaaggagatgataacgaagcatgatcaggccaagctggctgcctcctctatcgacagcattgtg

SEQ ID NO: 21769 - DNA, 386 bp, Zea mays
  Clone ID: LIB3152-016-P1-K1-A5
attgagaccaactagcaacatagaatgcacaatagtgtacctctcaccagcggggtcttcggtatgtgaaaacccaattcttcaaccctacaggatccaacaggcaatcgcagctggcatcttacctttatcacccttgttcctccaacaatcatcagccctattacaacagttacctttggtgcatttattggcacaaaacatcagggcacaacaactacaacaacttgtgctagcaaaccttgctgcctactcttagcaacagcagtttctttcattcaaccaactaggttcattgaactctgctttttatttgcaacaacaacaactaccattcatccagctacctgctgcctacccccagctatttttttcattcaaccaac

SEQ ID NO: 21770 - DNA, 263 bp, Zea mays
  Clone ID: LIB3152-016-P1-K1-A7
gcgtccgttatccgcactgtaaactaagtttcggtctgcagtcccggcttttaggcgggggttccatctgagcgaatctatccattcttgttctgtatggccgccagcgtcaccgtggaaaacctcatccccaaggtcttaaaatgtgagtatgcattccgtggggagattgtcattcatgctcagcgtctgcatcgacatctacaaacacaaccagggtctcttacttttgatgagatcctctatagcaatattgtgaatac

SEQ ID NO: 21771 - DNA, 363 bp, Zea mays
  Clone ID: LIB3152-016-P1-K1-A9
acatataaagcacaattttgttttaacaatggcagccaaaatatggggcgggcttatgctccttggtctttctgcaagtgttgctaccgtaaccattttcccacaatgctcacaagctcctatagctttcctttttcccccatacctttcaccagcggagtcttcaatgtgtgaaaactcaattgttctaccctacaggatccaacaggctatctcaacaggcatctaaccattatcacccttgttccttcaacaaccgtctgccctattacagcagttacctttggtccatttgtttgcacaaaacatcagtgtacaacatcttcaacaacttgtgcttgcaaaccttgctgtatacttctt

SEQ ID NO: 21772 - DNA, 388 bp, Zea mays
  Clone ID: LIB3152-016-P1-K1-B1
ccgatcgacaccatgagggtgttgctcgttgccctcgctctcctggctctcgctgcgagcgccacctccacgcatacaagcggcggctgcggctgccagccaccgccgccggttcatctaccgccgccggtgcatctgccacctccggttcacctgccacctccggtgcatctcccaccgccggtccacctgccgccgccggtccacctgccaccgccggtccatgtgccgccgccggttcatctgccgccgccaccatgccactaccctactcaaccgccccggcctcagcctcatccccagccacacccatgcccgtgccaacagccgcatccaagcccgtgccagctgcagggaacctgcggcgttggcagcaccccgatcctgg

SEQ ID NO: 21773 - DNA, 379 bp, Zea mays
  Clone ID: LIB3152-016-P1-K1-B10
gtctgcatataggaagcaattgtgctccccccatgggttgcacttgctatcaggccaaggcctggtgtctgggattacattcgggtgaatgtaagtgagctggctgtggaggagctgagtgtttctgagtacttggcattcaaggaacagctggtggatggacaatccaacagcaactttgtgcttgagcttgattttgagcccttcaatgcctcctttcctcgtccttccatgtcgaagtccatcggaaatggagtgcaattccttaaccgacacctgtcgtccaagttgttccaggacaaggagagtttgtaccccttgctgaacttcctcaaggctcataactacaagggcacgacgatgatgttgaatgacagaa

SEQ ID NO: 21774 - DNA, 381 bp, Zea mays
  Clone ID: LIB3152-016-P1-K1-B11
ccaactagcaacatagaaagcacattagtgtaccaacaatggcagccaagataggttgcctccttatgctccttggtctttctgcaagtgctgctacggcgaccattttcccgaaatgctcgcaagctcctatagcttcccttcttcccccgtacctctcaccagcggtgtcttcggtatgtgaaaacccaattcttcaaccctacaggatccaacaggcaatcacagctggcatcttacctttatcacccttgttcctccaacaatcattagccctattacatcagttacctttggtgcatttattggcacaaaacattagggcacaacaactacaacaacttgtgctagcaaaccttgctgcctactctcagcaacagc

SEQ ID NO: 21775 - DNA, 367 bp, Zea mays
  Clone ID: LIB3152-016-P1-K1-B12
gagaccaacaagcaacatataaagtttaatccagtagcaacaatagagcagcaggggagaccaagatattttccctccttatgctccttgctctttctacatgtgttgctaacgcgacaattttccctcaatgctcacaagctcctatagcttccctttttcccccataccttccatcaattatagcttcagtatgtgaaaacccatctcttcaaccatataggcttcaacatgcaatcgcattatgcaacatacctttatcgcccttgttgtgtcaacaatcgccagccctatctttggtgcagtcattggtacaaaccattatggcacaacagctgcagcaactcttgctacctgttatcaacca

SEQ ID NO: 21776 - DNA, 382 bp, Zea mays
  Clone ID: LIB3152-016-P1-K1-B2
ctacttgccctagaaccctcgccgccgcccctctttaggattcccatgtccctggtcgccccctgacacgcccgccccggatcctgcacccgaattccgcgtggaattccgggccgaaccgcctctctgcgtgcgcctccgaccaccaaactctctctctcacacgcgcgcgcgcgcgcacgtctgaggcggtttgattctccggtgggggttccttggtctcgaactctcgatttgctgctgatgggggtgccgaagcagcgctggacgccggaggaagaggccgcgctcaaggccggtgtcgccaagcacgggcccggcaagtggcgcaccatcctccgggactcggacttcagcgcgctcctgcgccttcgctccaatg

SEQ ID NO: 21777 - DNA, 387 bp, Zea mays
  Clone ID: LIB3152-016-P1-K1-B4
tgcaaagttctttgtcattaaatcgtacagtgaggatgacatccacaagagtgtaaaatacaatgtgtgggcaagcacaaccaatggaaacaagaagctcgatgctgcttatcaagaagctcagtcgaagggttctgcgtgccctatattcttgtttttctcagtgaatacaagtgggcagtttgttggtgttgctgaaatgacgggggctgtcgattttgagaaaaccctggggtattggcaacaggacaagtggaatggttccttctctgttaagtggcacattgtcaaggacgtgcctaacaacattctcaaacacatcatcctagagaacaacgagaacaagcctgtcacgaacagccgtgacactcaagagatacacctaga

SEQ ID NO: 21778 - DNA, 382 bp, Zea mays
  Clone ID: LIB3152-016-P1-K1-B5
attttgagcattcagaaacacaccaagcgaagctacctagcaacgacttaacaacaatggctaccaagatattagccctccttgcgcttcttgccctttttgtgagcgcaacaaatgcgttcattattccacaatgctcacttgctcctagtgccattataccacagttcctccgaccagttacttcaatgggcttcgaacacctagctgtgcaagcctacaggctacaacaagcgcttgcggcgagcgtcttacaacaaccaattaaccaattgcaacaacaatccttggcacatctaaccatacaaaccatcgcaacacaacagcaacaacagttcctaccagcactgagccaactagatgtggtgaaccctgtcgccta

SEQ ID NO: 21779 - DNA, 242 bp, Zea mays
  unsure at all n locations
  Clone ID: LIB3152-016-P1-K1-B6
ccgattagctcaatcgacctccagaattgggtagaacttcgacaccccatgaagggtgccctgatcgtgtgccgggttgctcttcctgggcgccctcgctgcgagcccgcacgcctctcagtacaaagcggctggcttggtgtgactgccagacccaccaccgttttcaatctaccccgcctnnccgttctaaatatgcnncgcctnnccgttctaattctgcccgcccgcaaaagcagcag

SEQ ID NO: 21780 - DNA, 385 bp, Zea mays
  Clone ID: LIB3152-016-P1-K1-B7
gaccaactagcaacatagaaagcacaatagtgtaccaacaatggcagccaaaatattttgcttccttatgctccttggtctttctgcaagtgctgctaccgcaaccattttcccacaatgctcacaagctcctatagcttcctttcttcccccatacctctcaccagcggtgtcttcagtatgtgaaaacccaattcttcaaccctacaggatccaacaggcaatcgcagcaggcatcttacctttatcacccttgttcctccaacaaccgtcagccctattacagcagttacctttggtgcatttgttggcacaaaacatcaaggcacaacaactacaacaacttgtgctaggaaaccttgctgcctactctcagcaacagcag

SEQ ID NO: 21781 - DNA, 386 bp, Zea mays
  Clone ID: LIB3152-016-P1-K1-B8
caactagcaacatagaaagcacaattttgtaccaacaatggcagccaaaatatggtgcctccttatgctccttggtctttctgcaagtgctgctacggcgaccattttcccgaaatgctcgcaagctcctatagcttcccttcttcccccgtacctctcaccagcggtgtcttcggtatgtgaaaacccaattcttcaaccctacaggatccaacaggcaatcacagctggcatcttacctttatcacccttgttcctccaacaatcatcagccctattacatcagttacctttggtgcatttattggcacaaaacatcagggcacaacaactacaacaacttgtgctagcaaaccttgctgcctactctcagcaacagcagtttc

SEQ ID NO: 21782 - DNA, 463 bp, Zea mays
  Clone ID: LIB3152-016-P1-K1-B9
ctattatttaatttaaattttattttttataaaaaaaatattttaaatgtaaagggtttaatattaaaaataaatttataataaattaaaattaaataaaaaaaaatttaaataaatataaaaaataaatatattataatataatataataataaaaaaaaaaaattaatataaaaatattatataaaaaatattataaaaaaaaaattatatatttaaattatataaaaaaaataataaaattaatataaattataaaaaaaaatatataaaatttaatataatataataaattataattaatataatattaatataattaataaatataaataaaataaaaatatatatataaaatataacaaatatataatataataaatacaatataatatatttaataataatatataaaatatatataaaatataatatataataaatttaataattttattattaa

SEQ ID NO: 21783 - DNA, 393 bp, Zea mays
  Clone ID: LIB3152-016-P1-K1-C1
caccaagcgaagcgcactagcaacgacctaacaacaatggctaccaagatattagccctccttgcgcttcttgccctttttgtgagcgcaacaaatgcgttcattattccacaatgctcacttgctcctagtgccattattccacagttcctcccaccagttacttcaatgggcttcgaacacctagctgtgcaagccaacatgcaacaacaagcgcttgcggcgagcgtcttacaacaaccaattgcccaattgcaacaacaatccttgccacatctaacaatacaagccatcacaacgcaacagcaacaacagttcctaccagcactgagccacctagccatggtgaaccctgccgcctacttgcaagagcagctgcttgcatccaaccca

SEQ ID NO: 21784 - DNA, 292 bp, Zea mays
  unsure at all n locations
  Clone ID: LIB3152-016-P1-K1-C11
ggcgcccacgcgttcgaccaagctaagctcactattactttctacaacaaggctaccaagggatggctcttttttcacttttctctttttgctaacgcaacatattctttcatnatttcacaatgctcactagctcctagttccattatccacatttcctcctaccattacttaatgttctttaacacccactttgcaatcctatatgctacaacaagcgattgcacgagcgttttcatcaaccaattcctcaattgttcaacaatccttggcacatttaacaatacaaacc

SEQ ID NO: 21785 - DNA, 385 bp, Zea mays
  Clone ID: LIB3152-016-P1-K1-C2
agctcatcgactccagattggagaactcgacaccatgaaggtgctgatcgttgcccttgctctcctggcgctcgctgcgagcgccgcctccagtacaagcggcggctgtggctgccagacaccaccgtttcatctaccgcctccgttctatatgccgcctccgttctatctgccgccgcagcagcagccgcagccatggcaataccccactcaaccaccgcagctaagcccgtgccagcagttcggatcctgcggcgtcggcagcgtcggcagcccgttcctgggccagtgcgtcgagttcctgaggcaccagtgcagcccggcggcgacgccctacggctcgccacagtgccaggcgctgcagcagcagtgctgccaccagatc

SEQ ID NO: 21786 - DNA, 361 bp, Zea mays
  unsure at all n locations
  Clone ID: LIB3152-016-P1-K1-C3
cttccgaaccaggcacaataaaagggggaatccagtaccaccaataaaccaccaatggcgaccaaaatattttccttcctatgctcctgctcttctgcattggtgctacgcgacaattttcctcatgctcacaagctcttagcttccttcttccccatccttncataatgatagctcagtatgtgaaaacccactcttaaccctatggctccacagcaatcgcagaagaacatacctttatcacccttgttaacaatcgcagccctatctttgggcagtcattggacaaaccatcaggcacgcagctgcagcaactcgtgctcctgtgataaccaagtagctctggcaacctttctcctac

SEQ ID NO: 21787 - DNA, 67 bp, Zea mays
  Clone ID: LIB3152-016-P1-K1-C4
gccaagtgcactgacactgttcatgctggacaaacaaacagtacccctccgttttaggggccttttt

SEQ ID NO: 21788 - DNA, 377 bp, Zea mays
  unsure at all n locations
  Clone ID: LIB3152-016-P1-K1-C6
agcaacatagaaggcacaatagtgtaccaacaatggcagctaaaatattttgcctccttatgctccttggtctttctgcaagtgctgctacggcgaccattttcccacaatgctcacaagctcctatagcttcccttcttcccccgtacctctcaccaacggtgtcnttcgtatgtgaaaacccaattcttcaaccctacaggatccaacaggcaatcgcagctggcatcttacctttatcacccttgttcctccaacaatcatcagccctattacagcagttacctttggtgcatttattggcacaaaacatcagggcacaacaactacaacaacttgtgctagcaaaccttgctgnctactctcagcaacagcag

SEQ ID NO: 21789 - DNA, 388 bp, Zea mays
  Clone ID: LIB3152-016-P1-K1-C7
gcacaatagtgtaccaacaatggcagctaaaatattttgcctccttatgctccttggtctttctgcaagtgctgctacggcgaccattttcccacaatgctcacaagctcctatagcttcccttcttcccccgtacctctcaccaacggtgtcttcggtatgtgaaaacccaattcttcaaccctacaggatccaacaggcaatcgcagctggcatcttacctttatcacccttgttcctccaacaatcatcagccctattacagcagttacctttggtgcatttattggcacaaaacatcagggcacaacaactacaacaacttgtgctagcaaaccttgctgcctactctcagcaacagcagtttcttccattcaaccaactagct

SEQ ID NO: 21790 - DNA, 388 bp, Zea mays
  Clone ID: LIB3152-016-P1-K1-C8
gagaccaacaagcaacatagaaagtggaatacagtagcaacaatagagcaacaatggcggccaagatattttccatccttatgctccttgctctttctgcatgtgttgctaacgcgaccatttttcctcaatactcacaagctcctatagctgcccttcttcccccataccttccatcaatgaccgcttcagtatgtgaaaacccagcccttcaaccctacaggctccaacaagcaatcgcaacaagcaacttacctttatcacccctgttctttcaacaatcgccagccctatctttggtgcagtcattggtacaaaccatcagggcacaacagctgcagcaactcgtgctaccagtgatcagccaagtagctctggcaaacctttc

SEQ ID NO: 21791 - DNA, 389 bp, Zea mays
  Clone ID: LIB3152-016-P1-K1-C9
attgataccaactagcaacatacatagtgaagtacactagcaacatcttagcaccaatgggagccaagatttttgccctccttgccctccttgctctttcagcaagcgctgctacctcgacttttattccacaatgctcacaacaatacctctctccggcgacagccgtgggatttcaatacccaactatacaatcctacatggtacaagaggccatccaagcaagcatcttacggtcattagcattaaccctccaacaaccatatgctctattgcaacagccatccttagtgcatctgtatctccaaagaatcgcggcacaacaactacaacaacagttgctaccaacaatcaatcaagtagttgcagcgaaccttgctgcttacctt

SEQ ID NO: 21792 - DNA, 383 bp, Zea mays
  Clone ID: LIB3152-016-P1-K1-D1
ttcagaaacacaccaagcgaagcacattagcaacaacctaacaacaatggctaccaagatattatccctccttgcgcttcttgcgctttttgcgagcgcaacaaatgcgttcattattccacaatgctcacttgctccaagttccattattacacagttcctcccaccagttacttcaatgggcttcgaacacccagctgtgcaagcctataggctacaacaagcaattgcggcgagcgtcttacaacaaccaatttcccagttgcaacaacaatccttggcacatctaacaatacaaaccatcgcaacgcaacagcaacaacaattcctaccagcactgagccacctagccatggtgaaccctgccgcctacttgcaacagc

SEQ ID NO: 21793 - DNA, 376 bp, Zea mays
  unsure at all n locations
  Clone ID: LIB3152-016-P1-K1-D12
cgtgcaacaangaattgtntgcaaccagattgtanccagctctaactcagctagcgtgtggcagaaccctgttgcctacttgcaacagnctgcttccattcaaccaactaactatgtcgaactctgttgcgtacctacaacagcgacaacagttacttaatccattggcagtggctaacccattggtcgctgccttcctacagcagcaacaattgctgccatacaaccggttctctttgatgaatcctgtcttgtcgaggcagcaacccatcgttggaggtgccatcttttagattacatatgagatgtactcgataatggtgccctcataccggcatgtgtttcctagaaataatcaatatattggttgagattt

SEQ ID NO: 21794 - DNA, 391 bp, Zea mays
  Clone ID: LIB3152-016-P1-K1-D2
agcctagcaattagctcatcgactccagattggagaactcgacaccatgaaggtgctgatcgttgcccttgctctcctggcgctcgctgcgagcgccgcctccagtacaagcggcggctgtggctgccagacaccaccgtttcatctaccgcctccgttctatatgccgcctccgttctatctgccgccgcagcagcagccgcagccatggcaataccccactcaaccaccgcagctaagcccgtgccagcagttcggatcctgcggcgtcggcagcgtcggcagcccgttcctgggccagtgcgtcgagttcctgaggcaccagtgcagcccggcggcgacgccctacggctcgccacagtgccaggcgctgcagcagcagtgctgccac

SEQ ID NO: 21795 - DNA, 388 bp, Zea mays
  Clone ID: LIB3152-016-P1-K1-D3
cggacgcgtgggataccaactagcaacatacatagtgaagtacactagcaacatcttagcaccaatgggagccaagatttttgccctccttgccctccttgctctttcagcaagcgctgctacctcgacttttattccacaatgctcacaacaatacctctctccggcgacagccgtgggatttcaatacccaactatacaatcctacatggtacaagaggccatccaagcaagcatcttacggtcattagcattaaccctccaacaaccatatgctctattgcaacagccatccttagtgcatctgtatctccaaagaatcgcggcacaacaactacaacaacagttgctaccaacaatcaatcaagtagttgcagcgaaccttgct

SEQ ID NO: 21796 - DNA, 385 bp, Zea mays
  Clone ID: LIB3152-016-P1-K1-D4
tttcagcattcagaaacacaccaagcgaagcgcactagcaacaacctaacaacaatggctaccaagatattagccctccttgcgcttcttgcccttttagtgagcgcaacaaatgcgttcattattccacagtgctcacttgctcctagtgccattattccacagttcctcccaccagttacttcaatgggcttcgaacatccagccgtgcaagcctacaggctacaactagcgcttgcggcgagcgtcttacaacaaccaattgcccaattgcaacaacaatccttggcacatctaaacctacaaaccatcgcaacgcaacagcaacaacagtttctgccatcactgagccacctagccgtggtgaaccctgtcgcctacttgc

SEQ ID NO: 21797 - DNA, 383 bp, Zea mays
  Clone ID: LIB3152-016-P1-K1-D5
gatcagcaaagcggcagtgcgtagagaggatcgtcgaacagaacagcatgaagatggtcatcgttctcgtcgtgtgcctggctctgtcagctgccagcgcctctgcaatgcagatgccctgcccctgcgcggggctgcagggcttgtacggcgctggcgccggcctgacgacgatgatgggcgccggcgggctgtacccctacgcggagtacctgaggcagccgcagtgcagcccgctggcggcggcgccctactacgccgggtgtgggcagacgagcgccatgtaccagccgctccggcaacagtgctgccagcagcagatgaggatgatggacgtgcagtccgtcgcgcagcagctgcagatgatgatgcagcttgagcgt

SEQ ID NO: 21798 - DNA, 379 bp, Zea mays
  Clone ID: LIB3152-016-P1-K1-D6
ggcggcttctactgcgaggacggtgaaggatgtgaacccccacgagtttgtcaaggcctactccgcccatctcaaacgctccggcaagatggagcttcctgagtgggttgacattgtgaagactgcgaggttcaaggagctccctccttatgaccctgactggtactacatcagggctgcatctgtagcaaggaagatctacttgagacaaggcattggtgttggtggcttccagaagatttatggtggccgccagaggaatggctcacgcccacctcacttctgcaagagcagtggtgccatttcacgcaacatcctccagcagctgcaggagatgggcatcattgatgtcgatcccaagggtggacggcgcatcacc

SEQ ID NO: 21799 - DNA, 388 bp, Zea mays
  Clone ID: LIB3152-016-P1-K1-D8
aactagcaacatagaaagcacaattttgtaccaacaatggcagccaaaggattgggcttccttatgctccttggtctttctgcaagtgctgctaccgcaaccattttcccacaatgctcacaagctcctatagcttcctttcttcccccatacctctcaccagcggtgtcttcagtatgtgaaaacccaattcttcaaccctacaggatccaacaggcaatcgcagcaggcatcttacctttatcacccttgttcctccaacaaccgtcagccctattacagcagttacctttggtgcatttgttggcacaaaacatcaaggcacatcaactacaacaacttgtgctaggaaaccttgctgcctactctcagcaacagcagtttcttt

SEQ ID NO: 21800 - DNA, 380 bp, Zea mays
  Clone ID: LIB3152-016-P1-K1-E10
attgagaccaacaagcaacatatatagtggaatccagtagcaacaatagagcggcaatggcgaccaagatattttccctccttatgctccttgctctttctgcatgtgttgctaacgcgacaattttccctcaatgctcacaagctcctatagcttcccttcttcccccataccttccatcaatgatagcttcagtatgtgaaaacccagcttttcaaccctataggctccaacaagcaatcgcagcaagcaacatacctttatcacccttgtttcaacaatcgccagccctatctttggtgcagtcattggttcaaaccatcagggcacagcaagccgtgctttcttcttgacacagcaacagttgctgcctttctacc

SEQ ID NO: 21801 - DNA, 392 bp, Zea mays
  Clone ID: LIB3152-016-P1-K1-E3
gcaacagctcagtgagattgagaataaattagttgcatcaagtgaagaaatagagttgctgaaagagcgtattcaacaagaagctgctgtatcagcagaaagaggaatgcagcttgaagaaacaatgaccagtgcagagggatacaaagaaaaaattaacgagctacaatgctccctagattcctcgatgtctaaaaaccagctacttgaacaagaagttaaggagctgactgataaatgttcagagcatcaagaacaagcgcattcagttcagcaaagaagtctggagctggaagatctgcttcacacatcaaagactcatgctgaaggtgcatactctcggacacaggagctggagcaggagctgaacagcacatatgaaaagctcaagg

SEQ ID NO: 21802 - DNA, 316 bp, Zea mays
  Clone ID: LIB3152-016-P1-K1-E4
cccacgcgtacgggggtattaacatgacttagaacatggtgcaattaaggatgatagttgaggaggcagctcaggatacacctcgatattactgactatcatggatactaaccaatcgccaccttgcaaggaaccgaaccgagatcaagaccgctaaaaggcacccttctcaaacataattcaagacatgtgacaagagatatgtagagatctccctgaagatgttatagaaactgtcatagcaagggtaactgttgctgcacttactggattccgcactgtgtgtcgcatgtggtgctcacacatgggctcagac

SEQ ID NO: 21803 - DNA, 390 bp, Zea mays
  unsure at all n locations
  Clone ID: LIB3152-016-P1-K1-E5
cgtcccgaaagggctggggccaaataatatccttcctccagggcaaagaaggatggaatcctggggtctttagctcgtcgtgccaaggcgttggaggatgcattcaacaagctngagggattttcatgtaacaaggccgaaggagcaatgtatcttttccctcagattcatctgccacagaaagcaatcgaggctgctaaagctgctaagaaagcgcctgacgctttctacgctctccgtctccttgaatcaactggaatcgtcgtggtccctggatctggatttggtcaagttcctggaacatggcacatcagatgcacgatcctgccgcaggaagacaagatccccgcggtgatcagccgcttcagggctttccatgaggcgttcttg

SEQ ID NO: 21804 - DNA, 382 bp, Zea mays
  Clone ID: LIB3152-016-P1-K1-E6
caatcacagctggcatcttacctttatcacccttgttcctccaacaatcatcaggcctattacatcagttacctttggtgcatttattggcacaaaacatcagggcacaacaactacaacaacttgtgctagcaaaccttgctgcctactctcagcaacagcagtttcttccattcaaccaactagctgcattgaactctgcttcttatttgcaacaacaacaactaccattcagccagctacctgctgcctacccccagcaatttctttcattcaaccaactggcagcattgaactttcctgcttatttacagcagcaacaactactaccattcagccagctagctggtgtgagccctgctaccttcttgatacaaccaca

SEQ ID NO: 21805 - DNA, 291 bp, Zea mays
  Clone ID: LIB3152-016-P1-K1-E7
cggacgcgtgggcggacgcgtgggataaaattaggggcagacgggttgaaggaggtggaagaaacagccttatcgtgtgcatgaagggtatacatagactggccagaagaacttgatgaagctgttcgcttatcgaaggcttgaaccattccattttcaagactgaccacaaatgaatgttcattgtgtggatttcaagctaaacttttgacgtctgctttaacataccatttatgacaattctttcttccatctttcatataatacatggcaactgtcttattaaaggat

SEQ ID NO: 21806 - DNA, 387 bp, Zea mays
  Clone ID: LIB3152-016-P1-K1-E8
attttgagcattcagaaacacaccaagcgaagcacattagcaacaacctaacaacaatggctaccaagatattatccctccttgcgcttcttgcgctttttgcgagcgcaacaaatgcgttcattattccacaatgctcacttgctccaagttccattattacacagttcctcccaccagttacttcaatgggcttcgaacacccagctgtgcaagcctataggctacaacaagcaattgcggcgagcgtcttacaacaaccaatttcccagttgcaacaacaatccttggcacatctaacaatacaaaccatcgcaacgcaacagcaacaacaattcctaccagcactgagccacctagccatggtgaaccctgccgcctacttgc

SEQ ID NO: 21807 - DNA, 387 bp, Zea mays
  Clone ID: LIB3152-016-P1-K1-E9
attatgcgcattcagaaacacacttagcgacgcacattgccaacaacctgacagcgaatggttaccaagatattatccctccttgcgcttcttgcgcgtcttgcgagcgcaacaaaggcgttcattattgcacaatgctcacttgctccaagattcattattacacagatccttccaccagttacttcaatgggctctgaacacccagctgtgcatgcctataggctacaacacgcaattgcggtgggcgtcgtacaacaaccaatttaccagctgcaacaacaatcgttggcacatttaacagtacataccatcgtaacgcaacagctacaacaattgctaccagcactgatccaactagccatggagaaccctgccgtctacttg

SEQ ID NO: 21808 - DNA, 357 bp, Zea mays
  Clone ID: LIB3152-016-P1-K1-F1
ccaagatccaggacaaggagggcattcctccggaccagcagcggctcatttttgccggcaagcagctcgaggacgggcgcacgctggccgactacaacattcagaaagagagcaccctccacttggtgctgcgtctcaggggtggcatgcagatcttcgtgaagacacttactggcaagacgatcacccttgaggtggagtcctcagacaccattgacaacgtcaaggccaagatccaggacaaggagggcattccaccggaccagcagcggctgatcttcgccggcaagcagctggaggatggtcgcaccttggctgactacaacatccagaaggagagcaccctccacctggtgc

SEQ ID NO: 21809 - DNA, 373 bp, Zea mays
  unsure at all n locations
  Clone ID: LIB3152-016-P1-K1-F11
tagaccaactagcaacatataatgtttaatagngnaccaacaatggcgggcaggatattttgcttccttatgctccttggtctttctgcaagtgctgctaccgcaaccattttcccacaatgctcacaagctcctatagcttcctttcttcccccatacctctcaccagcggtgtcttcagtatgtgaaaacccaattcttcaaccctacaggatccaacaggcaatcgcagcaggcatcttacctttatcaccctttgttctccaacaaccgtcatccctattacagtagttacctttggtgcatttgttggcacaataacattaatgcacaacaactacaacaacttgtgctaggaaaccttgctgcctac

SEQ ID NO: 21810 - DNA, 392 bp, Zea mays
  Clone ID: LIB3152-016-P1-K1-F2
attttgagcattcagaaacacaccaagcgaagcgcactagcaacgacctaacaacaatggctaccaagatattagccctccttgcgcttcttgccctttttgtgagcgcaacaaatgcgttcattattccacaatgctcacttgctcctagtgccattattccacagttcctcccaccagttacttcaatgggcttcgaacacctagctgtgcaagccaacatgcaacaacaagcgcttgcggcgagcgtcttacaacaaccaattgcccaattgcaacaacaatccttgccacatctaacaatacaagccatcacaacgcaacagcaacaacagttcctaccagcactgagccacctagccatggtgaaccctgccgcctacttgcaagag

SEQ ID NO: 21811 - DNA, 383 bp, Zea mays
  Clone ID: LIB3152-016-P1-K1-F3
cggcaatcgcaccaggcaacttacctttatcacccctgttctttcaacaatcgccagcccggtctttggtgcagtcattggtacaaaccatcagggcacaacagctgcagcaactcgtgctaccagtgatcagccaagtagctctggcaaacctttctccctactctcagcaacaacaatttcttccattcaaccaactgtctacactgaaccctgctgcttatttgcagcaacaacaactactaccattcagccagctagctactgcctactctcagcagcaacaatttcttccatttaaccaattcgccgcactgaacccctctgcttatttccagcagcaaatactactaccatttggccagctagctacaacaagcccc

SEQ ID NO: 21812 - DNA, 388 bp, Zea mays
  Clone ID: LIB3152-016-P1-K1-F4
agatattagccctccttgcgcttcttgcccttttagtgagcgcaacaaatgcgttcattattccacagtgctcacttgctcctagtgccattattccacagttcctcccaccagttacttcaatgggcttcgaacatccagccgtgcaagcctacaggctacaactagcgcttgcggcgagcgtcttacaacaaccaattgcccaattgcaacaacaatccttggcacatctaaacctacaaaccatcgcaacgcaacagcaacaacagtttctgccatcactgagccacctagccgtggtgaaccctgtcgcctacttgcaacagcagctacttgcatccaacccacttgctctggcgaacgtagctgcataccagcaacaacaacg

SEQ ID NO: 21813 - DNA, 386 bp, Zea mays
  Clone ID: LIB3152-016-P1-K1-F5
attgataccaactagcaacatacatagtgatgtacactagcaccatcttagcaccaaggggagccaagatttttgccctccttgccctccttgctctttcagcaagcgctgctacctcgacttttattccacaatgctcacaacaatacctctctccggcgacagccgtgggatttcaatacccaactatacaatcctacatggtacaagaggccatccaagcaagcatcttacggtcattagcattaaccctccaacaaccatatgctctattgcaacagccatccttagtgcatctgtatctccaaagaatcgcggcacaacaactacaacaacagttgctaccaacaatcaatcaagtagttgcagcgaaccttgctgcttac

SEQ ID NO: 21814 - DNA, 384 bp, Zea mays
  Clone ID: LIB3152-016-P1-K1-F6
caatagtgtaccaacaatggcagccaaaatattttgcctccttatgctccttgggattgctgcaagtgctgctacggcgaccattttcccgcaatgctcacaagctcctatagcttcccttcttcccccgtacctctcaccagcggtgtcttcggtatgtgaaaacccaattcttcaaccctacaggatccaacaggcaatcgcagctggcatcttacctttatcacccttgttcctccaacaatcatcagccctattacagcagttacctttggtgcatttattggcacaaaacatcagggcacaacaactacaacaacttgtgctagcaaaccttgctgcctactctcagcaacagcagtttcttccattcaaccaactagc

SEQ ID NO: 21815 - DNA, 387 bp, Zea mays
  Clone ID: LIB3152-016-P1-K1-F7
ctcagctaccgcgaccacgacgcctacgcgagagggcagggaacacagccactggccgacgagaccccggcgcgcgcgagagaaagagaagagaggaggatcttttgttcgtgaaaaatattggaggcggagggaaggtgaaggagggggatcggagatgaacgtgttccggctggcgggggacatgacccacctcctcagcgtggtagtgctgctcctcaagatccataccatcaagtcctgcgcagataacattgctcctgagaagacccatcaaggaggaatatgttgacttgttgaggttgtcctggaatcagcagtgccatctaaaacgccgccaaatctcaccgggaggcataacgaacagcaaaatatagaggaaaacag

SEQ ID NO: 21816 - DNA, 384 bp, Zea mays
  Clone ID: LIB3152-016-P1-K1-F8
attttgagcattcaaaaacacacattgggaagtgcactagcaacttcctaacagcgaatggctaccaagatattagccctccttgcgctcctttccctttcagtgagcgcaacaactgcattcattattccacaatgctcacttgctcctaatgccattattccacagttcctcccatcagttacatcaatgggcatcgaacaccctattgtgcaagcctataggctacaacaagcgcttgcggcgagcgtcttacaacaaccgtttgcccaattacaacaacaatccttggcacatctaaccatacaaaccatcgcaacacaactagagcaacagtttgtgcccgcattgagccaactagccgcagtgaaccctgtctcctac

SEQ ID NO: 21817 - DNA, 371 bp, Zea mays
  Clone ID: LIB3152-016-P1-K1-F9
ctcctcgcctcctctccctattctttacgacgcaagggagagtgacgggggggggcgcgtttcgagctatgagggccaatgctaataggggaagcaccgcaccatgacccttgttcgccgccgccgcctcagaactccgcgaggttgtcaggattcaatatgtctaccagcacattcgctacttcctgcacgctgttgggcaatgttagaacaacgctatcctaccatacagtggtgaagagcccttcgtttctaagcttcttcagccaagttactaaggttccaagcctgaagaccttcaagaaactggatgtcttctccatggctgtatacaaagtgaagcttgatttgcctgaaggtgaaaagcactt

SEQ ID NO: 21818 - DNA, 382 bp, Zea mays
  unsure at all n locations
  Clone ID: LIB3152-016-P1-K1-G2
cggacgctttgtctacctattcttttttttttatanaaagcacaataanttaccggcaggggtagtcaaaatattttgcctccttatgcttcttggtatttctgcaagatctgctacttctaccaattttccgcaatgctcacaagcttctataactttctttttttccttttaccttttaccatttttttcttttttttgtgaaaacccaattttttaaccctacagtatccaacatgcaattgcatcttttaatattacctttattatctttgttccttcaacaattattagtcctattacattatttactcttttttcttttatttttacaaaacattattttacaacatctataacaacttttgcttttaaatttttt

SEQ ID NO: 21819 - DNA, 383 bp, Zea mays
  Clone ID: LIB3152-016-P1-K1-G3
aaaaaggcacaatagtgtaccaacaattggctttcaaaatattttgcctcctaaggctcgggggtatttctgcaagtgctgctacggcgaccattttcccgcaatgctcacaagctcctatagcttcccttcttcccccgtacctctcaccagcggtgtcttcggtatgtgaaaacccaattcttcaaccctacaggatccaacaggcaatcgcagctggcatcttacctttatcacccttgttcctccaacaatcatcagccctattacagcagttacctttggtgcatttattggcacaaaacatcagggcacaacaactacaacaacttgtgctagcaaaccttgctgcctactctcagcaacagcagtttctttcattc

SEQ ID NO: 21820 - DNA, 385 bp, Zea mays
  Clone ID: LIB3152-016-P1-K1-G4
gaaacacaccaagcgaagcgcactagcaacaacctaacaacaatggctaccaagatattatccctccttgcgcttcttgcgctttttgcgagcgcaacaaatgcgtccattattccacaatgctcacttgctcctagttccattattccacagttcctcccaccagttacttcaatggccttcgaacacccagctgtgcaagcctataggctacaacaagcgattgcggcgagcgtcttacaacaaccaattgcccaattgcaacaacaatccttggcacatctaacaatacaaaccatcgcaacgcaacagcaacaacagttcctaccagcactgagccacctagccatggtgaaccctgtcgcctacttgcaacagcagctgc

SEQ ID NO: 21821 - DNA, 388 bp, Zea mays
  Clone ID: LIB3152-016-P1-K1-G5
cgagaaagcacaatagtggtaccaacatatggcagcctaaaatattttgcgctccttatgcgtccttggtctttctgcaagtgctgctacggcgaccattttcccacaatgctcacaagctcctatagcttcccttcttcccccgtacctctcaccaacggtgtcttcggtatgtgaaaacccaattcttcaaccctacaggatccaacaggcaatcgcagctggcatcttacctttatcacccttgttcctccaacaatcatcagccctattacagcagttacctttggtgcatttattggcacaaaacatcagggcacaacaactacaacaacttgtgctagcaaaccttgctgcctactctcagcaacagcagtttcttccattc

SEQ ID NO: 21822 - DNA, 386 bp, Zea mays
  Clone ID: LIB3152-016-P1-K1-G6
caccaagcgaagcacattagcaacatcctaacaacaatggctaccaagatattatccctccttgcgcttcttgcgctttttgcgagcgcaacaaatgcgttcattattccacaatgctcacttgctccaagttccattattacacagttcctcccaccagttacttcaatgggcttcgaacacccagctgtgcaagcctataggctacaacaagcaattgcggcgagcgtcttacaacaaccaatttcccagttgcaacaacaatccttggcacatctaacaatacaaaccatcgcaacgcaacagcaacaacaattcctaccagcactgagccacctagccatggtgaaccctgccgcctacttgcaacagcagttgcttgcatc

SEQ ID NO: 21823 - DNA, 387 bp, Zea mays
  Clone ID: LIB3152-016-P1-K1-G7
attcagaaacacaccaagcgaagcacattagcaacaacctaacaacaatggctaccaagatattatccctccttgcgcttcttgcgctttttgcgagcgcaacaaatgcgttcattattccacaatgctcacttgctccaagttccattattacacagttcctcccaccagttacttcaatgggcttcgaacacccagctgtgcaagcctataggctacaacaagcaattgcggcgagcgtcttacaacaaccaatttcccagttgcaacaacaatccttggcacatctaacaatacaaaccatcgcaacgcaacagcaacaacaattcctaccagcactgagccacctagccatggtgaaccctgccgcctacttgcaacagcagt

SEQ ID NO: 21824 - DNA, 335 bp, Zea mays
  unsure at all n locations
  Clone ID: LIB3152-016-P1-K1-G8
antcaaaaacacaccaagctaagctttttagcaacaacctaacaacaatggctgggaatatatttttctttcttgctcttcttgcgctttttgcgagctcaacaaattctttcattatttcacaatgctcacttgcttcaagtttcattattacacagttcttcctaccagttactttaatgggcttttaacacccagctgtgcaagcctatatgctacaacaagcaattgctgctagcgtcttacaacaaccaatttttcatttgcaacaacaatcctttgcacatttaacattacataccatagtatctcatcttttactacaatttctacca

SEQ ID NO: 21825 - DNA, 378 bp, Zea mays
  Clone ID: LIB3152-016-P1-K1-G9
gggcggacgcttgggttagcattcagaaacacaccaagcgaggcggactagcaacaacctaacaacaatggctaccaagatattatccctccttgcgcttcttgcgctttttgcgagcgcaacaaatgcgtccattattccacaatgctcacttgctcctagttccattattccacagttcctcccaccagttacttcaatggccttcgaacacccagctgtgcaagcctataggctacaacaagcgattgcggcgagcgtcttacaacaaccaattgcccaattgcaacaacaatccttggcacatctaacaatacaaaccatcgcaacgcatcagcaacaacagttcctaccagcactgagccacctagccatggt

SEQ ID NO: 21826 - DNA, 377 bp, Zea mays
  Clone ID: LIB3152-016-P1-K1-H1
ccacgcgtccggctttatctactccagagcgcagaataaccttatcgacaccatgagggtgttgcgtcgggccctcgctctcctggctctcgctgcgagcgccacctccacgcatacaagcggcggctgcggctgccagccaccgccgccggttcatctaccgccgccggtgcatctgccacctccggttcacctgccacctccggtgcatctcccaccgccggtccacctgccgccgccggtccacctgccaccgccggtccatgtgccggcgcctggttcatttgtcgtcgtcaccatgccactaccctacttaaccggctcggcctcagcctaattcttagccacattcatgcccgggccaacagccgtattct

SEQ ID NO: 21827 - DNA, 391 bp, Zea mays
  Clone ID: LIB3152-016-P1-K1-H2
caccaagcgaagcacattagcaacaacctaacaacaatggctaccaagatattatccctgcttgcgcttcttgcgctttttgcgagcgcaacaaatgcgttcattattccacaatgctcacttgctccaagttccattattacacagttcctcccaccagttacttcaatgggcttcgaacacccagctgtgcaagcctataggctacaacaagcaattgcggcgagcgtcttacaacaaccaatttcccagttgcaacaacaatccttggcacatctaacaatacaaaccatcgcaacgcaacagcaacaacaattcctaccagcactgagccacctagccatggtgaaccctgccgcctacttgcaacagcagttgcttgcatcaaacc

SEQ ID NO: 21828 - DNA, 377 bp, Zea mays
  Clone ID: LIB3152-016-P1-K1-H3
acaaccctgatggggggcttccggaggcttttattaaaatcaaagtttagcaggccggttattgacttcgcttactactggccgaagtccacacccataaccgaggcagttgccaatgatataatgctgttaactgtttccaaatgcaccggccatgccggcacaaggctggggtgggcattggggaaggatactaaggtggctcaaaagatgatcaagtttatagagctcaacacaatcggtgtttccaaggactctcaacttcgtgccgttaagataatcggggcaatatgtaatggctatgagccggtaccatcctctggtaaaacaagccaactctttcatttcgccaaggaaaaaatggcggctcgctgggc

SEQ ID NO: 21829 - DNA, 384 bp, Zea mays
  Clone ID: LIB3152-016-P1-K1-H4
gatcagcaaagcggcagtgcgtagagaggatcgtcgaacagaacagcatgaagatggtcatcgttctcgtcgtgtgcctggctctgtcagctgccagcgcctctgcaatgcagatgccctgcccctgcgcggggctgcagggcttgtacggcgctggcgccggcctgacgacgatgatgggcgccggcgggctgtacccctacgcggagtacctgaggcagccgcagtgcagcccgctggcggcggcgccctactacgccgggtgtgggcagacgagcgccatgtaccagccgctccggcaacagtgctgccagcagcagatgaggatgatggacgtgcagtccgtcgcgcagcaactgcagatgatgatgcaacttgagcgtg

SEQ ID NO: 21830 - DNA, 395 bp, Zea mays
  Clone ID: LIB3152-016-P1-K1-H5
cccacgcgtccgacaccaagcgaggccccttaccactttcctttcaccaagggctcccaagaaagggtccgtgcctgcgcttcttgcgcttttggcgagcgcaacaaatgcgtccattattccacaatgctcacttgctcctagttccattattccacagttcctcccaccagttacttcaatggccttcgaacacccagctgtgcaagcctataggctacaacaagcgattgcggcgagcgtcttacaacaaccaattgcccaattgcaacaacaatccttggcacatctaacaatacaaaccatcgcaacgcaacagcaacaacagttcctaccagcactgagccacctagccatggtgaaccctgtcgcctacttgcaacagcagctgcttg

SEQ ID NO: 21831 - DNA, 309 bp, Zea mays
  unsure at all n locations
  Clone ID: LIB3152-016-P1-K1-H6
gacgacccacgcgtacgcggacgcgtggcctccctttttatttttctcccaggaaanaanccctggtgggggttcttgcgctttttgcgagcgcaacaaatgcgttcattattccacactgctcacttgctccaagttccattattacacagttcctcccaccagttacttcaatgggcttcgaacacccagctgtgcaagcctataggctacaacaagcaattgcggcgagcgtcttacaacaaccaatttcccagttgcaacaacaatccttggcacatctaacaatacaaaccatcgcaacgcaac

SEQ ID NO: 21832 - DNA, 387 bp, Zea mays
  Clone ID: LIB3152-016-P1-K1-H7
attcagaaacacaccaagcgaagcgtactagcaacgacctaacaacaatggctgcgcaagatattagccctccttgcgcttcttgccctttttgtgagcgcaacaaatgcgttcattattccacaatgctcacttgctcctagtgccattattccacagttcctcccaccagttacttcaatgggcttcgaacacctagctgtgcaagccaacatgcaacaacaagcgcttgcggcgagcgtcttacaacaaccaattgcccaattgcaacaacaatccttgccacatctaacaatacaagccatcacaacgcaacagcaacaacagttcctaccagcactgagccacctagccatggtgaaccctgccgcctacttgcaagagcag

SEQ ID NO: 21833 - DNA, 261 bp, Zea mays
  unsure at all n locations
  Clone ID: LIB3152-016-P1-K1-H8
aacacaccaagcttttttttctaacaacaaccnaacaacaagggctggcaaaatattaaaactacttgccctactacacatatatgagagctcaacaaacacattaattaaatccacatcactcactatcaactaaatccattattccacaccaccatcaaccagatattataaaaagcaactaacacctatctttacaagccaaaatgcaacaacataaacacaattacaagcatctaacaacaaccaatttcctcaatt

SEQ ID NO: 21834 - DNA, 246 bp, Zea mays
  Clone ID: LIB3152-017-P1-K1-A1
cagaaacacaccaagcgaagcacattatcaacaacctaacaacaatggctaccaagatattatccctccttgcgcttcttgcgctttttgcgagcgcaacaaatgcgttcattattccacaatgctcacttgctccaagttccattattacacagttcctcccaccagttacttcaatgggcttcgaacacccagctgtgcaagcctatatgctacatcaagcaattgcgtctgagcgtcttacaa

SEQ ID NO: 21835 - DNA, 145 bp, Zea mays
  Clone ID: LIB3152-017-P1-K1-A10
tgcaacactactaatttcacatatctattcaaccaacagaactaccataaagaagttttcattttaacttcacaatcacctcatctattttctctttaaaaaacataatattatatacacaaatattatttaacaacaaattttt

SEQ ID NO: 21836 - DNA, 120 bp, Zea mays
  Clone ID: LIB3152-017-P1-K1-A11
ccagcgtccgagtatgagcaggcagaaacacacttttcgaagcaacccagcaacgaccggacagcagttttctaccaatatattagccctccttgcgcttattgcccttatgtgagcgca

SEQ ID NO: 21837 - DNA, 222 bp, Zea mays
  unsure at all n locations
  Clone ID: LIB3152-017-P1-K1-A12
gnaatccatcacctaaatattttttcattcaaaacacaccaagcggacgcattttttcatcctacaacaagcctaccaagaattattcttttttgcgctactgctctttttgctagtctatcattttctctcaatatatcttctttctcaacattttttatatatcaaatatatttctttttacaatttaactttgttacaaatatttttttttttttcata

SEQ ID NO: 21838 - DNA, 311 bp, Zea mays
  Clone ID: LIB3152-017-P1-K1-A2
aaaaaaaaaaaaaaaaaaaaaacatattttttcaaaataacaacaaaaaaaatcgggcgggcgccctaaaaattatctcttctcacccaccctttacatccacaacaaatatcttttttataatcacatcttatttaaaattctcattccctttttttatacaaacttttttttttctaaaactcttcttctttccccaaatcttttattctctcttccaaatattatctcctcatatctaaattttccctctaatatttaatttttcccccactcttttttttttttcccctccataaatattttttttc

SEQ ID NO: 21839 - DNA, 356 bp, Zea mays
  unsure at all n locations
  Clone ID: LIB3152-017-P1-K1-A3
cgtcgacaggggaattaatggcgtcgtcttctagcagcagccaccgccgcctgatccgcgcagccgccgtcctgctctccgtgctcgctgctgccagcgccagcgccgggaccttctgcgtgccggggtgggccattctgcactacctgttcccgagctgtctcttttttccttacgcgagttgcctttttcggatcctctttcttcttactgaattttgagggtcatggtttttttgtgaggtatttttttttctttttctcgcagtatctttttctttttctctattcttttttttttgtttatatttttttcgctcttttttcttcttttttttttctttgctttantttttt

SEQ ID NO: 21840 - DNA, 428 bp, Zea mays
  unsure at all n locations
  Clone ID: LIB3152-017-P1-K1-A4
cggacacatgggtgatcattcagattcattcaagcgaagcacattatcaacaggcgaggatacatattcttccaacatattatccctccttgcgcaacattctctttttgcgagcgcatcaaattcttacataattttacatttcttatttgttccaaaatccatatatttcacaattactctcttttttttatctaaaattttttttttttaacacatattttttttaaacctaaatttttattaatatttctattttttcttaaaaatatttttatttttctttaaaaatctatttgtttttataaaatatatttttttttttccatattttttttttattttcatnatattttttttttttttctttataattattaattttttattaaataaaaatttttttttttctttaatccatattattt

SEQ ID NO: 21841 - DNA, 137 bp, Zea mays
  unsure at all n locations
  Clone ID: LIB3152-017-P1-K1-A5
gacagcaaagcggcagtgcgtatatattatcgtcgaacagaacagcatgaagaatgtcatctttctcttcttgtgcctctctctntcagctgccagcgccttttcaatgcatattcctttctcttgcacaatactta

SEQ ID NO: 21842 - DNA, 259 bp, Zea mays
  unsure at all n locations
  Clone ID: LIB3152-017-P1-K1-A6
gcttcccttcttcccccatacctttcattatctgtgtcttcggtatgtaaaaacgcggttctttatccctacagtatccaacangcaatctcatctggcatcttacctttatcacccttgttctttcaacaatttatatccttattacttcattatcctttttttcattttttttcacaaattattatttcacatcaacttcatctactattttctctaaacctttcttaccaatttatttttctcctatttttttttt

SEQ ID NO: 21843 - DNA, 291 bp, Zea mays
  Clone ID: LIB3152-017-P1-K1-A8
cggaatggcccgagctcgaaccacgcgtccggcggcgttccggtccgcggtggaccacctgtcgcagtactcgggcgagggcgggggcggtggcatgctgtacgtgcccgcgggcaagtggctgacgggccccttcaacctgaccagccacttcaccctctacctccaccaagacgccgtcatcctcggctcccaggacgtaggcgagtggccaatcgtggatcccctgccttcttacggaagagggagggacaaggtcggagggaggttcgctagcctcatctgttgatc

SEQ ID NO: 21844 - DNA, 367 bp, Zea mays
  Clone ID: LIB3152-017-P1-K1-A9
caactagcaacatataaagctcaatattgtaccaacaatggcagccaaaatagggggccttcttatgctccttggtctttctgcaagtgctgttacggcgaccattttcccacaatgctcacaagctcctatagcttcccttcttcccccgtacctctcaccagcggtgtcttcggtatgtgaaaacccaattcttcaaccctataggatccaacaggcaatcgcagctggcatcttacctttatcacccttgttcctccaacaatcatcagccctattacagcagttacctttggtgcatttattggcacagaacattatggctcatcaactacaacaacttgtgctagcaaaccttgctgtctac

SEQ ID NO: 21845 - DNA, 383 bp, Zea mays
  Clone ID: LIB3152-017-P1-K1-B1
atagaaagtggaatccagtagcaacaatagagcaacaatggagaccaagatattttcgctccttatgctccttgctctttctacatgtgttgctaacgcgacaattttccctcaatgctcacaagctcctatagcttccctttttcccccataccttccatcaattatagcttcagtatgtgaaaacccagctcttcaaccatataggcttcaacaagcaatcgcagcaagcaacatacctttatcgcccttgttgtgtcaacaatcgccagccctatctttggtgcagtcattggtacaaaccatcagggcacaacagctgcagcaactcgtgctacctgtgatcaaccaagtagctctggcaaaccttttctcctactctt

SEQ ID NO: 21846 - DNA, 379 bp, Zea mays
  Clone ID: LIB3152-017-P1-K1-B10
cccacgcgtccgatttgcagcaacaactattaccatttagccagctagctactgcctactctcaacaacaacaacttcttccatttaaccaattggccgcactgaaccccgctgcttatttgcagcagcaaatactactaccatttagccagctagctacagcaagccgtgcttccttcttgacacaacaacagttgctgccgttctaccagcagtttgcggctaaccccgcaaccctcttacaactacaacaattgttgccctttgtccaacttgctttgacaaacccagcagcctcctaccaacaacacatcattggtggtgccctcttttagattgcttattagatgtaattcaataataaagttttttggatgat

SEQ ID NO: 21847 - DNA, 374 bp, Zea mays
  Clone ID: LIB3152-017-P1-K1-B11
attgagaccaacaagcaacatatattgtggaatccagtagcaacaatagagcagcaatggctaccaagatattttccctccttatgctccttgctctttctgcatgtgttgctaacgcgacaattttccctcaatgctcacaagctcctatagcttcccttcttcccccataccttccatcaatgatagcttcagtatgtgaaaacccagctcttcaaccctataggctccaacaagcaatcgcagcaagcaacatacctttatcacccttgttttaacaatcgccaggcctatcttttgtgcagtcatttttatataccatttatgcacagcatctgcagcaaacttttgctacctgtgatcaaccaagtatc

SEQ ID NO: 21848 - DNA, 384 bp, Zea mays
  Clone ID: LIB3152-017-P1-K1-B2
aagcaacatagaaagtggaatacagtagcaacaatagagcaacaatggcggccgagatattttccatccttatgctccttgctctttctgcatgtgttgctaacgcgaccatttttcctcaatactcacaagctcctatagctgcccttcttcccccataccttccatcaatgaccgcttcagtatgtgaaaacccagcccttcaaccctacaggctccaacaagcaatcgcaacaagcaacttacctttatcacccctgttctttcaacaatcgccagccctatctttggtgcagtcattggtacaaaccatcagggcacaacagctgcagcaactcgtgctaccagtgatcagccaagtagctctggcaaacctttctccct

SEQ ID NO: 21849 - DNA, 379 bp, Zea mays
  Clone ID: LIB3152-017-P1-K1-B3
gcaaattgcaccaagaaatccatcgagaggccgtcgacaggggaattaatggcgtcgtcgtctagcagcagccaccgccgcctcatcctcgcagccgccgtcctgctctccgtgctcgcggctgccagcgccagcgccgggacctcctgcgtgccggggtgggccatcccgcacaacccgctcccgagctgccgctggtacgtgaccagccggacctgcggcatcgggccgcgcctcccgtggccggagctgaagaggagatgctgccgggagctggcggacatcccggcgtactgccggtgcacggcgctgagcatcctcatggacggcgcgatcccgccgggcccggacgcgcagctggaggtgccgctagaggacc

SEQ ID NO: 21850 - DNA, 381 bp, Zea mays
  Clone ID: LIB3152-017-P1-K1-B4
gcacaatagtgtaccaacaatggcagctaaaatattttgcctccttatgctccttggtctttctgcaagtgctgctacggcgaccattttcccacaatgctcacaagctcctatagcttcccttcttcccccgtacctctcaccaacggtgtcttcggtatgtgaaaacccaattcttcaaccctacaggatccaacaggcaatcgcagctggcatcttacctttatcacccttgttcctccaacaatcatcagccctattacagcagttacctttggtgcatttattggcacaaaacatcagggcacaacaactacaacaacttgtgctagcaaaccttgctgcctactctcagcaacagcagtttcttccattcaacca

SEQ ID NO: 21851 - DNA, 373 bp, Zea mays
  Clone ID: LIB3152-017-P1-K1-B5
cagcctcatccccagccacacccatgcccgtgccaacagccgcatccaagcccgtgccagctgcagggaacctgcggcgttggcagcaccccgatcctgggccagtgcgtcgagttcctgaggcatcagtgcagcccgacggcgacgccctactgctcgcctcagtgccagtcgttgcggcagcagtgttgccagcagctcaggcaggtggagccgcagcaccggtaccaggcgatcttcggcttggtccctccagtccatcctgcagcagcagccgcaaagcggccaggtcgcggggctgttggcggcgcagatagcgcagcaactgacggcgatgtgcggcctgcagcagccgactccatgcccctacgct

SEQ ID NO: 21852 - DNA, 376 bp, Zea mays
  Clone ID: LIB3152-017-P1-K1-B6
acgtcagcctagcaattagctcatcgactccagattggagaactcgacaccatgaaggtgctgatcgttgcccttgctctcctggcgctcgctgcgagcgccgcctccagtacaagcggcggctgtggctgccagacaccaccgtttcatctaccgcctccgttctatatgccgcctccgttctatctgccgccgcagcagcagccgcagccatggcaataccccactcaaccaccgcagctaagcccgtgccagcagttcggatcctgcggcgtcggcagcgtcggcagcccgttcctgggccagtgcgtcgagttcctgaggcaccagtgcagcccggcggcgacgccctacggctcgccacagtgccaggcgc

SEQ ID NO: 21853 - DNA, 367 bp, Zea mays
  Clone ID: LIB3152-017-P1-K1-B7
gctgttcagccgcctcttcgtcaagaaggagatgaggattctcatggtcgggcgcgatgcctccggtaagaccaccatcctctacaagctcaagctcggcgagatcgtcaccaccatccccactatcggattcaatgatgaaactgttgagtataagaacattagcttcactgtttgggatgttggtggccaggacaagatcaggcccctgtggaggcactactttcagaacacacagggacttatttttgttgtagacagcaaccacagggaacgtgttgttgaggctagagatgagctccacaggatgctgaatgaggatgagctgcgtgacgctgtgctgctcgtattgcaaacaaacaagatc

SEQ ID NO: 21854 - DNA, 379 bp, Zea mays
  Clone ID: LIB3152-017-P1-K1-B8
gcagacgttaacatgatgggatatgcaaatgctgagcagattgcatcaggaattcactttaggctaaaggcccgtgcctttatcgttgctgagcctaacggcaagcgtgtcgtgtttgtaaatcttgatgcttgcatggcatcacagcttgttactataaaggtgcttgaaaggcttaaagcaaggtatggagatctttataatgagaataatgtggctatcagtggaatccatacgcatgctggtcctggtggttatctgcagtatgtagtttatattgttacatcacttgggtttgttcgccaatcatttgatgtgattgtcaatggaatcgagcaatgcattgttgaagctcacaacaatctccaccctgggaaaa

SEQ ID NO: 21855 - DNA, 377 bp, Zea mays
  Clone ID: LIB3152-017-P1-K1-B9
aacaagcaacatagaaagtggaattcagtagcaacaatagagcaacaatggcgaccaagatattttccctccttatgctccttgctctttctgcatgtgttgctaacgcgacaattttccctcaatgctcacaagctcctatagcttcccttcttcccccataccttccatcaatgatagcttcagtatgtgaaaacccagctcttcaaccctataggctccaacaagcaatcgcagcaagcaacatacctttatcactcttgtttcaacaatcgccagccctatctttggtgcagtcattggtacaaaccatcatggcacagcagctgcagcaactcgtgctacctgtgatcaaccaagtagctctggcaaacctt

SEQ ID NO: 21856 - DNA, 384 bp, Zea mays
  Clone ID: LIB3152-017-P1-K1-C1
cggacgcgtgggcagtaccatcaatcattattcatcttagtagtataggcaccaaagtgaaatctgcaacatcaattatctaactccaaaaaccatgaagctggtgcttgtggttcttgctttcattgctttagtatcaagtgtttcttgtacacagacaggcggctgcagctgtggtcaacaacaaagccatgagcagcaacatcatccacaacaacatcatccacaaaaacaacaacatcaaccaccaccacaacatcaccagcagcagcaacaccaacaacaacaagttcacatgcaaccacaaaaacattagcaacaacaagaagttcatgttcaacaacaacaacaacaaccgcagcaccaacaacaacaacaacaaca

SEQ ID NO: 21857 - DNA, 232 bp, Zea mays
  unsure at all n locations
  Clone ID: LIB3152-017-P1-K1-C10
taacaaatgcgttcattatttttttttgctcacttgctcctagagccaagggagcatatttcctcccaccatttacttcaangatcttctaacatccatccgtgcattcctacatgctacaactagctcttgcagctatcgttttacaacaaccaatttcccaattgcaacatcaatccttggcacatcttaacctacaaaccatcttatcgcaacatcatcatcatattct

SEQ ID NO: 21858 - DNA, 372 bp, Zea mays
  Clone ID: LIB3152-017-P1-K1-C12
gatcattgtccctgagatgatttgttgcattgttggggtctacaacggcggggccttcaaccaggttgagatcaagcctgagatgatcggccactaccttgctgagttctccatctcctacaagccggtcaagcacggcaggcccggtatcggtgccacccactcctcgcggtttattcctctgaaatgagctgttactcggctttttagtatcccaagagtccgttggcaatgtttcattcatatttttctacttctttagtattccaagacattttgtgttgttccattcctagctaagaattcaaagctaatcatttttcaaatatgctgttttgttggaaaaaaattttttagtggcggtcttttttt

SEQ ID NO: 21859 - DNA, 378 bp, Zea mays
  Clone ID: LIB3152-017-P1-K1-C2
gcggcagtgcgtagagaggatcgtcgaacagaacagcatgaagatggtcatcgttctcgtcgtgtgcctggctctgtcagctgccagcgcctctgcaatgcagatgccctgcccctgcgcggggctgcagggcttgtacggcgctggcgccggcctgacgacgatgatgggcgccggcgggctgtacccctacgcggagtacctgaggcagccgcagtgcagcccgctggcggcggcgccctactacgccgggtgtgggcagacgagcgccatgtaccagccgctccggcaacagtgctgccagcagcagatgaggatgatggacgtgcagtccgtcgcgcagcagctgcagatgatgatgcagcttgagcgtgccgc

SEQ ID NO: 21860 - DNA, 382 bp, Zea mays
  Clone ID: LIB3152-017-P1-K1-C3
agcggtgtcttcggtatgtgaaaacccaattcttcaaccctacaggatccaacaggcaatcgcagctggcatcttacctttatcacccttgttcctccaacaatcatcagccctattacaacagttacctttggtgcatttattggcacaaaacatcagggcacaacaactacaacaacttgtgctagcaaaccttgctgcctactctcagcaacagcagtttcttccattcaaccaactaggttcattgaactctgcttcttatttgcaacaacaacaactaccattcagccagctacctgctgcctacccccagcaatttcttccattcaaccaactagcagcattgaactctcctgcttatttacagcagcaacaacta

SEQ ID NO: 21861 - DNA, 382 bp, Zea mays
  Clone ID: LIB3152-017-P1-K1-C4
agaccattagctttatctactccagagcgcagaagaacccgatcgacaccatgagggtgttgctcgttgccctcgctctcctggctctcgctgcgagcgccacctccacgcatacaagcggcggctgcggctgccagccaccgccgccggttcatctaccgccgccggtgcatctgccacctccggttcacctgccacctccggtgcatctcccaccgccggtccacctgccgccgccggtccacctgccaccgccggtccatgtgccgccgccggttcatctgccgccgccaccatgccactaccctactcaaccgccccggcctcagactcatccccagccacacccatgcccgtgccaacagccgcatccaagcccgtg

SEQ ID NO: 21862 - DNA, 355 bp, Zea mays
  Clone ID: LIB3152-017-P1-K1-C5
ggcggacccacgcgtccgaaagacctaccagtacctaatcggttctggaatggatcccggaccggacaacaagggggacctgggcttcgtgtacacaagcttccaggagcgcgcgacggacgtctagcacggcaacaccgcgcggctcgtcagggcgccgaggacagggccaagaaggacgagcccaggacggtcaagttcagctggatctttgatagggaagccgttgtttaggcacttgttgctgactgtgatatgtgctcagatcatgtcgctagctgtcagtgtctttgtcacaatgtgtttatgtgtttgaaatacagtaagagtgtttttttcctgcttaatttaaaaa

SEQ ID NO: 21863 - DNA, 266 bp, Zea mays
  Clone ID: LIB3152-017-P1-K1-C6
atccaatccagatcagcaaagcggtttttcgtagagaggatcgtcgaacagaggagggtgaagatggtcatcgttctcgtcgtgtgcctggctctgtcagctgccagcgcctctgcaatgcagatgccctgcccctgcgcggggctgcagggcttgtacggcgctggcgccggcctgacgacgatgatgggcgccggcgggctgtacccctacgcggagtacctgaggcagtcgcagtgcaacccgttggctgcggcgccctacta

SEQ ID NO: 21864 - DNA, 369 bp, Zea mays
  Clone ID: LIB3152-017-P1-K1-C7
cccacgcgtccgcaactagcaacatttaaagcacaatagtgtaccaacaatggcagccaaaatattttgcctccttatgctccttggtctttctgcaagtgctgctacggcgaccattttcccgaaatgctcgcaagctcctatagcttcccttcttcccccgtacctctcaccagcggtgtcttcggtatgtgaaaacccaattcttcaaccctacaggatccaacaggcaatcacagctggcatcttacctttatcacccttgttcctccaacaatcatcagccctattacatcagttaccttttgtgcatttattggcacaaaacattatggcacaacaacttcaacaacttgtgctagcaaacct

SEQ ID NO: 21865 - DNA, 373 bp, Zea mays
  unsure at all n locations
  Clone ID: LIB3152-017-P1-K1-C8
agctcatcgactccagattggagatctcgacaccatgaaggtgctgatcgggggccttgctctcctggcgctcgctgcgagcgccgcctccagtacaagcggcggctgtggctgccagacaccaccgtttcatctaccgcctccgttctatatgccgcctccgttctatctgccgccgcagcagcagccgcagccatggcaataccccactcaaccaccgcagctaagcccgtgccagcagttcggatcctgcggcgtcggcagcgtcggcagcccgttcctgggccagtgcgtcnagttcctgaggcactagtgcatcccggcggcgacgccctacggctcgccacagtgccaggcgctgcagcagcagtgc

SEQ ID NO: 21866 - DNA, 283 bp, Zea mays
  Clone ID: LIB3152-017-P1-K1-D1
cacaggctgcgcgatggtgctgtgggtcttcggctacggctccctcatctggaaccgcggcttcgacttcgacgacaaaatcctcggcttcatcaagggctacaagcgcacctttaatctcgcttgcattgaccacagaggcacaccggagcatccggcgaggacctgcacgcttgaaaccgacgacgaggccatatgctggggaattgcatattgtgtcaagggtggtccagaaaaagagctaaaagcaatacagtacttggagagaagagagtgtgagtac

SEQ ID NO: 21867 - DNA, 380 bp, Zea mays
  Clone ID: LIB3152-017-P1-K1-D10
cggacgcgtgggcaacaagcaacatagaaagtggaatccagtagcaacaatagagcaacaatggcgaccaagatattttccctccttatgctccttgctctttctgcatgtgttgctaacgcgacaattttccctcaatgctcacaagctcctatagcttcccttcttcccccataccttccatcaatgatagcttcagtatgtgaaaacccagctcttcaaccctataggctccaacaagcaatcgcagcaagcaacatacctttatcacccttgtttcaacaatcgccagccctatctttggtgcagtcattggtacaaaccatcagggcacagcagctgcagcaactcgtgctacctgtgatcaaccaagtagctct

SEQ ID NO: 21868 - DNA, 380 bp, Zea mays
  Clone ID: LIB3152-017-P1-K1-D11
ctcacacctgaacaacaagcatcttttaaagcggaacccagccacaacaatggggcgacattggccaccaacatatttcccctccttatgctcctcgctctatctgcatgtgttgctaacgcgacattctactctcaatgctcacaagctcctatagtttcccttcttacccaattccttacatcaatgattgcttcagtctttcaaaacccacctctgcaaccctataggctccaacaagcaatcgcagcaagcacacatacctttatcacccttgtttcaacaaatctccagccctatcttttgtgcagtcattggtacaaaccattaggtcacatcagctgcagcaactcttgctacctgtgatcaaccaagtagct

SEQ ID NO: 21869 - DNA, 105 bp, Zea mays
  Clone ID: LIB3152-017-P1-K1-D12
tctttactctttgtcaacaaacttttttttagtgaaatccagaaacattagtgcgtcaacattttctatcaccacatccccccttcttataccccaaaatctttt

SEQ ID NO: 21870 - DNA, 379 bp, Zea mays
  Clone ID: LIB3152-017-P1-K1-D2
ttttgagcattcagaaacacaccaagcgaagcacattagcaacaacctaacaacaatggctaccaagatattatccctccttgcgcttcttgcgctttttgcgagcgcaacaaatgcgttcattattccacaatgctcacttgctccaagttccattattacacagttcctcccaccagttacttcaatgggcttcgaacacccagctgtgcaagcctataggctacaacaagcaattgcggcgagcgtcttacaacaaccaatttcccagttgcaacaacaatccttggcacatctaacaatacaaaccatcgcaacgcaacagcaacaacaattcctaccagcactgagccacctagccatggtgaaccctgccgcc

SEQ ID NO: 21871 - DNA, 370 bp, Zea mays
  Clone ID: LIB3152-017-P1-K1-D3
gcccgttcctgggccagtgcgtcgagttcctgaggcaccagtgcagcccggcggcgacgccctacggctcgccacagtgccaggcgctgcagcagcagtgctgccaccagatcaggcaggtggagccgctgcaccggtaccaggcgacatacggtgtggtcctgcagtccttcctgcagcagcagccgcagggcgagctcgcggcgctgatggcggcccaggtagcgcagcagctgacggcgatgtgcggcctgcagctgcagcagccaggtccctgcccttgcaacgcagctgccggcggtgtctactactgaggaaactatgtactgtagtaataatgtaatggagccgctgactagctacctagctc

SEQ ID NO: 21872 - DNA, 381 bp, Zea mays
  Clone ID: LIB3152-017-P1-K1-D4
caactagctgcattgaactctgcttcttatttgcaacaacaacaactaccattcagccagctatctgctgcctacccccagcaatttcttccattcaaccaactgacagctttgaactctcctgcttatttacagcagcaacaactactaccattcagccagctagctggtgtgagccctgctaccttcttgacacaaccacaattgttgccgttctaccagcacgctgcgcctaacgctggcaccctcttacaactgcaacaattgctgccattcaaccaacttgctttgacaaacccaacagcattctaccaacaacccatcattggtggtgccctcttttagatttcttatgagttatagttcaataataaagttttt

SEQ ID NO: 21873 - DNA, 383 bp, Zea mays
  Clone ID: LIB3152-017-P1-K1-D5
caactagcaacatagaaagcacaatagtgtaccaacaatggcagccaaaatattttgcgctccttatgctccttggtatttctgcaagtgctgctacggcgaccattttcccgcaatgctcacaagctcctatagcttcccttcttcccccgtacctctcaccagcggtgtcttcggtatgtgaaaacccaattcttcaaccctacaggatccaacaggcaatcgcagctggcatcttacctttatcacccttgttcctccaacaatcatcagccctattacagcagttacctttggtgcatttattggcacaaaacatcagggcacaacaactacaacaacttgtgctagcaaaccttgctgcctactctcagcaacagcag

SEQ ID NO: 21874 - DNA, 385 bp, Zea mays
  Clone ID: LIB3152-017-P1-K1-D6
gaccaactagcaacatagaaagcacaatattgtaccaataatggcagccaaaatattttgcctcattatgctccttggtctttctgcaagtgctgctacggcgagcattttcccgcaatgctcacaagctcctatagcttcccttcttcccccatacctctcaccagcgatgtcttcagtatgtgaaaatccaattcttctaccctacaggatccaacaggcaatcgcagcaggcatcttacctttatcacccttgttcctccaacaatcatcagccctattacagcagttacctttggtgcatttattggcacaaaacatcagggcacaacaactacaacaactcgtgctagcaaaccttgctgcctactctcagcaacagcag

SEQ ID NO: 21875 - DNA, 377 bp, Zea mays
  Clone ID: LIB3152-017-P1-K1-D7
aattgcaccaagaaatccatcgagaggccgtcgacaggggaattaatggcgtcgtcgtctagcagcagccaccgccgcctcatcctcgcagccgccgtcctgctctccgtgctcgcggctgccagcgccagcgccgggacctcctgcgtgccggggtgggccatcccgcacaacccgctcccgagctgccgctggtacgtgaccagccggacctgcggcatcgggccgcgcctcccgtggccggagctgaagaggagatgctgccgggagctggcggacatcccggcgtactgccggtgcacggcgctgagcatcctcatggacggcgcgatcccgccgggcccggacgcgcagctggagggccgcctagaggacct

SEQ ID NO: 21876 - DNA, 378 bp, Zea mays
  Clone ID: LIB3152-017-P1-K1-D8
attagctttatctactccagagcgcagaagaacccgatcgacaccatgagggtgttgctcgttgccctcgctctcctggctctcgctgcgagcgccacctccacgcatacaagcggcggctgcggctgccagccaccgccgccggttcatctaccgccgccggtgcatctgccacctccggttcacctgccacctccggtgcatctcccaccgccggtccacctgccgccgccggtccacctgccaccgccggtccatgtgccgccgccggttcatctgccgccgccaccatgccactaccctacttaaccgccccggcctcaaccttatccccagccacacccatgcccgtgccaacagccgcattcaagcccgtgc

SEQ ID NO: 21877 - DNA, 247 bp, Zea mays
  Clone ID: LIB3152-017-P1-K1-D9
attagctttatctactccagatcgcataagaacccgatcgacaccatgaggggggtgctcgttgccctcgctctcctggctctcgctgcgagcgccacctccacgcatacaagcggcggctgcggatgccagccaccgccgccggttcatctaccgccgccggtgcatctgccaccttctgttcacctgccaccttccgtgcatctcccaccgtcgttccaccttgccgtcttctgtccacctgcca

SEQ ID NO: 21878 - DNA, 369 bp, Zea mays
  unsure at all n locations
  Clone ID: LIB3152-017-P1-K1-E1
ccaactagcaacatagaaagcacaatagtgtaccaacaatggcagccaaaatattttgcctccttatgctccttggtctttctgcaagtgctgctacggcgaccattttcccgcaatgctcgcaagctcctatagcttcccttcttcccccgtacctctcaccagcggtgtcttcggtatgtgaaaacccaattcttcaaccctacaggatccaacaggcaatcgcagctggcatcttacctttatcacccttgttcctccaacaatcatcagccctattacaacagtgacctttggtgcatttattgtcacaaaacatnagggcactacaactacaacatctttgtgctagcaaaccttgctgcctat

SEQ ID NO: 21879 - DNA, 383 bp, Zea mays
  Clone ID: LIB3152-017-P1-K1-E11
attttgagcattcagaaacacaccaagcgaagcacattagcaacaacctaacagcaatggctaccaagatattatccctccttgcgcttcttgcgctttttgcgagcgcaacaaatgcgttcattattccacaatgctcacttgctccaagttccattattacacagttcctcccaccagttacttcaatgggcttcgaacacccagctgtgcaagcctataggctacaacaagcaattgcggcgagcgtcttacaacaaccaatttcccagttgcaacaacaatccttggcacatctaacaatacaaaccatcgcaacgcaacagcaacaacaattcctaccagcactgagccacctagccatggtgaaccctgccgcctac

SEQ ID NO: 21880 - DNA, 63 bp, Zea mays
  unsure at all n locations
  Clone ID: LIB3152-017-P1-K1-E12
ggcgaccacgcgttctaanctaaacattcacaaacatttttttttaaacacactatcaacaac

SEQ ID NO: 21881 - DNA, 377 bp, Zea mays
  Clone ID: LIB3152-017-P1-K1-E3
attttcagcattcagaaacacaccaagcgaagcgcactagcaacaacctaacaacagtggctaccaagatattagccctccttgcgcttcttgcccttttagtgagcgcaacaaatgcgttcattattccacagtgctcacttgctcctagtgccattattccacagttcctcccaccagttacttcaatgggcttcgaacatccagccgtgcaagcctacaggctacaactagcgcttgcggcgagcgtcttacaacaaccaattgcccaattgcaacaacaatccttggcacatctaaacctacaaaccatcgcaacgcaacagcaacaacagtttctgccatcactgagccacctagccgtggtgaaccctgtc

SEQ ID NO: 21882 - DNA, 375 bp, Zea mays
  Clone ID: LIB3152-017-P1-K1-E4
ctttctgcaagtgctgctacggcgaccattttcccgcaatgctcgcaagctcctatagcttcccttcttcccccgtacctctcaccagcggtgtcttcggtatgtgaaaacccaattcttcaaccctacaggatccaacaggcaatcgcagctggcatcttacctttatcacccttgttcctccaacaatcatcagccctattacaacagttacctttggtgcatttattggcacaaaacatcagggcacaacaactacaacaacttgtgctagcaaaccttgctgcctactctcagcaacagcagttttttccattcaaccaactaggttcattgaactctgcttcttatttgcaacaacaacaactaccattc

SEQ ID NO: 21883 - DNA, 387 bp, Zea mays
  Clone ID: LIB3152-017-P1-K1-E5
tcgatttttccgaaatgcttgcaaggttctattggttcccttttttccccgtacctctcaccagcgggggcttccgtatgtgaaaacccaattcttcaaccctacaggatccaacaggcaatcacagctggcatcttacctttatcacccttgttcctccaacaatcatcagccctattacatcagttacctttggtgcatttattggcacaaaacatcagggcacaacaactacaacaacttgtgctagcaaaccttgctgcctactctcagcaacagcagtttcttccattcaaccaacttgctttgacaaacccagcagcgttctaccaacaacccatcattggtggtgccctcttttagatttcttatgagttatagttcaat

SEQ ID NO: 21884 - DNA, 376 bp, Zea mays
  Clone ID: LIB3152-017-P1-K1-E7
cgcccaccagcagctgcccccttgctgtcgccgcctctccgcgcgaccgatctaccgccgccgccaccatgtcgctgatcgccggcgaggacttccaacatattctgcgtctgctgaacaccaacgtggatgggaagcagaagatcatgttcgccatgacctccataaagggtgttgggcgccgcttctccaacatcgtctgcaagaaggccgacatcgacatgaacaagagggccggtgagctgacgcctgaagagctggagcgcctgatgacggtcgtggccaaccctaggcagttcaaggtgccggactggttcctcaacaggaagaaggattacaaggacggaaggttctcacaggtcgtttccaacgccct

SEQ ID NO: 21885 - DNA, 325 bp, Zea mays
  unsure at all n locations
  Clone ID: LIB3152-017-P1-K1-E8
agaccattagctttatctactccatagcgcagaagaacccgatcgacaccagtgcggtgttgctcgttgccctcgctctcctggctctcgctgcgagcgccacctccacgcatacaagcggcggctgctgctgccagccaccgacgccggttcatactaccgtcactgtgcatctgccacctcctttttacaagccaccttctaagcatgccctttctaccttttatattttttctgctgagcattttcctcaaatagtatcatttttctttttactttttttttgtggactattattntaattttttattactttatttttttt

SEQ ID NO: 21886 - DNA, 259 bp, Zea mays
  Clone ID: LIB3152-017-P1-K1-E9
agcccataccctacttaacctttttttcccaaacctaacccaccgacacaggcgatgctcttgccaactttccttatcccaacccaagctccatatttcataataactcttctttctttcagcaacaacctccaatttctgtctccaatatctttttttatttctgatagcattattttcacacccatactttttactctccaaccttatttttttttatataccaaatctttttctttcatctaattttttttctttc

SEQ ID NO: 21887 - DNA, 381 bp, Zea mays
  Clone ID: LIB3152-017-P1-K1-F1
tgcgttcattattccacagtgctcacttgctcctagtgccattattccacagttcctgccaccagttacttcaatgggcttcgaacatccagccgtgcaagcctacaggctacaactagcgcttgcggcgagcgtcttacaacaaccaattgcccaattgcaacaacaatccttggcacatctaaacctacaaaccatcgcaacgcaacagcaacaacagtttctgccatcactgagccacctagccgtggtgaaccctgtcgcctacttgcaacagcagctacttgcatccaacccacttgctctggcgaacgtagctgcataccagcaacaacaacgtctgcaacagtttatgccagcgctcagtcaactagccatggt

SEQ ID NO: 21888 - DNA, 385 bp, Zea mays
  Clone ID: LIB3152-017-P1-K1-F10
attcagaaacacaccaagcgaagcgcactagcaacaacctaacaacaatggctaccaagatattatccctccttgcgcttcttgcgctttttgcgagcgcaacaaatgcgtccattattccacaatgctcacttgctcctagttccattattccacagttcctcccaccagttacttcaatggccttcgaacacccagctgtgcaagcctataggctacaacaagcgattgcggcgagcgtcttacaacaaccaattgcccaattgcaacaacaatccttggcacatctaacaatacaaaccatcgcaacgcaacagcaacaacagttcctaccagcactgagccacctagccatggtgaaccctgtcgcctacttgcaacagca

SEQ ID NO: 21889 - DNA, 383 bp, Zea mays
  Clone ID: LIB3152-017-P1-K1-F11
attcaaaaacacaccaagcttatttttctagcaacaacctaacaacaatggggggcaagatattatccctccttgcgcttcttgcgctttttgcgagcgcaacatatgcgtccattattccacaatgctcacttgctcctagtttcattattccacagttttttcccaccagttactttaatgtccttcgaacacttatctgtgcaagcctataggctacaacttgcgattgctgcgagcgtctttcaacaaccaatttcctaattgcaacaacaattcttggctcatttaataattctaactattgcttcgctacattttaactttctttactatctctgatttacttagccttgtttaactctttctttctactttcttca

SEQ ID NO: 21890 - DNA, 384 bp, Zea mays
  Clone ID: LIB3152-017-P1-K1-F12
gaccaacaagcaacatagaaagtggaatccagtagcaacaatagagcaacaatggcgaccaagatattttccctccttatgctccttgctctttctgcatgtgttgctaacgcgacaattttccctcaatgctcacaagctcctatagcttcccttcttcccccataccttccatcaatgatagcttcagtatgtgaaaacccagctcttcaaccctataggctccaacaagcaatcgcagcaagcaacatacctttatcacccttgtttcaacaatcgccagccctatctttggtgcagtcattggtacaaaccatcagggcacagcagctgcagcaactcgtgctacctgtgatcaaccaagtagctctggcaaacctttct

SEQ ID NO: 21891 - DNA, 389 bp, Zea mays
  Clone ID: LIB3152-017-P1-K1-F2
agccttccgaagaaccacaccaggcgaagcacattatcaacaacctaacaacaatggctaccaagatattatccctccttgcgcttcttgcgctttttgcgagcgcaacaaatgcgttcattattccacaatgctcacttgctccaagttccattattacacagttcctcccaccagttacttcaatgggcttcgaacacccagctgtgcaagcctataggctacaacaagcaattgcggcgagcgtcttacaacaaccaatttcccagttgcaacaacaatccttggcacatctaacaatacaaaccatcgcaacgcaacagcaacaacaattcctaccagcactgagccacctagccatggtgaaccctgccgcctacttgcaacag

SEQ ID NO: 21892 - DNA, 178 bp, Zea mays
  Clone ID: LIB3152-017-P1-K1-F3
cctccccactgcctcgtgtggccgtcgtctcccgttcggaacgccaagcccccgcgtggggcgaaatggcccccaagcgaggtggcagggcgccggtgccggccaagaagaagacggataaagtgacgaaccctctattcgagaagaggccgaagcagttcggcatcggcggctcgtt

SEQ ID NO: 21893 - DNA, 385 bp, Zea mays
  Clone ID: LIB3152-017-P1-K1-F4
aagcaacatagaaagtggaatccagtagcaacaatagagcaacaatggcgaccaagatattttccctccttatgctccttgctctttctgcatgtgttgctaacgcgacaattttccctcaatgctcacaagctcctatagcttcccttcttcccccataccttccatcaatgatagcttcagtatgtgaaaacccagctcttcaaccctataggctccaacaagcaatcgcagcaagcaacatacctttatcacccttgtttcaacaatcgccagccctatctttggtgcagtcattggtacaaaccatcagggcacagcagctgcagcaactcgtgctacctgtgatcaaccaagtagctctggcaaacctttctccctactc

SEQ ID NO: 21894 - DNA, 390 bp, Zea mays
  Clone ID: LIB3152-017-P1-K1-F5
aagcaacacaaaaagctgcatccattttcttcagcccagcaacaatggcgcccggggtgattttgcctccttatgctccatgctctttctcgcatgtagggctaacgcgacaatcttccctcaatgctcacaagctcctatagcttcccttcttcccccataccttccatcaatgatagcttcagtatgtgaaaacccagctcttcaaccctataggctccaacaagcaatcattgcaggcagcagtctacaacaacccatggcccaattgcaaccacccttctcggcgcatctaacattgcaacaaaccataacgccacagcatctgcagtaactactgctacctgtgatcctagccatggtgaaccctgtcgcctacttgcaacagca

SEQ ID NO: 21895 - DNA, 385 bp, Zea mays
  Clone ID: LIB3152-017-P1-K1-F6
caacaagcaacatagaaagtggaatccagtagcaacaatagagcaacaatggagaccaagatattttccctccttatgctccttgctctttctacatgtgttgctaacgcgacaattttccctcaatgctcacaagctcctatagcttccctttttcccccataccttccatcaattatagcttcagtatgtgaaaacccagctcttcaaccatataggcttcaacaagcaatcgcagcaagcaacatacctttatcgcccttgttgtgtcaacaatcgccagccctatctttggtgcagtcattggtacaaaccatcagggcacaacagctgcagcaactcgtgctacctgtgatcaaccaagtagctctggcaaacctttctc

SEQ ID NO: 21896 - DNA, 368 bp, Zea mays
  unsure at all n locations
  Clone ID: LIB3152-017-P1-K1-F7
caacaagcaacatataaagtgttatccattagcaacaatagagcaacaatggaggccaatatattttccctccttatgctccttgctctttctacatgtgttgctaacgcgacaattttccctcaatgctcacaagctcctatagcttccctttttcccccataccttccatcaattatagcttcagtttgtgaaaacccagctcttcaaccatataggctttaacaagcaatcttatcaagcaacatacctttatcgcccttgttgtgtcaacaatcgccagtccttatcttnggtgcatttattgttacaaaccatcatggcacaacaactttatcaactcgtgcttcctgttatcaaccaatttt

SEQ ID NO: 21897 - DNA, 377 bp, Zea mays
  Clone ID: LIB3152-017-P1-K1-F8
gcaacagcagtttcttccattcaaccaactggctgcattgaactctgctgcttatttgcaacaacaactaccattcagtcagctagctgctgcctacccccagcaatttcttccattcaaccaactggcagcattgaactctgctgcttatttacaacagcaacagctaccaccattcagccagctagctgatgtgagccctgttgccttcttgacacaacaacagttgttgccgttctacctgcacgctgcgcctaacgctggcaccctcttacaactgcaacaattgctgccattcaaccaacttgctttgacaaacccaacagcgttctaccaacaacccatcattggtggtgccctcttttagattgcttatg

SEQ ID NO: 21898 - DNA, 386 bp, Zea mays
  Clone ID: LIB3152-017-P1-K1-G10
gcaacatagaaagcacaatagtgtaccaacaatggcagccaaaatattttgcctccttatgctccttggtctttctgcaagtgctgctacggcgaccattttcccacaatgctcacaagctcctatagcttcccttcttcccccgtacctctcaccagcggtgtcttcggtatgtgaaaacccaattcttcaaccctataggatccaacaggcaatcgcagctggcatcttacctttatcacccttgttcctccaacaatcatcagccctattacagcagttacctttggtgcatttattggcacaaaacatcagggcacaacaactacaacaacttgtgctagcaaaccttgctgcctactctcagcaacaacagtttcttccat

SEQ ID NO: 21899 - DNA, 376 bp, Zea mays
  Clone ID: LIB3152-017-P1-K1-G2
tattttgagcattcagaaacacaccaagcgaagcgcactagcaacgacctaacaacaatggctaccaagatattagccctccttgcgcttcttgccctttttgtgagcgcaacaaatgcgttcattattccacaatgctcacttgctcctagtgccattattccacagttcctcccaccagttacttcaatgggcttcgaacacctagctgtgcaagccaacatgcaacaacaagcgcttgcggcgagcgtcttacaacaaccaattgcccaattgcaacaacaatccttgccacatctaacaatacaagccatcacaacgcaacagcaacaacagttcctaccagcactgagccacctagccatggtgaaccctg

SEQ ID NO: 21900 - DNA, 380 bp, Zea mays
  Clone ID: LIB3152-017-P1-K1-G3
ggtgaaccctgtcgcctacctacaacagcaacaattgctttcatctagcccgctcgctgtgggcaatgcacctacgtacctacaacaacagttgctgcaacagattgtaccagctctgactcagctagctgtggcaaaccctactgcctacttgcaacagttgcttccattcaaccaactggctgtgtcgaactctgctgtgtacctacaacagcgacaacagttacttaatccactagcagtggctaacccattggtcgctaacttcctgcagcagcaacaattgctgccatacaaccagttctctttgatgaaccctgccttgcagcaacccatcgtttgaggtgccatcttttagattacatatgagatgtactcaa

SEQ ID NO: 21901 - DNA, 383 bp, Zea mays
  Clone ID: LIB3152-017-P1-K1-G4
ggggcagctccggcacgccaccgcgcacccgaagtgcggtacctccacaccccggagcacctctcggaggacgagctggtgtcgctggtcggcggcgagggctccctggacctggtcgtggcggccacctccatccactggttcgacgtcccgctcttctacgccgtcgtgagccgcgccctgcggaagcccggcggcgtgctcgccgtgtggggctacaactacgagatccacccgttcgaggacgcgctgcacggccagctctacccggccctgcggccgtacctggacccgcgggcggggctggccatggagcggtaccggtccctgccgttcccgttcgagcccgtcggggtgggcgccgagggcacgcccgccgacgt

SEQ ID NO: 21902 - DNA, 370 bp, Zea mays
  unsure at all n locations
  Clone ID: LIB3152-017-P1-K1-G5
cttcggtatgtgaaaacccaattcttcaactcctacaggatccaacaggcaatcggaggtggcattttacctttatgacccttgttcctccaacaatcatcagccctattacaacagttacctttggttcatttattggcacaaaacatgatgggtcaacaactacaacaacttgtgctagcaaaccttggtgcctactcttagctacagcaaggtggtttcattcaaccaaactaaanttttttatgaacacttttttcttttttttcaacattcaacaaacctcttcttttttgttggtatttttttttttttattactccctctattattttttttttttcaattattttttattttattggtatat

SEQ ID NO: 21903 - DNA, 186 bp, Zea mays
  Clone ID: LIB3152-017-P1-K1-G7
gcggaccgtgggcggaccgtgggtctgaccgtgggcaaagcggcagtgcgtagagaggatcgcaacaaacagcatgaagatggtcatcgtctcgcggtgcctgctctgtcagctgccacgcctctgcaatcagatgccctgcccctgcgcgggctgcagcttgtacggcctgcgccgcctgacaca

SEQ ID NO: 21904 - DNA, 380 bp, Zea mays
  Clone ID: LIB3152-017-P1-K1-G8
ctaacaacaatggctaccaagatattatccctccttgcgcttcttgcgctttttgcgagcgcaacaaatgcgtccattattccacaatgctcacttgctcctagttccattattccacagttcctcccaccagttacttcaatggccttcgaacacccagctgtgcaagcctataggctacaacaagcgattgcggcgagcgtcttacaacaaccaattgcccaattgcaacaacaatccttggcacatctaacaatacaaaccatcgcaacgcaacatcaacaacagttcctaccagcactgagccacctagccatggtgaaccctgtcgcctacttgcaacagcagctgcttgcatccaacccacttgctctagcaat

SEQ ID NO: 21905 - DNA, 373 bp, Zea mays
  Clone ID: LIB3152-017-P1-K1-G9
gaaagcacaatagtgtaccaacaatggcagccaaaatattttgcctccttatgctccttggtctttctgcaagtgctgctacggcgaccattttcccgaaatgctcgcaagctcctatagcttcccttcttcccccgtacctctcaccagcggtgtcttcggtatgtgaaaacccaattcttcaaccctacaggatccaacaggcaatcacagctggcatcttacctttatcacccttgttcctccaacaatcatcagccctattacatcagttacctttggtgcatttattggcacaaaacatcatggcacaacaactacaacaacttgtgctagcaaaccttgctgcctactctcagcaacagcagtttct

SEQ ID NO: 21906 - DNA, 379 bp, Zea mays
  Clone ID: LIB3152-017-P1-K1-H1
gagaccaacaagcaacatagaaagtggaatccagtagcaacaatagagcaacaatggagaccaagatattttccctccttatgctccttgctctttctacatgtgttgctaacgcgacaattttccctcaatgctcacaagctcctatagcttccctttttcccccataccttccatcaattatagcttcagtatgtgaaaacccagctcttcaaccatataggcttcaacaagcaatcgcagcaagcaacatacctttatcgcccttgttgtgtcaacaatcgccagccctatctttggtgcagtcattggtacaaaccatcaaggcacaacagctgcagcaactcgtgctacctgtgatcaaccaagtagctctggc

SEQ ID NO: 21907 - DNA, 386 bp, Zea mays
  Clone ID: LIB3152-017-P1-K1-H10
gagcattcagaaacacaccaagcgaagctacctagcaacgacttaacaacaatggctaccaagatattagccctccttgcgcttcttgccctttttgtgagcgcaacaaatgcgttcattattccacaatgctcacttgctcctagtgccattataccacagttcctccgaccagttacttcaatgggcttcgaacacctagctgtgcaagcctacaggctacaacaagcgcttgcggcgagcgtcttacaacaaccaattaaccaattgcaacaacaatccttggcacatctaaccatacaaaccatcgcaacacaacagcaacaacagttcctaccagcactgagccaactagatgtggtgaaccctgtcgcctacttgcaaca

SEQ ID NO: 21908 - DNA, 381 bp, Zea mays
  unsure at all n locations
  Clone ID: LIB3152-017-P1-K1-H11
gagcattcataaacacaccattcttttctacctaccaacgacttaacaacaatggcttccatgatattagcccttcttgcgcttcttgccctttttgtgagcgcaacaaatgcgttcattattccacaatgctcacttgctcctagtgccattataccacatntcctccgaccagttacttcaatgggcttcgaacacctagctgtgcaagcctacaggctacaacaagcgcttgctgcgagcgtcttacaacaaccaattaaccaattgcaacaacaatccttggcacatttaaccatacaaaccatttcatcacaacatcatcaactttttctaccatcactgaaccaactagatttggtgaaccctgtcttctacttg

SEQ ID NO: 21909 - DNA, 386 bp, Zea mays
  Clone ID: LIB3152-017-P1-K1-H12
acgacaagagactcactgccttccatcctgaaatcgaggagctcatctacagcgacgtcgagaactccgagcacaagttcgtgctgaaggacaagaagaagccgatcatcttctcgatggcgcgtctcgaccgcgtgaagaacatgacaggcctggtggagatgtacggcaagaacgcgcgcctgagggagctggcgaacctcgtgatcgtcgccggtgaccacggcaaggagtccaaggacagggaggagcaggcggagttcaagaagatgtacagcctcatcgacgagtacaagttgaagggccatatccggtggatctcggcgcagatgaaccgtgtccgcaacggggagctgtaccgctacatttgtgataccaagggcgca

SEQ ID NO: 21910 - DNA, 375 bp, Zea mays
  Clone ID: LIB3152-017-P1-K1-H2
attttgagcattcagaaacacaccaagcgaagcacattagcaacaacctaacaacaatggctaccaagatattatccctccttgcgcttcttgcgctttttgcgagcgcaacaaatgcgttcattattccacaatgctcacttgctccaagttccattattacacagttcctcccaccagttacttcaatgggcttcgaacacccagctgtgcaagcctataggctacaacaagcaattgcggcgagcgtcttacaacaaccaatttcccagttgcaacaacaatccttggcacatctaacaatacaaaccatcgcaacgcaacagcaacaacaattcctaccagcactgagccacctagccatggtgaaccctg

SEQ ID NO: 21911 - DNA, 260 bp, Zea mays
  Clone ID: LIB3152-017-P1-K1-H3
aataccaacatgcaacatcaaacgttttttacaacatcaacaacaacctaacaacgagggctactatatttttcttcctcactccccttgctgcgcttacatctatcgcaacaactacatttattattcaacaatgataacctgctataacttccattattacacaataccttccattaattatttcaatagtctgtgaacacccagctctgcaatcatataggctacaacaagcaatcgcatcaagcaacatacaacaa

SEQ ID NO: 21912 - DNA, 393 bp, Zea mays
  Clone ID: LIB3152-017-P1-K1-H4
taccggtacggaatggccggacccacccgtccgattttcagcattcagaaacacaccaagcgaagcgcactagcaacaacctaacaacaatggctaccaagatattagccctccttgcgcttcttgcccttttagtgagcgcaacaaatgcgttcattattccacagtgctcacttgctcctagtgccattattccacagttcctcccaccagttacttcaatgggcttcgaacatccagccgtgcaagcctacaggctacaactagcgcttgcggcgagcgtcttacaacaaccaattgcccaattgcaacaacaatccttggcacatctaaacctacaaaccatcgcaacgcaacagcaacaacagtttctgccatcactgagccacctag

SEQ ID NO: 21913 - DNA, 394 bp, Zea mays
  Clone ID: LIB3152-017-P1-K1-H6
cgagaaacacaccgagcgaagcacattagcaacaacctaacaacaatggctaccaagatattatccctccttgcgcttcttgcgctttttgcgagcgcaacaaatgcgttcattattccacaatgctcacttgctccaagttccattattacacagttcctcccaccagttacttcaatgggcttcgaacacccagctgtgcaagcctataggctacaacaagcaattgcggcgagcgtcttacaacaaccaatttcccagttgcaacaacaatccttggcacatctaacaatacaaaccatcgcaacgcaacagcaacaacaattcctaccagcactgagccacctagccatggtgaaccctgccgcctacttgcaacagcagttgcttgcat

SEQ ID NO: 21914 - DNA, 291 bp, Zea mays
  Clone ID: LIB3152-017-P1-K1-H7
caactagcaacatagaaagcacaatagtgtaccaacaatggccgccaaaatattgggccttcttatgctcctcgctctttgcgcaagtgctgataccgacacaatctttcatgaatgcatacaggtcactatatctatgttccattattacacacctttcaccaaccagtgtacttcaatgtggcttagaacacccatctaagcaagcctatatgctacaacaagcaatagctgcgtgcgtcttacaacaaccaatttcccagttgcaacaacaatccttagtcacatcta

SEQ ID NO: 21915 - DNA, 75 bp, Zea mays
  Clone ID: LIB3152-017-P1-K1-H8
cacaacacacaaataaacctttttttctaccacctatcaccaccaaaacaagagttttattattcctttcactcc

SEQ ID NO: 21916 - DNA, 379 bp, Zea mays
  Clone ID: LIB3152-017-P1-K1-H9
atctaaacctacaaaccatcgcatctctatcagcaacaacagtttctgccaggacgtagcctcctagcctttgtgaaccctgccgcctacttgcaacagcagctacttgcattcaacccacttgctctggcgaacgtagctgcataccagcaacaacaacgtctgcaacattttatgccagcgctcattcaactagccatggtgaaccttgtcgcctacctactacatcaacaattgcttttatctaacccgttcgctttgggcaatgcacttacttacctacaacaacagtttgctgcatcatattcgttccatctcttacttaactagcttttgcaaaccctactgcctactttcaacatatgctttctttcaacca

SEQ ID NO: 21917 - DNA, 378 bp, Zea mays
  Clone ID: LIB3152-018-P1-K1-A10
cccacgcgtccgcagaccattagctttatctactccagagcgcagaagaacccgatcgacaccatgagggtgttgctcgttgccctcgctctcctggctctcgctgcgagcgccacctccacgcatacaagcggcggctgcggctgccagccaccgccgccggttcatctaccgccgccggtgcatctgccacctccggttcacctgccacctccggtgcatctcccaccgccggtccacctgccgccgccggtccacctgccaccgccggtccatgtgccgccgccggttcatctgccgccgccaccatgccactaccctactcaaccgtcccggcctcagcctcatccccagccacacccatgcccgtgccaacag

SEQ ID NO: 21918 - DNA, 377 bp, Zea mays
  Clone ID: LIB3152-018-P1-K1-A11
gttgctcgaatggaaaaaatttttttcacttaaccctgatccttatttgggcgaacagctactactaccattcagccagctagcttctgtctactgtcagtagctacaagctcttccatttaaccaactagccgcacttaacccttctacttatctccagcagtaaatactactaccattttgccagttagctacaacatgcacctcttacttcttgacacaacaacaattgcttccgttctaccagctgtttgtggctaaccccgtaaccctattacaactgcaacagttgttgtcctttgtccaacttgctttgacatacccagctgccttgtactaacaacacattattaggcagagccatcttttagattgct

SEQ ID NO: 21919 - DNA, 216 bp, Zea mays
  Clone ID: LIB3152-018-P1-K1-A12
gttgttcaaaatggctcttcattttctgaaagggaaccaggcaattcgtgagagaaaagatcaacggataaaatggacgacttttgccacaaggatagtttctctgaagtgtcctatgaatacctggtaagggtggtcaaggtgcttgaattgtaaggccttttttgaaccaaacttaaggttgaatttttttacagggttaacctaacttgccac

SEQ ID NO: 21920 - DNA, 378 bp, Zea mays
  Clone ID: LIB3152-018-P1-K1-A2
aatattttgagcattcagaaacacaccaagcgaagcacattagcaacaacctaacaacaatggctaccaagatattatccctccttgcgcttcttgcgctttttgcgagcgcaacaaatgcgttcattattccacaatgctcacttgctccaagttccattattacacagttcctcccaccagttacttcaatgggcttcgaacacccagctgtgcaagcctataggctacaacaagcaattgcggcgagcgtcttacaacaaccaatttcccagttgcaacaacaatccttggcacatctaacaatacaaaccatcgcaacgcaacagcaacaacaattcctaccagcactgagccacctagccatggtgaaccctg

SEQ ID NO: 21921 - DNA, 323 bp, Zea mays
  Clone ID: LIB3152-018-P1-K1-A3
ctagctgtggcaaaccctactgcctacttgcaacagttgcttccattcaaccaactggctgtgtcgaactctgctgtgtacctacaacagcgacaacagttacttaatccactagcagtggctaacccattggtcgctaacttcctgcagcagcaacaattgctgccatacaaccagttctctttgatgaaccctgccttgcagcaacccatcgttggaggtgccatcttttagattacatatgagatgtactcaacaatggtgccctcataccggcatgtgtttcctagaaataatcaatatattgattgagatttatcttg

SEQ ID NO: 21922 - DNA, 373 bp, Zea mays
  Clone ID: LIB3152-018-P1-K1-A5
agccctatctttggtgcagtcattggtacaaaccatcagggcacagcagctgcagcaactcgtgctacctgtgatcaaccaagtagctctggcaaacctttctccctactctcagcaacaacaatttcttccattcaaccaactgtctacattgaaccgtgctgcttatttgcagcaacaactattaccattcagccagctagctactgcctactctcagcaacaacaacttcttccatttaaccaattggccgcactgaaccccgctgcttatttgcagcagcaaatactactaccatttagccagctagctgcagcaagccgtgcttccttcttgacacagcaacagttgctgcctttctaccagcagttt

SEQ ID NO: 21923 - DNA, 262 bp, Zea mays
  Clone ID: LIB3152-018-P1-K1-A6
gaaaacccagctcttcaaccctataggctccaacaagcaatcgcagcaagcaacagacctttatcacccttgtttcaacaatcgccagccctatctttggtgcagtcattggtacaaaccatcagggcacagcagctgcagcaactcgtgctacctgtgatcaaccaagtagctctggcaaacctttctccctactctcagcaacaacaatttcttccattcaaccaactgtctacattgaaccgtgctgcttatttgcagc

SEQ ID NO: 21924 - DNA, 360 bp, Zea mays
  Clone ID: LIB3152-018-P1-K1-A7
gaaacacaccaagcgaagcgctctatcaacaacctaacaacaatggctaccaagatattatccctccttgcgcttcttgcgctttttgcgagcgcaacaaatgcgtccattattccacaatgctcacttgctcctagttccattattccacagttcctcccaccagttacttcaatggccttcgaacacccagctgtgcaagcctataggctacaacaagcgattgcggcgagcgtcttacaacaaccaattgcccaattgcaacaacaatccttggcacatctaacaatacaaaccatcgcaacgcaacagcaacaacagttcctaccagcactgagccacctagccatggtgaaccct

SEQ ID NO: 21925 - DNA, 374 bp, Zea mays
  Clone ID: LIB3152-018-P1-K1-A8
cggacgcgtgggcggcaacgccgtcaacgtcctgcgcgtcgctccgagcaaggctatcgagcatttcacctatgacacggccaagaagttcctaacccccaagggcgacgagccgcccaagatcccgatccccactccgctggttgccggagctctagccggattcgcctcaaccttgtgcacctaccccatggagctgatcaagaccagggtcaccatcgagaaggacgtatacgacaacgtcgcgcacgcgttcgtgaagatcctacgcgacgagggcccgtcggagctgtaccgtgggctgacacccagcctgatcggcgtggtgccgtacgcggcctgtaacttctacgcctacgagacgctgaagcggc

SEQ ID NO: 21926 - DNA, 378 bp, Zea mays
  Clone ID: LIB3152-018-P1-K1-A9
cttcaaccctataggctccatcttgtctaatcgcagcaagcaacataccttgatgagccttgtttcaacaatcgccagccctatctttggtgcagtcattggtacaaaccatcagggcacagcagctgcagcaactcgtgctacctgtgatcaaccaagtagctctggcaaacctttctccctactctcagcaacaacaatttcttccattcaaccaactgtctacattgaaccgtgctgcttatttgcagcaacaactattaccattcagccagctagctactgcctactctcagcaacaacaacttcttccatttaaccaattggccgcactgaaccccgctgcttatttgcagcagcaaatactactaccattta

SEQ ID NO: 21927 - DNA, 378 bp, Zea mays
  Clone ID: LIB3152-018-P1-K1-B1
gcattcagaaacacaccaagcgaatcgcactagcaacaacctaacaacaatggctaccaagatattagccctccttgcgcttcttgcccttttagtgagcgcaacaaatgcgttcattattccacagtgctcacttgctcctagtgccattattccacagttcctcccaccagttacttcaatgggcttcgaacatccagccgtgcaagcctacaggctacaactagcgcttgcggcgagcgtcttacaacaaccaattgcccaattgcaacaacaatccttggcacatctaaacctacaaaccatcgcaacgcaacagcaacaacagtttctgccatcactgagccacctagccgtggtgaaccctgtcgcctactt

SEQ ID NO: 21928 - DNA, 369 bp, Zea mays
  Clone ID: LIB3152-018-P1-K1-B10
gttactgagtgtgccggagtggtattcgtgttccgccgggtgccgaggtggcctcgcggtcttctgccgtctcatcgtcgcctgctccccgtcgcgttcatcccgaggcatatcttggtcttgtaattgtataaaaagaaggtttggggaatcaggtttatctaaccagtggacatggtatcagttaatcttgggttagttcattatgtactggaccacatatatggaacacttcttcatcgcaccaaactaggaacaccatttttctcaaaaggatggggaggtaccaaacttgatttgctagagaagatggtgaagcagttgtttcccgaggcacgttgccaaaactggccaccaactgctgtgcag

SEQ ID NO: 21929 - DNA, 361 bp, Zea mays
  Clone ID: LIB3152-018-P1-K1-B11
attgagaccaactagcaacatataaagcacaatagtgtaccaacaatggcaggcaaaatattttgcttccttatgctccttggtctttctgcaagtgctgctaccgcaaccattttcccacaatgctcacaagctcctatagcttcctttcttcccccatacctctcaccagcggtgtcttcagtatgtgaaaacccaattcttcaaccctacaggatccaacaggcaatcgcagcaggcatcttacctttatcacccttgttcctccaacaaccgtcagccctattacagcagttacctttggtgcatttgttggcacaaaacatcaaggcacaacatctacaacaacttgtgctaggaa

SEQ ID NO: 21930 - DNA, 374 bp, Zea mays
  Clone ID: LIB3152-018-P1-K1-B12
ggaatacagtagcaacaatagagcaacaatggcggccaagatattttccatccttatgctccttgctctttctgcatgtgttgctaacgcgaccatttttcctcaatactcacaagctcctatagctgcccttcttcccccataccttccatcaatgaccgcttcagtatgtgaaaacccagcccttcaaccctacaggctccaacaagcaatcgcaacaagcaacttacctttatcacccctgttctttcaacaatcgccagccctatctttggtgcagtcattggtacaaaccatcagggcacaacagctgcagcaactcgtgctaccagtgatcagccaagtagctctggcaaacctttctccctactctc

SEQ ID NO: 21931 - DNA, 376 bp, Zea mays
  Clone ID: LIB3152-018-P1-K1-B2
cggacgcgtgggttgagaccaactagcaacatagaaagcacaatagtgtaccaacaatggcagccaaaatattttgcttccttatgctccttggtctttctgcaagtgttgctaccgcaaccattttcccacaatgctcacaagctcctatagcttcccttcttcccccatacctctcaccagcggtgtcttcaatgtgtgaaaacccaattgttcaaccctacaggatccaacaggcaatcgcaacaggcatcttaccattatcacccttgttcctccaacaaccgtcagccctattacagcagttacctttggtccatttggtggcacaaaacatcagggcacaacaactacaacaacttgtgctagcaaacct

SEQ ID NO: 21932 - DNA, 380 bp, Zea mays
  Clone ID: LIB3152-018-P1-K1-B3
ccaactagcaacatagaaagcacaatagtgtaccaacaatggcagctaaaatattttgcctccttatgctccttggtctttctgcaagtgctgctacggcgaccattttcccacaatgctcacaagctcctatagcttcccttcttcccccgtacctctcaccaacggtgtcttcggtatgtgaaaacccaattcttcaaccctacaggatccaacaggcaatcgcagctggcatcttacctttatcacccttgttcctccaacaatcatcagccctattacagcagttacctttggtgcatttattggcacaaaacatcagggcacaacaactacaacaacttgtgctagcaaaccttgctgcctactctcagcaacag

SEQ ID NO: 21933 - DNA, 204 bp, Zea mays
  Clone ID: LIB3152-018-P1-K1-B4
aaaaagcatgagcaaaagttggatcgctagtgggctgggtcccgggcattatgcataggagtatgacatggtggtagacgattgataaatgatggatgagaaactgggttggtggctggaactgtcataactactgtgcattctatggcgcaatatgggtcgccttgatatgaatcgagttactgttcgttttactgtacttat

SEQ ID NO: 21934 - DNA, 374 bp, Zea mays
  Clone ID: LIB3152-018-P1-K1-B5
attttgagcattcagaaacacaccaagcgaagcgcactagcaacgacctaacaacaatggctaccaagatattagccctccttgcgcttcttgccctttttgtgagcgcaacaaatgcgttcattattccacaatgctcacttgctcctagtgccattattccacagttcctcccaccagttacttcaatgggcttcgaacacctagctgtgcaagccaacatgcaacaacaagcgcttgcggcgagcgtcttacaacaaccaattgcccaattgcaacaacaatccttgccacatctaacaatacaagccatcacaacgcaacagcaacaacagttcctaccagcactgagccacctagccatggtgaaccct

SEQ ID NO: 21935 - DNA, 376 bp, Zea mays
  Clone ID: LIB3152-018-P1-K1-B6
tagcaaaccttgctgcctactctcagcaacagcagtttcttccattcaaccaactagctgcattgaactctgcttcttatttgcaacaacaacaactaccattcagccagctacctgctgcctacccccagcaatttcttccattcaaccaactggcagcattgaactctcctgcttatttacagcagcaacaactactaccattcagccagctagctggtgtgagccctgctaccttcttgatacaaccacagttgttgccgttctaccagcacgctgcgcctaacgctggcaccctcttacaactgcaacaattgctgccattcaaccaacttgctttgacaaacccagcagcgttctaccaacaacccatcat

SEQ ID NO: 21936 - DNA, 372 bp, Zea mays
  Clone ID: LIB3152-018-P1-K1-B7
gatcgccaacggcgctaccgtgctctctctagacactgattttgatggctgcatgcggctcattcgcgaggtcactgcagagctgccaatctaccttgccaattcgctcaacccgctccgccttgaggggcagaagacagcggccatcgagatattgcagcagttcaattggcaggtgccagattgggtcattgttccaggaggcaatcttgggaatatctatgcattctacaaggggtttgagatgtgccgcgttcttggacttgttgatcgcgtgccacggcttgtctgcgcacaggctgcaaatgcaaatccattgtaccggtactacaagtcaggttggactgagtttgagccacaaactgccgagac

SEQ ID NO: 21937 - DNA, 342 bp, Zea mays
  unsure at all n locations
  Clone ID: LIB3152-018-P1-K1-B8
aaacacacaaagggaagtgctttttctatcttcctaacaacaatggctacgagaagtattagccctccttgcgctcctttccctttcagtgagcgcaacaactgcattcattattccacaatgctcacttgctcctaatgccattattccacagttcctcccatcagttacatcaatgggcatngaacaccctattgtgcaagcctataggctacaacaagcgcttgcggcgagcgttttacaacaaccgtttgcccaattacaacaacaatccttgtcacatctaaccatacaaaccatttcaacacaactagagcaacagtttgtgcccgcatttgagcc

SEQ ID NO: 21938 - DNA, 372 bp, Zea mays
  Clone ID: LIB3152-018-P1-K1-B9
attttgagcattcagaaacacaccaagcgaagcgcactagcaacgacctaacaacaatggctaccaagatattagccctccttgcgcttcttgccctttttgtgagcgcaacaaatgcgttcattattccacaatgctcacttgctcctagtgccattattccacagttcctcccaccagttacttcaatgggcttcgaacacctagctgtgcaagccaacatgcaacaacaagcgcttgcggcgagcgtcttacaacaaccaattgcccaattgcaacaacaatccttgccacatctaacaatacaagccatcacaacgcaacagcaacaacagttcctaccagcactgagccacctagccatggtgaacc

SEQ ID NO: 21939 - DNA, 379 bp, Zea mays
  Clone ID: LIB3152-018-P1-K1-C1
tatttagaccaactagcaacatagaaagcacaatagtgtaccaacaatggcagccaaaatattttgcctccttatgctccttggtatttctgcaagtgctgctacggcgaccattttcccgcaatgctcacaagctcctatagcttcccttcttcccccgtacctctcaccagcggtgtcttcggtatgtgaaaacccaattcttcaaccctacaggatccaacaggcaatcgcagctggcatcttacctttatcacccttgttcctccaacaatcatcagccctattacagcagttacctttggtgcatttattggcacaaaacatcagggcacaacaactacaacaacttgtgctagcaaaccttgctgcctactct

SEQ ID NO: 21940 - DNA, 373 bp, Zea mays
  Clone ID: LIB3152-018-P1-K1-C12
agaccaactagcaacatagaaagctcaatagtgtaccaacaatggcagccaaaatattttgcctccttatgctccttggtctttctgcaagtgctgctacggcgaccattttcccacaatgctcacaagctcctatagcttcccttcttcccccgtacctctcaccagcggtgtcttcggtatgtgaaaacccaattcttcaaccctataggatccaacaggcaatcgcagctggcatcttacctttatcacccttgttcctccaacaatcatcagccctattacagcagttacctttggtgcatttattggcacaaaacatcagggcacaacaactacaacaacttgtgctagcaaaccttgctgcctactc

SEQ ID NO: 21941 - DNA, 381 bp, Zea mays
  Clone ID: LIB3152-018-P1-K1-C2
aaacacaccaagcgaagcacattagcaacaacctaacaacaatggctaccaagatattatccctccttgcgcttcttgcgctttttgcgagcgcaacaaatgcgttcattattccacaatgctcacttgctccaagttccattattacacagttcctcccaccagttacttcaatgggcttcgaacacccagctgtgcaagcctataggctacaacaagcaattgcggcgagcgtcttacaacaaccaatttcccagttgcaacaacaatccttggcacatctaacaatacaaaccatcgcaacgcaacagcaacaacaattcctatcagcactgagccacctagccatggtgaaccctgccgcctacttgcaacagcagt

SEQ ID NO: 21942 - DNA, 378 bp, Zea mays
  Clone ID: LIB3152-018-P1-K1-C5
attcagaaacacaccaagcgaagcgcactagcaacaacctaacaacaatggctaccaagatattagccctccttgcgcttcttgcccttttagtgagcgcaacaaatgcgttcattattccacagtgctcacttgctcctagtgccattattccacagttcctcccaccagttacttcaatgggcttcgaacatccagccgtgcaagcctacaggctacaactagcgcttgcggcgagcgtcttacaacaaccaattgcccaattgcaacaacaatccttggcacatctaaacctacaaaccatcgcaacgcaacagcaacaacagtttctgccatcactgagccacctagccgtggtgaaccctgtcgcctacttgc

SEQ ID NO: 21943 - DNA, 378 bp, Zea mays
  Clone ID: LIB3152-018-P1-K1-C6
gtgaaccctgccgcctacctacaacagcaacaactgctttcatctagcccgctcgctgtggccaatgcacctacatacctgcaacaagaattgttgcaacagattgtaccagctctaactcagctagctgtggcaaaccctgttgcctacttgcaacagctgcttccattcaaccaactaactatgtcgaactctgttgcgtacctacaacagcgacaacagttacttaatccattggcagtggctaacccattggtcgctgccttcctacagcagcaacaattgctgccatacaaccggttctctttgatgaatcctgtcttgtcgaggcagcaacccatcgttggaggtgccatcttttagattacatatgagatg

SEQ ID NO: 21944 - DNA, 378 bp, Zea mays
  Clone ID: LIB3152-018-P1-K1-C8
gttgcaacaacaatccttggcacatctaacaatacaaaccatcgcaacgcaacagcaacaacaattcctaccagcactgagccacctagccatggtgaaccctgccgcctacttgcaacagcagttgcttgcatcaaacccacttgctctggcaaacgtagttgcaaaccagccacaacaacagctgcaacagtttctgccagcgctcagtcaactagccatggtgaaccctgccgcctacctacaacagcaacaactgctttcatctagcccgctcgctgtggccaatgcacctacatacctgcaacaacaattgttgcaacagattgtaccagctctgactcagctagttgtggcaaaccctgctgcctacttgca

SEQ ID NO: 21945 - DNA, 376 bp, Zea mays
  Clone ID: LIB3152-018-P1-K1-C9
gggtcttcagaccattagctttatctactccagagcgcagaagaacccgatcgacaccatgagggtgttgctcgttgccctcgctctcctggctctcgctgcgagcgccacctccacgcatacaagcggcggctgcggctgccagccaccgccgccggttcatctaccgccgccggtgcatctgccacctccggttcacctgccacctccggtgcatctcccaccgccggtccacctgccgtcgccggtccacctgccaccgtcggtccatgtgccgccgccggttcatctgccgccgtcaccatgccactaccctactcaaccgtcccggcctcagcctcatccccagccacacccatgcccgtgccaacagccg

SEQ ID NO: 21946 - DNA, 377 bp, Zea mays
  Clone ID: LIB3152-018-P1-K1-D1
attgagaccaactagcaacatagaaagcacaatagtgtaccaacaatggcagccaaaatattttgcttccttatgctccttggtctttctgcaagtgttgctaccgcaaccattttcccacaatgctcacaagctcctatagcttcccttcttcccccatacctctcaccagcggtgtcttcaatgtgtgaaaacccaattgttcaaccctacaggatccaacaggcaatcgcaacaggcatcttaccattatcacccttgttcctccaacaaccgtcagccctattacagcagttacctttggtccatttggtggcacaaaacatcagggcacaacaactacaacaacttgtgctagcaaaccttgctgcatactc

SEQ ID NO: 21947 - DNA, 375 bp, Zea mays
  Clone ID: LIB3152-018-P1-K1-D10
tagcaacatagaaagcacaattgtgtaccaacaatggcagctaaaatattttgcctccttatgctccttggtctttctgcaagtgctgctacggcgaccattttcccacaatgctcacaagctcctatagcttcccttcttcccccgtacctctcaccaacggtgtcttcggtatgtgaaaacccaattcttcaaccctacaggatccaacaggcaatcgcagctggcatcttacctttatcacccttgttcctccaacaatcatcagccctattacagcagttacctttggtgcatttattggcacaaaacatcagggcacaacaactacaacaacttgtgctagcaaaccttgctgcctactctcagcaacag

SEQ ID NO: 21948 - DNA, 351 bp, Zea mays
  Clone ID: LIB3152-018-P1-K1-D11
tgcaacatataaagctcaatattttttcaacaatggcagctaaaatatttggccgccttatgctccttggtctctctgcaagtgctgctacggcgaccattttcccacaatgctcacaagctcctatagctttccttcttccaccgtacctcttaccaactgtgttcttggtatgtgaaaacccaattcttaaccctacatgatccaacaggcaatcgcagcttgcattttacctttattacccttgttcctccaacaattatcagtcctattacagcagttaccttttgtgcttttattggcacataacattatgtcacaacaactacaacaacttgtgctatcaaacct

SEQ ID NO: 21949 - DNA, 376 bp, Zea mays
  Clone ID: LIB3152-018-P1-K1-D2
gaaagtggaatccagtagcaacaatagagcaacaatggagaccaagatattttccctccttatgctccttgctctttctacatgtgttgctaacgcgacaattttccctcaatgctcacaagctcctatagcttccctttttcccccataccttccatcaattatagcttcagtatgtgaaaacccagctcttcaaccatataggcttcaacaagcaatcgcagcaagcaacatacctttatcgcccttgttgtgtcaacaatcgccagccctatctttggtgcagtcattggtacaaaccatcagggcacaacagctgcagcaactcgtgctacctgtgatcaaccaagtagctctggcaaacctttctccctac

SEQ ID NO: 21950 - DNA, 331 bp, Zea mays
  Clone ID: LIB3152-018-P1-K1-D3
tcattgagaccactagcacataaagcacatatgtccaacaatggcagcaaaatattttgcttcttatgctccttgtctttctgcagtgctgctccgaaccattttcacatgctcacaagctctatagcttctttttcccccatacctctaccagcgggtcttcagtatgtgaaaacccaattttaaccctacagatcaacaggcatccagcagcattaccttatacccttgttcctcaacaccgtagccctattacagcagtacctttggtgcatttgtgcacaaaacataaggcacacactcaacaacttggctagaacctgctgctact

SEQ ID NO: 21951 - DNA, 358 bp, Zea mays
  Clone ID: LIB3152-018-P1-K1-D4
cagaaacacaccaagcgaagcacattagcaacaacctaacaacaatggctaccaagatattatccctccttgcgcttcttgcgctttttgcgagcgcaacaaatgcgttcattattccacaatgctcacttgctccaagttccattattacacagttcctcccaccagttacttcaatgggcttcgaacacccagctgtgcaagccctataggctacaacaagcaattgcggcgagcgtcttacaacaaccaatttcccagttgcaacaacaatccttggcacatctaacaatacaaaccatcgcaacgcaacatcaacaacaattcctaccagcactgagccacctagccatggtga

SEQ ID NO: 21952 - DNA, 379 bp, Zea mays
  Clone ID: LIB3152-018-P1-K1-D6
gcttcacccacaagctgctgtcctgcaacaagcgccagccttacgcagtctcccgccgcgctggccaccagacgtcggccgagtcctggggtacgggccgcgctgtgtcccgtatcccccgcgtccccggcggcggcacccaccgcgccggccagggagcattcggcaacatgtgccgcggcggacgcatgttcgcgcccaccaagatctggcgcaagtggcaccgccgcgtcaacgtcaacctccgccgcgtcgccgtcgcctcggcgctcgccgccaccgccgtcccggccctcgtccaggcgcgcggccaccgcatcgagaccgttcccgagatgcccctggttatctccgactcggcagagtccatcgagaagac

SEQ ID NO: 21953 - DNA, 377 bp, Zea mays
  Clone ID: LIB3152-018-P1-K1-D7
agaaatctcgtgtggaacaaaagggtaaaagctcgtttgattctgatttccagtacgaatacgaaccgccaccatgccactaccctactcaaccgccccggcctcagcctcatccccagccacacccatgcccgtgccaacagccgcatccaagcccgtgccagctgcagggaacctgcggcgttggcagcaccccgatcctgggccagtgcgtcgagttcctgaggcatcagtgcagcccgacggcgacgccctactgctcgcctcagtgccagtcgttgcggcagcagtgttgccagcagctcaggcaggtggagccgcagcaccggtaccaggcgatcttcggcttggtcctccagtccatcctgcagcagcag

SEQ ID NO: 21954 - DNA, 374 bp, Zea mays
  Clone ID: LIB3152-018-P1-K1-D8
cccacgcgtccgccaactagcaacatagaaagcacaatagtgtaccaacaatggcagccaaaatattttgcttccttatgctccttggtctttctgcaagtgttgctaccgcaaccattttcccacaatgctcacaagctcctatagcttcccttcttcccccatacctctcaccagcggtgtcttcaatgtgtgaaaacccaattgttcaaccctacaggatccaacaggcaatcgcaacaggcatcttaccattatcacccttgttcctccaacaaccgtcagccctattacagcagttacctttggtccatttggtggcacaaaacatcagggcacaacaactacaacaacttgtgctagcaaaccttgct

SEQ ID NO: 21955 - DNA, 375 bp, Zea mays
  Clone ID: LIB3152-018-P1-K1-D9
caacaagcaacatagaaagtggaatacagtagcaacaatagagcaacaatggcggccaagatattttccatccttatgctccttgctctttctgcatgtgttgctaacgcgaccatttttcctcaatactcacaagctcctatagctgcccttcttcccccataccttccatcaatgaccgcttcagtatgtgaaaacccagcccttcaaccctacaggctccaacatgcaatcgcaacaagcaacttacctttatcacccctgttctttcaacaatcgccagccctatctttggtgcagtcattggtacaaaccatcatggcacaacagcttcagcaactcgtgctaccagtgatcagccaagtatctctggca

SEQ ID NO: 21956 - DNA, 377 bp, Zea mays
  Clone ID: LIB3152-018-P1-K1-E1
tggacgtcagcctagcaattagctcatcgactccagattggagaactcgacaccatgaaggtgctgatcgttgcccttgctctcctggcgctcgctgcgagcgccgcctccagtacaagcggcggctgtggctgccagacaccaccgtttcatctaccgcctccgttctatatgccgcctccgttctatctgccgccgcagcagcagccgcagccatggcaataccccactcaaccaccgcagctaagcccgtgccagcagttcggatcctgcggcgtcggcagcgtcggcagcccgttcctgggccagtgcgtcgagttcctgaggcaccagtgcagcccggcggcgacgccctacggctcgccacagtgccaggc

SEQ ID NO: 21957 - DNA, 377 bp, Zea mays
  Clone ID: LIB3152-018-P1-K1-E10
attttgagcattcagaaacacaccttgcgaagcacattagcaacaacctaacagcaatggctaccaagatattatccctccttgcgcttcttgcgctttttgcgagcgcaacaaatgcgttcattattccacaatgctcacttgctccaagttccattattacacagttcctcccaccagttacttcaatgggcttcgaacacccagctgtgcaagcctataggctacaacaagcaattgcggcgagcgtcttacaacaaccaatttcccagttgcaacaacaatccttggcacatctaacaatacaaaccatcgcaacgcaacagcaacaacaattcctaccagcactgagccacctagccatggtgaaccctgcc

SEQ ID NO: 21958 - DNA, 371 bp, Zea mays
  Clone ID: LIB3152-018-P1-K1-E12
agaccaactagcaacatagaatgctcaatagtgtaccaacaatggcaggtgagggattttgcctccttatgctccttggtctttctgcaagtgctgctacggcgaccattttcccacaatgctcacaagctcctatagcttcccttcttcccccgtacctctcaccaacggtgtcttcggtatgtgaaaacccaattcttcaaccctacaggatccaacaggcaatcgcagctggcatcttacctttatcacccttgttcctccaacaatcatcagccctattacagcagttacctttggtgcatttattggcacaaaacatcagggcacaacaactacaacaacttgtgctagcaaaccttgctgcctac

SEQ ID NO: 21959 - DNA, 376 bp, Zea mays
  Clone ID: LIB3152-018-P1-K1-E3
gggatttcaaagcaaatgaaggttctgaatatctgcaaagatctagcacctgctgatttagctgaggacgaagttctgttgcagactgttttagatgaaaccattaacactctgagacttaaggatgaaactgaagatgtgaataggctcatgaacactgagttctcagttctctcagtagttttgttgcaattagggatggagctcagagatctgcacttacagaagtgtgccattgagaaagaagtggagagtggagaaacagagttgctttgtttgcaaaacaaaaaccaacagatgttggaacagaatgaacaactaaggaatggattacaggaaagcagtgaaagggaggaggtgctgaaaactgaagtat

SEQ ID NO: 21960 - DNA, 362 bp, Zea mays
  Clone ID: LIB3152-018-P1-K1-E4
cagaaacacaccaagcgaagcacattatcaacaacctaacaacaatggctaccaagatattatccctccttgcgcttcttgcgctttttgcgagcgcaacaaatgcgttcattattccacaatgctcacttgctccaagttccattattacacagttcctcccaccagttacttcaatgggcttcgaacacccagctgtgcaagcctataggctacaacaagcaattgcggcgagcgtcttacaacaaccaatttcccagttgcaacaacaatccttggcacatctaacaatacaaaccatcgcaacgcaacagcaacaacaattcctaccagcactgagccacctagccatggtgaaccct

SEQ ID NO: 21961 - DNA, 187 bp, Zea mays
  Clone ID: LIB3152-018-P1-K1-E5
tgcgtacacggtctccctcttcctgtcagtagtagagtgagagtgaggcagcgagggggagacaaggggaaatggggaagggagcccaggggaaccatgcggcggcggcgttcggccaggtggaagacaacatggcggctttattttttcacaagaaactccctgtagttggtgcaatgggagtttg

SEQ ID NO: 21962 - DNA, 332 bp, Zea mays
  unsure at all n locations
  Clone ID: LIB3152-018-P1-K1-E6
aagacggattcttgcacgatccatctgtataattgctccgtacggccttgttcgtttccgtcggattgcaaccgcccaccattggtggtgccatcttctagattttttatgatttatactgtaataataaagttctcatgctgatatgtgcgacctctcagtaataaagtattagagatctatattttaaaaaaaaaaaaaaaaaaaaaaaaaaaaaacccaaaaaaaaaaaaaaggacaaacaattttaaggatccaaaaataatttaannnttnnntncnacgttatagcttttcttatttggtcacctaaattaaattttatatggcct

SEQ ID NO: 21963 - DNA, 379 bp, Zea mays
  Clone ID: LIB3152-018-P1-K1-E7
caagcatcttacggtcattagcattaaccctccaacaaccatatgctctattgcgaacagccatccttagtgcatctgtatctccaaagaatcgcggcacaacaactacaacaacagttgctaccaacaatcaatcaagtagttgcagcgaaccttgctgcttaccttcagcaacaacagtttcttccattcaatcaactagatggggtgaaccctgctatctacttgcaggcacaacagctactaccatttaaccaacttgtcgggagcccttatgccttcttactgcaacaacagcttctaccattccatctgcaagctgtggcaaacattgctgctttcttgagacaacaacatttgttgccattttacccacagg

SEQ ID NO: 21964 - DNA, 377 bp, Zea mays
  Clone ID: LIB3152-018-P1-K1-E8
gagcattttcccgcaatgctcacatgctcctatagcttcccttcttcccccatgcctctcaccagcgatgtcttcagtatgtgaaaatccaattcttctaccctacaggatccaacaggcaatcgcagcaggcatcttacctttatcacccttgttcctccaacaatcatcagccctattacagcagttacctttggtgcatttattggcacaaaacatcagggcacaacaactacaacaactcgtgctagcaaaccttgctgcctactctcagcaacagcagttacctttggtgcatttgttggcacaaaacatcagggcacaacaactacaacaactcgtgctagcaaaccttgctgcctactctcagcaacaac

SEQ ID NO: 21965 - DNA, 188 bp, Zea mays
  Clone ID: LIB3152-018-P1-K1-F11
gaaacacaccaagctaagcgctctttcaacaacctaacaacaatggctaggaagatattatccctccttgcgcttcttgcccttttagtgagcgcaacaaatgcgttcattattccacagtgctcacttgctcctagtgccattattccacagttcctcccaccagttactttaatgggcttttaaca

SEQ ID NO: 21966 - DNA, 379 bp, Zea mays
  Clone ID: LIB3152-018-P1-K1-F2
caacaagcaacatagaaagtggaatccagtagcaacaatagagcaacaatggcgaccaagatattttccctccttatgctccttgctctttctgcatgtgttgctaacgcgacaattttccctcaatgctcacaagctcctatagcttcccttcttcccccataccttccatcaatgatagcttcagtatgtgaaaacccagctcttcaaccctataggctccaacaagcaatcgcagcaagcaacatacctttatcacccttgtttcaacaatcgccagccctatctttggtgcagtcattggtacaaaccatcatggcacagcagctgcagcaactcgtgctacctgtgatcaaccaagtagctctggcaaaccttt

SEQ ID NO: 21967 - DNA, 377 bp, Zea mays
  Clone ID: LIB3152-018-P1-K1-F3
cacctacatacctgcaacaagaattgttgcaacagattgtaccagctctaactcagctagctgtggcaaaccctgttgcctacttgcaacagctgcttccattcaaccaactaactatgtcgaactctgttgcgtacctacaacagcgacaacagttacttaatccattggcagtggctaacccattggtcgctgccttcctacagcagcaacaattgctgccatacaaccggttctctttgatgaatcctgtcttgtcgaggcagcaacccatcgttggaggtgccatcttttagattacatatgagatgtactcgataatggtgccctcataccggcatgtgtttcctagaaataatcaatatattggttgagat

SEQ ID NO: 21968 - DNA, 376 bp, Zea mays
  Clone ID: LIB3152-018-P1-K1-F4
tagcaacatagaaagcacaatagtgtaccaacaatggcagctaaaatattttgcctccttatgctccttggtctttctgcaagtgctgctacggcgaccattttcccacaatgctcacaagctcctatagcttcccttcttcccccgtacctctcaccaacggtgtcttcggtatgtgaaaacccaattcttcaaccctacaggatccaacaggcaatcgcagctggcatcttacctttatcacccttgttcctccaacaatcatcagccctattacagcagttacctttggtgcatttattggcacaaaacatcagggcacaacaactacaacaacttgtgctagcataccttgctgcctactctcagcaacagc

SEQ ID NO: 21969 - DNA, 346 bp, Zea mays
  Clone ID: LIB3152-018-P1-K1-F6
attgataccaacaagcaacatattttgtttaatccagtagcaacaatagagcagcagtgtcgaccaatatattttccctccttatgctccttgctctttctgcatgtgttgctaacgcgacaattttccctcaatgctcacaagctcctatagcttcccttcttccccataccttccatcaatgatagcttcagtatgtgaaaacccagctcttcaaccctatatgctccaacaagcaatcgcagcaagcaacatacctttattacccttgttttaacaatctgcaaccctatctttggtgcattcattggtacaataccataaggcacatcaactgcaacaactt

SEQ ID NO: 21970 - DNA, 371 bp, Zea mays
  Clone ID: LIB3152-018-P1-K1-F7
gttgagaatggctgacgaggatatccagcctatcgtatgtgacaatggcactggaatggtcaaggccggtttcgctggtgatgatgcgccaagagctgtcttccccagcattgtgggaagaccacgccacaccggtgtcatggtcggcatgggccaaaaggatgcctacgtaggtgatgaggctcaggccaagagaggcatcctgacactgaagtacccgattgagcatggcattgtcaacaactgggatgacatggagaaaatctggcatcacaccttctacaacgagctccgtgtttcgcctgaagatcaccctgtgctgctgaccgaggcccctctcaaccccaaggccaacagagagaaaatgacgc

SEQ ID NO: 21971 - DNA, 285 bp, Zea mays
  Clone ID: LIB3152-018-P1-K1-F8
gcgacagctcgacaaagatttgttttagtgatccggcgctgagaagagatggctgggatcgccgcatccgcctcggcggcggcggctctgtgcttcgcggccctggtggccgtggccgtctgccatggcgaggtcgagcggcagaggctcatggacctgcactgctggcaggaggtccaggagagcccgctcgacgcgtgccgccaggtccttgaccggcagctaaccggcggcggcgtcggcggcccgttccggtggggcacctggctccggatgcggtgctgt

SEQ ID NO: 21972 - DNA, 377 bp, Zea mays
  Clone ID: LIB3152-018-P1-K1-F9
ctactatactatactctaggaagctaggacaccaccgccatggcagccaagatgcttgcattgttcgctctcctagctctttgtgcaagcgccactagtgcgacccatattccagggcacttgccaccagtcatgccattgggtaccatgaacccatgcatgcagtactgcatgatgcaacaggggcttgccagcttgatggcgtgtccgtccctgatgctgcagcaactgttggccttaccgcttcagacgatgccagtgatgatgccacagatgatgacgcctaacatgatgtcaccattgatgatgccgagcatgatgtcaccaatggtcttgccgagcatgatgtcgcaaatgatgatgccacaatgtcactg

SEQ ID NO: 21973 - DNA, 374 bp, Zea mays; identical to SEQ ID NO: 21428
  Clone ID: LIB3152-018-P1-K1-G1

SEQ ID NO: 21974 - DNA, 112 bp, Zea mays
  Clone ID: LIB3152-018-P1-K1-G11
ggccaactgccataagcacattgccaacagcgcaatttgctcttactctgttttgagtgctgtcggaccattttcactgtacctctatgttcttttcccgtccttacacggg

SEQ ID NO: 21975 - DNA, 390 bp, Zea mays
  Clone ID: LIB3152-018-P1-K1-G2
attcccggtcgcccacgcgtcgaccataatcatattatcttagttgtataggcaccaaatcaaatctgcaacatcaattatctaactccaaaaaccatgaagctggtgcttgggttcttgctttcattgctttagtatcaagtgtttcttgtacacagacaggcggctgcagctgtggtcaacaacaaagccatgagcagcaacatcatccacaacaacatcatccacaaaaacaacaacatcaaccaccaccacaacatcaccagcagcagctacaccaacaacatcaagttcacatgcaaccacaaaaacatcagctacaacaagaagttcatgttcaacaacaacaacaacatccgcagcaccaacaacaacaacaacatcagcacc

SEQ ID NO: 21976 - DNA, 381 bp, Zea mays
  Clone ID: LIB3152-018-P1-K1-G3
agcaaacacaaataaagaaacaactttgctgaccatgatagatttttatctagttggaagagtcctcttaatattcatctagtcttatataagtttgggtatatagaaatacaaacagaaaagagaggatagaggataggctcattacataaaaaaaagatatggaaatagccataatacataacaaaaaaagaaaaaaaggagcgggagagccaaatgaatcgaaagattcatgtttggttcgggaagagatcataaaaattgtaaacttaatagcaagataatctactttcattaaaagatttattagataatcgaaaacagaggattttaagtactattcgaaattcggaagaattgcgtaaagggacccttgaacaa

SEQ ID NO: 21977 - DNA, 139 bp, Zea mays
  Clone ID: LIB3152-018-P1-K1-G4
ggtgggcggttgcaataaggtggttccttcttctagattttttatgatttagactggaataataaagttctcatgctgatatgtgcgacctctcagtaataaagtattagagatctatattttaataataaaaaatatt

SEQ ID NO: 21978 - DNA, 377 bp, Zea mays
  Clone ID: LIB3152-018-P1-K1-G5
gcaacatagaaagtggaatacagtagcaacaatagagcaacaatggcggccaagatattttccatccttatgctccttgctctttctgcatgtgttgctaacgcgaccatttttcctcaatactcacaagctcctatagctgcccttcttcccccataccttccatcaatgaccgcttcagtatgtgaaaacccagcccttcaaccctacaggctccaacaagcaatcgcaacaagcaacttacctttatcacccctgttctttcaacaatcgccagccctatctttggtgcagtcattggtacaaaccatcagggcacaacagctgcagcaactcgtgctaccagtgatcagccaagtagctctggcaaacctttc

SEQ ID NO: 21979 - DNA, 376 bp, Zea mays
  Clone ID: LIB3152-018-P1-K1-G7
gagaccaacaagcaacatagattgttgaatccagtagcaacaatagagcaacgggggagaccaagatattttccctccttatgctccttgctctttctacatgtgttgctaacgcgacaattttccctcaatgctcacaagctcctatagcttccctttttcccccatatcttccatcaattatagcttcagtatgtgaaaacccagctcttcaaccatataggcttcaacaagcaatcgcagcaagcaacatacctttatcgcccttgttgtgtcaacaatcgccagccctatctttggtgcagtcattggtacaaaccatcagggcacaacagctgcagcaactcgtgctacctgtgatcaaccaagtagctct

SEQ ID NO: 21980 - DNA, 377 bp, Zea mays
  Clone ID: LIB3152-018-P1-K1-G8
ctttcctctcttgcctccgtcgccatgacccaccgcctccttctcctgctcctgctgctccctttgctagcgccgcctgctgcgtctgcacgccagggcgcggggcaggatttgggacagtgccccgggctggagtacggcctgccgccgttcgccgccgctctccgggcaagctgccccgtctcgacggaggggtactcgccccccgaggaggttgttaatggggaagaacttctcaggttgttggatggcaaggaagagcacacagctgtccttttctatgcatcatggtgccctttctcagaaagaatcagaccagtctttgatgatctgagctcaatgtttccacgggttaagcacttggctatcgaagagtc

SEQ ID NO: 21981 - DNA, 377 bp, Zea mays
  unsure at all n locations
  Clone ID: LIB3152-018-P1-K1-G9
gcggcggcacaagggaagcgaagaggaatcaacgcgatgtctgcgaccacggcggcggtgcccttctggcgggcggccgggatgacctacatcggctactccaacatctgcgctgcgctggtacggaactgcctcaaggagcccttcaagtccgaggccgcgtcccgcgagaaggtccatttctccatctccaagtggacggatggcaaacaggagaagcccactgtccgcacagaatccgatgaataaagctctggtgccatagtggcatagtccttgctacagatgatttgaagtgttgttgcaagtttccggaacatgctatttagctggcttgattntatagtcaatgctgaataataaatactttttacgac

SEQ ID NO: 21982 - DNA, 402 bp, Zea mays
  Clone ID: LIB3152-018-P1-K1-H1
ttacccggccggacccacgcgtccgggttttctcacgctcaagtacccgtttgagcacggtattgtgagcaactgggatgacatggagaaaatctggcatcatactttctacaacgagcttcgtgttgcaccagaggagcaccctgtgttgctcactgaggctcctttgaacccaaaggccaacagggagaagatgacccaaattatgtttgagactttcaatgttcctgccatgtatgttgcaatccaagcagttctatcactctatgctagtgggcgtactactggtattgttcttgactctggtgatggtgtgagccacactgtgcccatttacgaaggatatgcccttcctcatgccattcttcgtttggatcttgctggtcgtgaccttacagactc

SEQ ID NO: 21983 - DNA, 378 bp, Zea mays
  Clone ID: LIB3152-018-P1-K1-H11
gcacaatagtgtaccaacaattgcttccaaaatattttgcctccttatgctccgtggtctttctgcaagtgctgctacggcgaccattttcccgaaatgctcgcaagctcctatagcttcccttcttcccccgtacctctcaccagcggtgtcttcggtatgtgaaaacccaattcttcaaccctacaggatccaacaggcaatcacagctggcatcttacctttatcacccttgttcctccaacaatcatcagccctattacatcagttacctttggtgcatttattggcacaaaacatcagggcacaacaactacaacaacttgtgctagcaaaccttgctgcctactctcagcaacagcagtttcttccattcaa

SEQ ID NO: 21984 - DNA, 375 bp, Zea mays
  Clone ID: LIB3152-018-P1-K1-H2
atagaaagcacaatagtgtaccaacaatggcagccaaaatattttgcctccttatgctccttggtctttctgcaagtgctgctacggcgaccattttcccgcaatgctcgcaagctcctatagcttcccttcttcccccgtacctctcaccagcggtgtcttcggtatgtgaaaacccaattcttcaaccctacaggatccaacaggcaatcgcagctggcatcttacctttatcacccttgttcctccaacaatcatcagccctattacaacagttacctttggtgcatttattggcacaaaacatcagggcacaacaactacaacaacttgtgctagcaaaccttgctgcctactctcagcaacagcagtttc

SEQ ID NO: 21985 - DNA, 378 bp, Zea mays
  Clone ID: LIB3152-018-P1-K1-H3
cggacgcgtgggaaagcggcagtgcgtagagaggatcgtcgaacagaacagcatgaagatggtcatcgttctcgtcgtgtgcctggctctgtcagctgccagcgcctctgcaatgcagatgccctgcccctgcgcggggctgcagggcttgtacggcgctggcgccggcctgacgacgatgatgggcgccggcgggctgtacccctacgcggagtacctgaggcagccgcagtgcagcccgctggcggcggcgccctactacgccgggtgtgggcagacgagcgccatgtaccagccgctccggcaacagtgctgccagcagcagatgaggatgatggacgtgcagtccgtcgcgcagcagctgcagatgatgatgca

SEQ ID NO: 21986 - DNA, 424 bp, Zea mays
  unsure at all n locations
  Clone ID: LIB3152-018-P1-K1-H4
ccgggcccgacccacgcccgtccggatcaatacaagtatgcgacagggctcgtacatatgtatttggtgagggagtgatcnnncggcgctngnnagaagagtnatggctaannngatcgcnncgcagcnncgccgctggctgtgcgtgcggcngcctgtngnccttcgtctggtccctggtgggggccgttgcnccgtctgtccaagggcgatgtgtcgagccggcatgagggctcatgggaccctgcatgtgtctggcatggaggggtccaggatgaggcccgcttcgatctcgtgtccgccatggtccctcgtaccggcatgctataccggcgtgcggtcgtcgtgcggcnnccgttccggtgtgggcatccgggcttccggatggcggtgtctgccaagcagctccaggtacgtgaagccg

SEQ ID NO: 21987 - DNA, 382 bp, Zea mays
  Clone ID: LIB3152-018-P1-K1-H5
acagttcctcccaccagttacttcaatgttcttcgaacatccagccgtgcaagcctacaggctacaactagcgcttgcggcgagcgtcttacaacaaccaattgcccaattgcaacaacaatccttggcacatctaaacctacaaaccatcgcaacgcaacatcaacaacagtttctgccatcactgagccacctagccgtggtgaaccctgtcgcctacttgcaacagcagctacttgcatccaacccacttgctctggcgaacgtagctgcataccagcaacaacaacgtctgcaacagtttatgccagcgctcagtcaactagccatggtgaaccctgtcgcctacctacaacagcaacaattgctttcatctagcccg

SEQ ID NO: 21988 - DNA, 382 bp, Zea mays
  Clone ID: LIB3152-018-P1-K1-H6
ccgcccacgcgtccgtagcaacatagaaagctcaatagtgtaccaacaatggcagctaaaatattttgcctccttatgctccttggtctttctgcaagtgctgctacggcgaccattttcccacaatgctcacaagctcctatagcttcccttcttcccccgtacctctcaccaacggtgtcttcggtatgtgaaaacccaattcttcaaccctacaggatccaacaggcaatcgcagctggcatcttacctttatcacccttgttcctccaacaatcatcagccctattacagcagttacctttggtgcatttattggcacaaaacatcagggcacaacaactacaacaacttgtgctagcaaaccttgctgcctactctc

SEQ ID NO: 21989 - DNA, 378 bp, Zea mays
  Clone ID: LIB3152-018-P1-K1-H7
aacacaccaagcgaagcgcactagctacaacctaacaacaatggctaccaagatattagccctccttgcgcttcttgcccttttagtgagcgcaacaaatgcgttcattattccacagtgctcacttgctcctagtgccattattccacagttcctcccaccagttacttcaatgggcttcgaacatccagccgtgcaagcctacaggctacaactagcgcttgcggcgagcgtcttacaacaaccaattgcccaattgcaacaacaatccttggcacatctaaacctacaaaccatcgcaacgcaacagcaacaacagtttctgccatcactgagccacctagccgtggtgaaccctgtcgcctacttgcaacagca

SEQ ID NO: 21990 - DNA, 377 bp, Zea mays
  Clone ID: LIB3152-018-P1-K1-H8
ctgggtcttcagaccattagctttatctactccagagcgcagaagaacccgatcgacaccatgagggtgttgctcgttgccctcgctctcctggctctcgctgcgagcgccacctccacgcatacaagcggcggctgcggctgccagccaccgccgccggttcatctaccgccgccggtgcatctgccacctccggttcacctgccacctccggtgcatctcccaccgccggtccacctgccgccgccggtccacctgccaccgccggtccatgtgccgccgccggttcatctgccgtcgccaccatgccactaccctactcaaccgccccggcctcagcctcatccccagccacacccatgcccgtgccaacagcc

SEQ ID NO: 21991 - DNA, 377 bp, Zea mays
  Clone ID: LIB3152-019-P1-K1-A1
attttgagcattcagaaacacaccatgcgaagcgcactagcaacaacctaacaacaatggctaccaagatattatccctccttgcgcttcttgcgctttttgcgagcgcaacaaatgcgtccattattccacaatgctcacttgctcctagttccattattccacagttcctcccaccagttacttcaatggccttcgaacacccagctgtgcaagcctataggctacaacaagcgattgcggcgagcgtcttacaacaaccaattgcccaattgcaacaacaatccttggcacatctaacaatacaaaccatcgcaacgcaacagcaacaacagttcctaccagcactgagccacctagccatggtgaaccctgtc

SEQ ID NO: 21992 - DNA, 376 bp, Zea mays
  Clone ID: LIB3152-019-P1-K1-A2
caacaagcaacatagaaagtggaatccagtagcaacaatagagcaacaatggcgaccaagatattttccctccttatgctccttgctctttctgcatgtgttgctaacgcgacaattttccctcaatgctcacaagctcctatagcttcccttcttcccccataccttccatcaatgatagcttcagtatgtgaaaacccagctcttcaaccctataggctccaacaagcaatcgcagcaagcaacatacctttatcacccttgtttcaacaatcgccagccctatctttggtgcagtcattggtacaaaccatcagggcacagcagctgcagcaactcgtgctacctgtgatcaaccaagtagctctggcaaacc

SEQ ID NO: 21993 - DNA, 372 bp, Zea mays
  Clone ID: LIB3152-019-P1-K1-A3
cccacgcgtccgggcgataggtggacttcaatcgcttaaaggcatggcagtggatgagagtctgattaactatgatgtcctcctgcatgtgcaccagtgctgcccagactttgtggagctgaaggtgtctgcactgtacgtggatgaagacatggcctcagtcatctgcaactctcttcctcgtctgaaaaagttggagataccaagttgtgacatgtcttccgctgcgattataaggttccttgattgcctagagcagctcgagcacctggacatctcaggttacgagacatcagccatctcaagcccggttcttgagaaagcttcgcggctcaaggtcttcctctggaactcgaaatttgagcttgggga

SEQ ID NO: 21994 - DNA, 377 bp, Zea mays
  Clone ID: LIB3152-019-P1-K1-A4
cagaaacacaccaagcgaagcacattagcaacaacctaacaacaatggctaccaagatattatccctccttgcgcttcttgcgctttttgcgagcgcaacaaatgcgttcattattccacaatgctcacttgctccaagttccattattacacagttcctcccaccagttacttcaatgggcttcgaacacccagctgtgcaagcctataggctacaacaagcaattgcggcgagcgtcttacaacaaccaatttcccagttgcaacaacaatccttggcacatctaacaatacaaaccatcgcaacgcaacagcaacaacaattcctaccagcactgagccacctagccatggtgaaccctgccgcctacttgcaa

SEQ ID NO: 21995 - DNA, 377 bp, Zea mays
  Clone ID: LIB3152-019-P1-K1-A5
cttagcaccaatgggagccaagatttttgccctccttgccctccttgctctttgagcaagcgctgctacctcgacttttattccacaatgctcacaacaatacctctctccggcgacagccgtgggatttcaatacccaactatacaatcctacatggtacaagaggccatccaagcaagcatcttacggtcattagcattaaccctccaacaaccatatgctctattgcaacagccatccttagtgcatctgtatctccaaagaatcgcggcacaacaactacaacaacagttgctaccaacaatcaatcaagtagttgcagcgaaccttgctgcttacctccagcaacaacagtttttttcattcaatcaactag

SEQ ID NO: 21996 - DNA, 371 bp, Zea mays
  Clone ID: LIB3152-019-P1-K1-A9
cgcaaattgcaccaagaaatccatcgagaggccgtcgacaggggaattaatggcgtcgtcgtctagcagcagccaccgccgcctcatcctcgcagccgccgtcctgctctccgtgctcgcggctgccagcgccagcgccgggacctcctgcgtgccggggtgggccatcccgcacaacccgctcccgagctgccgctggtacgtgaccagccggacctgcggcatcgggccgcgcctcccgtggccggagctgaagaggagatgctgccgggagctggcggacatcccggcgtactgccggtgcacggcgctgagcatcctcatggacggcgcgatcccgccgggcccggacgcgcagctggagggccgcc

SEQ ID NO: 21997 - DNA, 374 bp, Zea mays
  Clone ID: LIB3152-019-P1-K1-B1
attttgagcattcagaaacacaccaagcgaagcacattagcaacaacctaacaacaatggctaccaagatattatccctccttgcgcttcttgcgctttttgcgagcgcaacaaatgcgttcattattccacaatgctcacttgctccaagttccattattacacagttcctcccaccagttacttcaatgggcttcgaacacccagctgtgcaagcctataggctacaacaagcaattgcggcgagcgtcttacaacaaccaatttcccagttgcaacaacaatccttggcacatctaacaatacaaaccatcgcaacgcaacagcaacaacaattcctaccagcactgagccacctagccatggtgaaccct

SEQ ID NO: 21998 - DNA, 309 bp, Zea mays
  Clone ID: LIB3152-019-P1-K1-B12
catcatacatagtgaagtactctttcacatcttatcaccaatgggagccggggttttcccttctgccctcctgctctttcagcaagcgctgctacctctactttattccacaatgctcacaacattacctttctcctcatcagccgtgggatatcaatacccaactatacaatccttcatggttcatgatgccattcatgcaagcatcttacagtcattagcatttaccctccaacatccatatgctctattgcaacagccatccttatttgcatttgtatcttcaaagatatttgtgctcatcaacta

SEQ ID NO: 21999 - DNA, 370 bp, Zea mays
  Clone ID: LIB3152-019-P1-K1-B2
cccccataccttccatcaatgatagcttcagtatgtgaaaacccagctcttcaaccctataggctccaacaagcaatcgcagcaagcaacatacctttatcacccttgtttcaacaatcgccagccctatctttggtgcagtcattggtacaaaccatcagggcacagcagctgcagcaactcgtgctacctgtgatcaaccaagtagctctggcaaacctttctccctactctcagcaacaacaatttcttccattcaaccaactgtctacattgaaccgtgctgcttatttgcagcaacaactattaccattcagccagctagctactgcctactctcagcaacaacaacttcttccatttaaccaat

SEQ ID NO: 22000 - DNA, 376 bp, Zea mays
  Clone ID: LIB3152-019-P1-K1-B3
attgagaccaactagcaacatagaaagcacaatagtgtaccaacaatggcagccaaaatattttgcctccttatgctccttggtctttctgcaagtgctgctacggcgaccattttcccacaatgctcacaagctcctatagcttcccttcttcccccgtacctctcaccagcggtgtcttcggtatgtgaaaacccaattcttcaaccctataggatccaacaggcaatcgcagctggcatcttacctttatcacccttgttcctccaacaatcatcagccctattacagcagttacctttggtgcatttattggcacaaaacatcagggcacaacaactacaacaacttgtgctagcaaaccttgctgcctact

SEQ ID NO: 22001 - DNA, 371 bp, Zea mays
  Clone ID: LIB3152-019-P1-K1-B4
atctaaacctacaaaccatcgcaacgcaacagcaacaacagtttctgccatcactgagccacctagccgtggtgaaccctgtcgcctacttgcaacagcagctacttgcatccaacccacttgctctggcgaacgtagctgcataccagcaacaacaacgtctgcaacagtttatgccagcgctcagtcaactagccatggtgaaccctgtcgcctacctacaacagcaacaattgctttcatctagcccgctcgctgtgggcaatgcacctacgtacctacaacaacagttgctgcaacagattgtaccagctctgactcagctagctgtggcaaaccctactgcctacttgcaacagttgctttcattc

SEQ ID NO: 22002 - DNA, 391 bp, Zea mays
  unsure at all n locations
  Clone ID: LIB3152-019-P1-K1-B6
cgatgatacctagntttggttgaacctctgtcttcttattntgcaacatacaacatactaccagtgtcagccatgctatcctgcnttgcctacccccagcaantttcttccattcaacccaactagctagcattgaacctctcctgcttatttacatgcagaacaacctactaccatttcagccatgctagctggtgtgaggccctgctatccttcttgacacaaccacagttgttgccgttctaccagcacgttgcgcctaacgctggcaccctcttacaactgcaacaattgctgccattcaaccaacttgctttgacaaacccagcagtgttctaccaacaacccatcattggtggtgccctcttttagatttcttatgagttttagt

SEQ ID NO: 22003 - DNA, 368 bp, Zea mays
  Clone ID: LIB3152-019-P1-K1-B7
cagcattcataaacacaccaagcgttgcgcactagcaacaacctaacaacaatggctaccaagatattagccctccttgcgcttcttgcccttttagtgagcgcaacaaatgcgttcattattccacagtgctcacttgctcctagtgccattattccacagttcctcccaccagttacttcaatgggcttcgaacatccagccgtgcaagcctacaggctacaactagcgcttgcggcgagcgtcttacaacaaccaattgcccaattgcaacaacaattcttggcacatctaaacctacaaaccatcgcaacgcatcagcaacaacagtttctgccatcactgagccacctaaccgttgtgaaccc

SEQ ID NO: 22004 - DNA, 366 bp, Zea mays
  Clone ID: LIB3152-019-P1-K1-C1
cattcatcttagtagtataggcaccaaatcaaatctgcaacatcaattatctaactccaaaaaccatgaagctggtgcttgtggttcttgctttcattgctttagtatcaagtgtttcttgtacacagacaggcggctgcagctgtggtcaacaacaaagccatgagcagcaacatcatccacaacaacatcatccacataaacaacaacatcaaccaccaccacaacatcaccagcagcagcatcaccaacaacaacaagttcacatgcaaccacaaaaacatcagcaacaacaagaagttcatgttcaacaacaacaacatcaaccgcatctccaacaacatcaacaacaacagcaccaacaac

SEQ ID NO: 22005 - DNA, 153 bp, Zea mays
  Clone ID: LIB3152-019-P1-K1-C2
aagttttgtttgtggtcgttgctgttattgtgtgaactgttgagctctgttagcctgtgcacttttatctatttatttggtaccttcttgctatttcaccttctgcaatacaagaatgctgtaagagctatatgttaaccttttggcattgtt

SEQ ID NO: 22006 - DNA, 374 bp, Zea mays
  Clone ID: LIB3152-019-P1-K1-C3
caactagcaacatagaaagcacaattgtgtaccaacaatggcagccaaaatattttgcttccttatgctccttggtctttctgcaagtgctgctaccgcaaccattttcccacaatgctcacaagctcctatagcttcctttcttcccccatacctctcaccagcggtgtcttcagtatgtgaaaacccaattcttcaaccctacaggatccaacaggcaatcgcagcaggcatcttacctttatcacccttgttcctccaacaaccgtcagccctattacagcagttacctttggtgcatttgttggcacaaaacatcaaggcacaacaactacaacaacttgtgctaggaaaccttgctgcctactctcagc

SEQ ID NO: 22007 - DNA, 375 bp, Zea mays
  Clone ID: LIB3152-019-P1-K1-C4
cagaaacacaccaagcgaagcacattagcaacaacctaacaacaatggctaccaagatattatccctccttgcgcttcttgcgctttttgcgagcgcaacaaatgcgttcattattccacaatgctcacttgctccaagttccattattacacagttcctcccaccagttacttcaatgggcttcgaacacccagctgtgcaagcctataggctacaacaagcaattgcggcgagcgtcttacaacaaccaatttcccagttgcaacaacaatccttggcacatctaacaatacaaaccatcgcaacgcaacagcaacaacaattcctaccagcactgagccacctagccatggtgaaccctgccgcctacttgc

SEQ ID NO: 22008 - DNA, 375 bp, Zea mays
  Clone ID: LIB3152-019-P1-K1-C5
ctttatctactccagagcgcataataacccgatcgacaccatgagggtgttgcgtggggccctcgctctcctggctctcgctgcgagcgccacctccacgcatacaagcggcggctgcggctgccagccaccgccgccggttcatctaccgccgccggtgcatctgccacctccggttcacctgccacctccggtgcatctcccaccgccggtccacctgccgccgccggtccacctgccaccgccggtccatgtgccgccgccggttcatctgccgccgccaccatgccactaccctactcaaccgccccggcctcagcctcattccccagccacacccatgcccgtgccaacagccgcatccaagcccgtgcc

SEQ ID NO: 22009 - DNA, 392 bp, Zea mays
  Clone ID: LIB3152-019-P1-K1-C6
accaaggcgtccgattttgaccattcaaaaacacacatttgtttagtgcactagcaacttcctaacaacaagggctaccaagatattagccctccttgcgctcctttccctttcagtgagcgcaacaactgcattcattattccacaatgctcacttgctcctaatgccattattccacagttcctcccatcagttacatcaatgggcatcgaacaccctattgtgcaagcctataggctacaacaagcgcttgcggcgagcgtcttacaacaaccgtttgcccaattacaacaacaatccttggcacatctaaccatacaaaccatcgcaacacaactagagcaacagtttgtgcccgcattgagccaactagccgcagtgaaccctgtct

SEQ ID NO: 22010 - DNA, 366 bp, Zea mays
  Clone ID: LIB3152-019-P1-K1-C8
gcaattagctcatcgactccagattgtagaactcgacaccatgaaggtgcgtgggcgttgcccttgctctcctggcgctcgctgctagcgccgcctccagtacaagcggcggctgtggctgccagacaccaccgtttcatctaccgcctccgttctatatgccgcctccgttctatctgccgccgcagcagcagccgcagccatggcaataccccactcaaccaccgtagctaagcccgtgccagcagttcggatcctgcggcgtcagcagcgtcggcagcccgttcctgggccagtgcgtcgagttcctgaggcaccagtgcagcccggcggcgacgccctacggctcgtcacagtgccaggcgc

SEQ ID NO: 22011 - DNA, 375 bp, Zea mays
  Clone ID: LIB3152-019-P1-K1-D1
aagcaacatagaaagtggaatccagtagcaacaatagagcaacaatggcgaccaagatattttccctccttatgctccttgctctttctgcatgtgttgctaacgcgacaattttccctcaatgctcacaagctcctatagcttcccttcttcccccataccttccatcaatgatagcttcagtatgtgaaaacccagctcttcaaccctataggctccaacaagcaatcgcagcaagcaacatacctttatcacccttgtttcaacaatcgccagccctatctttggtgcagtcattggtacaaaccatcagggcacagcagctgcagcaactcgtgctacctgtgatcaaccaagtagctctggcaaaccttt

SEQ ID NO: 22012 - DNA, 367 bp, Zea mays
  Clone ID: LIB3152-019-P1-K1-D10
attcagaaacacaccaagcgattctctctagcaacaacctaacaacaatggcgtgcaagatattatccctccttgcgcttcttgcgctttttgcgagcgcaacaaatgcgtccattattccacaatgctcacttgctcctagttccattattccacagttcctcccaccagttacttcaatggccttcgaacacccatctgtgcaagcctatatgctacaacaagcgattgcggcgagcgtcttacaacaaccaattgcccaattgcaacaacattccttggcacatctaacaatacataccatcgcaacgcaacagcaacaacagttcctaccatcacttagccacctagccatggttgaaccctg

SEQ ID NO: 22013 - DNA, 379 bp, Zea mays
  Clone ID: LIB3152-019-P1-K1-D12
cgtccgttggttcttcaaaccattacctttttttactccagagcgcagaagaacccgaggggggccatgagggtgttgctcgttgccctcgctctcctggctctcgctgcgagcgccacctccacgcttacaagcggcggctgcggctgccagccaccgccgccggttcatctaccgccgccggtgcatctgccacctccggttcacctgccacctccggtgcattttccaccgtcggtccacctgccgccgccggtccacctgccaccgtcggtccatgtgccgccgccggttcatctgccgtcgccaccatgccactaccctactcaaccgtcccggccttagccttatccccaggcacacccatgcccgtgccaac

SEQ ID NO: 22014 - DNA, 375 bp, Zea mays
  Clone ID: LIB3152-019-P1-K1-D2
gataccaactagcaacatacatagtgaagtacagtagcaacatcttagcaccaatggcagccaagatttttgccctccttgccctccttgctctttcagcaagtgttgctaccgcgactattattccacaatgctcacaacaatacctctctccggtgacagccgcgagatttgaatacccaactatacaatcctacaggctacaagaggccatcacagcaagcatcttacggtcgttagcattgactgtccaacaaccatatgccctattgcaacaaccatccttagtgaatctatatctccaaagaatcgcagcacaacaactacaacagcagttgcttccaacaatcaatcaagtagttgcagcgaaccttg

SEQ ID NO: 22015 - DNA, 376 bp, Zea mays
  Clone ID: LIB3152-019-P1-K1-D3
aaacacaccaagcgaagcgcactatcaacgacctaacaacaatggctaccaagatattagccctccttgcgcttcttgccctttttgtgagcgcaacaaatgcgttcattattccacaatgctcacttgctcctagtgccattattccacagttcctcccaccagttacttcaatgggcttcgaacacctagctgtgcaagccaacatgcaacaacaagcgcttgcggcgagcgtcttacaacaaccaattgcccaattgcaacaacaatccttgccacatctaacaatacaagccatcacaacgcaacagcaacaacagttcctaccagcactgagccacctagccatggtgaaccctgccgcctacttgcaaga

SEQ ID NO: 22016 - DNA, 259 bp, Zea mays
  Clone ID: LIB3152-019-P1-K1-D4
aaaaaaaaaaaaaaaaaaaaaaaatttttttaaaaaacaacgggcgcaccaaaaagggggggcaaatctaaaatacacaaacattcaaaaggggcggcccttttatagataacaaatttatggatcccttttttccgaccccttacaacgttccgcgtggccccaaccttaattttcctggctggatttttcaacaaaaattactggccaacccttgtcgccccctaaccatttagaacgcccgccaatccccttttaa

SEQ ID NO: 22017 - DNA, 277 bp, Zea mays
  Clone ID: LIB3152-019-P1-K1-D8
ggcgacccacgcgtcctttttaatacattatctacaattttttatcaatggctgccaagatatatgcgaagcgtattctccttgctctttctacattttttgctaactcaaccatttttcctcatttctcacaaactcctatatctgtccttctttccccatacctttcatcaatgtaccgttcattatgataaaacccatccctttaaccctacattgctccaacaagcaatctcaacaagcatcttacctttatcacctcttgtttttcaacaat

SEQ ID NO: 22018 - DNA, 373 bp, Zea mays
  Clone ID: LIB3152-019-P1-K1-E1
agattggagaactcgacaccatgaaggtgctgatcgttgcccttgctctcctggcgctcgctgcgagcgccgcctccagtacaagcggcggctgtggctgccagacaccaccgtttcatctaccgcctccgttctatatgccgcctccgttctatctgccgccgcagcagcagccgcagccatggcaataccccactcaaccaccgcagctaagcccgtgccagcagttcggatcctgcggcgtcggcagcgtcggcagcccgttcctgggccagtgcgtcgagttcctgaggcaccagtgcagcccggcggcgacgccctacggctcgccacagtgccaggcgctgcagcagcagtgctgccaccagatcag

SEQ ID NO: 22019 - DNA, 376 bp, Zea mays
  Clone ID: LIB3152-019-P1-K1-E10
agaaagtggaatccagtagcaacaatagatcaacaatggcgaccaagatattttccctccttatgctccttgctctttctgcatgtgttgctaacgcgacaattttccctcaatgctcacaagctcctatagcttcccttcttcccccataccttccatcaatgatagcttcagtatgtgaaaacccagctcttcaaccctataggctccaacaagcaatcgcagcaagcaacatacctttatcacccttgtttcaacaatcgccagccctatctttggtgcagtcattggtacaaaccatcagggcacagcagctgcagcaactcgtgctacctgtgatcaaccaagtagctctggcaaaaccttctccctactc

SEQ ID NO: 22020 - DNA, 376 bp, Zea mays
  Clone ID: LIB3152-019-P1-K1-E11
ttcgtctcaatgcaacttacatcattctttttttttatgaatagaagcaaactggcggggggggtgagctcttttatattcttccccctaagctaattatggacccatatgctaataatcctgaggactgttatgacaaggaatacattcctgaccctgatgacaagaagccagagggctatgattatattcccaaggaaattcctgaccctgatgctaataagtctgatgacttgatatgacttggaatatggtgaatggactgcccctaccattcccaacccataattcaaaggaccatgtatacaaaataaaattattaaccctaactaccattgtaaatggaaagcacctatgattgacaacccatatttta

SEQ ID NO: 22021 - DNA, 291 bp, Zea mays
  Clone ID: LIB3152-019-P1-K1-E12
tattatctcctccttgcgctttttgcccttttagtgagcgcaacaaatgcgttctttattccacagtgctcacttgctcctagtgccattattccacagttcctcccaccagttacttcaatgggcttcgaacatccagccttgcaagcctacatgctacatctagcgcttgcggttagcgtcttacatcaaccaattgcccaattgcaacaacaattccttggcacattttaacctacataccatttcaactcatcatcaacaacagtatctgccatcactgatccacct

SEQ ID NO: 22022 - DNA, 375 bp, Zea mays
  Clone ID: LIB3152-019-P1-K1-E2
ctggaatggtcaaggctggttttgctggcgatgatgcaccaagggcggttttccctagcattgttggccgtcctcgccacactggtgtcatggtagggatgggacagaaggacgcatatgttggcgatgaggcacagtccaagagaggtattcttacgctcaagtacccgattgagcacggtattgtgagcaactgggatgacatggagaaaatctggcatcatactttctacaacgagcttcgtgttgccccagaggagcaccctgtgttgctcaccgaggctcctttgaacccaaaggccaacagggagaagatgacccaaattatgtttgagactttcaatgttcctgccatgtatgttgcaatccaagcgg

SEQ ID NO: 22023 - DNA, 373 bp, Zea mays
  Clone ID: LIB3152-019-P1-K1-E3
cagcattcagaaacacaccaagcgaagcgcactagcaacaacctaacaacaatggctaccaagatattagccctccttgcgcttcttgcccttttagtgagcgcaacaaatgcgttcattattccacagtgctcacttgctcctagtgccattattccacagttcctcccaccagttacttcaatgggcttcgaacatccagccgtgcaagcctacaggctacaactagcgcttgcggcgagcgtcttacaacaaccaattgcccaattgcaacaacaatccttggcacatctaaacctacaaaccatcgcaacgcaacagcaacaacagtttctgccatcactgagccacctagccgtggtgaaccctgtcg

SEQ ID NO: 22024 - DNA, 388 bp, Zea mays
  unsure at all n locations
  Clone ID: LIB3152-019-P1-K1-E4
acccacgcgtccggagaccaactagcaacatatttttgtttcaatattgnaccaataatggcagggggagtattttgcctcattatgctccttggtctttctgcaagtgctgctactgctagcattttcccgcaatgctcacaagctcctatagcttcccttcttcccccatacctctcaccagctatgtcttcagtatgtgaaaatccaattcttctaccctacatgatccaacaggcaatcgcatcaggcatcttacctttatcaccctttgttccttcaacaatcatcagccctattacagcagttacctttggtgcatttattgtcacaaaacatcatggcacaacatctacaacaactcttgctagcaaaccttgctgcctac

SEQ ID NO: 22025 - DNA, 213 bp, Zea mays
  Clone ID: LIB3152-019-P1-K1-E7
atcctccgaaccgtaggtgcgggggcgatccatggacacccacatcgcacccgcgaacggggcggcgtctaaccaaacagctggctgcccggcgtaggctccggtgtgcccgatggctttcacacctgctcattctgcggagaccctgttatcgggggaggcgtattggggcgccaccttctgcgtcgcctcatgcatttatgcatcaacgac

SEQ ID NO: 22026 - DNA, 286 bp, Zea mays
  Clone ID: LIB3152-019-P1-K1-F1
gaaagcacattagtgtaccaacaatggcagccaaaatattttgcctccttatgctccttggtctttctgcaagtgctgctacggcgaccattttcccgaaatgctcgcaagctcctatagcttcccttttcccccgacctctaccagcgggtttcgttgtgaacccattttacctacagccacagcatcagtgcattacttatacctgtctcacatatagctatcatagtccttgggcttatgccaaacatagccacactcacacttggcacaaacctgtgctact

SEQ ID NO: 22027 - DNA, 375 bp, Zea mays
  Clone ID: LIB3152-019-P1-K1-F10
gcaacatagaaagtggaatccagtagcaacaatagagcaacaatggcgaccaagatattttccctccttatgctccttgctctttctgcatgtgttgctaacgcgacaattttccctcaatgctcacaagctcctatagcttcccttcttcccccataccttccatcaatgatagcttcagtatgtgaaaacccagctcttcaaccctataggctccaacaagcaatcgcagcaagcaacatacctttatcacccttgtttcaacaatcgccagccctatctttggtgcagtcattggtacaaaccatcagggcacagcagctgcagcaactcgtgctacctgtgatcaaccaagtagctctggcaaacctttct

SEQ ID NO: 22028 - DNA, 371 bp, Zea mays
  Clone ID: LIB3152-019-P1-K1-F11
gtgaacgagtcatggtggcctgctttgttcctcccaaagggagaagcgcctccgtacgggaaaccacatgacctgaagaaggtttggaaagttggtgtcctgacgggcgtgatcaagcacatggccccaaacttcgataagatcaggaaccgtgtaaggaagtcgaagtgtctgcaggacaaaatgactgcaaaggagagcctcatctggcttggtgttctacaacgcgaggagaagtctgttcacggctttggcagtgctttactacagaatgctcggcatagtagcacttcagaggacagaaacgagggcatatatagcagcagtgacgagtatgatgtcgaccgccttgagcagcctccttgttccac

SEQ ID NO: 22029 - DNA, 213 bp, Zea mays
  Clone ID: LIB3152-019-P1-K1-F12
ggcgacccacgcgtccggcggcagtgcgtatagaggatcgtttttttgaacagcatgaagatggtcatcgggcgtggtgtgtgcctggctctgtcagctgccagcgcctctgcaatgcatatgccctgcccctgcgcggggctgcagggcttgtacggcgctggcgccgtcctgacgactatgatgggcgccggcggtctgttcccttactct

SEQ ID NO: 22030 - DNA, 368 bp, Zea mays
  Clone ID: LIB3152-019-P1-K1-F2
gcacaatagtgtaccaacaatggcagccaaaatattttgcctccttatgctccttggtctttctgcaagtgctgctacggcgaccattttcccgcaatgctcgcaagctcctatagcttcccttcttcccccgtacctctcaccagcggtgtcttcggtatgtgaaaacccaattcttcaaccctacaggatccaacaggcaatcgcagctggcatcttacctttatcacccttgttcctccaacaatcatcagccctattacaacagttacctttggtgcatttattggcacaaaacatcagggcacaacaactacaacaacttgtgctagcaaaccttgctgcctactctcagcaacagcagtttc

SEQ ID NO: 22031 - DNA, 374 bp, Zea mays; identical to SEQ ID NO: 21934
  Clone ID: LIB3152-019-P1-K1-F3

SEQ ID NO: 22032 - DNA, 377 bp, Zea mays
  Clone ID: LIB3152-019-P1-K1-F5
atcgactccagattggagaactcgacaccatgaaggtgctgatcgttgcccttgctctcctggcgctcgctgcgagcgccgcctccagtacaagcggcggctgtggctgccagacaccaccgtttcatctaccgcctccgttctatatgccgcctccgttctatctgccgccgcagcagcagccgcagccatggcaataccccactcaaccaccgcagctaagcccgtgccagcagttcggatcctgcggcgtcggcagcgtcggcagcccgttcctgggccagtgcgtcgagttcctgaggcaccagtgcagcccggcggcgacgccctacggctcgccacagtgccaggcgctgcagcagcagtgctgccaccag

SEQ ID NO: 22033 - DNA, 378 bp, Zea mays
  Clone ID: LIB3152-019-P1-K1-F6
cgcatccaatcccgtgccatctgcttggaacctgcggcgttggcagcacgcgggggcctgggccagtgcgtcgagttcctgaggcatcagtgcagcccgacggcgacgccctactgctcgcctcagtgccagtcgttgcggcagcagtgttgccagcagctcaggcaggtggagccgcagcaccggtaccaggcgatcttcggcttggtcctccagtccatcctgcatcagcagccgcaaagcggccaggtcgcggggctgttggcggcgcatatagcgcagcaactgacggcgatgtgcggcctgcagcagccgactccatgcccctacgctgctgtcggcggtgttccccactgaagaaactatgtgctgtattat

SEQ ID NO: 22034 - DNA, 207 bp, Zea mays
  Clone ID: LIB3152-019-P1-K1-F7
ggcgacccacgcgtccggcgcagtgcgtatagaggatcttttaacagaacagcatgaagatggtcaggggggtcgttttgtgcctggctctgtcagctgccatctcctctgcaatgcagatgccctgcccctgctcggggctgcatggcttgtacggctctggcgccggcctgacgacgatgatgggcgccgtgcggtctgtacccc

SEQ ID NO: 22035 - DNA, 366 bp, Zea mays
  Clone ID: LIB3152-019-P1-K1-G1
gacccacgcgtcctttttcaaccaagtagcagtatagttctctgctgcttatcaacagcagcaacaggtactacttttcacccagctagctggtgtgagccctgctaccttcttgacacaaccacagttgttgccgttctaccagcacgttgcgcctaacgctggcaccctcttacaactgcaacaattgctgccattcaaccaacttgctttgacaaacccagcagtgttctaccaacaacccatcattggtggtgccctcttttagatttcttatgagttatagttcaataataaagttttttatcctagaaatgtggcttcccagaaataagaaagcacatttctagaataaaaaactttatt

SEQ ID NO: 22036 - DNA, 125 bp, Zea mays
  unsure at all n locations
  Clone ID: LIB3152-019-P1-K1-G10
cgggtccgaccccacgccgnntccggtcagtccctagcatattagctcaatcgtactccatgattggggagaancctcgacaccatgagagggtgcttgnnatcgttgcnnccttgctttctcct

SEQ ID NO: 22037 - DNA, 373 bp, Zea mays
  Clone ID: LIB3152-019-P1-K1-G11
cgttccgcatctagcaacatataatgcacatttttttttccaacaatggcagccaaaatatggtaggctcttatgcttccttgtatatcctacaagtctgctacggcatccatttttccgcattgctcacaagctcctatagcttcccttcttcctccgtacctctcaccagcgttgtctttctgttgtgaaatcccaattcttcaaccctactggatccaacatgcaatcgcatctggctatctacctttataaccctttgtcctccaacaaatattttccctatatcagctattgttcctttggtgcatttatttgcactaatacattttgtctctacaactatcacaacttgtgctatctaaccttttct

SEQ ID NO: 22038 - DNA, 379 bp, Zea mays
  Clone ID: LIB3152-019-P1-K1-G12
catagaaagcacaatagtgtaccatcattggcagccaaaatattttgcctccttatgctccttggtctttctgcaagtgctgctacggcgaccattttcccgaaatgctcgcaagctcctatagcttcccttcttcccccgtacctctcaccagcggtgtcttcggtatgtgaaaacccaattcttcaaccctacaggatccaacaggcaatcacagctggcatcttacctttatcacccttgttgctacaacaattatcagccctattacatcagctacctgtggtgcatttattggctcaatacattaaggcacaacaactacaacaacttgtgctagcaaaccttgctgactactctcatcaacagcagcatcttc

SEQ ID NO: 22039 - DNA, 376 bp, Zea mays
  Clone ID: LIB3152-019-P1-K1-G2
accaagcgaagcgcactagcaacaacctaacaacaatggctaccaagatattagccctccttgcgcttcttgcccttttagtgagcgcaacaaatgcgttcattattccacagtgctcacttgctcctagtgccattattccacagttcctcccaccagttacttcaatgggcttcgaacatccagccgtgcaagcctacaggctacaactagcgcttgcggcgagcgtcttacaacaaccaattgcccaattgcaacaacaatccttggcacatctaaacctacaaaccatcgcaacgcaacagcaacaacagtttctgccatcactgagccacctagccgtggtgaaccctgtcgcctacttgcaacagcagct

SEQ ID NO: 22040 - DNA, 369 bp, Zea mays
  Clone ID: LIB3152-019-P1-K1-G3
tgctcacttgctcctagtgccattattccacagttcctcccaccagttacttcaatgggcttcgaacacctagctgtgcaagccaacatgcaacaacaagcgcttgcggcgagcgtcttacaacaaccaattgcccaattgcaacaacaatccttgccacatctaacaatacaagccatcacaacgcaacagcaacaacagttcctaccagcactgagccacctagccatggtgaaccctgccgcctacttgcaagagcagctgcttgcatccaacccacttgctctggcgaacgtagttgcaaaccagcaacaacaacagctacaacagtttctgccaacgctcagtcaactagccatggtgaaccct

SEQ ID NO: 22041 - DNA, 336 bp, Zea mays
  Clone ID: LIB3152-019-P1-K1-H1
caacaatggcagccaaaatattttgcttccttatgctccttggtctttctgcaagtgctgctaccgcaaccattttcccacaatgctcacaagctcctatagcttcctttcttcccccatacctctcaccagcggtgtcttcagtatgtgaaaacccaattcttcaaccctacaggatccaacaggcaatcgcagcaggcatcttacctttatcacccttgttcctccaacaaccgtcagccctattacagcagttacctttggtgcatttgttggcacaaaacatcaaggcacaacaactacaacaacttgtgctaggaaaccttgctgcctact

SEQ ID NO: 22042 - DNA, 324 bp, Zea mays
  Clone ID: LIB3152-019-P1-K1-H12
ggatctgcttgctatggttactgatgactccaaggttcttctccatcgcttcaattggcaaaggctttggacaatctctccagggaagtgcatcacatcaatttgttggagccctgatggtaaaataatagcacttggcacagaagctggtttgattcttttgcatgatgtggaggtgtgtatctggatgatgataaaaaatgtcggtgtctattgtatctttgtatgaacattcgtttgtacttcatagacacctgatccagtgcctatcttctctttattataaattttttaataattttataatatttttatttattaatt

SEQ ID NO: 22043 - DNA, 223 bp, Zea mays
  Clone ID: LIB3152-019-P1-K1-H2
atttgctctagctctggcttttgcaggctgtcggcgaccattttccaaagctccagctctatgcttcttttcccgtccttaccagcgggtcttcgatgtgaaaacccaacttaaccctcagaccacagatcacagtggcattaccttataccctgtctcaacaatatagcctattacatagtccttgggcttattgccaaacatagcacacactcacactggc

SEQ ID NO: 22044 - DNA, 376 bp, Zea mays
  Clone ID: LIB3152-019-P1-K1-H3
aaccgccccggcctcagcctcatccccagccacacccatgcccgtgccaacagccgcatccaagcccgtgccagctgcagggaacctgcggcgttggcagcaccccgatcctgggccagtgcgtcgagtttctgaggcatcagtgcagcccgacggcgacgccctactgctcgtctcagtgccagtcgttgcggcagcagtgttgccagcagctcaggcaggtggagccgcagcaccggtaccaggcgatcttcggcttggtcctccagtccatcctgcagcagcagccgcaaagcggccaggtcgcggggctgttggcggcgcacatagcgcagcaactgacggcgatgtgcggcctgcagcagccgactccatg

SEQ ID NO: 22045 - DNA, 203 bp, Zea mays
  Clone ID: LIB3152-019-P1-K1-H5
agctaaactgtggcaggcagctatgttttttacgagctagctccgcgcgcgctagggggcgtcacgtacgtgctgtgatcaactgtctagttctctacttgacgcggacaccctgacccgcgcgcgctccttgtccatggtcgtctttcttattttcttttttctattttattttattattttacttttttttttatatttta

SEQ ID NO: 22046 - DNA, 300 bp, Zea mays
  unsure at all n locations
  Clone ID: LIB3152-019-P1-K1-H6
ggaanncccgggcgagcacgcgtccgtggtcgcgtgggcttactcttttttttctcgttgtcccactcctggggggaggcgtagtctttcgcgtattgtacctcgtgttcgttataccacccacttgttctggagagggtttggtgaaagaccgaggataagatctacgtgcctgtctctttaacttactacaggtacatccagctgcggttcagtctgctattgcctggcatgacttgaagcttcaaggattctgaacctcaacaactaccaatactttttcggaccatactgagagga

SEQ ID NO: 22047 - DNA, 291 bp, Zea mays
  Clone ID: LIB3152-019-P1-K1-H9
acccacgcgtccgtataaacacaccaatcgaatttttgtattctacatacctaacaacatatggctggcagggatattattcccttctttgcacattctagcacatttttgctagctactacaaattctgtttattatttccacatttcttactctactccaattttccatttattacacagtattcctcccaccagtttacttcaatacgctttctaacaccctatttgttcaatctctataattatacaactaatcatttgctgctaatctactttacaacataccata

SEQ ID NO: 22048 - DNA, 222 bp, Zea mays
  Clone ID: LIB3152-020-P1-K1-A10
gcacaatagtgtaccaacaatttttttcaaaatatttcgcttccttatgcgccggtgtctttcttcaattgctgctaccccaaccattttcccacaatgctcacaagctcctatagctttctttcttcccccataccttttaccatcttagtcttcagtatgtgaaaacccaattctttaaccctacatgatccaacatgcattcacatcatgcatttttac

SEQ ID NO: 22049 - DNA, 388 bp, Zea mays
  Clone ID: LIB3152-020-P1-K1-A2
caacaagcaacatagaaagtggaatccagtagcaacaatagagcaacaatggcgaccaagatattttccctccttatgctccttgctctttctgcatgtgttgctaacgcgacaattttccctcaatgctcacaagctcctatagcttcccttcttcccccataccttccatcaatgatagcttcagtatgtgaaaacccagctcttcaaccctataggctccaacaagcaatcgcagcaagcaaccatacctttatcacccttgtttcaacaatcgccagccctatctttggtgcagtcattggtacaaaccatcagggcacagcagctgcagcaactcgtgctacctgtgatcaaccaagtagctctggcaaacctttctccctac

SEQ ID NO: 22050 - DNA, 382 bp, Zea mays
  Clone ID: LIB3152-020-P1-K1-A3
cacatctaaacctacaaaccatcgcaacgcaacagcaacaacagtttctgccatcactgagccacctagccgtggtgaaccctgtcgcctacttgcaacagcagctacttgcatccaacccacttgctctggcgaacgtagctgcataccagcaacaacaacgtctgcaacagtttatgccagcgctcagtcaactagccatggtgaaccctgtcgcctacctacaacagcaacaattgctttcatctagcccgctcgctgtgggcaatgcacctacgtacctacaacaacagttgctgcaacagattggaccagctctgactcagctagctgtggcaaaccctactgcctacttgcaacagttgcttccattcaaccaact

SEQ ID NO: 22051 - DNA, 385 bp, Zea mays
  Clone ID: LIB3152-020-P1-K1-A4
ctcatcgactccagattggagaactctacaccatgaaggtgctgatcgttgcccttgctgtcctggcgctcgctgcgagcgccgcctccagaacaagcggcggttgtggctgccagacaccaccggtttatctaccggctccgttctatatgccgcctccgttctatctgccgccgcagcagcagccgcagcacatggcaataccccactcaaccaccgcgagtaagcccgtgccagcagctcggatcctgcggcgtcggcagcgtccgcagcccgttcctgggccagtgcgtcgagttcctgaggcaccactgcatgccggcggcgacgccctacggctcgccacagtgccaggcgctgcagcagcagtgctgacaccagatca

SEQ ID NO: 22052 - DNA, 371 bp, Zea mays
  Clone ID: LIB3152-020-P1-K1-A5
cgaaaagcatggatgccgaagccgtcgccgccgccgagggccaggtgcggcactggaccgcggacgtcaacggcatttccctccacgtcgccgagcgcggcgccgccgacgcgccggcggtcctcctcatccacggcttcccggagctctggctctcgtggcgccaccagatggccgcgctcgccgcccgcggcttccgcgcgctggcccccgacctccgtggctacggcgactcgtccgtgcccaccgaccccgccgcctactccatcctccacatcgtcggcgacttggtcgcgctccttgaccacctccaactcacaaaggtgttcgtggttgggcacgactggggcgcgatggtggcgtggcacctc

SEQ ID NO: 22053 - DNA, 378 bp, Zea mays
  Clone ID: LIB3152-020-P1-K1-A6
acccttgttcctccaacaatcatcagccctattacatcagttacctttggtgcatttattggcacaaaacatcagggcacaacaactacaacaacttgtgctagcaaaccttgctgcctactctcagcaacagcagtttcttccattcaaccaactagctgcattgaactctgcttcttatttgcaacaacaacaactaccattcagccagctacctgctgcctacccccagcaatttcttccattcaaccaactggcagcattgaactctcctgcttatttacagcagcaacaactactaccattcagccagctagctggtgtgagccctgctaccttcttgatacaaccacagttgttgccgttctaccagcacgc

SEQ ID NO: 22054 - DNA, 404 bp, Zea mays
  Clone ID: LIB3152-020-P1-K1-A7
cgggtcgacccaagcgatccgtacgagcctcgttcctacaacaatcttctattcctattacataagtcacctttggggcgggtattgtcacaaaacatcagggcacaacaactacaacaacttgtgctagcaaaccttgctgcctactctcagcaacagcagtttcttccattcaaccaactagctgcattgaactctgcttcttatttgcaacaacaacaactaccattcagccagctacctgctgcctacccccagcaatttcttccatacaaccaactggcagcattgaactctcctgcttatttacagcagcaacaactactaccattcagccagctagctggtgtgagccctgctaccttcttgatacaaccacagttgttgccgttctaccagcacgc

SEQ ID NO: 22055 - DNA, 195 bp, Zea mays
  Clone ID: LIB3152-020-P1-K1-A8
atctttggcattcaaacactctatcattcctatcacactagcaacaaccgggccgcaaattttaccaatatattatccctccacaccctcatcaccctgtttctgaacacatcaaatgcctatcattattacacaatgctcacttgcatcctacctacaatattccacaaactctcccatcaattactttcatca

SEQ ID NO: 22056 - DNA, 82 bp, Zea mays
  Clone ID: LIB3152-020-P1-K1-B1
cgcgtccggcgagctaacacactatattatccttttttctcttacacctacatgcaactacgggtgggtggttataatttat

SEQ ID NO: 22057 - DNA, 375 bp, Zea mays
  Clone ID: LIB3152-020-P1-K1-B10
attttgagcattcagaaacacaccaagcgaagcgcactagcaacaacctaacaacaatggctaccaagatattatccctccttgcgcttcttgcgctttttgcgagcgcaacaaatgcgtccattattccacaatgctcacttgctcctagttccattattccacagttcctcccaccagttacttcaatggccttcgaacacccagctgtgcaagcctataggctacaacaagcgattgcggcgagcgtcttacaacaaccaattgcccaattgcaacaacaatccttggcacatctaacaatacaaaccatcgcaacgcaacagcaacaacagttcctaccagcactgagccacctagccatggtgaaccctg

SEQ ID NO: 22058 - DNA, 379 bp, Zea mays
  Clone ID: LIB3152-020-P1-K1-B11
ctctcaccagcggtgtcttcagtatgtgaaaacccaattcttcaaccctacaggatccaacaggcaatcgcagcaggcatcttacctttatcacccttgttcctccaacaaccgtcagccctattacagcagttacctttggtgcatttgttggcacaaaacatcaaggcacaacaactacaacaacttgtgctaggaaaccttgctgcctactctcagcaacagcagtttcttccattcaaccaactggctgcattgaactctgctgcttatttgcaacaacaactaccattcagtcagctagctgctgcctacccccagcaatttcttccattcaaccaactggcagcattgaactctgctgcttatttacaacagc

SEQ ID NO: 22059 - DNA, 303 bp, Zea mays
  Clone ID: LIB3152-020-P1-K1-B12
ttctcaccaatgcagaaactttttttgtaaaacccactacctcaaccctgggagctctaatctccaatttcatcacccatcttacctttatcacccttgttcctacaacaaccgttacccctattacagcacataccttagttgcatttatttgcacaaaacatcaattcacaacaacaacaacatctattgctaggaaacaccgctgcctactctcagcaacagcactttctgccattcaaccaactgtctgtattcaactcattttcttatttgtaacaccagcttccattcatttaacta

SEQ ID NO: 22060 - DNA, 382 bp, Zea mays
  Clone ID: LIB3152-020-P1-K1-B2
caactagcaacatagaaagcacaatagtgtaccaacaatggcagccaaaatattttgcttccttatgctccttggtctttctgcaagtgctgctaccgcaaccattttcccacaatgctcacaagctcctatagcttcctttcttcccccatacctctcaccagcggtgtcttcagtatgtgaaaacccaattcttcaaccctacaggatccaacaggcaatcgcagcaggcatcttacctttatcacccttgttcctccaacaaccgtcagccctattacagcagttacctttggtgcatttgttggcacaaaacatcaaggcacaacaactacaacaacttgtgctaggaaaccttgctgcctactctcagcaacagcag

SEQ ID NO: 22061 - DNA, 383 bp, Zea mays
  Clone ID: LIB3152-020-P1-K1-B3
caactagcaacatagaaagcacaatagtgtaccaacaatggcagccaaaatattgtgcgtccttatgctccttggtctttctgcaagtgctgctacggcgaccattttcccgaaatgctcgcaagctcctatagcttcccttcttcccccgtaacctctcaccagcggtgtcttcggtatgtgaaaacccaattcttcaaccctacaggatccaacaggcaatcacagctggcatcttacctttatcacccttgttcctccaacaatcatcagccctattacatcagttacctttggtgcatttattggcacaaaacatcagggcacaacaactacaacaacttgtgctagcaaaccttgctgcctactcttagcaacagcag

SEQ ID NO: 22062 - DNA, 380 bp, Zea mays
  Clone ID: LIB3152-020-P1-K1-B4
cggacgcgtgggcggacgcgtgggtgagcattcagaaacacaccaagcgaagcgcactagcaacaacctaacaacaatggctaccaagatattatccctccttgcgcttcttgcgctttttgcgagcgcaacaaatgcgtccattattccacaatgctcacttgctcctagttccattattccacagttcctcccaccagttacttcaatggccttcgaacacccagctgtgcaagcctataggctacaacaagcgattgcggcgagcgtcttacaacaaccaattgcccaattgcaacaacaatccttggcacatctaacaatacaaaccatcgcaacgcaacagcaacaacagttcctaccagcactgagccacctag

SEQ ID NO: 22063 - DNA, 380 bp, Zea mays
  unsure at all n locations
  Clone ID: LIB3152-020-P1-K1-B5
gcaacatagaaagcacaatagtgtaccaacaatggcagccaaaatattttgcctccttatgctccttggtctttctgcaagtgctgctacggcgaccattttcccgaaatgctcgcaagctcctatagcttcccttcttcccccgtacctctcaccagcggtgtcttcggtatgtgaaaacccaattcttcaaccctacaggatccaacaggcaatcacagctggcatcttacctttatcacccttgttcctncaacaatcatcagccctattacatcagttacctttggtgcatttattggcacaaaacatcagggcacaacaactacaacaacttgtgctagcaaaccttgctgcctactctcagcaacagcagtttc

SEQ ID NO: 22064 - DNA, 377 bp, Zea mays
  Clone ID: LIB3152-020-P1-K1-B6
attttgagcattcagaaacacaccaagcgaagcgcactagcaacaacctaacaacaatggctaccaagatattatccctccttgcgcttcttgcgctttttgcgagcgcaacaaatgcgtccattattccacaatgctcacttgctcctagttccattattccacagttcctcccaccagttacttcaatggccttcgaacacccagctgtgcaagcctataggctacaacaagcgattgcggcgagcgtcttacaacaaccaattgcccaattgcaacaacaatccttggcacatctaacaatacaaaccatcgcaacgcaacagcaacaacagttcctaccagcactgagccacctagccatggtgaaccctgtc

SEQ ID NO: 22065 - DNA, 382 bp, Zea mays
  Clone ID: LIB3152-020-P1-K1-B7
agaaagcacaatagtgtaccaacaatggcagccaaaatattttgcctccttatgctccttggtctttctgcaagtgctgctacggcgaccattttcccgcaatgctcgcaagctcctatagcttcccttcttcccccgtacctctcaccagcggtgtcttcggtatgtgaaaacccaattcttcaaccctacaggatccaacaggcaatcgcagctggcatcttacctttatcacccttgttcctccaacaatcatcagccctattacaacagttacctttggtgcatttattggcacaaaacatcagggcacaacaactacaacaacttgtgctagcaaaccttgctgcctactctcagcaacagcagtttcttccattca

SEQ ID NO: 22066 - DNA, 302 bp, Zea mays
  Clone ID: LIB3152-020-P1-K1-B8
caaaaacacaccaagcgaatttctttatcaacaacctaacaacaatgggtggccgtatattatcccttcttgcgcttcttgcactttttgcgagcgcaacatatgcgtccattattccacaatgctcacttgctcctagatccattattccacagttcctcccaccagttacttcaatggcctttgaacacccagctgtgcaagcctataggctacaacaagctattgctgctagcgttcttacaacaaccaatttcccaattgtaacaacattccttggcacatctaacaattcataccat

SEQ ID NO: 22067 - DNA, 165 bp, Zea mays
  unsure at all n locations
  Clone ID: LIB3152-020-P1-K1-B9
gggggagcacgcgnncgaaaanaacaacaaaaaaatttttttattttcccaacaatcactactatggtcggttttttaataattctcaaacccccccctccacacaattctaccactaccatatctccacatatctacaaatttttcaatatccaacaattttaa

SEQ ID NO: 22068 - DNA, 357 bp, Zea mays
  Clone ID: LIB3152-020-P1-K1-C1
attcaaaaacacaaccaggcaaaccgccctagcaacgacctaacaacaatggctaccaagaatttagccctccttgcgcttcttgccctttttgggagcgcaacaaatgcgttcattattccacaatgctcacttgctcctagtgccattattccacagttcctcccaccagttacttcaatgggcttcgaacacctagctgtgcaagccaacatgcaacaacaagcgcttgcggcgagcgtcttacaacaaccaattgcccaattgcaacaacaatccttgccacatctaacaatacaagccatcacaacgcaacagcaacaacagttcctaccagcactgagccacctagccatg

SEQ ID NO: 22069 - DNA, 379 bp, Zea mays
  Clone ID: LIB3152-020-P1-K1-C11
agcgcaacaaatgcgttcattattccacaatgctcacttgctcctagtgccattattccacagttcctcccaccagttacttcaatgggcttcgaacacctagctgtgcaagccaacatgcaacaacaagcgcttgcggcgagcgtcttacaacaacaatggctaccaagatattagccctccttgcgcttcttgccctttttgtgagcgcaacaaatgcgttcattattccacaatgctcacttgctcctagtgccattattccacagttcctcccaccagttacttcaatgggcttcgaacacctagctgtgcaagccaacatgcaacaacaagcgcttgcggcgagcgtcttacaacaaccaattgcccaattgca

SEQ ID NO: 22070 - DNA, 376 bp, Zea mays; identical to SEQ ID NO: 21992
  Clone ID: LIB3152-020-P1-K1-C12

SEQ ID NO: 22071 - DNA, 370 bp, Zea mays
  Clone ID: LIB3152-020-P1-K1-C2
ctggtgtcatcaagcctggtatggtagtcacctttggtccaactggcctgactactggggggaagtctggtgggatgcaccatggggggcttcaagggggcttttccggcgacaatgttggcttcaaacgggaaaacggtgctgtcaaggatctaaggcggggttcgggggctccaactccaaagatgaccctgccaaggaggctgccagctttaccttccaggtcatcatcatgaaccaccctgggcagattggcaacggctatgccccagtgctggactgccacaccttccacaatgccgtcaagtttgctgagctcattaccaagatcgacaggcgatctggcaaggagctcgagaaggagcccaag

SEQ ID NO: 22072 - DNA, 199 bp, Zea mays
  Clone ID: LIB3152-020-P1-K1-C3
ttccttttttccccggacctctcaacaagcgggtctttggtatgggaaacccaattctttaaccctatggatccaacagcaatcgagctgcatctaccttatcaccctgttctcaacatatcagctattacagcagtacttgggcttattgcacaaacataggacacactacaacacttggctgcaacctgtgctactt

SEQ ID NO: 22073 - DNA, 164 bp, Zea mays
  Clone ID: LIB3152-020-P1-K1-C4
gtgacatactagccacatataaggtttattttttacacaacacaaccttacaaggcagagggtcatcttattatcaatgctttctcatatagcaaacatactgagaccattatctcactatgctatcacaccattatcttttcactattttttcactgaacatt

SEQ ID NO: 22074 - DNA, 244 bp, Zea mays
  Clone ID: LIB3152-020-P1-K1-C5
cggctaacccattggtcgccgccttcctgtaacagcaacaatttctgccatagggccgaatctctttgatgaaccttgccttgtcaaggcagcaaccgatcgttggaggtgccattttttaaatctcaatcgatatgttctttgtgactttgccctcataccggcatgtgcaacttactagtaataatcaatatattgattgagatttaaccatataagctttaaacatgcaatttttaataag

SEQ ID NO: 22075 - DNA, 102 bp, Zea mays
  Clone ID: LIB3152-020-P1-K1-C6
cccacgctcacaccaggaagctctcctcccggttcctgggggcccccgaatccttcctccggccgttgcttccaacgcccgcggccggcccttcttcggggg

SEQ ID NO: 22076 - DNA, 348 bp, Zea mays
  Clone ID: LIB3152-020-P1-K1-C7
cccacgctcacaccaggaagctcttcttcccgttcctcggcgcccccgcaggcggcctccggccgttggctcccactcccgccgccggcccctcctcgcggcggacgctcgccgtcagggccatggcgcctcccaagccgggaggcaagcccaagaaagtggtgggcattataaagctggcgctcgaggccggcaaggcgacgccggcgccgaccgtcgttccggcgctcggtgccaagggagtcaacatcatggcgttctttaaggagtacaatgccaagacggtcgacaagctccgttacatcatcctcttcgagatcaccgtgttttgatgattagagctttacc

SEQ ID NO: 22077 - DNA, 137 bp, Zea mays
  Clone ID: LIB3152-020-P1-K1-C8
ttcaccaacatatcacaaacttatttttctactaccaacacaccctagcattcgacgcgaacttactatatttaacactccatcctacctacaacacatacaacagctactttaatccactaccaatggttaaccca

SEQ ID NO: 22078 - DNA, 373 bp, Zea mays
  Clone ID: LIB3152-020-P1-K1-C9
ttcttcgtcgacaagcagggagttcacctcgctcggtgtgcagtgagcgactagattgttgactgcataacaaaacccatcgtcgtcggatcggagatgatgagttccgtcgtcgtggatgctgctgctaccagcagcagcgagaagaagacgtcgtggccggaggtggtgggcatgtccatcaaggaggcgacggagaccattctcaaggacatgcccaacgcgtacatccaggtgctgcctgttgggtcgcccgtgacgctggaccttcgccccgaccgcgtccgtatcttcgttgacaccgtcgccatgactccgacagttgggtgatacacaccaaatgcaataaacaaaccctactttttaatttaat

SEQ ID NO: 22079 - DNA, 228 bp, Zea mays
  Clone ID: LIB3152-020-P1-K1-D12
cgttcgttttacttaactttcccggtttttttctcatccccagccacacccatgcagggggcatctttctcattcaatcccttgccaacttaatgtaaccttcaatttaggcagtacccttatacaaatccagggcgttttgtttctgaggcatcagtgcatcccgactgcgacgccctactgctcgcctcagtgccagtctttgcggcagcagtattgtcagcatct

SEQ ID NO: 22080 - DNA, 297 bp, Zea mays
  Clone ID: LIB3152-020-P1-K1-D2
agaaaagcacaatagtggtcccaacaatggcagcccaaaaaatttggcttcctaatgctcctgggcttttttgaggtctgttaccgaaccattttccacatgctcacagctctatacttcctttttcccatactttacagggggtttcagttggaaaccaattttaacctcagatcacaggcatgagcaggatttaccttataccctgtcctcacaccgcagcctatacagagtaccttgggatttgtgcacaaacataagccaacactacacaactggctaggaacctgtgctact

SEQ ID NO: 22081 - DNA, 359 bp, Zea mays
  Clone ID: LIB3152-020-P1-K1-D3
cgttttcagcattcagaaacacaccaagcgaagcgcactagcaacaacctaacaacatgggctaccaagatataagccctgcttgcgcttctagcccttttagtgagcgcaacacatccgtacattattccacagcgctaactcgctcatagtgccattattccacaggtgctaccaccagttacttaaatgggattagaacatacagacgtgcaagcctacaggctacaactagagcttgcggcgagcgtcttacaacaaccaatttgccaaatgcaacaacaatgcttggcacatctaaacctacaaaccatcagaacgcaacagcaacaacagttggtgacatcactgagccacct

SEQ ID NO: 22082 - DNA, 380 bp, Zea mays
  Clone ID: LIB3152-020-P1-K1-D4
gcaacatagaaagcacaatagtgtaccaacaatggcagccaaaatattttgcttccttatgctccttggtctttctgcaagtgctgctaccgcaaccattttcccacaatgctcacaagctcctatagcttcctttcttcccccatacctctcaccagcggtgtcttcagtatgtgaaaacccaattcttcaaccctacaggatccaacaggcaatcgcagcaggcatcttacctttatcacccttgttcctccaacaaccgtcagccctattacagcagttacctttggtgcatttgttggcacaaaacatcaaggcacaacaactacaacaacttgtgctaggaaaccttgctgtctactctcagcaacagcagtttc

SEQ ID NO: 22083 - DNA, 375 bp, Zea mays
  Clone ID: LIB3152-020-P1-K1-D5
caacaagcaacatagaaagtggaatccagtagcaacaatagagcaacaatggagaccaagatattttccctccttatgctccttgctctttctacatgtgttgctaacgcgacaattttccctcaatgctcacaagctcctatagcttccctttttcccccataccttccatcaattatagcttcagtatgtgaaaacccagctcttcaaccatataggcttcaacaagcaatcgcagcaagcaacataccctttatcgcccttgttgtgtcaacaatcgccagccctatctttggtgcagtcattggtacaaaccatcagggcacaacagctgcagcaactcgtgctacctgtgatcaaccaaagagctctggc

SEQ ID NO: 22084 - DNA, 349 bp, Zea mays
  unsure at all n locations
  Clone ID: LIB3152-020-P1-K1-D6
attttgagcattcagaaacacaccaagcgaagcacattagcaacaacctaacaacaatggctaccaagatattatccctccttgcgcttcttgcgctttttgcgagcgcaacaaatgcgttcattattccacaatgctcacttgctccaagttccattattacacagttcctcccaccagttacttcaatgggcttcgaacacccagctgtgcaagcctataggctacaacaagcaattgcggcgagcgtcttacaacaaccaatttcccagttgcaacaacaatccttggcacatctaacaatacaaaccatcgcaacgcaacagcaacaacaattnctaccagcact

SEQ ID NO: 22085 - DNA, 379 bp, Zea mays
  Clone ID: LIB3152-020-P1-K1-D7
attttgagcattcagaaacacaccatgcgaagcacattagcaacaacctaacagcaatggctaccaagatattatccctccttgcgcttcttgcgctttttgcgagcgcaacaaatgcgttcattattccacaatgctcacttgctccaagttccattattacacagttcctcccaccagttacttcaatgggcttcgaacacccagctgtgcaagcctataggctacaacaagcaattgcggcgagcgtcttacaacaaccaatttcccagttgcaacaacaatccttggcacatctaacaatacaaaccatcgcaacgcaacagcaacaacaattcctaccagcactgagccacctagccatggtgaaccctgccgc

SEQ ID NO: 22086 - DNA, 378 bp, Zea mays
  Clone ID: LIB3152-020-P1-K1-D8
aagcaacatagaaagtggaatacagtagcaacaatagagcaacaatggcggccaggatattttccatccttatgctccttgctctttctgcatgtgttgctaacgcgaccatttttcctcaatactcacaagctcctatagctgcccttcttcccccataccttccatcaatgaccgcttcagtatgtgaaaacccagcccttcaaccctacaggctccaacaagcaatcgcaacaagcaacttacctttatcacccctgttctttcaacaatcgccagccctatctttggtgcagtcattggtacaaaccatcagggcacaacagctgcagcaactcgtgctaccagtgatcagccaagtagctctggcaaaccttt

SEQ ID NO: 22087 - DNA, 271 bp, Zea mays
  Clone ID: LIB3152-020-P1-K1-D9
aacatacatatctataatcattcttatttaccatacctcagcattcggggcggggtttatctaatgttactatttccccccatgacccattatacccttaatacgactattcatgtgtaattacttcacaaacttatttttatcatcaataccatcatccttctttaaacatctcattcatctttttcattccataaacattatctttcccttatcttactactatccctaacactcattttaatttctttaccccacctaacaattctat

SEQ ID NO: 22088 - DNA, 379 bp, Zea mays
  Clone ID: LIB3152-020-P1-K1-E10
cagaaacacaccaagcgaagcgcactagcaacaacctaacaacaatggctaccaagatattagccctccttgcgcttcttgcccttttagtgagcgcaacaaatgcgttcattattccacagtgctcacttgctcctagtgccattattccacagttcctcccaccagttacttcaatgggcttcgaacatccagccgtgcaagcctacaggctacaactagcgcttgcggcgagcgtcttacaacaaccaattgcccaattgcaacaacaatccttggcacatctaaacctacaaaccatcgcaacgcaacagcaacaacagtttctgccatcactgagccacctagccgtggtgaaccctgtcgcctacttgcaaca

SEQ ID NO: 22089 - DNA, 380 bp, Zea mays
  Clone ID: LIB3152-020-P1-K1-E11
caactagcaacatagaaagcacaatattgtaccaataatggcagccaaaatattttgcctcattatgctccttggtctttctgcaagtgctgctacggcgagcattttcccgcaatgctcacaagctcctatagcttcccttcttcccccatacctctcaccagcgatgtcttcagtatgtgaaaatccaattcttctaccctacaggatccaacaggcaatcgcagcaggcatcttacctttatcacccttgttcctccaacaatcatcagccctattacagcagttacctttggtgcatttattggcacaaaacatcagggcacaacaactacaaaacatcagggcacaacaactacaacaactcgtgctagcaaacc

SEQ ID NO: 22090 - DNA, 320 bp, Zea mays
  Clone ID: LIB3152-020-P1-K1-E12
ctactagctacatataaagctcttttttacaccacaaatggcacctcaaggcgggggggcttattatgcttctcgttcttcctccaaccgctgatacaggaagccttcactctgagagaacacaagcttctatccctatactttttaacacatacctgtcaccagcaacatacttagattaccaaaattcaaacaatctaccctacttgatccaacacactaattgatacagactattaccttacatacccttgtgcctctaacactcactatgaccattacagtagctacctctaacgcatttaccgacactaaacatc

SEQ ID NO: 22091 - DNA, 381 bp, Zea mays
  Clone ID: LIB3152-020-P1-K1-E2
cgaggctgtgattgatgcttaccttgatgggctagaggcttcgggcttgagcgacttatctcgagttaccagtgtcgcatccttctttgtcagccgagtcgacacccttatcgacaaaatgcttgaaaagattggaacacctgaggcacttgccttgagagggaaggctgccgtcgcacaggccaaactagcaaatcggctctaccagaagaaattctctggcccgaggtgggaggcgttggccaagaaaggtgccaagaaacagaggttgttgtgggcatccaccggtgtcaagaacccagcttatcccgacactctttacatcgacagtctcattggacctgacacggtcaacacgatgcccgaccaagctttgcacgc

SEQ ID NO: 22092 - DNA, 384 bp, Zea mays
  Clone ID: LIB3152-020-P1-K1-E3
agaccagttcccctctcctgatcgtcctgttcctcacagcagcagccatggcggccgagccggagaagcaggcggcccccgcggcacaggagacggccgtgcacatcgtgtacgttgaccgccccgaggacgccgaccctgaggagttacacatccgcaccctcacccccgtcctcggcagcgaacagaaggccagggacgcagtgctctaccactacaagaacgccgccagcggcttctccgcgaagctcaccccccagcaggtcaaggatctcaaggagcaaccaggttgtctccaaggtgtgccgagccagacttaccagctacatggtcctgggtctggcactcaccagggcacgacacacaccttgggccttatgtgaa

SEQ ID NO: 22093 - DNA, 368 bp, Zea mays
  Clone ID: LIB3152-020-P1-K1-E4
gctgttttgttttattttgtggaggcgaggaacctcgtgttttgcgtggagaaggcaagccgctcaacgctcgtcgacgtgcggagctatgcacaaatcgaatcgccaacgttcttacaaacaccgattgggtttgtttatggaccgagaggtgacgaccgtgcaagtgatgtggtgccaaccacaagatgcagtcggtggacgacccaaggaaggatggactcaaccagtatttgctcgccaagcgagtacctcccccagcaaacactatctaagtgtcaaactaaaggtactccttaggatgattggttgatggtgtgacttggcctccatccctgccaccgggatagatggtcgagtgggttact

SEQ ID NO: 22094 - DNA, 169 bp, Zea mays
  Clone ID: LIB3152-020-P1-K1-E6
ccattcaaccaacttgcttatttatttttcacaccgtctaccaacaacccgcattgttttttccctcttttaaatttctcacaaattatcaatcaataataaaattttttgtctgattcttatggctttccagaaataataatgtacatttctagattctttaaaaatt

SEQ ID NO: 22095 - DNA, 378 bp, Zea mays
  Clone ID: LIB3152-020-P1-K1-E7
aagcaacatagaaagtggaatccagtagcaacaatagagcaacaatggagaccagagatattttccctccttatgctccttgctctttctacatgtgttgctaacgcgacaattttccctcaatgctcacaagctcctatagcttccctttttcccccataccttccatcaattatagcttcagtatgtgaaaacccagctcttcaaccatataggcttcaacaagcaatcgcagcaagcaacatacctttatcgcccttgttgtgtcaacaatcgccagccctatctttggtgcagtcattggtacaaaccatcagggcacaacagctgcagcaactcgtgctacctgtgatcaaccaagtagctctggcaaacctt

SEQ ID NO: 22096 - DNA, 379 bp, Zea mays
  Clone ID: LIB3152-020-P1-K1-E8
cggacgcgtgggataaagcacaattttgtaccaacaatggcagccaaaatattgggcctccttatgctccttggtctttctgcaagtgctgctacggcgaccattttcccgcaatgctcgcaagctcctatagcttcccttcttcccccgtacctctcaccagcggtgtcttcggtatgtgaaaacccaattcttcaaccctacaggatccaacaggcaatcgcagctggcatcttacctttatcacccttgttcctccaacaatcatcagccctattacaacagttacctttggtgcatttattggcacaaaacattagggcacaacaactacaacaacttgtgctagcaaaccttgctgcctactctcagcaacagc

SEQ ID NO: 22097 - DNA, 364 bp, Zea mays
  unsure at all n locations
  Clone ID: LIB3152-020-P1-K1-F1
cccacgcgtgcgcccacgcgtgcgtccacgcgtacgcccacgcgtncgcaaacaagtagcgacagctcgacaaagatttgtgagagtgatccggcgctgagaagagatggctaagatcgccgcagccgccgcggcggcggcggcgctgtgcttcgcggccctggtggccgtggccgtctgccaaggcgaggtcgagcggcagaggctcaaggacctgcagtgctggcaggaggtccaggagagcccgctcgacgcgtgccgccaggtcctcgaccggcagctaaccggcggcggcgtcggcggcccgttccggtggggcaccgggctccggatgcggtgctgccagcagctccaggacgtgagc

SEQ ID NO: 22098 - DNA, 356 bp, Zea mays
  Clone ID: LIB3152-020-P1-K1-F10
gacagagagaaaaccttgactttttttaaggccgcaacattaaactgtgggcggtttgttccgattaacctgattggatagaaatgtttgatgatctgcttcttcaaaccgagaagaaggccacagatctgctagagctgatgcggaatgaagctttcaagaattctcaggtcacccagactaaaggaccaagtggaccacggccactgtgaaggaaaccaacaaagaaggatgtggtggaccttaggaccatcctcatccactgtgcacaggctgtggcagcagatgaccgtatgactgctaatgaattgttaaagcatataatgcaccattccaagccaaatggtgttggaacc

SEQ ID NO: 22099 - DNA, 374 bp, Zea mays
  Clone ID: LIB3152-020-P1-K1-F12
gcaacatagaaagtggaatccagtttcaacaatagagcaacaatggcgaccaagatattttccctccttatgctccttgctctttctgcatgtgttgctaacgcgacaattttccctcaatgctcacaagctcctatagcttcccttcttcccccataccttccatcaatgatagcttcagtatgtgaaaacccagctcttcaaccctataggctccaacaagcaatcgcagcaagcaacatacctttatcacccttgtttcaacaatcgccagccctatctttggtgcagtcattggtacaaaccatcagggcacagcagctgcagcaactcgtgctacctgtgatcaaccaagtagctctggcaaacctttc

SEQ ID NO: 22100 - DNA, 382 bp, Zea mays
  Clone ID: LIB3152-020-P1-K1-F2
atttgaagctgtcattcacttcgctggattgaaagctgtgggtgaaagtgtacagaagccattactttattatgacaacaacgtcattggcacgataaatcttctagaagttatgtctgttcacggttgcaagaagttggtgttctcatcatcagctgcagtttatggatcacccaaaaactcaccctgcacagaaaattttcctcttactccaaacaatccatatggcaaaacaaagctcgttgttgaggatatttgccgggatatctaccgttcagatcctgaatggaagatcattttacttaggtacttcaatccagttggtgctcatcctagtggatatcttggcgaggacccacgaggaattcccaacaatcttatg

SEQ ID NO: 22101 - DNA, 384 bp, Zea mays
  Clone ID: LIB3152-020-P1-K1-F4
gttcaatcctcatctcgatcggggaggccaccaaccacgaaccatatggcgggagggaaggtttactcgttcgaggaggtgaggaagcacagcgaccgcaaggactgctggctcatcatcgccggcaaggtgtacgacgtcacgccgttcatggaagagcaccccggcggcgacgaggtcctgctggcgtccgtcggcaaggacgccaccgcggacttcgaggacatcggccacagcgcctccgccaaggagctcatgccccagtactgcatcggcaaggtcgacgcggctaccttcccggccaagcccgcctacgtcgtcaccaaggacgacgccaggtcgtccgagaaggccgcgacgagcgccggcgcttgggccacgctc

SEQ ID NO: 22102 - DNA, 379 bp, Zea mays
  Clone ID: LIB3152-020-P1-K1-F5
gtgaagtacactagcaacatcttatcaccaatgggagccaagatttttgccctcggtgccctccttgctctttcagcaagcgctgctacctcgacttttattccacaatgctcacaacaatacctctctccggcgacagccgtgggatttcaatacccaactatacaatcctacatggtacaagaggccatccaagcaagcatcttacggtcattagcattaaccctccaacaaccatatgctctattgcaacagccatccttagtgcatctgtatctccaaagaatcgcggcacaacaactacaacaacagttgctaccaacaatcaatcaagtagttgcagcgaaccttgctgcttacctccagcaacaacagtttc

SEQ ID NO: 22103 - DNA, 376 bp, Zea mays
  Clone ID: LIB3152-020-P1-K1-F7
tagcaacatagaaagcacaatagtgtaccaacaatggcagccaaaatattttggctccttatgctccttggtctttctgcaagtgctgctacggcgaccattttcccgaaatgctcgcaagctcctatagcttcccttcttcccccgtacctctcaccagcggtgtcttcggtatgtgaaaacccaattcttcaaccctacaggatccaacaggcaatcacagctggcatcttacctttatcacccttgttcctccaacaatcatcagccctattacatcagttacctttggtgcatttattggcacaaaacatcagggcacaacaactacaacaacttgtgctagcaaaccttgctgcctactctcagcaacagc

SEQ ID NO: 22104 - DNA, 371 bp, Zea mays
  unsure at all n locations
  Clone ID: LIB3152-020-P1-K1-G1
ctcatttcctctcggttctgctcggtggcaacccagcgcgtagatcttgttcttggacgagaattctnctcaagttctcggatttctgtttttgtgccgcttagcaattcaaccccgaaattgttttgcggcgcagtcttcacccgaatcttgggtcgtagccaagaagatgaacaaggataaggctccgatgccgggagacggcgaccccagcgacggcttgccgccgcagtccacgcgccgtgccggggcgccgccctcgtcgtctaccccgccgcgggagtacgacatcagccgcatgccggactttcctacccggagcaccggccaccggcgtgcgcactccgagatcctgggcctncccgacgacc

SEQ ID NO: 22105 - DNA, 382 bp, Zea mays
  Clone ID: LIB3152-020-P1-K1-G2
caactagcaacatagaaagcacaatagtgtaccaacaatggcagccaaaatattttgcctccttatgctccttggtctttctgcaagtgctgctacggcgaccattttcccgaaatgctcgcaagctcctatagcttcccttcttcccccgtacctctcaccagcggtgtcttcggtatgtgaaaacccaattcttcaaccctacaggatccaacaggcaatcacagctggcatcttacctttatcacccttgttcctccaacaatcatcagccctattacatcagttacctttggtgcatttattggcacaaaacatcagggcacaacaactacaacaacttgtgctagcaaaccttgctgcctactctcagcaacagcag

SEQ ID NO: 22106 - DNA, 350 bp, Zea mays
  Clone ID: LIB3152-020-P1-K1-G3
attgagaccaactagcaacatagaaagcacaatagtgtaccaacaatggcagccaaaatattttgcttccttatgctccttggtctttctgcaagtgctgctaccgcaaccattttcccacaatgctcacaagctcctatagcttcctttcttcccccatacctctcaccagcggtgtcttcagtatgtgaaaacccaattcttcaaccctacaggatccaacaggcaatcgcagcaggcatcttacctttatcacccttgttcctccaacaaccgtcagccctattacagcagttacctttggtgcatttgttggcacaaaacatcaaggcacaacaactacaacaact

SEQ ID NO: 22107 - DNA, 376 bp, Zea mays
  Clone ID: LIB3152-020-P1-K1-G4
cggacgcgtgggcggacgcgtggtgccgttcgttcatctaccgccgccggtgcgtgggccacctccggttcacctgccacctccggtgcatctcccaccgccggtccacctgccgccgccggtccacctgccaccgccggtccatgtgccgtcgccggttcatctgccgccgccaccatgccactaccctactcaaccgccccggcctcagcctcatccccagccacacccatgcccgtgccaacagccgtattcaagcccgtgccagctgcagggaacctgcggcgttggcagcaccccgatcctgggccagtgcgtcgagtttctgaggcatcagtgcagcccgacggcgacgccctactgctcgcctcagtgc

SEQ ID NO: 22108 - DNA, 381 bp, Zea mays
  unsure at all n locations
  Clone ID: LIB3152-020-P1-K1-G6
accaagcgaagctacctaccaacgacttaacaacaatggctaccaagatattagccgtccttgcgcttcttgccctttttgtgagcgcaacanatgcgttcattattccacaatgctcacttgctcctagtgccattataccacagttcctccgaccagttacttcaatgggcttcgaacacctagctgtgcaagcctacaggctacaacaagcgcttgcggcgagcgtcttacaacaaccaattaaccaattgcaacaacaatccttggcacatctaaccatacaaaccatcgcaacacaacagcaacaacagttcctaccagcactgagccaactagatgtggtgaaccctgtcgcctacttgcaacagcaggtgcttg

SEQ ID NO: 22109 - DNA, 381 bp, Zea mays
  Clone ID: LIB3152-020-P1-K1-G7
tagcaacatagaaagcacaatagtgtaccaacaatggcagccaaaatattttgcttccttatgctccttggtctttctgcaagtgttgctaccgcaaccattttcccacaatgctcacaagctcctatagcttcccttcttcccccatacctctcaccagcggtgtcttcaatgtgtgaaaacccaattgttcaaccctacaggatccaacaggcaatcgcaacaggcatcttaccattatcacccttgttcctccaacaaccgtcagccctattacagcagttacctttggtccatttggtggcacaaaacatcagggcacaacaactacaacaacttgtgctagcaaaccttgctgcatactctcaacaacatcagttt

SEQ ID NO: 22110 - DNA, 324 bp, Zea mays
  Clone ID: LIB3152-020-P1-K1-G9
gctgccagcgcctctgcaatgcatatgccctgcccctgcgcggggctgcagggggtgtacggcgctggcgccggcctgacgacgatgatgggcgccggcgggctgtacccctacgcggagtacctgaggcagccgcagtgcagcccgctggcggcggcgccctactacgccgggtgtgggcagacgagcgccatgtaccagccgctccggcaacagtgctgccagcagcagatgaggatgatggacgtgcagtccgtctcgcagcagctgtagatgatgatgcagtttgagcgtgccgctgtcgccagcagcagcctgtacgag

SEQ ID NO: 22111 - DNA, 314 bp, Zea mays
  Clone ID: LIB3152-020-P1-K1-H1
ccttgttcctccaacaagggtgatattttttacagcagttacctatgtgccatttggtggcacaaaacatcaaggcacaacaactacaacaacttgtgctagcaaaccttgctgcatactctcagcaacatcagtttcttacattcaaccaactggctgcattgaactctgctgattatttgcaacaacaattgctgccattcaaccaacttgctttgacaaacccagcagcgttctaccaacaacccatcattgctggtgccctcttttagatttcttatgagttatagttcaataataaagtcctttgtctg

SEQ ID NO: 22112 - DNA, 376 bp, Zea mays
  Clone ID: LIB3152-020-P1-K1-H10
cctttatcgcccttgttgtgtcaacaatcgccagccctatctttggtgcagtcattggtacaaaccatcagggcacaacagctgcagcaactcgtgctacctgtgatcaaccaagtagctctggcaaacctttctccctactctccgcaacaacaatttcttccattcaaccaactgtctacactgaaccctgctgcttatttgcagcaacaactattaccatttagccagctagctactgcctactctcaacaacaacaacttcttccatttaaccaattggccgcactgaaccccgctgcttatttgcagcagcaaatactactaccatttagccagctagctacagcaagccgtgcttccttcttgacacaac

SEQ ID NO: 22113 - DNA, 338 bp, Zea mays
  Clone ID: LIB3152-020-P1-K1-H11
cgccagccctatctttggtggggacgttggttcaaactatccatccacaacatctgcagcaacttgtgctacctgtgatcaaccaagtagctctggcaaacctttctccctactctccgcaacaacaatttcttccattcaaccaactgtctacactgaaccctgctgcttatttgcagcaacaactattaccatttatccagctagcttctgtctactttcaacaacaacaacttctttcatttaaccaattggccgcacttgaacccttctacttatttgcaacagcaaatactactaccatttattcagctagcttcatcaagctcgacttttct

SEQ ID NO: 22114 - DNA, 243 bp, Zea mays
  Clone ID: LIB3152-020-P1-K1-H2
cctagatcatacaacaaagctcatttttttaacaacactagcacactaactagggggggtgtttaattctctataactatcttcatacacacatacggcaaccattcatctaaattgttacacagctccaacacctttatatctttactcgtacctttaacaatcatcaatattaactatttcaaaactcaattttttaacctcataaaactcaacaaggcataacaaattgaatccaaccac

SEQ ID NO: 22115 - DNA, 298 bp, Zea mays
  Clone ID: LIB3152-020-P1-K1-H3
ggaagcttcgagttctttttccttttggcttactgcgcaagaggggtaacgagaggacggccggcatggccaagaagctgcttccgtctctgaaaccgggtgctgggtcgagaaagctggtgcagcccaagaggaccgcccggcggcatcctccttccggaacatccaagcagctgaatgctgctaaagtggtggctgttggccctggtgagcgcgacaaggcaggcaatctgatcccagttgctctgaaggaaggtgacactgttctcctgccagagtatggtggaaactgaagtta

SEQ ID NO: 22116 - DNA, 250 bp, Zea mays
  Clone ID: LIB3152-020-P1-K1-H4
aagcacatagaaagtggaatccagtagcaacaatagagcaacaatggcgaccaagatattttccctccttatgctccttgctctttctgcatgtgttgctaacgcgacaattttccctcaatgctcacaagctcctatagcttcccttcttcccccataccttccatcaatgatagcttcagtatgtgaaaacccagctcttcaaccctataggctccaacaagcaatcgcagcaagcaacataccttta

SEQ ID NO: 22117 - DNA, 351 bp, Zea mays
  Clone ID: LIB3152-020-P1-K1-H5
atttttctagcattgagaaacacattaagttaatcgcactagcaacaacctagcagcggtggctactaagatattatccctccttgcgcttcttgcgctttttgcgagcgcaacaaatgcgttcattattccacaatgctcacttgctcctagttccattattccacagattcttccaccagttacttgaatggccttcgaacacccagctgtgcaagcctataggctacaacaagcgattgctgcgagcgtcttacaacaaccaattgtccaattgcaacaacaatgcgtggcacatgtaacaatacataccatcgcaacgcatcagcaacaacagtttctaccagcact

SEQ ID NO: 22118 - DNA, 383 bp, Zea mays
  unsure at all n locations
  Clone ID: LIB3152-020-P1-K1-H6
gaccaactagcaacatagaaagcacattattgtaccaacaatggcagccaaaatatttggcctccttatgctccttggtctttctgcaagtgctgctacggcgaccattttcccacaatgctcacaagctcctatagcttcccttcttcccccgtacctctcaccagcggtgtcttcggtatgtgaaaacccaattcttcaaccctataggatccaacaggcaatcgcagctggcatcttacctttatcacccttgttcctccaacaatcatcagccctattacagcagttacctttggtgcatttattggcacaaaacatcagggcacaacaactacaacaactngtgctagcanaccttgctgcctactctcagcaacaac

SEQ ID NO: 22119 - DNA, 373 bp, Zea mays
  unsure at all n locations
  Clone ID: LIB3152-020-P1-K1-H7
gaccaactagcaacatanaattcattatagtgtaccaacaatggcagccaggagggttttgcctccttatgctccttggtctttctgcaagtgctgctacggcgaccattttcccacattgctcacaagctcctatagcttcccttcttcccccgtacctctcaccagcggtgtcttcggtatgtgaaaacccaattcttcaaccctataggatccaacaggcaatctcagctggcatcttacctttatcacccttgttcctccaacaatcatcagccctattacagcagttacctttggtgcatttattggcacataacattaaggtacaacaacttcaacaacttgtgctagcaaaccttgcttgctactc

SEQ ID NO: 22120 - DNA, 379 bp, Zea mays
  Clone ID: LIB3152-020-P1-K1-H8
aagcgaagcacattagcaacaacctaacaacaatggctaccaagatattatccctccttgcgcttcttgcgctttttgcgagcgcaacaaatgcgttcattattccacaatgctcacttgctccaagttccattattacacagttcctcccaccagttacttcaatgggcttcgaacacccagctgtgcaagcctataggctacaacaagcaattgcggcgagcgtcttacaacaaccaatttcccagttgcaacaacaatccttggcacatctaacaatacaaaccatcgcaacgcaacagcaacaacaattcctaccagcactgagccacctagccatggtgaaccctgccgcctacttgcaacagcagttgcttgc

SEQ ID NO: 22121 - DNA, 375 bp, Zea mays
  Clone ID: LIB3152-021-P1-K1-A1
caatccttgccacatctaacaatacaggccatcacaacgcaacagcaacaacagttcctaccagcactgagccacctagccatggtgaaccctgccgcctacttgcaagagcagctgcttgcatccaacccacttgctctggcgaacgtagttgcaaaccagcaacaacaacagctacaacagtttctgccaacgctcagtcaactagccatggtgaaccctgccgcctacgtacaacaacaacaactgctgtcatctagcccgctcgctgtgggcaatgcacctacatacctgcaacaacaattgttgcaacagattgtaccagctctgactcaactagctgtggcaaaccctgttgcctacttgcaacagctg

SEQ ID NO: 22122 - DNA, 360 bp, Zea mays
  Clone ID: LIB3152-021-P1-K1-A10
attgagaccaacaagcaacatagaatgtggaatccagtagcaacaatagagcaacaatggcgaccaagatattttccctccttatgctccttgctctttctgcatgtgttgctaacgcgacaattttccctcaatgctcacaagctcctatagcttcccttcttcccccataccttccatcaatgatagcttcagtatgtgaaaacccagctcttcaaccctataggctccaacaagcaatcgcagcaagcaacatacctttatcacccttgtttcaacaatcgccagccctatctttggtgcagtcattggtacaaaccatcagggcacagcagctgcagcaactcgtgctacctgtga

SEQ ID NO: 22123 - DNA, 177 bp, Zea mays
  Clone ID: LIB3152-021-P1-K1-A11
cccacgccttccgtgcacctttttttttacgccttactgctagccttaggggcggtctttttggcagcagttttgccagcagcttacgcaggtccagccccagcacctcttctagtcgatcttccactcgatcctgcagtacatcctgcaaaagcagccgcaaagcgggcaggtcgc

SEQ ID NO: 22124 - DNA, 361 bp, Zea mays
  Clone ID: LIB3152-021-P1-K1-A12
gcaacatagaaagcacaatagtgtaccaacaatggcagccaaaatattttggttccttatgctccttggtctttctgcaagtgttgctaccgcaaccattttcccacaatgctcacaagctcctatagcttcccttcttcccccatacctctcaccagcggtgtcttcaatgtgtgaaaacccaattgttcaaccctacaggatccaacaggcaatcgcaacaggcatcttaccattatcacccttgttcctccaacaaccgtcagccctattacagcagttacctttggtccatttggtggcacaaaacatcagggctcaacaactacaacaacttgtgctagcaaaccttgctgaatac

SEQ ID NO: 22125 - DNA, 375 bp, Zea mays
  Clone ID: LIB3152-021-P1-K1-A2
tgagcattcagaaacacaccaagcgtagcgcactagcaacaacctaacaacaatggctaccaagatattatccctccttgcgcttcttgcgctttttgcgagcgcaacaaatgcgtccattattccacaatgctcacttgctcctagttccattattccacagttcctcccaccagttacttcaatggccttcgaacacccagctgtgcaagcctataggctacaacaagcgattgcggcgagcgtcttacaacaaccaattgcccaattgcaacaacaatccttggcacatctaacaatacaaaccatcgcaacgcaacagcaacaacagttcctaccagcactgagccacctagccatggtgaaccctgtcgc

SEQ ID NO: 22126 - DNA, 371 bp, Zea mays
  Clone ID: LIB3152-021-P1-K1-A3
ggcagccaaaatattttgcctccttatgctccttggtatttctgcaagtgctggtacggcgaccattttcccgcaatgctcacaagctcctatagcttcccttcttcccccgtacctctcaccagcggtgtcttcggtatgtgaaaacccaattcttcaaccctacaggatccaacaggcaatcgcagctggcatcttacctttatcacccttgttcctccaacaatcatcagccctattacagcagttacctttggtgcatttattggcacaaaacatcaaggcacaacaactacaacaacttgggctagcaaaccttggtggctactcttaacaacagcagtttcttccattcaaccaactagctgcat

SEQ ID NO: 22127 - DNA, 364 bp, Zea mays
  Clone ID: LIB3152-021-P1-K1-A4
ctccgagcatcctagtgactcccatggctccggccatgtcggcgcagttcacaagaatgaccttcagcaacctgtttgtccgtcgggctggcccaggcagcacggagctgaccgtggagggaaggccatccgaccagctgggcaggagaaacctcactgacagccccgtatttgacggccgtggccctgacgccagcctcgtggctcgcgtacagggagtcgctacccagatgggcgacgtgcgccagttgtacaccgtcgtgttccaggagaggccgctcaagggctccacgctcgtcaccgaaggcgcgatgacggaagggtcagacgagtgggcgatctacggcggaactggagtgttcgc

SEQ ID NO: 22128 - DNA, 297 bp, Zea mays
  Clone ID: LIB3152-021-P1-K1-A5
ctcgaagctacatcaattctgtggcttgtggtttcttagattatgactcaagtgacaatgcactccaagagacggttaaacctatggtagatggtggaactgagggcttcaagggacacgctagagtcattatacctggaacaacaccttgctttgaatgcaacatatggctttttcctccacaggttaagttccctttatgtactctcggcgagacaccaagaactgcaggtcactgcattggggatgctcacttgatcaaaatggatgagggttattctggaaaaccttttgatt

SEQ ID NO: 22129 - DNA, 281 bp, Zea mays
  Clone ID: LIB3152-021-P1-K1-A6
caaagctgtattggaggagcttgaatatgtgatggcagattatggttacagcagtgagcacattctcatggttgatatcatccctgacgctgctgttcgtaaggcaatgaacgacataaatgcagcccaaaggcttcaactggcaagtgtttacaagggagaagcagagaagatccttattgtgaaaaaagcgcgggcagaaacagaggcgaaatatctttctggtgtcgggatcgctaaacaacggcaggcgataaccgaccggcttagagagaacattc

SEQ ID NO: 22130 - DNA, 365 bp, Zea mays
  Clone ID: LIB3152-021-P1-K1-A7
ggccggggtcggcagcagatttgtcgagagatctcattctccgatccgccgggccaccatggcggaggatgctacgagcagccacccgtcacgctacgtcaagctcaccaaggaccaggacgcccccgccgaggacatccgccccggcgagctcaaccagccagttcacgtcccgcagctcgaaggccggaggtgtagcgagtgcggtcaggtcctgcccgagagctacgagccgcccgccgacgagccctggaccaccgggatcttcggatgcaccgatgacccagagacctgccgaactggattgttttgcccctgcgtgctgtttgggcgcaacgttgaggctgttagggaggacatccctt

SEQ ID NO: 22131 - DNA, 292 bp, Zea mays
  unsure at all n locations
  Clone ID: LIB3152-021-P1-K1-A9
attatttagaccaactagctttttttaaagcacaatagngtaccaacactgccggttaaaatattttgcctccttatgctccttggtatttctgcaagtgctgctacggcgaccattttccctcaatgctcacaagctcctatagcttcccttctttccccgtacctcttaccagctgtgttttctttatgttaaaacccaattctttaaccctacatgatctaactgtcatatcgtaattggcatattacctttatcacccttgttccttcaacaatcattatccctatta

SEQ ID NO: 22132 - DNA, 146 bp, Zea mays
  unsure at all n locations
  Clone ID: LIB3152-021-P1-K1-B1
ggttgggaanaancggacgaccaaaacaccgggaataaaaacaataaaaaaatttttttaaaaaaaaaacaaaaaacccgccgtttattaattctcacccccccacctccccactctccctacaactccacctccaccatacaaac

SEQ ID NO: 22133 - DNA, 263 bp, Zea mays
  Clone ID: LIB3152-021-P1-K1-B10
gctcatcgactccagattgtttattttgacaccatgaaggtgctgaacctcgcccttgctctcctggcgctcgctgcgagcgccgcctccagtacaagcggtggctgtggctgccagacaccaccgtttcatctaccgcctccgttctatatgccgcctccggtctatctgccgccgcatcagcatccgcatccatggcaataccccactcaaccacctcagctaagcccgtgccagcatttccgatcctgcgtttattgcat

SEQ ID NO: 22134 - DNA, 253 bp, Zea mays
  Clone ID: LIB3152-021-P1-K1-B11
gactttagcctagcaattagcttagctactccagattggagaactcgacgccgtgaatgttctgatcgttgcccttgctctcctggcgctcgctgcgagcgccgtcttcagtacaagcggcggctgtggctgtcagacaccaccgtttcatctaccgccttcgttctatatgccgtcttctttctatctgccgccgcatcatcatccgtagcctatttatttccccactcaaccaccgtatttaatccctttt

SEQ ID NO: 22135 - DNA, 226 bp, Zea mays
  Clone ID: LIB3152-021-P1-K1-B12
tattgagaccaacatgcaacatttgtttgtttaacacacgagcaacacaagggcagcaattttttacaaaatattttccatcctaatgctccttgctctatctgcatgtgttgctaacgcgaccatttttcctcaatactcacaagctcctatagctgccctacttcccccataccttccaataatgaccgcttcagtatgtgaaaacccagccctttaaccctac

SEQ ID NO: 22136 - DNA, 373 bp, Zea mays
  Clone ID: LIB3152-021-P1-K1-B2
gggtcttcagaccattagctttatctacttcagagcgcagaagaacccgatcgacaccatgagggtgttgctcgttgccctcgctctcctggctctcgctgcgagcgccacctccacgcatacaagcggcggctgcggctgccagccaccgccgccggttcatctaccgccgccggtgcatctgccacctccggttcacctgccacctccggtgcatctcccaccgccggtccacctgccgccgccggtccacctgccaccgccggtccatgtgccgccgccggttcatctgccgccgccaccatgccactaccctactcaaccgccccggcctcagcctcatccccagccacacccatgcccgtgccaacag

SEQ ID NO: 22137 - DNA, 369 bp, Zea mays
  Clone ID: LIB3152-021-P1-K1-B3
cagcaacagcagtttcttccattcaaccaactagctgcattgaactctgcttcttatttgcaacaacaacaactaccattcagccagctacctgctgcctacccccagcaatttcttccattcaaccaactggcagcattgaactctcctgcttatttacagcagcaacaactactaccattcagccagctagctggtgtgagccctgctaccttcttgatacaaccacagttgttgccgttctaccagcacgctgcgcctaacgctggcaccctcttacaactgcaacaattgctgccattcaaccaacttgctttgacaaacccagcagcgttctaccaacaacccatcattggtggtgccctcttt

SEQ ID NO: 22138 - DNA, 360 bp, Zea mays
  Clone ID: LIB3152-021-P1-K1-B5
caacaatggagaccaagatattttttcttcttatgctccttgctctttctacgtgtgttgctaacgcgacaattttccctcaatgctcacaagctcctatagcttccctttttcccccataccttccatcaattatagcttcagtatgtgaaaacccagctcttcaaccatataggcttcaacaagcaatcgcagcaagcaacatacctttatcgcccttgttgtgtcaacaatcgccagccctatctttggtgcagtcattggtacaaaccatcagggcacaacagctgcagcaactcgtgctacctgtgatcaaccaagtagctctggcaaacctttctccctactcttcgcaacaac

SEQ ID NO: 22139 - DNA, 361 bp, Zea mays
  Clone ID: LIB3152-021-P1-K1-B6
tttcagcattcagaaacacaccaagtgtttcgcactagcaacaacctaacaacaatggctaccaagatattagccctccttgcgcttcttgcccttttagtgagcgcaacaaatgcgttcattattccacagtgctcacttgctcctagtgccattattccacagttcctcccaccagttacttcaatgggcttcgaacatccagccgtgcaagcctacaggctacaactagcgcttgcggcgagcgtcttacaacaaaccaattgcccaattgcaacaacaatccttggcacatctaaacctacaaaccatcgcaacgcaacagcaacaacagtttctgccatcactgagccacctagcc

SEQ ID NO: 22140 - DNA, 365 bp, Zea mays
  Clone ID: LIB3152-021-P1-K1-B7
attcagaaacacaccaagcgaagcacattagcaacaacctaacaacaatggctaccaagatattatccctccttgcgcttcttgcgctttttgcgagcgcaacaaatgcgttcattattccacaatgctcacttgctccaagttccattattacacagttcctcccaccagttacttcaatgggcttcgaacacccagctgtgcaagcctataggctacaacaagcaattgcggcgagcgtcttacaacaaccaatttcccagttgcaacaacaatccttggcacatctaacaatacaaaccatcgcaacgcaacagcaacaacaattcctaccagcactgagccacctagccatggtgaaccct

SEQ ID NO: 22141 - DNA, 368 bp, Zea mays
  Clone ID: LIB3152-021-P1-K1-B8
ccaactagcaacatagaaagcacatttgtgtaccaacaatggcagccaaaatattttgcctccttatgctccttggtatttctgcaagtgctgctacggcgaccattttcccgcaatgctcacaagctcctatagcttcccttcttcccccgtacctctcaccagcggtgtcttcggtatgtgaaaacccaattcttcaaccctacaggatccaacaggcaatcgcagctggcatcttacctttatcacccttgttcctccaacaatcatcagccctattacagcagttacctttggtgcatttattggcacaaaacatcagggcacaacaactacaacaacttgtgctagcaaaccttgctgcctac

SEQ ID NO: 22142 - DNA, 348 bp, Zea mays
  Clone ID: LIB3152-021-P1-K1-B9
cggacgcgtgggcggacgcgtgggcaactagccatggtgaaccctgccgcctacctacaacagcaacaactgctttcatctagcccgctcgctgtggccaatgcacctacatacctgcaacaagaattgttgcaacagattgtaccagctctaactcagctagctgtggcaaaccctgttgcctacttgcaacagctgcttccattcaaccaactaactatgtcgaactctgttgcgtacctacaacagcgacaacagttacttaatccattggcagtggctaacccattggtcgctgccttcctacagcagcaacaattgctgccatacaaccggttctctttgatg

SEQ ID NO: 22143 - DNA, 367 bp, Zea mays
  Clone ID: LIB3152-021-P1-K1-C1
gcaaagcggcagtgcgtagagaggatcgtcgaacagaacagcatgaagatggtcatcgttctcgtcgtgtgcctggctctgtcagctgccagcgcctctgcaatgcagatgccctgcccctgcgcggggctgcagggcttgtacggcgctggcgccggcctgacgacgatgatgggcgccggcgggctgtacccctacgcggagtacctgaggcagccgcagtgcagcccgctggcggcggcgccctactacgccgggtgtgggcagacgagcgccatgtaccagccgctccggcaacagtgctgccagcagcagatgaggatgatggacgtgcagtccgtcgcgcagcagctgcagatgatgatgc

SEQ ID NO: 22144 - DNA, 401 bp, Zea mays
  Clone ID: LIB3152-021-P1-K1-C10
aaaaaaaaaaaaaaatttttattaaaaaaaaaaaaaaaaaaaaaaaaaaaatctcgtctgatattttaaaaaaaaaaataataaaaaaaacaaaaaaaaacaaaaaaaaaaattaaaagaaataaaaaaaaaaaaatattaataataaaaaaaagaaaaacaaatataaaaaaaaaataaaaaaataataaaaaaaaaaacaaaaaaaaaaaaaaataaaaaaaaaaaataaaaaaaaagtaaaaataaaaaaatataaaaattataatataaaaaaaaataaaaacaaaaaaaatataaaaataatataaaaaaaaaaataaataaaaaaaaacaataaaataacaaaaaaacaaaaataataaaacaaaagatataaaaaaaataataaaaataaaaat

SEQ ID NO: 22145 - DNA, 258 bp, Zea mays
  Clone ID: LIB3152-021-P1-K1-C11
cgcaaattgcaccaagaaatttattgagaggccgtcgacaggggaattggtcgcgtcgtcgtctagcagcagccaccgccgcctcatcctcgcagccgccgtcctgctctccgtgctcgcggctgccagcgccagcgccgggacctcctgcgtgccggggtgcaccattcctcacaacccgttcccgagctggctgttggtccccgaccagtctaaccttataggctacaactcgcatttcctgttcgtggcttacat

SEQ ID NO: 22146 - DNA, 299 bp, Zea mays
  Clone ID: LIB3152-021-P1-K1-C12
ctattctctaggaagcaaggtttttcttatcgacatggcagccaagaggtgtggagtgtttgcgctcctagctcttccttcaaccgccactagtgctacccatattccagggcacttgacaccactactgatgccattggctaccatgaacccatggattgcagtattgtatgaagcaacagggggttgccaacttgctagcgtggccgtccctgatgctgcatcaactgttggccttaccgctttagccgtgccagatgccaatgatgatgccaggtatgatgccaccgattacaatt

SEQ ID NO: 22147 - DNA, 326 bp, Zea mays
  Clone ID: LIB3152-021-P1-K1-C2
cccagcagcattctaccaacaacccatcattggtggtgccctcttttagatgtgttattgaactataactcataagaaatgtcagagggggccccccctgcgatgcagaggcggtggcccgccgcggggcggccgcgcgggtacggcgggggcgcccggcccgcgaccagcaggcgcgccggcgggctgtaccgcgaggcggagtacctgaggcagccgcagtgcaacccgctggcggcggcgccctactacgccgggtgtgggcagacgagcgccatgtaccagccgctccggcaacagtgctgccagcagcagatgaggatgat

SEQ ID NO: 22148 - DNA, 368 bp, Zea mays
  Clone ID: LIB3152-021-P1-K1-C3
ttccttttcagcacctgcaccaattcgttgcgctcgtgctcccctctcgtccggcgccagcacccccgcgccgccatggccacggactcctccgccggctcgttccagaagatccagatccagcgcgaggacaccacttttgatgcttatgttgttggcaaagaaaatgctcctggaattgtggttttgcaagagtggtggggagttgactatgagataaagaaccatgcgatccacatttcccaacttggtggaggatacaaagcactcattccagatttataccgtggaaaagttgctctggatgttgctgaggcacaacatctgatggagggtcttgactggcagggtgcagtcaaggatatcca

SEQ ID NO: 22149 - DNA, 194 bp, Zea mays
  Clone ID: LIB3152-021-P1-K1-C4
attttcagcattcagaaacacaccatgtgttgcgcactagcaacaacctaacaacaatggctaccaagatattagccctccttgcgcttcttgcccttttagtgagcgcaacaaatgcgttcattattccacagtgctcacttgctcctagtgccattattccacaagtccttccaccagttacttcaatgggc

SEQ ID NO: 22150 - DNA, 362 bp, Zea mays
  Clone ID: LIB3152-021-P1-K1-C5
gaaagcacaatatttgtaccaatattgttcttccaaaatattttgcctcattatgctgcgttggtctttctgcaagtgctgctacggcgagcattttcccgcaatgctcacaagctcctatagcttcccttcttcccccatacctctcaccagcgatgtcttcagtatgtgaaaatccaattcttctaccctacaggatccaacaggcaatcgcagcaggcatcttacctttatcacccttgttcctccaacaatcatcagccctattacagcagttacctttggtgcatttattggcacaaaacatcagggcacaacaactacaacaaacttgtgctagcaaatcctgctgtctactctta

SEQ ID NO: 22151 - DNA, 181 bp, Zea mays
  Clone ID: LIB3152-021-P1-K1-C7
gacccacgcgtacggccacacgtccgttaagcacttttttgtaccaacaatggcaactaaaatgtccgtccttcttatgctccttggtctttatgcaagcagctgctactgcaaccatatgcccacaatgctcacaagcgtttatagctttgcaccgcgctcctgacctactaacaacgat

SEQ ID NO: 22152 - DNA, 367 bp, Zea mays
  Clone ID: LIB3152-021-P1-K1-D1
gcaagaaagatccagcctgtgtggcaaatgtgaagaacctctacaaagaacttgacctagaggcggtatttcaggagtacgagaatgagagctacaagaagctgattgcagacattgaagcccagccaagcattgcggttcagaaagtgctgaaatccttcttgcacaagatctacaagaggcagaagtagggtgctcttggataaacgagctcaggagtcgttaccccttcgcatgcttgacataacgggacttcctcacctggttcctctagtatgatgtggagcgtctagttaaaaaaaatggatgtagtatgaagcaccttgctgctctgaatattaacaggcaattaaggcaaggtgctgtt

SEQ ID NO: 22153 - DNA, 375 bp, Zea mays
  Clone ID: LIB3152-021-P1-K1-D11
acccccggggcgacgccacgcgttctgccattattctacagatctcttctttagttactacaatgggctaagagcggcgggtcttgcaagcctacaggctacaactagcgctagcggcgagcgtcttacaacaaccaattgcccaattgcaacaactatccttggcacatctaaacctacaaaccatcttaacgcaacagcaacaacagtttctgccatcactgagccacctagccgtggtgaaccctgtcgcctacttgcaacatcagctacttgcatccaacccacttgctctggcgaacgtagctgtataccagcaacaacaacgtctgcaacatgttatgcctgcgctcattcaactagccatggtgaacc

SEQ ID NO: 22154 - DNA, 365 bp, Zea mays
  Clone ID: LIB3152-021-P1-K1-D2
gagaccaacaagcaacatagaaagtggaatacagtagcaacaatagagcaacggtggcggccaagatattttccatccttatgctccttgctctttctgcatgtgttgctaacgcgaccatttttcctcaatactcacaagctcctatagctgcccttcttcccccataccttccatcaatgaccgcttcagtatgtgaaaacccagcccttcaaccctacaggctccaacaagcaatcgcaacaagcaacttacctttatcacccctgttctttcaacaatcgccagccctatctttggtgcagtcattggtacaaaccatcagggcacaacagctgcagcaactcgtgctaccagtgatcagc

SEQ ID NO: 22155 - DNA, 366 bp, Zea mays
  Clone ID: LIB3152-021-P1-K1-D3
cagaaacacaccaagcgaagcacattagcaacaacctaacaacaatggctaccaagatattatccctccttgcgcttcttgcgctttttgcgagcgcaacaaatgcgttcattattccacaatgctcacttgctccaagttccattattacacagttcctcccaccagttacttcaatgggcttcgaacacccagctgtgcaagcctataggctacaacaagcaattgcggcgagcgtcttacaacaaccaatttcccagttgcaacaacaatccttggcacatctaacaatacaaaccatcgcaacgcaacagcaacaacaattcctaccagcactgagccacctagccatggtgaaccctgccg

SEQ ID NO: 22156 - DNA, 336 bp, Zea mays
  Clone ID: LIB3152-021-P1-K1-D4
ccacgcgttcgaagcaacatagaatgtggaatccagtagcaacaatagagcaacaatggagaccaagatattttccctccttatgctccttgctctttctacatgtgttgctaacgcgacaattttccctcaatgctcacaagctcctatagcttccctttttcccccataccttccatcaattatagcttcagtatgtgaaaacccagctcttcaaccatataggcttcaacaagcaatcgcagcaagcaacatacctttatcgcccttgttgtgtcaacaatcgccagccctatctttggtgcagtcattggtacaaaccatcagggcacaaca

SEQ ID NO: 22157 - DNA, 359 bp, Zea mays
  Clone ID: LIB3152-021-P1-K1-D5
gaccaacaagcattatagaaggtgttttttagtagcaacaatagagcaacaatggagaccaagatatttttcctccttatgctccttgctctttctacatgtgttgctaacgcgacaattttccctcaatgctcacaagctcctatagcttccctttttcccccataccttccatcaattatagcttcagtatgtgaaaacccagctcttcaaccatataggcttcaacaagcaatcgcagcaagcaacatacctttatcgtccttgttgtgtcaacaatcgccagccctatctttggtgcagtcattggtacaaaccattatgggccaacagttgcagcaactcgtgctacctgtgat

SEQ ID NO: 22158 - DNA, 363 bp, Zea mays
  Clone ID: LIB3152-021-P1-K1-D6
caactagcaacatacatagtgaagttcactagcaacatcttagcaccaatgggggccaagatttttgccctccttgccctccttgctctttcagcaagcgctgctacctcgacttttattccacaatgctcacaacaatacctctctccggcgacagccgtgggatttcaatacccaactatacaatcctacatggtacaagaggccatccaagcaagcatcttacggtcattagcattaaccctccaacaaccatatgctctattgcaacagccatccttagtgcatctgtatctccaaagaatcgcggcacaacaactacaacaacagttgctaccaacaatcaatcaagtagttgcagcg

SEQ ID NO: 22159 - DNA, 228 bp, Zea mays
  Clone ID: LIB3152-021-P1-K1-D7
agaccattagctttatctacttcattgcgcagaagaacccgatcgacacgatgcgggtgttgctcgttgccctcgctctcctggctctcgctgcgagcgccacctccacgcatacaagcggcggctgcgtctgccagccaccgacgccggttcatctaccgccgccggtgcatctgccacctccggttcacctgccacctccggtgcatttaccaccgccgttccacc

SEQ ID NO: 22160 - DNA, 187 bp, Zea mays
  Clone ID: LIB3152-021-P1-K1-D8
aaaaaaaaaaaaaaaaaaaaaaaaaaaaaaaaaaaaaaaaaaaaaaaaaaaaaaaaaaaaaaaaaaaaaaaaaaaaaaaaaaaaaaaaaaaaaaaaaaaaaaaaaaaaaaaaaaaaaaaaaaaaaaaaaaaaaaaaaaaaaaaagaaaaaaaaaaaaaaaatgaaaaaaaaaaaaaaaaaaaaaaaa

SEQ ID NO: 22161 - DNA, 159 bp, Zea mays
  Clone ID: LIB3152-021-P1-K1-E1
cggacgcgtggggaggaaataagttcttttccaccttaattccctcccaatggcgaaggggatttgaggttcacaaagtagcgaatgtgtcagactcctacttccctcgcaaccatactaccttgtactacctgaaatttttatttatatatatatttg

SEQ ID NO: 22162 - DNA, 353 bp, Zea mays
  Clone ID: LIB3152-021-P1-K1-E10
gccacctccggttcacctgctactttcggtgcatcttccaccgccggtgcacggtgccgtcgccggtccacctgccaccgccggtccatgtgccgccgccggttcatctgccgccgccaccatgccactaccctactcaaccgccccggcctcagcctcatccccagccacacccatgcccgtgccaacagccgcatccaagcccgtgccagctgcagggaacctgcggcgttggcagcaccccgatcctgggccagtgcgtcgagttcctgaggcatcagtgcagcccgacggcgtctccctactgctcgcctcattgccagtcgttgcggcagcagtgttgccagctagct

SEQ ID NO: 22163 - DNA, 392 bp, Zea mays
  Clone ID: LIB3152-021-P1-K1-E11
gaacggccgggccgacccacgcgtaacaattttgagcattcagaaacattttttgcgaagcacattagcaacaacctggcagcaattgctaccaagatattatccctccttgcgcttcttgcgctttttgcgagcgcaacaaatgcgttcattattccacaatgctcacttgctccaagttccattattacacagttcctcccaccagttacttcaatgggcttcgaacacccagctgtgcaagcctataggctacaacaagcaattgcggcgagcgtcttacaacaaccaattttccagttgcaacaacaatccttggcacatctaacaatacaaaccatcgcaacgcaacagcaacaacaattcctaccagcactgagccacctaaccat

SEQ ID NO: 22164 - DNA, 184 bp, Zea mays
  Clone ID: LIB3152-021-P1-K1-E12
atttcttatgagttataatttaattataaatctaaaagacggaaaaaccggggttttttttaaaaaaaaaacacacctccccacaacaaatcaataaaatataactccacaaaaacaaccaaataatacaaaacttcataaataaattcaaattctcctcccttttaaatatatccaactttac

SEQ ID NO: 22165 - DNA, 142 bp, Zea mays
  Clone ID: LIB3152-021-P1-K1-E2
gggggatttgaggttcacacaccctccaaagtgtcagactcctacttacctcgcaaccatactaccttgtactacctgaaatctttatttatatatatattcaaaatgttaaacaaaaaaataaaaaaacaaaggtcttcca

SEQ ID NO: 22166 - DNA, 365 bp, Zea mays
  Clone ID: LIB3152-021-P1-K1-E3
tagaaagtggaatccagtagcaacaatagagcaacaatggcgaccaagatattttccctccttatgctccttgctctttctgcatgtgttgctaacgcgacaattttccctcaatgctcacaagctcctatagcttcccttcttcccccataccttccatcaatgatagcttcagtatgtgaaaacccagctcttcaaccctataggctccaacaagcaatcgcagcaagcaacatacctttatcacccttgtttcaacaatcgccagccctatctttggtgcagtcattggtacaaaccatcagggcacagcagctgcagcaactcgtgctacctgtgatcaaccaagtagctctggcaaacct

SEQ ID NO: 22167 - DNA, 275 bp, Zea mays
  unsure at all n locations
  Clone ID: LIB3152-021-P1-K1-E4
accaagcgaagcgcactagcaacaaacctaacaacaatggctaccaagatattagccctccttgcgcttcttgcccttttagtgagcgcaacaaatgcgttcattattccacagtgctcacttgctcctagtgccattattccacagttcctcccaccagttacttcaatgggcttcgaacatccagccgtgcaagcctacaggctacaactagcgcttgcggcgagcgtcttacaacaacccatcattggtggtgcnccnctttngatttctta

SEQ ID NO: 22168 - DNA, 222 bp, Zea mays
  Clone ID: LIB3152-021-P1-K1-E5
aaccaggtgccgccggttggccatttttttgggggggtgatccgcccctggggggggatggctaaaatcgccgcagccgccgcggcggcggcggcgctgtgcttcgcggccctggtggccgtggccgtctgccaaggcgaggtcgagcggcagaggctcagggacctgcagtgctggcaggaggtccaggagagcccgttcgacgcgtgccgccaggtcctt

SEQ ID NO: 22169 - DNA, 306 bp, Zea mays
  Clone ID: LIB3152-021-P1-K1-E6
atcaccaccactgggtcttcagactattagctttatctactccagagcgcagaagaacccgatcgacaccatgagggtgttgctcgttgccctcgctctcctggctctcgctgcgagcgccacctccacgcatacaagcggcggctgcggctgccagccaccgccgccggttcatctaccgccgccggtgcatctgccacctccggttcacctgccacctccggtgcatttcccaccgccggtccacctgccgtcgctcggtccacctgccaccgccggtccatggtgccgccgccgttttcattt

SEQ ID NO: 22170 - DNA, 363 bp, Zea mays
  Clone ID: LIB3152-021-P1-K1-E7
ttaactagcaacattcatagtgtagttctctagcaacatcttagcaccagtgggagccaagatttttgccctccttgccctccttgctctttcagcaagcgctgctacctcgacttttattccacaatgctcacaacaatacctctctccggcgacagccgtgggatttcaatacccaactatacaatcctacatggtacaagaggccatccaagcaagcatcttacggtcattagcattaaccctccaacaaccatatgctctattgcaacagccatccttagtgcatctgtatcttcaaagaatcgcggcacaacaactacaacaacagttgctaccaacaatcaatcaagtagttgcagc

SEQ ID NO: 22171 - DNA, 262 bp, Zea mays
  Clone ID: LIB3152-021-P1-K1-E8
cttcgacacacggaagaagtttaatatcatcaagctctatgtgcgcagggggtggatcatggacaactgtgaggaactgatccctgagtggctgagttttgttaagggtattgttgactctgaggaccttcccctcaatatctcccttgagactcttcagcagaacaagatcctgaaggtgatccggaagaaccttgctaagaatttttttgagtttttttttgacgattttttaaaacaaagaggtctaataacaatgttt

SEQ ID NO: 22172 - DNA, 61 bp, Zea mays
  unsure at all n locations
  Clone ID: LIB3152-021-P1-K1-E9
aaaaaaaaaaaattttaatttgtagaaaaaaaaaaaaaaaaaaaanggggggggggggttt

SEQ ID NO: 22173 - DNA, 376 bp, Zea mays
  unsure at all n locations
  Clone ID: LIB3152-021-P1-K1-F1
gccgaccacgcgtccgatagaagcacaatagtgtaccttatttgcagccaaaatatttngcttccggtggcttcttggtctttctgcaagtgctgctaccgcaaccattttcccacaatgctcacaagctcctatagcttcctttcttcccccatacctctcaccagcggtgtcttcagtatgtgaaaacccaattcttcaaccctacaggatccaacaggcaatcgcagcaggcatcttacctttatcacccttgttcctccaacaaccgtcagccctattacagcagttacctttggtgcatttgttggcacaaaacatcaaggcacaacaactacaacaacttgtgctaggaaaccttgctgcctactctcag

SEQ ID NO: 22174 - DNA, 218 bp, Zea mays
  unsure at all n locations
  Clone ID: LIB3152-021-P1-K1-F11
acccacgcgtacgttatactatactctaagatgttagtataccaccaacatggcagccaagtgccgtgcttttttcactctcctagctctttcnacaaacaccactattgctacccatattccattgcactagccaccattcatgccattgtgtaccatgaacccatgcattcactactccatgattcaacatgcgcttgccaacttgatggcttttc

SEQ ID NO: 22175 - DNA, 365 bp, Zea mays
  Clone ID: LIB3152-021-P1-K1-F2
gagaccaacaagcaacatagaaagtggaatccagtagcaacaatagagcaacaatggagaccaagatattttccctccttatgctccttgctctttctacatgtgttgctaacgcgacaattttccctcaatgctcacaagctcctatagcttccctttttcccccataccttccatcaattatagcttcagtatgtgaaaacccagctcttcaaccatataggcttcaacaagcaatcgcagcaagcaacatacctttatcgcccttgttgtgtcaacaatcgccagccctatctttggtgcagtcattggtacaaaccatcagggcacaacagctgcagcaactcgtgctacctgtgatcaac

SEQ ID NO: 22176 - DNA, 364 bp, Zea mays
  Clone ID: LIB3152-021-P1-K1-F3
gtggaatccagtatcaacaatagattatctttggagaccaagatattttccctccttatgctccttgctctttctacatgtgttgctaacgcgacaattttccctcaatgctcacaagctcctatagcttccctttttcccccataccttccatcaattatagcttcagtatgtgaaaacccagctcttcaaccatataggcttcaacaagcaatcgcagcaagcaacatacctttatcgcccttgttgtgtcaacaatcgccagccctatctttggtgcagtcattggtacaaaccatcagggcacaacagctgcagcaactcgtgctacctgtgatcaaccaagtagctctggcaaaccttt

SEQ ID NO: 22177 - DNA, 363 bp, Zea mays; identical to SEQ ID NO: 20868
  Clone ID: LIB3152-021-P1-K1-F4

SEQ ID NO: 22178 - DNA, 364 bp, Zea mays
  Clone ID: LIB3152-021-P1-K1-F6
gcaacatagaaagcacaatattgtttcaataatggcagccaaaatattttgccgcaggatgctccttggtctttctgcaagtgctgctacggcgagcattttcccgcaatgctcacaagctcctatagcttcccttcttcccccatacctctcaccagcgatgtcttcagtatgtgaaaatccaattcttctaccctacaggatccaacaggcaatcgcagcaggcatcttacctttatcacccttgttcctccaacaatcatcagccctattacagcagttacctttggtgcatttattggcacaaaacatcagggcacaacaactacaacaactcgtgctagcaaaccttgctgcctactct

SEQ ID NO: 22179 - DNA, 362 bp, Zea mays
  Clone ID: LIB3152-021-P1-K1-F8
gttgcaaaccagcaacaacatcaactgcaacagtttctgccagcgcttagtcaactagccatggtgaaccctgccgcctacctacaacagcaacaactgctttcatctagcccgctcgctgtggccaatgcacctacatacctgcaacaagaattgttgcaacagattgtaccagctctaactcagctagctgtggcaaaccctgttgcctacttgcaacagctgcttccattcaaccaactaactatgtcgaactctgttgcgtacctacaacagcgacaacagttacttaatccattggcagtggctaacccattggtcgctgccttcctacagcagcaacaattgctgccatacaaccg

SEQ ID NO: 22180 - DNA, 343 bp, Zea mays
  Clone ID: LIB3152-021-P1-K1-F9
tcacggcgttcagtacatggtttttttcctcctcgtcacatagattcgtgggcgtgctgtgtcatgctccagaccgttagatcaccgtaaacatcttgtcgtgcacaataccgtctcgaacccaccacatccgttgtcggttgtttaaatcatcgcctggccgggagtgtcgacattagttcgctttcgtccaaattgccaccgcggatacttaagtcttgggtcgcgcgtttttctatcttgcgtgcgaacatttgacactcctatcattttgtgcagctattgtttcaaaccatctgggcacaacaagttgcagtaacttaatgatctcttttgttattcc

SEQ ID NO: 22181 - DNA, 364 bp, Zea mays
  Clone ID: LIB3152-021-P1-K1-G1
ttcagcattcagaaacacaccaagtgaatcgcactagcaacaacctaacaacaatggctaccaagatattagccctccttgcgcttcttgcccttttagtgagcgcaacaaatgcgttcattattccacagtgctcacttgctcctagtgccattattccacagttcctcccaccagttacttcaatgggcttcgaacatccagccgtgcaagcctacaggctacaactagcgcttgcggcgagcgtcttacaacaaccaattgcccaattgcaacaacaatccttggcacatctaaacctacaaaccatcgcaacgcaacagcaacaacagtttctgccatcactgagccacctagccgtggt

SEQ ID NO: 22182 - DNA, 194 bp, Zea mays
  Clone ID: LIB3152-021-P1-K1-G10
acgaccacacatccataccattttctttatttactccagagcgcaaaaaaacccgttcttacatcattagtttgttgctcgttacaatcgatctcctggctctatttgcaagcgccacctcaactcatacaaacggaagatattattgctatcaatttcttcattttaattaaccaacaattatataattttaa

SEQ ID NO: 22183 - DNA, 363 bp, Zea mays
  unsure at all n locations
  Clone ID: LIB3152-021-P1-K1-G2
gaaagcacaatagtgtaccaacaatggcagccaaaatattttgcctccttatgctccttggtctttctgcaagtgctgctacggcgaccattttcccacaatgctcacaagctcctatagcttnccttcttcccccgcacctctcaccagcggtgtnttcggtatgtgaaaacccaattcttcaaccctataggatccaacaggcaatcgcagctggcatcttacctttatcactnttgttnctncaacaatcatcagccctattacagcagttacctttggtgcatttattggcacaaaacatcagggcacaacaactacaacaacttgtgctagcaaaccttgctgcctactctcagcaac

SEQ ID NO: 22184 - DNA, 363 bp, Zea mays
  Clone ID: LIB3152-021-P1-K1-G3
aacaatcatcagccctattacattttttacctttggtgcatttattggcacatgacatcatggcacaacaactacaacaacttgtgctagcaaaccttgctgcctactctcagcaacagcagtttcttccattcaaccaactagctgcattgaactctgcttcttatttgcaacaacaacaactaccattcagccagctacctgctgcctacccccagcaatttcttccattcaaccaactggcagcattgaactctcctgcttatttacagcagcaacaactactaccattcagccagctagctggtgtgagccctgctaccttcttgatacaaccacagttgttgccgttctaccagcacg

SEQ ID NO: 22185 - DNA, 362 bp, Zea mays
  Clone ID: LIB3152-021-P1-K1-G4
ggaaaccttgctgcctactctcagtaacagcagtttcttccattcaaccaactggctgcattgaactctgctgcttatttgcaacaacaactaccattcagtcagctagctgctgcctacccccagcaatttcttccattcaaccaactggcagcattgaactctgctgcttatttacaacagcaacagctaccaccattcagccagctagctgatgtgagccctgttgccttcttgacacaacaacagttgttgccgttctacctgcacgctgcgcctaacgctggcaccctcttacaactgcaacaattgctgccattcaaccaacttgctttgacaaacccaacagcgttctaccaaca

SEQ ID NO: 22186 - DNA, 366 bp, Zea mays
  unsure at all n locations
  Clone ID: LIB3152-021-P1-K1-G5
cccacgcgtncggtngagaccaactatcaacatatttttttttttattgtaccaacaaatgcagccgactgtttttttcctacttatgctccttggtctatctgcaagtgctgctacggcgaccattttcccgcaatgctcgcaagctcctataacttcccttcttcccccgtacctctcaccagctgtgtctactgtatgtgaaaacccaattctttaaccctacatgatccaacaagcaatcgcagctggcatattacctttatcacccttgttccttcaacaatcatcaaccctattacaacatttacctttggttcatttatttgcacaaaacaataatgtacaacaacatcaacaactttt

SEQ ID NO: 22187 - DNA, 361 bp, Zea mays
  Clone ID: LIB3152-021-P1-K1-G8
gagaccaacaagcaacatagtatgtttaatccagtagcaacaatagagcggcagtggagaccaagatattttccctccttatgctccttgctctttctacatgtgttgctaacgcgacaattttccctcaatgctcacaagctcctatagcttccctttttcccccataccttccatcaattatagcttcagtatgtgaaaacccagctcttcaaccatataggcttcaacaagcaatcgcagcaagcaacatacctttatcgcccttgttgtgtcaacaatcgccagccctatctttggtgcagtcattggtacaaaccatcagggcacaacagctgcagcaactcgtgctacctgtgat

SEQ ID NO: 22188 - DNA, 362 bp, Zea mays
  unsure at all n locations
  Clone ID: LIB3152-021-P1-K1-H1
cggacgcgtgggtgagctcaggcgtactagctcattgcttctgtgtacctctgtatcccccgcagatctcgcgagggctatggtggcggtggacccggaccatccgaccgggaccgaggggcgcgacccccgcggcatgagcgtgcttcagcagcacgtggctttcttcgaccgcgacggcgacggcgtcgtctacccctgggagactttcaaaggcatgcgagcaatagggtgtgggttctttacatccctcgtcctctcgttcctcatcaacctcgtcatgagttatcccactcagccgggatggctaccctcccttttgctctccgntcatgtaaagaacattcataaggctaaacacg

SEQ ID NO: 22189 - DNA, 361 bp, Zea mays
  Clone ID: LIB3152-021-P1-K1-H10
gacccacgcgtacgaataaagtaccaacaatatttttttttatattaagcctacttatactcgccgggttttttcaagtgctgctacccctaccattttctcacaatgctcacaagcttctatatctttccttttttctccttacctttcaccatcattttcttttatatcttaaaacccaattctttaaccctatattatccaacattcaatctcatctttcattttacctttatcaccctttttcctccaacaatcattacccctattacagcaattacctttttttcatttattttcacaaaacattattttcacaacaactacaacaacttgtgctagcaaaccttgtttactactc

SEQ ID NO: 22190 - DNA, 354 bp, Zea mays
  unsure at all n locations
  Clone ID: LIB3152-021-P1-K1-H2
nggactcgttggttagctcatgctttcttttttactgctaccagtgtacctctggtgtgcttcgtacaacccagcgagggctatggtggcggtcgacccggaccatccgaccgcgacctatgacaaccacctgcgcggcatgagcgtgcttcagcagcacgtggctttcttcgaccgcgacggcgacggcgtcgtctacccttgggagactttcaaaggcatgcgagcaataggacgcgggttctttacatcaatagcactttcttgcattaaaacaacttgctttagtaaacctagttagaaaccatggacaacatcaactgngctcttcgttcatgtaaagaacattcataa

SEQ ID NO: 22191 - DNA, 265 bp, Zea mays
  Clone ID: LIB3152-021-P1-K1-H4
ctgtggtaacttttcttacacctctatctataaactcctaacgtctaaatgatcctatagtccactcttttactgttctttttttttctttaaatcataatcaaactagcttttaccctattgtttcacacgagattatttttcttcttgaacttatattatgacaccttttttatctttttaacactattttctttcctaatcaaacttcttaccttacaatttttttcaaccgtatctattaaataatattttttactttttt

SEQ ID NO: 22192 - DNA, 366 bp, Zea mays
  Clone ID: LIB3152-021-P1-K1-H5
caacaacaacgtctgcaacagtttatgccagcgctcagtcaactagccatggggaaccctgtcgcctacctacaacagcaacaattgctttcatctagcccgctcgctgtgggcaatgcacctacgtacctacaacaacagttgctgcaacagattgtaccagctctgactcagctagctgtggcaaaccctactgcctacttgcaacagttgcttccattcaaccaactggctgtgtcgaactctgctgtgtacctacaacagcgacaacagttacttaatccactagcagtggctaacccattggtcgctaacttcctgcagcagcaacaattgctgccatacaaccagttctctttgatgaac

SEQ ID NO: 22193 - DNA, 365 bp, Zea mays
  Clone ID: LIB3152-021-P1-K1-H6
cccacgcgtccggaagactccatcatgcagctcatacgtatatcacttgccatgccagcctagcttcttccgtgtctttctttctcaataaatacatgccactcacatggtgctcctccatcttccaagtcaccaacgcaaattgcaccaagaaatccatcgagaggccgtcgacaggggaattaatggcgtcgtcgtctagcagcagccaccgccgcctcatcctcgcagccgccgtcctgctctccgtgctcgcggctgccagcgccagcgccgggacctcctgcgtgccggggtgggccatcccgcacaacccgctcccgagctgccgctggtacgtgaccagccggacctgcggcatcggg

SEQ ID NO: 22194 - DNA, 359 bp, Zea mays
  Clone ID: LIB3152-021-P1-K1-H7
cttgctcctagttccattattccacagttcctcccaccagttacttcaatggccttcgaacacccagctgtgcaagcctataggctacaacaagcgattgcggcgagcgtcttacaacaaccaattgcccaattgcaacaacaatccttggcacatctaacaatacaaaccatcgcaacgcaacagcaacaacagttcctaccagcactgagccacctagccatggtgaaccctgtcgcctacttgcaacagcagctgcttgcatccaacccacttgctctagcaaacgtagttgcaaaccagcaacaacaacaactgcaacagtttctgccagcgcttagtcaactagccatggtgaa

SEQ ID NO: 22195 - DNA, 201 bp, Zea mays
  Clone ID: LIB3152-021-P1-K1-H8
ctcctcctacatacaaattttttttatctcacacaaaaacacagtggcgttcaatcaaccaactctgcaaacctatcttctacaacaagcatattgtggcaaccctactactacaacctaaatgcctaaccgcaacaactatccttgctacatttaacataccaaacaataacaacagattaactatatcaaatcctacct

SEQ ID NO: 22196 - DNA, 173 bp, Zea mays
  Clone ID: LIB3152-021-P1-K1-H9
cgacaatgtaaaggcaaaaattcttttaaggagggcatacaccctgacgggcggcgtcttatctactccggcaaacacctggatgattgcctcaccttatcacactacaacatccaaaacgagagcaccctacaccttgtgcttcttctccatggacgacactaaatcatgcg

SEQ ID NO: 22197 - DNA, 382 bp, Zea mays
  Clone ID: LIB3152-022-P1-K1-A1
gcaacatagaaagcacaatagtgtaccaacaatggcagccaaaatattttgcctccttatgctccttggtctttctgcaagtgctgctacggcgaccattttcccgaaatgctcgcaagctcctatagcttcccttcttcccccgtacctctcaccagcggtgtcttcggtatgtgaaaacccaattcttcaaccctacaggatccaacaggcaatcacagctggcatcttacctttatcacccttgttcctccaacaatcatcagccctattacatcagttacctttggtgcatttattggcacaaaacatcagggcacaacaactacaacaacttgtgctagcaaaccttgctgcctactctcagcaacagcagtttctt

SEQ ID NO: 22198 - DNA, 363 bp, Zea mays
  Clone ID: LIB3152-022-P1-K1-A10
attcagaaacacaccaagtcgaagcacattagcaacaacctaacaacaatggctaccacgatattatccctccttgcgcttcttgcgctttttgcgagcgcaacaaatgcgttcattattgcacaatgctcacttgctccaagatccattattacacagatccttccaccagttacttcaatgggcttcgaacacccagctgtgcaagcctataggctacaacaagcaattgcggcgagcgtcttacaacaaccaattttccagttgcaacaacaatccttggcacatttaacaatacaaaccattgtaacgcaacagcaacaacaattcctaccagcactgattcacctagccatggtgaac

SEQ ID NO: 22199 - DNA, 369 bp, Zea mays
  Clone ID: LIB3152-022-P1-K1-A11
catagaaagcacaatagtgtaccaacaatggcagccaaaatattttgcttccttatgctccttggtctttctgcaagtgttgctaccgcaaccattttcccacaatgctcacaagctcctatagcttcccttcttcccccatacctctcaccagcggtgtcttcaatgtgtgaaaacccaattgttcaaccctacaggatccaacaggcaatcgcaacaggcatcttaccattatcacccttgttcctccaacaaccgtcagccctattacagcagttacctttggtccatttggtggcacaaaacatcagggcacaacaactacaacaacttgtgctagcaaaccttgctgcatactctcagcaacat

SEQ ID NO: 22200 - DNA, 374 bp, Zea mays
  Clone ID: LIB3152-022-P1-K1-A12
attttgagcattcagaaacacacctagcgaagcgcactagcaacgacctaacaacaatggctaccaagatattagccctccttgcgcttcttgccctttttgtgagcgcaacaaatgcgttcattattccacaatgctcacttgctcctagtgccattattccacagttcctcccaccagttacttcaatgggcttcgaacacctagctgtgcaagccaacatgcaacaacaagcgcttgcggcgagcgtcttacaacaaccaattgcccaattgcaacaacaatccttgccacatctaacaatacaagccatcacaacgcaacagcaacaacagttcctaccagcactgagccacctagccatggtgaaccct

SEQ ID NO: 22201 - DNA, 379 bp, Zea mays
  Clone ID: LIB3152-022-P1-K1-A2
gcacaatagtgtaccaacaatggcatccaaaatattttgcctccttatgctccttggtctttctgcaagtgctgctacggcgaccattttcccacaatgctcacaagctcctatagcttcccttcttcccccgtacctctcaccagcggtgtcttcggtatgtgaaaacccaattcttcaaccctataggatccaacaggcaatcgcagctggcatcttacctttatcacccttgttcctccaacaatcatcagccctattacagcagttacctttggtgcatttattggcacaaaacatcagggcacaacaactacaacaacttgtgctagcaaaccttgctgcctactctcagcaacaacagtttctttcattcaac

SEQ ID NO: 22202 - DNA, 382 bp, Zea mays; identical to SEQ ID NO: 22060
  Clone ID: LIB3152-022-P1-K1-A3

SEQ ID NO: 22203 - DNA, 387 bp, Zea mays
  unsure at all n locations
  Clone ID: LIB3152-022-P1-K1-A4
cgaccacgcgtncgaatattattatcttgtagtataggcaccaaatcaaatctgcaacatcaattatctaactccaaaaaccatgaagctggtgcttgtggttcttgctttcattgctttagtatcaagtgttttttgtacacagacaggcggctgcagctgtggtcaacaacaaagccatgagcagcaacattattcacaacaacatcattcacaaaaacaacaacattaaccaccaccacaacattaccagcagcagcaacaccaacaacaacaagttcacatgcaaccacaaaaacattagcaacaacaagaagtttatgtttaacaacaacaacaacaaccgtagtacccaccacaacaacaacaacagggccaacaacaaca

SEQ ID NO: 22204 - DNA, 318 bp, Zea mays
  Clone ID: LIB3152-022-P1-K1-A5
caactagcaacataaaaagcacaatattgtaccaacaatggcagccaaaatattttgcctccttatgctccttggtctttctgcaagtgctgctacggcgaccattttcccgaaatgctcgcaagctcctatagcttcccttcttcccccgtacctctcaccagcggtgtcttcggtatgtgaaaacccaattcttcaaccctacaggatccaacaggcaatcacagctggcatcttacctttatcacccttgttcctccaacaatcatcagccctattacatcagttaccttttgtgcatttattggcacaaaacat

SEQ ID NO: 22205 - DNA, 360 bp, Zea mays
  Clone ID: LIB3152-022-P1-K1-A6
ttcagcattcagaaacacaccaagcgaagtcgcactagcaacaacctaacaacaatggcgtaccaagatattagccctccttgcgcttcttgcccttttagtgagcgcaacaaatgcgttcattattccacagtgctcacttgctcctagtgccattattccacagttcctcccaccagttacttaaatgggcttcgaacatccagccgtgcaagcctacaggctacaactagcgcttgcggcgagcgttttacaacaaccaattgcccaattgcaacaacaatccttggcacattttaaacctacaaaccatctgaacgtaacagcatcaacagtttttgccatcactgagccacctag

SEQ ID NO: 22206 - DNA, 376 bp, Zea mays
  Clone ID: LIB3152-022-P1-K1-A7
caacaattgcttccggtactcaacattggcagccaaaatattttgcctgcttatgctccttggactttctgcaagtgctgctacggctaccattttcccgaaatgctcgcaagctcctatagcttcccttcttcccccgtacctctcaccagcggtgtcttcggtatgtgaaaacccaattcttcaaccctacaggatccaacaggcaatcacagctggcatcttacctttatcacccttgttcctccaacaatcatcagccctattacatcagttacctttggtgcatttattggcacaaaacatcatggcacaacaactacaacaacttgtgctagcaaaccttgctgcctactctcagcaacagcagtttctt

SEQ ID NO: 22207 - DNA, 392 bp, Zea mays
  unsure at all n locations
  Clone ID: LIB3152-022-P1-K1-A8
cagncccttcaagccctacagtgctccaacaagcaantcgcaacaaggcaacttagccgttatcacgccctgttgctttcaacaantcgccagcgcctatnnctttggtgcagtcatntggtacanaaccatcagggcacaaccagctgcagcaacctcgtgctaccagtgatcagccaagtagctctggcaaacctttctccctactctcagcaacaacaatttcttccattcaaccaactgtctacactgaaccctgctgcttatttgcagcaacaacaactactaccattcagccagctagctactgcctactctcagcagcaacaatttcttccatttaaccaattcgccgcactgaacccctctgcttatttccagcagcaaatact

SEQ ID NO: 22208 - DNA, 381 bp, Zea mays
  Clone ID: LIB3152-022-P1-K1-B1
ccccgatccagtctcgcggtcgcggccacgctgagggagagcgagaagagacagacaccgatcgcgcgcggagatgtcgtcggactcgtcgtcgtgggcgcgcgccctggtgcagatctcgccctataccttctccgcaatcggtatcgccgtctccatcggcgtctccgtcctcggcgcggcatggggtatcttcatcacggggagcagcctcatcggggccgccatcaaggcgcccaggatcacttcgaagaacctcatcagtgtcatcttctgtgaggctgtcgcaatttatggcgtaattgtggcaatcatcctccagacaaagcttgaaagtgtgccaacatctcaaatgtatgatccggagtctcttcgagctgg

SEQ ID NO: 22209 - DNA, 374 bp, Zea mays
  Clone ID: LIB3152-022-P1-K1-B11
caactagcaacatagaaagcacaattgtgtaccaacaatggcagccaaaatattttgcttccttatgctccttggtctttctgcaagtgttgctaccgcaaccattttcccacaatgctcacaagctcctatagcttcccttcttcccccatacctctcaccagcggtgtcttcaatgtgtgaaaacccaattgttcaaccctacaggatccaacaggcaatcgcaacaggcatcttaccattatcacccttgttcctccaacaaccgtcagccctattacagcagttacctttggtccatttggtggcacaaaacatcagggcacaacaactacaacaacttgtgctagcaaaccttgctgcatactctcagc

SEQ ID NO: 22210 - DNA, 375 bp, Zea mays
  Clone ID: LIB3152-022-P1-K1-B12
gctttcggaagtaaacccgatgcttggcttccgtggctgcaggcttggtatatcgtaccctgagctaacagaaatgcaagcccgtgccatctttgaagctgctatagcgatgaccaaccagggcgttcaagtctttccagagataatggttcctcttgttggaacacctcaagaattggggcatcaggtggcccttatccgtcaagtcgctaacaaagttttcaccagtatgggtaaaactattgggtacaagatcggaacgatgattgagattcccagggcagctctagtggcttgcgagatcgcggagcaagcttaaatcttcttctttggaaccaacgaccctacgcagatgacctttggctacagcagggt

SEQ ID NO: 22211 - DNA, 380 bp, Zea mays
  Clone ID: LIB3152-022-P1-K1-B2
attcagccagctagttgctgcctacccccagcaatttcttccattcaaccaactagcagcattgaactctgctgcttatttacagcagcaacaactactaccattcagccagctagctgatgtgagccctgctgccttcttgacacaacaacagttgttgccgttctacctgcacgctatgcctaacgctggcaccctcttacaactgcaacaattgctgccattcaaccaacttgctttgacaaactcaacagtgttctaccaacaacccatcattggtggtgccctcttttagattgcttatgagttatagttcaataatgaagttttttggatgatgtttgtggcgtcccagaaataagaaagtacatttctaaaat

SEQ ID NO: 22212 - DNA, 380 bp, Zea mays
  Clone ID: LIB3152-022-P1-K1-B3
tccgttcaaaaacacaccaagcgaagcgcactatcaacaacctaacaacaatggctaccaagatattatccctccttgcgcttcttgcgctttttgcgagcgcaacaaatgcgtccattattccacaatgctcacttgctcctagttccattattccacagttcctcccaccagttacttcaatggccttcgaacacccagctgtgcaagcctataggctacaacaagcgattgcggcgagcgttttacaacaaccaattgcccaattgcaacaacaatccttggcacatttaacaatacaaaccttcgcaacgcaacagcaacaacagtttctaccagcactgagccacctagccatggggaaccttgtcttttattta

SEQ ID NO: 22213 - DNA, 377 bp, Zea mays
  Clone ID: LIB3152-022-P1-K1-B4
attgagaccaactagcaacatagaaagcacaatagtgtaccaacaatggcagccaaaatattttgcctccttatgctccttggtctttctgcaagtgctgctacggcgaccattttcccgaaatgctcgcaagctcctatagcttcccttcttcccccgtacctctcaccagcggtgtcttcggtatgtgaaaacccaattcttcaaccctacaggatccaacaggcaatcacagctggcatcttacctttatcacccttgttcctccaacaatcatcagccctattacatcagttacctttggtgcatttattggcacaaaacatcagggcacaacaactacaacaacttgtgctagcaaaccttgctgcctactc

SEQ ID NO: 22214 - DNA, 379 bp, Zea mays
  Clone ID: LIB3152-022-P1-K1-B5
ccgacggcgacgccctactgctcgtctcagttccagtcgttgcggcagcagtgttgccagcagctcaggcaggtggagccgcagcaccggtaccaggcgatcttcggcttggtcctccagtccatcctgcagcagcagccgcaaagcggccaggtcgcggggctgttggcggcgcagatagcgcagcaactgacggcgatgtgcggcctgcagcagccgactccatgcccctacgctgctgccggcggtgtcccccactgaagaaactatgtgctgtagtatagccgctggctagctagctagttgagtcatttagcggcgatgattgagtaataatgtgtcacgcatcaccatgggtggcagtgtcagtgtgagcaat

SEQ ID NO: 22215 - DNA, 293 bp, Zea mays
  Clone ID: LIB3152-022-P1-K1-B6
cacctactaccattcagccagctagctgttttgagccctgctgccttcttgacacagcaacatttgttgccgttctacctgcacactgcgcctaacgttggcaccctcttacaactgcaacaattgctgccattcgaccaacttgctttgacaaacccagcagtgttctaccaacaacccatcattggtggtgccctcttttagattgcttatgagttatagttcaataataaagttttttttgctgatatttgtggcttcccagaaataagaaagtacatttctagattctt

SEQ ID NO: 22216 - DNA, 351 bp, Zea mays
  Clone ID: LIB3152-022-P1-K1-B8
caactagcaacatagaaagcacaatagtgtaccaacaatggcagccaaaatattttgcctccttatgctccttggtctttctgcaagtgctgctacggcgaccattttcccacaatgctcacaagctcctatagcttcccttcttcccccgtacctctcaccagcggtgtcttcggtatgtgaaaacccaattcttcaaccctataggatccaacaggcaatcgcagctggcatcttacctttatcacccttgttcctccaacaatcatcagccctattacagcagttacctttggtgcatttattggcacaaaacatcagggcacaacaactacaacaacttgtgctagc

SEQ ID NO: 22217 - DNA, 279 bp, Zea mays
  Clone ID: LIB3152-022-P1-K1-B9
gcacaatagtgtaccaacaatggcagccaaaatattttgcctccttatgctccttggtctttctgcaagtgctgctacggcgaccattttcccgcaatgctcgcaagctcctatagcttcccttcttcccccggacctctcaccagcggtgtctccggtatgtgaaaacccaattcttcaaccctacaggatccaacacgcgattgcagttggcattttacctggattacccttgttcctccaacaatcatcagtcctattacaacagttacctttggt

SEQ ID NO: 22218 - DNA, 248 bp, Zea mays
  Clone ID: LIB3152-022-P1-K1-C1
aaccacagtacgcgacgcaccatgcgaacagccttacaacaatgcttacaacgatggttgccatgattgagctcctcgtcgtgctagtggccgtttcagagggggcaataattgcacagagttttctagagcgtagagttgtttttagagagtttttccaacagtttcttccacgggtttttaaaagggctttggaacaagcatccgggcaacattaagggttacagtgggctttttcaacgcctttt

SEQ ID NO: 22219 - DNA, 373 bp, Zea mays
  Clone ID: LIB3152-022-P1-K1-C10
gcggcggctgtggctgccagacaccaccgtttcatctaccgcctccgttctatatgccgcctccgttctatctgccgccgcagcagcagccgcagccatggcaataccccactcaaccaccgcagctaagcccgtgccagcagttcggatcctgcggcgtcggcagcgtcggcagcccgttcctgggccagtgcgtcgagttcctgaggcaccagtgcagcccggcggcgacgccctacggctcgccacagtgccaggcgctgcagcagcagtgctgccaccagatcaggcaggtggagccgctgcaccggtaccaggcgacatacggtgtggtcctgcagtccttcctgcagcagcagccgcagggcgagct

SEQ ID NO: 22220 - DNA, 376 bp, Zea mays; identical to SEQ ID NO: 21376
  Clone ID: LIB3152-022-P1-K1-C11

SEQ ID NO: 22221 - DNA, 315 bp, Zea mays
  Clone ID: LIB3152-022-P1-K1-C12
gtctgccgcatcatttgcagccacttactttgcttcatccaacaccaggattggcggttccccagaatctccaatatccaggactaaatccttctttgcaatctgggccgcaaaagctgtcagaactccaaccctcattgatgccacctattactagtcaaggtccttcatcaggtatcctgcctgctacaacagctgctgcttctgctacattattagctccagaaagctcaaagcctttgttgccgaacatgggatcgatgtttgcttcacgtgcaacatcttttggagcaacttttcctttaccaagccagc

SEQ ID NO: 22222 - DNA, 377 bp, Zea mays
  Clone ID: LIB3152-022-P1-K1-C2
accaagcgaagcgcactagcaacaacctaacaacaatggctaccaagatattagccctccttgcgcttcttgcccttttagtgagcgcaacaaatgcgttcattattccacagtgctcacttgctcctagtgccattattccacagttcctcccaccagttacttcaatgggcttcgaacattcagccgtgcaagcctacaggctacaactagcgcttgcggcgagcgtcttacaacaaccaattgcccaattgcaacaacaatccttggcacatctaaacctacaaaccatcgcaacgcaacagcaacaacagtttctgccatcactgagccacctagccgtggtgaaccctgtcgcctacttgcaacagcagcta

SEQ ID NO: 22223 - DNA, 355 bp, Zea mays
  Clone ID: LIB3152-022-P1-K1-C3
cccacgcgtgcgtgtatctccaaagaatcggggcacaacaactacaacaacagttgctaccaacaattaatcaagtaggtgcagcgaaccttgctgcttacctgcagcaacaacagtttcttccattcaatcaactagatggggtgaaccctgctatctacttgcaggcacaacagctactaccatttaaccaacttgtcgggagcccttatgccttcttactgcaacaacagcttctaccatgccatctgcaagctgtggcaaacattgctgctttttagagacaacaacatttgttgccattttacccacaggttgtgggaaacattaatgccttcttgcaacagcaacaatt

SEQ ID NO: 22224 - DNA, 376 bp, Zea mays
  Clone ID: LIB3152-022-P1-K1-C4
atgaaattgtcagattttggattgtgtaagccaattgattgttcgaagttgtcaacactgaatgaaaatgaaccaatgactgatgaaaaccttagggagtctatggacatcgatcattctctctctgatactgcaaatggtaggaggtggagaagtccaaatgaacagcttcagcattggcagaacaacaggagaaaattggcattttcaacagtcgggacacctgattatattgctccagaggttctactaaagaagggatatggactagagtgtgactggtggtctcttggtgcaatcatgtatgaaatgcttgttggttatccaccattttattcagatgaaccactagttacatgccaaaagattgtgcatt

SEQ ID NO: 22225 - DNA, 381 bp, Zea mays
  Clone ID: LIB3152-022-P1-K1-C5
cggacgcgtgggttcagaaacacatcaagcgaagcgcactagcaacgacctaacaacagtggctaccaagatattagccctccttgcgcttcttgccctttttgtgagcgcaacaaatgcgttcattattccacaatgctcacttgctcctagtgccattattccacagttcctcccaccagttacttcaatgggcttcgaacacctagctgtgcaagccaacatgcaacaacaagcgcttgcggcgagcgtcttacaacaaccaattgcccaattgcaacaacaatccttgccacatctaacaatacaagccatcacaacgcaacagcaacaacagttcctaccagcactgagccacctagccatggtgaaccctgccgc

SEQ ID NO: 22226 - DNA, 368 bp, Zea mays
  Clone ID: LIB3152-022-P1-K1-C7
caaacatatgacctcaactttaatgtaggagaataatgatggttcacagaagatgatctggcgatagcttaaagaatgtatacaaatcttttgtgagcgaataccccattgtttcgattgaagatccttttgaccaggatgactgggttcactatgctaagatgactgaagaaattggagagcaagtgcagattgttggtgatgaccttctcgtcaccaaccccactagggttgctaaggctatcaaggagaaatcatgcaatgcccttctgctcaaggttaaccaaatcggatctgtgactgagagtattgaggctgtgaagatgtcaaaacgtgcgggctggggtgtgatgactagtcataggagt

SEQ ID NO: 22227 - DNA, 371 bp, Zea mays
  Clone ID: LIB3152-022-P1-K1-C8
tatgataccaactagcaacatacatagtgaagtacactagcaacatcttagcaccaatgggagccaagatttttgccctccttgccctccttgctctttcagcaagcgctgctacctcgacttttattccacaatgctcacaacaatacctctctccggcgacagccgtgggatttcaatacccaactatacaatcctacatggtacaagaggccatccaagcaagcatcttacggtcattagcattaaccctccaacaaccatatgctctattgcaacagccatccttagtgcatctgtatctccaaagaatcgcggcacaacaactacaacaacagttgctaccaacaatcaatcaagtagttgcagcg

SEQ ID NO: 22228 - DNA, 373 bp, Zea mays
  Clone ID: LIB3152-022-P1-K1-C9
aaaggagaaggcttcatctttcattttcacacaggcacgcaaatccggtgtgggtcaacctcgactcgagttcgcgcgcgtccccgaatcgaggggagatgagtcggccgcatgacggtcacaggtacttctttcccatggggaatcccttcaggatgattctcccaagaggagcccgcctgccaccgaagctcactgagctgctcacttcgtatgaggatggcctggccttgagcttgaggaaggtcaagccagaggccacctcataggtgttcacaccatcatggatgaagctcgcagtggagtgcttatcagagctgcacaccaatatagccaccctgattactgagcttgagctgtccttattagactg

SEQ ID NO: 22229 - DNA, 341 bp, Zea mays
  Clone ID: LIB3152-022-P1-K1-D1
gcctaagctagcaggcgctagatacattctatacaacaacccacagatctgcgccagtccggccacaggagataccgcatctgcctctctggtctggacacaggagcgtccgtgacctagtacaatggcgaggtgagatctacgatgcgtactattccatgtatgggcatgtggggaaactagctgacgagatcaagaaaggagccttatctggtgctggagcagagggtcagatatggcaagggcctgaaattttatgtgtacacgtgcttggtaagatgggcgcgccccctaagccctgcgtgccagacataacacaccatgaacttgcggaggctgac

SEQ ID NO: 22230 - DNA, 153 bp, Zea mays
  Clone ID: LIB3152-022-P1-K1-D10
agcgggtgcgagggcaagttctattacacccggagcgcgtttctgagcgccggggaggcgtacccaggctttgcccatggcgggtcgcaggtgcagggcaagggcgagaacggcgtcttttttgtgcaccccatgcccggaaaccggcaattt

SEQ ID NO: 22231 - DNA, 366 bp, Zea mays
  Clone ID: LIB3152-022-P1-K1-D11
aaagaaaaaagaaaaaagaggaaggagaaaaataaaaaatataataaaataaaaaaaaaaatagataaagaaaaaagaataaagaaaaaaatagaataaagaaaaaaaagaaaaagatagagaaaaaggaaaagataaaaaaaaaaaaaaagaagaaaagaaagaaaaaaataaaaggaagaaaaaaataaaaaaaaaaaagaaaattataaaaagaaaaaaaatggaataaaaaaaaataaaagaaaaaaaaaataaagataaaaaaataaaaaaaaaatggaaaaaaaaataatagaaaaaaaaaaataaaataaaagtaaaaaaaaaaaaaaataataagaaaatatataaaaagatattaag

SEQ ID NO: 22232 - DNA, 377 bp, Zea mays
  Clone ID: LIB3152-022-P1-K1-D12
cagaaacacaccaagcgaagcgcactagcaacaacctaacaacaatggctaccaagatattatccctccttgcgcttcttgcgctttttgcgagcgcaacaaatgcgtccattattccacaatgctcacttgctcctagttccattattccacagttcctcccaccagttacttcaatggccttcgaacacccagctgtgcaagcctataggctacaacaagcgattgcggcgagcgtcttacaacaaccaattgcccaattgcaacaacaatccttggcacatctaacaatacaaaccatcgcaacgcaacagcaacaacagttcctaccagcactgagccacctagccatggtgaaccctgtcgcctacttgcaa

SEQ ID NO: 22233 - DNA, 375 bp, Zea mays
  Clone ID: LIB3152-022-P1-K1-D2
gacaccctgggtgagatcgtgctcactcttcaggaggatcaccatgtgtggagattcgagtcttcgggccttttctcttctaggtcctgctacaaggttctgtttttgggctccatcaccttcgaaccttggaaaagactttggaaatcttgggctcctcctaagtgtaagacctttttatggttagccatgcagaataagtgttggacagctgacagactgcaaaaaagaggtcttccccatccggaagcatgccctttctgtgaacaagagcaagaaacagttcagcatctgttgactggttgtgtcttcgccaggcagttttggcatagcatcctctccccctttggtatgggccacttaactccaggacca

SEQ ID NO: 22234 - DNA, 348 bp, Zea mays
  Clone ID: LIB3152-022-P1-K1-D3
gcggcgttggcagcaccccgatcctgggccagtgcgtcgagtttctgaggcatcagtgcagcccgacggcgacgccctactgctcgcctcagtgccagtcgttgcggcagcagtgttgccagcagctcaggcaggtggagccgcagcaccggtaccaggcgatcttcggcttggtcctccagtccatcctgcagcagcagccgcaaagcggccaggtcgcggggctgttggcggcgcaaatagcgcagcaactgacggcgatgtgcggcctgcagcagccgactccatgcccctacgctgctgtcggcggtgtcccccactgaagaaactatgtgctgtagtatagcc

SEQ ID NO: 22235 - DNA, 345 bp, Zea mays
  Clone ID: LIB3152-022-P1-K1-D4
gcaacatagaaagcacaatagtgtaccaacaatggcagccaaaatattttgcctccttatgctccttggtctttctgcaagtgctgctacggcgaccattttcccgaaatgctcgcaagctcctatagcttcccttcttcccccgtacctctcaccagcggtgtcttcggtatgtgaaaacccaattcttcaaccctacaggatccaacaggcaatcacagctggcatcttacctttatcacccttggtcctccaacaatcatcagccctattacatcagttacctttggtgcatttattggcacaaaacatcagggcacaacaactacaacaacttgtgctagc

SEQ ID NO: 22236 - DNA, 381 bp, Zea mays
  Clone ID: LIB3152-022-P1-K1-D5
cctagttccattattccacagttttttccaccagttacttcaatggccttcgaacacccagctgtgcaagcctataggctacaacaagcgattgcggcgagcgtcttacaacaaccaattgcccaattgcaacaacaatccttggcacatctaacaatacaaaccatcgcaacgcaacagcaacaacagttcctaccagcactgagccacctagccatggtgaaccctgtcgcctacttgcaacagcagctgcttgcatccaacccacttgctctagcaaacgtagttgcaaaccagcaacaacaacaactgcaacagtttctgccagcgcttagtcaactagccatggtgaaccctgccgcctacctacaacagcaacaa

SEQ ID NO: 22237 - DNA, 377 bp, Zea mays
  Clone ID: LIB3152-022-P1-K1-D6
attttgagcattcagaaacacaccaagcgaagctacctagcaacgacttaacaacaatggctaccaagatattagccctccttgcgcttcttgccctttttgtgagcgcaacaaatgcgttcattattccacaatgctcacttgctcctagtgccattataccacagttcctccgaccagttacttcaatgggcttcgaacacctagctgtgcaagcctacaggctacaacaagcgcttgcggcgagcgtcttacaacaaccaattaaccaattgcaacaacaatccttggcacatctaaccatacaaaccatcgcaacacaacagcaacaacagttcctaccagcactgagccaactagatgtggtgaaccctgtc

SEQ ID NO: 22238 - DNA, 375 bp, Zea mays
  Clone ID: LIB3152-022-P1-K1-D7
cccactcgtacggaaagttttattttttatcaacaatagatcaacagtggcgggcaagatattttccatccttatgctccttgctctttctgcatgtgttgctaacgcgaccattttttctcaatactcacaagctcctatagctgcccttctttccccatacctaccatcaatgaccgctttagtatgtgaaaacccagccctttcaaccctacaggctccaacaagcaattgcaacatgcaacttacctttatcacccctgatctttcaacaatcgccagccctatctttggtgcagtcattggtacaaaccatcattgcacaacagcttcagctactcgtgcttccagtgatcagcccagttgcttcttgca

SEQ ID NO: 22239 - DNA, 370 bp, Zea mays
  Clone ID: LIB3152-022-P1-K1-D8
gtggacatgaagacctgttaaatggaatggaaattgctgctgcaactgaagacaaggaaacacattcttttgagattgatccttctcaggttgagaatgtcaagcaacggtgcttaccaaatgcattgaactatcccatgctggaggagtatgatttcagaaatgacactgtaaacccagatttggatatggagctaaagccgcaagcacggcctaggccatatcaagaaaagagtctcagtaaaatgtttgggaacggacgagcaaggtctggaattattgtgctaccttgtggtgctggcaagtccttggttggtgtatctgcagcctgtcgtattaagaagagctgtttatgtttggccacaaatgc

SEQ ID NO: 22240 - DNA, 374 bp, Zea mays
  Clone ID: LIB3152-022-P1-K1-D9
attttcagcattcagaaacacaccaagcgaagcgcactagcaacaacctaacaacaatggctaccaagatattagccctccttgcgcttcttgcccttttagtgagcgcaacaaatgcgttcattattccacagtgctcacttgctcctagtgccattattccacagttcctcccaccagttacttcaatgggcttcgaacatccagccgtgcaagcctacaggctacaactagcgcttgcggcgagcgtcttacaacaaccaattgcccaattgcaacaacaatccttggcacatctaaacctacaaaccatcgcaacgcaacagcaacaacagtttctgccatcactgagccacctagccgtggtgaaccct

SEQ ID NO: 22241 - DNA, 381 bp, Zea mays
  Clone ID: LIB3152-022-P1-K1-E1
caactagcaacatagaaagcacaatattgtaccaataatggcagccaaaatattgtgcctcattatgctccttggtctttctgcaagtgctgctacggcgagcattttcccgcaatgctcacaagctcctatagcttcccttcttcccccatacctctcaccagcgatgtcttcagtatgtgaaaatccaattcttctaccctacaggatccaacaggcaatcgcagcaggcatcttacctttatcacccttgttcctccaacaatcatcagccctattacagcagttacctttggtgcatttattggcacaaaacatcagggcacaacaactacaacaactcgtgctagcaaaccttgctgcctactctcagcaacagca

SEQ ID NO: 22242 - DNA, 374 bp, Zea mays
  Clone ID: LIB3152-022-P1-K1-E10
gcaattagctcatcgactccagattggagaactcgacaccatgaaggtgctgatcgttgcccttgctctcctggcgctcgctgcgagcgccgcctccagtacaagcggcggctgtggctgccagacaccaccgtttcatctaccgcctccgttctatatgccgcctccgttctatctgccgccgcagcagcagccgcagccatggcaataccccactcaaccaccgcagctaagcccgtgccagcagttcggatcctgcggcgtcggcagcgtcggcagcccgttcctgggccagtgcgtcgagttcctgaggcaccagtgcagcccggcggcgacgccctacggctcgccacagtgccaggcgctgcagcagc

SEQ ID NO: 22243 - DNA, 377 bp, Zea mays
  Clone ID: LIB3152-022-P1-K1-E11
gtcaatcgcagctggcatcttacctttatcaccctcgatcgttcaacaataatcagccctattacaacagttacctttggtgcatttattggcacaaaacatgaggggacaacaactacaacaacttgtgctagcaaaccttgctggctactctcagcaacagcagtttctttcattcaaccaactaggttcattgaactctgcttcttatttgcaacaacaacaactaccattcagccagctacctgctgcctacccccagcaatttcttccattcaaccaactagcagcattgaactcttctgcttatttacagcagcaacaactactaccattcagccagctagctggtgtgagccctgctaccttcttgacac

SEQ ID NO: 22244 - DNA, 378 bp, Zea mays
  unsure at all n locations
  Clone ID: LIB3152-022-P1-K1-E12
cggggtctttaaaccattaactttatttacttcaaaacgcaaaaaaacccgatcggcaacattagggtggtggttggtggccttggttttcttggttttggttgagagcgccacttacacacatacaagcggcggttgcggttgccagccaccgccgccggttcatataccgccgccggtgcatctgccacctccggttcacctgccacctccggtgcatctcccaccgccggtccacctgccgncgccggtccacctgccaccgccggtccatgtgccgccgccggttcatctgccgccgccaccatgccactaccctactcaaccgccccggcctcagcctcatccccagccacacccatgcccgtgccaacagcc

SEQ ID NO: 22245 - DNA, 381 bp, Zea mays
  Clone ID: LIB3152-022-P1-K1-E2
tctgcttttaatttgcaacaacaacatcttctattcagccagctacctgctggctacccccagcaatttcttccattcaaccaactggcagcattgaactctcctgcttatttacagcagcaacaactactaccattcagccagctagctggtgtgagccctgctaccttcttgatacaaccacagttgttgccgttctaccagcacgctgcgcctaacgctggcaccctcttacaactgcaacaattgctgccattcaaccaacttgctttgacaaacccagcagcgttctaccaacaacccatcattggtggtgccctcttttagatttcttatgagttatagttcaaaaataaagttttttgtctgatgtttgtggct

SEQ ID NO: 22246 - DNA, 382 bp, Zea mays
  Clone ID: LIB3152-022-P1-K1-E4
gagaccaactagcaacatagaaagcacaattgtgtaccaacaatggcagctaaaatattttgcctccttatgctccttggtctttctgcaagtgctgctacggcgaccattttcccacaatgctcacaagctcctatagcttcccttcttcccccgtacctctcaccaacggtgtcttcggtatgtgaaaacccaattcttcaaccctacaggatccaacaggcaatcgcagctggcatcttacctttatcacccttgttcctccaacaatcatcagccctattacagcagttacctttggtgcatttattggcacaaaacatcagggcacaacaactacaacaacttgtgctagcaaaccttgctgcctactctcagcaac

SEQ ID NO: 22247 - DNA, 339 bp, Zea mays
  Clone ID: LIB3152-022-P1-K1-E5
cccaaacccacgaaaccctcctgcctcgccttcgcttcctcatcctcccgccgcttagtcccggacccggaccaaccttcgtgaggacgggaattggactaagggggtaggatgccgccaaagaaagcggcgccatcgaaggcggagctggccaagaagcagaaggtcgtggaggacaagaccttcgggctgaagaacaagaataagagcaagaacgtccaaaagtacgtccagtccctgcaccaggccgtacagcccaagcctgactcgaccaagaccgtcgccaagaaaaagaaggatgaggagaaggcgcgcgagaaggagcttaatgatctgttc

SEQ ID NO: 22248 - DNA, 384 bp, Zea mays
  Clone ID: LIB3152-022-P1-K1-E6
ccaactagcaacatagaaagcacattagtgttccaacaatggcagccaaaatattttgcctccttatgctccttggtctttctgcaagtgctgctacggcgaccattttcccgcaatgctcgcaagctcctatagcttcccttcttcccccgtacctctcaccagcggtgtcttcggtatgtgaaaacccaattcttcaaccctacaggatccaacaggcaatcgcagctggcatcttacctttatcacccttgttcctccaacaatcatcagccctattacaacagttacctttggtgcatttattggcacaaaacatcagggcacaacaactacaacaacttgtgctagcaaaccttgcttgctacttttagcaacagcagt

SEQ ID NO: 22249 - DNA, 317 bp, Zea mays
  Clone ID: LIB3152-022-P1-K1-E7
gccaagatgcttgcattgttcgctctcctagctctttgtgcaagcgcggctagtgcgacccatattccagggcacttgccaccagtcatgccattgggtaccatgaacccatgcatgcagtactgcatgttgcaacaggggcttgccagcttgatggcgtgtccgtccctgatgctgcagcaactgttggccttaccgcttcagacgatgccagtgatgatgccacagatgatgacgcctaacatgatgtcaccattgatgatgccgagcatgatgtcaccaatggtcttgccgagcatgatgttgcaaatgattat

SEQ ID NO: 22250 - DNA, 377 bp, Zea mays
  Clone ID: LIB3152-022-P1-K1-E8
aatattttgagcattcagaaacacttcaagcgaagcgcactagcaacgacctaacaacaatggctaccaagatattagccctccttgcgcttcttgccctttttgtgagcgcaacaaatgcgttcattattccacaatgctcacttgctcctagtgccattattccacagttcctcccaccagttacttcaatgggcttcgaacacctagctgtgcaagccaacatgcaacaacaagcgcttgcggcgagcgtcttacaacaaccaattgcccaattgcaacaacaatccttgccacatctaacaatacaagccatcacaacgcaacagcaacaacagttcctaccagcactgagccacctagccatggtgaaccct

SEQ ID NO: 22251 - DNA, 376 bp, Zea mays
  Clone ID: LIB3152-022-P1-K1-E9
gtgaaaacccaattcttcaaccctacaggatccaacaggcaatcgcagctggcatcttacctttatcacccttgttcctccaacaatcatcagccctattacagcagttacctttggtgcatttattggcacaaaacatcagggcacaacaactacaacaacttgtgctagcaaaccttgctgcctactctcagcaacagcagtttcttccattcaaccaactagctgcattgaactctgcttcttatttgcaacaacaacaactaccattcagccagctatctgctgcctacccccagcaatttcttccattcaaccaactgacagcattgaactctcctgcttatttacagcagcaacaactactaccattcag

SEQ ID NO: 22252 - DNA, 380 bp, Zea mays
  Clone ID: LIB3152-022-P1-K1-F1
aaggtggaatccagtaccaccaatagagcaccaatggcgaccaagatattttccctccttatgctccttgctctttctgcatgtgttgctaacgcgacaattttccctcaatgctcacaagctcctatagcttcccttcttcccccataccttccatcaatgatagcttcagtatgtgaaaacccagctcttcaaccctataggctccaacaagcaatcgcagcaagcaacatacctttatcacccttgtttcaacaatcgccagccctatctttggtgcagtcattggtacaaaccatcagggcacagcaagccgtgcttccttcttgacacagcaacagttgctgcctttctaccagcagtttgcggctaaccccgca

SEQ ID NO: 22253 - DNA, 360 bp, Zea mays
  Clone ID: LIB3152-022-P1-K1-F10
cccacgcgtccggaccaacaagcaacatagaaagtggaatccagtagcaacaatagagcaacaatggcgaccaagatattttccctccttatgctccttgctctttctgcatgtgttgctaacgcgacaattttccctcaatgctcacaagctcctatagcttcccttcttcccccataccttccatcaatgatagcttcagtatgtgaaaacccagctcttcaaccctataggctccaacaagcaatcgcagcaagcaacatacctttatcacccttgtttcaacaatcgccagccctatctttggtgcagtcattggtacaaaccatcagggcacagcagctgcagcaactcgtgcta

SEQ ID NO: 22254 - DNA, 374 bp, Zea mays
  Clone ID: LIB3152-022-P1-K1-F11
ttcagaaacacaccaagcttagcgttctagcaacaacctaacaacaatggctgggaagatattagccctccttgcgcttcttgcccttttagggagcgcaacaaatgcgttcattattccacagtggttacttgcttctagtgcccatattccacagttccttccaccagttacttcaatgggcttcgaacattcagccgtgcaagcctacaggctacaactagcgcttgcggcgagcggcttacaacaaccaattgcccaattgcaacaacaatccttggcacatctaaacctacaaaccatcgcaacgcaacagcaacaacagtttttgccatcactgtaccacctagccgtggtgaaccctgtcgcctact

SEQ ID NO: 22255 - DNA, 372 bp, Zea mays
  Clone ID: LIB3152-022-P1-K1-F12
ggaggagagggctatcttaatttcatgggaaatgagtttggacatcctgaatggatagattttccaagaggtccgcaaagacttccaagtggtaagtttattccagggaataacaacagttatgacaaatgtcgtcgaagatttgacctgggtgatgcagactatcttaggtatcatggtatgcaagagtttgatcaggcaatgcaacatcttgagcaaaaatatgaattcatgacatctgatcaccagtatatttcccggaaacatgaggaggataaggtgattgtgttcgaaaagggagatttggtatttgtgttcaacttccactgcaacaacagctattttgactaccgtattgtttgtcgaaagcct

SEQ ID NO: 22256 - DNA, 375 bp, Zea mays
  Clone ID: LIB3152-022-P1-K1-F3
cgcctccggggaccccgtggcctgcctcgggtggccgttgtttcccgttcggaacgccaagccccccctccggcgaaatggcccccaagcgaggtggcagggcgccggtgccggccaagaagaagacggataaagtgacgaaccctcttattcgagaagaggccgaagcagttcggcatcggcggcgcgttgccgcccaagaaggacctgcaccggttcgtcaagtggcccaaggtcgtgcgtattcagcggcagcgccgcatcctcaagcagcgcctcaaggtaccaccggcgctcaaccagttcacccgcaccctcgacaagaacctcgctacgaacctttttaagatgcttctcaagtaccggcctgaagac

SEQ ID NO: 22257 - DNA, 376 bp, Zea mays
  Clone ID: LIB3152-022-P1-K1-F4
caacaagcaacatagaaagtggaatccagtagcaacaatagagcaacaatggggcccaggaattttcccttcttatgcttcttggtctttctacatgtggtggtaacgcgacaattttccctcaatgctcacaagctcctataggttccttttttccccatacctttcataaattagagctagagtgtgagaaaacccatctttaaaactatatgggtttaaacacgcattcgcagcgggcaacatacctttatcgcccttgttgtgtcaacaatcgccagccctatctttggtgcagtcattggtacaaaccatcagggcacaacagctgcagcaactcgggctacctgtgatcaaccaaagtgctctggcaaac

SEQ ID NO: 22258 - DNA, 175 bp, Zea mays
  Clone ID: LIB3152-022-P1-K1-F5
gcagcagcagcccttctttttggagcagcatcacaggggagatcgatcaatcaatcagcgagcaaagcccgcaccgcaccaggtggtagcttgcaattggcaaccccgcggaaccttcttcttcgaggcattccatatagttgcggcgggcccttattgccagcagagttcacca

SEQ ID NO: 22259 - DNA, 394 bp, Zea mays
  Clone ID: LIB3152-022-P1-K1-F6
caacaattgctgccattcaaccaatttgctttgacaaacctagcagtgttctaccaacaacccatcattggtggtgccctcttttagatttcttatgagttatagttcaatattaaagtttttggccggatgttgggggtttccaggaaataggaagagccattttttaaaaaaaaataaatttatttggtcttttttaaattttaattattttcgcctttttatttttatattgtggttgttttttttattggagatctttttatatttttattttatttttttttattttttattattaattgatattctttttatctattttttttaatattacacaaaaatatgggtgtgttgctcttcttcttttagtttttttataaaaatatttttt

SEQ ID NO: 22260 - DNA, 207 bp, Zea mays
  Clone ID: LIB3152-022-P1-K1-F7
gccgttatactcctataactgtgttaagcaataaagtaccatacattatgatgtttgtactatgatatttgaataagaatactaattgtaattataatgctactaaaaaaaaaaaaaaaaaaaaaaaaaaaaaaaaaaaaaaaaaaaaaaaaaaaaaaaaaaaaaaaaaaaaaaaaaaaaaaaatgtgaaaaaaaaaaaatttaaaa

SEQ ID NO: 22261 - DNA, 362 bp, Zea mays
  Clone ID: LIB3152-022-P1-K1-F8
cggacgcatgggctccacttaacttttgtcgacaagttcatgacccaatggtgggaaagtaaggccttcagagaggactacgagaagagaatcctcacatccctaaatagccgacagctgactcgagatggtcggatgaggaatcctgatgagaagcccatatttatcgagtcacaggcgccagctccagctccagctccagagcccatccctgtaaaattgcctgcaaaacaagccaaggaagtgcctgctccccaggcagatgatgctcccaagactgaagctccttcgaaaggacctgtcaagtcgcacaaggcaaaagctgctcttgatgcttatgatgattatgaggctgagcccct

SEQ ID NO: 22262 - DNA, 372 bp, Zea mays
  Clone ID: LIB3152-022-P1-K1-F9
cagcaacaacagtttctttcattctatcaactagatggggtgaaccctgctatctacttgcaggcacaacagctactaccatttaaccaacttgtcgggagcccttatgccttcttactgcaacaacagcttctaccattccatctgcaagctgtggcaaacattgctgctttcttgagacaacaacatttgttgccattttacccacaggttgtgggaaacattaatgccttcttgcaacagcaacaattgctaccattctacccacagaatgtggcaaacattgttgccttcttacaacaacaacaatttgttgccatttagccaacatgctttgacgaatcctaccaccttattgcaaccgcccaccat

SEQ ID NO: 22263 - DNA, 383 bp, Zea mays
  Clone ID: LIB3152-022-P1-K1-G1
cggcaacatagaaagggggaatccagtttcaacaatagagcaacaatggcgaccaagatattttccctccttatgctccttgctctttctgcatgtgttgctaacgcgacaattttccctcaatgctcacaagctcctatagcttcccttcttcccccataccttccatcaatgatagcttcagtatgtgaaaacccagctcttcaaccctataggctccaacaagcaatcgcagcaagcaacatacctttatcacccttgtttcaacaatcgccagccctatctttggtgcagtcattggtacaaaccatcagggcacagcagctgcagcaactcgtgctacctgtgatcaaccaagtagctctggcaaacctttctcccta

SEQ ID NO: 22264 - DNA, 153 bp, Zea mays
  Clone ID: LIB3152-022-P1-K1-G10
gcaaagcggcagtgcgtagagaggatcgtcgaacagaacagcatgaagatggtcatcgttctcgtcgtgtgcctggctctgtcagctgccagcgcctctgcaatgcagatgccctgcccctgcgcggggctgcagggcttgtacggcgctggc

SEQ ID NO: 22265 - DNA, 380 bp, Zea mays
  Clone ID: LIB3152-022-P1-K1-G11
cccacgcgtccgcccacgcttccgtctactcgtccgccaactagcaacatagaaggcacaatagtgtaccaacaatggcagccaaaatattttgcctccttatgctccttggtctttctgcaagtgctgctacggcgaccattttcccgaaatgctcgcaagctcctatagcttcccttcttcccccgtacctctcaccagcggtgtcttcggtatgtgaaaacccaattcttcaaccctacaggatccaacaggcaatcacagctggcatcttacctttatcacccttggtccttcaacaatcatcagccctattacatcagttacctttggtgcatttattggcacaaaacatcagggcacaacaactacaacaactt

SEQ ID NO: 22266 - DNA, 382 bp, Zea mays
  Clone ID: LIB3152-022-P1-K1-G12
ggtttatgcaattcagataatcctatggttggttttgtggtggaaaccagttcggattatggtcatcttgtcaaagatgttctttgcaggtgtatcactatttgcagccctcgggtttgttctctatggaggaaggttgttcatgatgttgcagcgttttcctgtagaatcaaaaggaagacgaaagaaattgcaggaggttgggtatgtgactaccatatgcttttcttgtttcttgatcagatgcgtcatgatgtgccttaatgcgtttgataaagcagcagatcttgatgttctgaaccatccaatcctgaacttcttctattacctgctggttgagatagtgccttcagctttggtgctcttcattctacggaaactg

SEQ ID NO: 22267 - DNA, 380 bp, Zea mays
  Clone ID: LIB3152-022-P1-K1-G2
caactagcaacatagaaagcacaatagtgtaccaacaatggcagccaaaatatgttgcctccttatgctccttggtctttctgcaagtgctgctacggcgaccattttcccacaatgctcacaagctcctatagcttcccttcttcccccgtacctctcaccagcggtgtcttcggtatgtgaaaacccaattcttcaaccctataggatccaacaggcaatcgcagctggcatcttacctttatcacccttgttcctccaacaatcatcagccctattacagcagttacctttggtgcatttattggcacaaaacatcagggcacaacaactacaacaacttgtgctagcaaaccttgctgcctactctcagcaacaac

SEQ ID NO: 22268 - DNA, 322 bp, Zea mays
  Clone ID: LIB3152-022-P1-K1-G4
caatagtgtaccaacaatggcagccaaaatattttgcttccttatgctccttggtctttctgcaagtgttgctaccgcaaccattttcccacaatgctcacaagctcctatagcttcccttcttcccccatacctctcaccagcggtgtcttcaatgtgtgaaaacccaattgttcaaccctacaggatccaacaggcaatcgcaacaggcattttaccattatcacccttgtttcttcaacaaccgtcagccctattacagcagttacctttggtccatttggtggcacaaaacattagggcacaacaactacaacaactt

SEQ ID NO: 22269 - DNA, 89 bp, Zea mays
  unsure at all n locations
  Clone ID: LIB3152-022-P1-K1-G5
naaaaaaaaaaaaaaaaaaaaaaaaaaaaaaaattaaaaaaaaaaaaaaaaaaaaaagaaaaaaaaaaaaaaaaaaaaaaaaaaaaaaa

SEQ ID NO: 22270 - DNA, 276 bp, Zea mays
  Clone ID: LIB3152-022-P1-K1-G6
gcggcagtgcgtagagaggatcgtcgaacagaacagcatgaagatggtcatcgtgctcgtcgtgtgcctggctctgtcagctgccagcgcctctgcaatgcagatgccctgcccctgcgcggggctgcagggcttgtacggcgctggcgccggcctgacgacgatgatgggcgccggcgggctgtacccctacgcggagtacctgaggcagccgcagtgcagcccgctggcggtggcgccctactacgccgggtgtgggcagacgagcgccatgta

SEQ ID NO: 22271 - DNA, 267 bp, Zea mays
  Clone ID: LIB3152-022-P1-K1-G7
tcgcaaaaacgagggctcgatttcgtttctgggtgccgctgatgctcatgggccgggtcgccagcatacccgtgtgccaactctcggtgcataccgaccgtgacggcacgtaccactacaacctcggtaaggcgctggctcccttgcgggtggaaggcatcctcatttcttggttccggtagagccacacacaacctgcgcaagattagaccgtgcaactgcgcccgtgccgcatagggttttcaagtttgacacctggattaagga

SEQ ID NO: 22272 - DNA, 363 bp, Zea mays
  Clone ID: LIB3152-022-P1-K1-G8
tgcgatttcgatctcgcagtcacctttttttttgttctgttgtgtatctagtagttggaggagatatgcagtttgcacttgcattggacacgaactcaggtcctcaccagataagatcttgtgagggtgatgggattgacaggttggaaaaattaagtattgggggcagaaagcaggagaaagctttgagaaataggtgctttggtggtagagatgctgcaactacacaatgtattcttaccttagatgcttgtcctgaaactcttcattcttaaacacaagcctttaggaaaaattatgctgatgcaaaccgtgtatctgctattaatttgggcgggggcactggatcttagctcttttctt

SEQ ID NO: 22273 - DNA, 365 bp, Zea mays
  Clone ID: LIB3152-022-P1-K1-G9
ccgggagcaccggaaattttggaggctgaaacggaaaggggagaaggcgatgacgacgagggagccgcgcgaggcgtcccggcgcgatgggcgcgactcgcacgggaggcgcccccactcctcgttcaggtcgcggagggacgatcccagcccaaggagaagagatgacaggaggcgtgaatcggacagggcgcaccacagaagtcgagatggagaatttttggaggtggtggaccatgatcagaagcggaatagagatgctgcgcagagcgctgaccctccgaatgctgagtcgaagtcagcgagtgatatgaagaatggcccctccaccaggcatgagagatcacctaggggaaccaaacgat

SEQ ID NO: 22274 - DNA, 388 bp, Zea mays
  unsure at all n locations
  Clone ID: LIB3152-022-P1-K1-H10
agcattcagaaacacaccaagcgaagcgcactagcaacaacctaacaacaatggctaccaagatattagccctccttgcgcttcttgcccttttagtgagcgcaacaaatgcgttcattattccacagtgctcacttgctcctagtgccattattccacagttcctcccaccagntacttaatgggcttcgaacatccagccgtgcaagcctacaggctacaactagcgcttgcggcgagcgtcttacaacaaccaattgcccaattgcaacaacaattcttggcacatctaaacctacaaaccatcgcaacgcaacagcaacaacagtttctgccatcactgagccacctagccgtggtgaaccctgtcgcctacttgcaacagcag

SEQ ID NO: 22275 - DNA, 373 bp, Zea mays
  Clone ID: LIB3152-022-P1-K1-H12
cagaaacacaccaagcgaagcgctctatcaacaacctaacaacaatggctaccaagatattatccctccttgcgcttcttgcgctttttgcgagcgcaacaaatgcgtccattattccacaatgctcacttgctcctagttccattattccacagttcctcccaccagttacttcaatggccttcgaacacccagctgtgcaagcctataggctacaacaagcgattgcggcgagcgtcttacaacaaccaattgcccaattgcaacaacaatccttggcacatctaacaatacaaaccatcgcaacgcaacagcaacaacagttcctaccagcactgagccacctagccatggtgaaccctgtcgcctactt

SEQ ID NO: 22276 - DNA, 149 bp, Zea mays
  unsure at all n locations
  Clone ID: LIB3152-022-P1-K1-H2
cggcgccacgcgtcgtagattagaaccaccagcgaagcgcctagcacaacctacaacaatgngtaccaagatattagccctccttgcgcttcttgcccttttagtgagcgcaacaaatgcgtttcattatttccacaagtgggctcact

SEQ ID NO: 22277 - DNA, 378 bp, Zea mays
  unsure at all n locations
  Clone ID: LIB3152-022-P1-K1-H3
tttcaaaaccacaccaagcgaagcgcactatcaacaacctaacaacaatggctaccaagatattagccctccttgcgcttcttgcccttttagtgagcgcaacanatgcgttcattattccacagtgctcacttgctcctagtgccattattccacagttcctcccaccagttacttcaatgggcttcgaacatccagccgtgcaagcctacaggctacaactagcgcttgcggcgagcgtcttacaacaaccaattgcccaattgcaacaacaatccttggcacatctaaacctacataccatcgcaacgcaacagcaacaacagtttctgccatcactgagccacctagccgtggtgaaccctgtcgcctacttgc

SEQ ID NO: 22278 - DNA, 245 bp, Zea mays
  Clone ID: LIB3152-022-P1-K1-H4
ggcgaccacgcgtccgaaatgcgttcattattccacaatgctcacttgctcctagtgccattataccacagttcctgcgaccagttactttaatgggcttcgaacacctagctgtgcaagcctacaggctacaacaagcgcttgcggcgagcgtcttacaacaaccaatttaccaattgcaacaacaattcttggcacatttaaccatacaaaccatcgcaacacaacagcaacaacagtttcta

SEQ ID NO: 22279 - DNA, 332 bp, Zea mays
  unsure at all n locations
  Clone ID: LIB3152-022-P1-K1-H5
cacgcgtncggcatcgatgttttcgatcccaagattatacattgtctctcctggagcagacatgagggtgtactacccgtatacggaaaccgacaagagactcactgtcttccatcctgaaatcgaggagcttatctacagcgacgtctagaactccgagcacaagttcgtgctgaaggacaagacgaagccgatcatcttctcgatggcgcgtctcgaccgcgtgaagaacatgacaggcctggtggagatgtacggcaagaacgcgcgcctgagggagctggcgaacctcgtgatcgtcgtcggtgaccactgcaaggagttcaaggaca

SEQ ID NO: 22280 - DNA, 367 bp, Zea mays
  Clone ID: LIB3152-022-P1-K1-H7
caactagcaacatagaaagcacaatagtgtaccaacaatggcagccaaaatattttgcttccttatgctccttggtctttctgcaagtgttgctaccgcaaccattttcccacaatgctcacaagctcctatagcttccctttttcccccatacctctcaccagcggtgtcttcaatgtgtgaaaacccaattgttcaaccctacaggatccaacaggcaatcgcaacaggcatcttaccattatcacccttgttcctccaacaaccgtcagccctattacagcagttacctttggtccatttggtggcacaaaacattagggcacaacaactacaacaacttgtgctagcaaaccttgctgcatac

SEQ ID NO: 22281 - DNA, 362 bp, Zea mays
  Clone ID: LIB3152-022-P1-K1-H8
attgagaccaactagcaacatagaaagcacaatagtgtaccaacaatggcagccaaaatattttgcttccttatgctccttggtctttctgcaagtgttgctaccgcaaccattttcccacaatgctcacaagctcctatagcttcccttcttcccccatacctctcaccagcggtgtcttcaatgtgtgaaaacccaattgttcaaccctacaggatccaacaggcaatcgcaacaggcatcttaccattatcacccttgttcctccaacaaccgtcagccctattacagcagttacctttggtccatttggtggcacaaaacatcagggcacaacaactacaacaacttgtgctagcaaa

SEQ ID NO: 22282 - DNA, 175 bp, Zea mays
  Clone ID: LIB3152-022-P1-K1-H9
ccacaggctgcgcgatggtgcttgttggtcttcggctacggctccctcatctggaaccccggcttcgacttcgacgacaaaatcctcggcttcatcaagggctacaagcgcacctttaatctcgcttgcattgaccacagaggcacaccggagcattcggcgagggcccgcgcgc

SEQ ID NO: 22283 - DNA, 136 bp, Zea mays
  Clone ID: LIB3152-023-P1-K1-A1
ctgggtcttcagaccattagctttatctactctcagagcgcaaaagaacccgatcgacaccatgagggtgttgctcgttgccctcgctctcctggctctcgctgtgagcgccaccttcacgcatacaagcggtggt

SEQ ID NO: 22284 - DNA, 243 bp, Zea mays
  Clone ID: LIB3152-023-P1-K1-A10
cgtgttttacatataatataggaggtggatatatcttccacagcaggtggaattgaaggtctttctgttactgttgacagtgatgatgaatatgacagtgaacatgatgatcgccctgcattatctgctgctgttcttgctgcacatgctagaaatgcccttcgtgcacctttattgcagactctgctagaagacattcctgtgagttctgcaattttcggcactgtatcattaaccggtgac

SEQ ID NO: 22285 - DNA, 163 bp, Zea mays
  Clone ID: LIB3152-023-P1-K1-A12
tcctaacaacaatcggctacgcggattttatccctcctcgctctcattgcgctatttgcgagcgcaacaaatgcgttcattttcccacactgctcactcgcttcaagttccattatttcacagttcctcccactcagttactttaatgggtttcgaacaccca

SEQ ID NO: 22286 - DNA, 292 bp, Zea mays
  Clone ID: LIB3152-023-P1-K1-A2
gcgggacgctgtgatcgccgtgccgtcctactttgggcaggccgagcgccgggcgttgacgcaggccgcgcagctggctggaatcagcgtgcttgctctcatcaacgagcacgctggggccgcgcttcagtacgggattgacaaggacttctccaatgcgtcgcggcatgtcatcttttacgacatgggcgctggtagcacctatgccgcattagtgtactactcggcatacaacgccaaggagttcggaaagacaggcttcgttaaccagttccaggttgtcgctcaacaa

SEQ ID NO: 22287 - DNA, 377 bp, Zea mays
  Clone ID: LIB3152-023-P1-K1-A3
aatgggcttcgaacacctagctgtgcaagccaacatgcaacaacaagcgcttgcggcgagcgtcttacaacaaccaattgcccaattgcaacaacaatccttgccacatctaacaatacaagccatcacaacgcaacagcaacaacagttcctaccagcactgagccacctagccatggtgaaccctgccgcctacttgcaagagcagctgcttgcatccaacccacttgctctggcgaacgtagttgcaaaccagcaacaacaacagctacaacagtttctgccaacgctcagtcaactagccatggtgaaccctgccgcctacgtacaacaacaacaactgctttcatctagcccgctcgctgtgggcaatgcac

SEQ ID NO: 22288 - DNA, 379 bp, Zea mays
  Clone ID: LIB3152-023-P1-K1-A4
gagaccaactagcaacataaaaagcacaatagtgtaccaacaatggcagccaaaatattgcgcctccttatgctccttggtctttctgcaagtgctgctacggcgaccattttcccacaatgctcacaagctcctatagcttcccttcttcccccgtacctctcaccagcggtgtcttcggtatgtgaaaacccaattcttcaaccctataggatccaacaggcaatcgcagctggcatcttacctttatcacccttgttcctccaacaatcatcagccctattacagcagttacctttggtgcatttattggcacaaaacatcagggcacaacaactacaacaacttgtgctagcaaaccttgctgcctactctcagc

SEQ ID NO: 22289 - DNA, 374 bp, Zea mays
  Clone ID: LIB3152-023-P1-K1-A5
gagaccaactagcaacatagaaagttcaatagtgtaccaacaatggcagccaaaatattttgcctccttatgctccttggtctttctgcaagtgctgctacggcgaccattttcccacaatgctcacaagctcctatagcttcccttcttcccccgtacctctcaccagcggtgtcttcggtatgtgaaaacccaattcttcaaccctataggatccaacaggcaatcgcagctggcatcttacctttatcacccttgttcctccaacaatcatcagccctattacagcagttacctttggtgcatttattggcacaaaacattagggcacaacaactacaacaacttgtgctagcaaaccttgctgtctactc

SEQ ID NO: 22290 - DNA, 376 bp, Zea mays
  unsure at all n locations
  Clone ID: LIB3152-023-P1-K1-A6
cttcgggctttttaaaaaccacaccactttttgcgcacnaccaacatcttaacaacgagggggttccaaaatattatccctccttgcgctttttgcgctttttgcgagcgcaacaaatgcgtccattattccacaatgctcactagctcctagttccattattccaaagttcctcccaccagttactttaatggcctttgaacacccagctgtgcaagcctataggctacaacaagcgattgctgcgagcgttttacaacaaccaattgcccaattgcaacaacaatccttggcacatctaacaatacaaaccatcgcaacgcaacagcaacaacagtttctaccagcactgagccacctagccatggtgaaccct

SEQ ID NO: 22291 - DNA, 375 bp, Zea mays
  Clone ID: LIB3152-023-P1-K1-B10
gccactcatacgggtggttccattttaccggatccacagcacagggggcgtagagatctaggcctccaatgcatcttggccttttatgtttgctgaacttatgtcatgtatttcttacatgtctatcttgttttaatgctctcattttcttatattctcctttcattttttgtaccattgtttatttatttatattttttttgttttattttatttcgtatgagctttttgatttattttattttttttttttatgttattcttttcttttttattttttttttttttttttactttatttgtctacttgtatttttgtattctttttctcacttaatttttttttttttatactttcttacgtatctatttttt

SEQ ID NO: 22292 - DNA, 376 bp, Zea mays
  Clone ID: LIB3152-023-P1-K1-B12
cggacgcgtgggttgagcattcattaacacaccaagcgaagctacctagcaacgacttaacaacaatggctaccaagatattagccctccttgcgcttcttgccctttttgtgagcgcaacaaatgcgttcattattccacaatgctcacttgctcctagtgccattataccacagttcctccgaccagttacttcaatgggcttcgaacacctagctgtgcaagcctacaggctacaacaagcgcttgcggtgagcgttttacaacaaccaattaaccaattgcaacaacaatccttggcacatttaaccatacaaaccattgcaacacaacagcaacaacagttcctaccagcactgagccaactagatgtggt

SEQ ID NO: 22293 - DNA, 377 bp, Zea mays
  Clone ID: LIB3152-023-P1-K1-B2
caacgacagccccagacaacactcaccgatagcaagtagcgccgccgacgtttcgagagcagagtatccaagctagccaagcgcgcacctcggtgacctagctagttcaggcgacgatatggcgtcaggtcaggaaagcaggaaggagctggaccgcaaggcccgcgagggcgagaccgtcgtccccggcgggaccggcggcaagagcgtcttacaacaaccaatttcccagttgcaacaacaatccttggcacatctaacaatacaaaccatcgcaacgcaacagcaacaacaattcctaccagcactgagccacctagccatggtgaaccctgccgcctacttgcaacagcagttgcttgcatcaaacccacttg

SEQ ID NO: 22294 - DNA, 370 bp, Zea mays
  Clone ID: LIB3152-023-P1-K1-B3
ctgacgcgtgcactcgaggctcgcattggtcgcaaaatatgtcgcctccttatgctcctgggtctttctgcaagtgctgctacggcgaccattttcccgcaatgctcgcaagctcctatagcttcccttcttcccccctacctgtcaccagcggtgtcttctgtatgtgaaaacccaagtcttcaaccctacaggatccaacaggcaatcgcagctggcatcttacctttatcacccttgttcctccaacaatcatcagccctattacaacagttacctttggtgcatttattggcacaaaacatcagggcacaacaactacaacaacttgtgctagcaaaccttgctgcctactctcagcaacagcagt

SEQ ID NO: 22295 - DNA, 383 bp, Zea mays
  Clone ID: LIB3152-023-P1-K1-B4
ggacgtcagcctagcaattagctcatcgactccagattggagaactcgacaccatgaaggtgctgatcgttgcccttgctctcctggcgctcgctgcgagcgccgcctccagtacaagcggcggctgtggctgccagacaccaccgtttcatctaccgcctccgttctatatgccgcctccgttctatctgccgccgcagcagcagccgcagccatggcaataccccactcaaccaccgcagctaagcccgtgccagcagttcggatcctgcggcgtcggcagcgtcggcagcccgttcctgggccagtgcgtcgagttcctgaggcaccagtgcagcccggcggcgacgccctacggctcgccacagtgccaggcgctgcag

SEQ ID NO: 22296 - DNA, 383 bp, Zea mays
  Clone ID: LIB3152-023-P1-K1-B5
cagaaacacaccaagcgaagcgcactagcaacaacctaacaacaatggctaccaagatattagccctccttgcgcttcttgcccttttagtgagcgcaacaaatgcgttcattattccacagtgctcacttgctcctagtgccattattccacagttcctcccaccagttacttcaatgggcttcgaacatccagccgtgcaagcctacaggctacaactagcgcttgcggcgagcgtcttacaacaaccaattgcccaattgcaacaacaatccttggcacatctaaacctacaaaccatcgcaacgcaacagcaacaacagtttctgccatcactgagccacctagccgtggtgaaccctgtcgcctacttgcaacagcag

SEQ ID NO: 22297 - DNA, 120 bp, Zea mays
  Clone ID: LIB3152-023-P1-K1-B7
aaccaacacacaaaaattttcactttttcaacaaaaaaacaacaagcggcaccgaaatattttaccaaattatactccccactattactacctcattaattaacaaccacaattctaccc

SEQ ID NO: 22298 - DNA, 242 bp, Zea mays
  Clone ID: LIB3152-023-P1-K1-B8
gccagctgcagggaacctgcggcgttggcagcaccccgatcctgggccagtgcgtcgagtttctgaggcatcagtgcagcccgacggcgacgccctactgctcgcctcagtgccagtcgttgcggcagcagtgttgccagcagctcaggcaggtggagccgcagcaccggtaccaggcgatcttcggcttggtcctccagtccattctgcagcagcagccgcaaagcggtcaggtcgtgggg

SEQ ID NO: 22299 - DNA, 366 bp, Zea mays
  Clone ID: LIB3152-023-P1-K1-C1
cccacgcgtccggaccattagctttatctactccagagcgcagaagaacccgatcgacaccatgagggtgttgctcgttgccctcgctctcctggctctcgctgcgagcgccacctccacgcatacaagcggcggctgcggctgccagccaccgccgccggttcatctaccgccgccggtgcatctgccaccttcggttcacctgccacctccggtgcatcttccaccgccggtccacctgccggcgccggtccacctgccaccgtcggtccatgtgccgccgccggttcatctgccgtcgccaccatgccactaccctactcaaccggcccggccttagccttatccccagccacacccatgccc

SEQ ID NO: 22300 - DNA, 366 bp, Zea mays
  Clone ID: LIB3152-023-P1-K1-C11
aagcaacatagaaagcgttatccattagcaacaatagagcaacaatggagaccgggatattttccctccttatgctccttgctctttctacatgtgttgctaacgcgacaattttccctcaatgctcacaagctcctatagcttccctttttcccccataccttccatcaattatagcttcagtatgtgaaaacccagctcttcaaccatataggcttcaacaagcaatcgcagcaagcaacatacctttatcgcccttgttgtgtcaacaatcgccagccctatctttggtgcagtcattggtacaaaccattagggcacaacagctgcagcaactcgtgctacctgtgatcaaccaagtagctc

SEQ ID NO: 22301 - DNA, 374 bp, Zea mays
  Clone ID: LIB3152-023-P1-K1-C2
attttgagcattcagaaacacaccaagcgaagctacctagcaacgacttaacaacaatggctaccaagatattagccctccttgcgcttcttgccctttttgtgagcgcaacaaatgcgttcattattccacaatgctcacttgctcctagtgccattataccacagttcctccgaccagttacttcaatgggcttcgaacacctagctgtgcaagcctacaggctacaacaagcgcttgcggcgagcgtcttacaacaaccaattaaccaattgcaacaacaatccttggcacatctaaccatacaaaccatcgcaacacaacagcaacaacagtttctaccagcactgagccaactagatgtggtgaaccct

SEQ ID NO: 22302 - DNA, 285 bp, Zea mays
  Clone ID: LIB3152-023-P1-K1-C3
ttcagcattcataaacacaccaagtttttcgttctagcaacaacctaacaacaggggctaccaagatattagccctccttgcgcttcttgcccttttagtgagcgcaacaatagcgttcattattccacagtgctcacttgctcctagtgccatcattccacagtttctcccaccagttacttcaatgggcttcgatcattcacccgtgcaagcctacatgcttcaactagcgcttgctgtgtgcgtcttacttcaaccaattgctcaattgcaactacttttct

SEQ ID NO: 22303 - DNA, 239 bp, Zea mays
  Clone ID: LIB3152-023-P1-K1-C4
cgcggcgttagcaaccctctggaggtgtggatttggcgcgtgaaggcgattgaggccgggttccgttcgtggatggctaatcaacccatccaaatcgaggccgatttgtccttatattaattttttatttttattaatttttatttttttttttatattttaattttattttttatttttacatattatttttatatttaattttttattctattttttataatttttataatactttt

SEQ ID NO: 22304 - DNA, 370 bp, Zea mays
  Clone ID: LIB3152-023-P1-K1-C7
gagctacataccatgaactatatttactcaacagcgcaaaacaacactattcggcaccattatggctgttggtctttctgcaagcgctgctacctcaaccattatgccacaatgctcacaagctactatagcttgctttcttcccccatacctctcaccagcggtgtcttcagtatgtgaaaacccaattcttcaaccctacaggatccaacaggcaatcgcagcaggcatcttacctttatcacccttgttcctccaacaaccgtcagccctattacagcagttacctttggtgcatttgttggcacaaaacatcaaggcacaacaactacaacaacttgtgctaggaaaccttgctgcctactctcag

SEQ ID NO: 22305 - DNA, 184 bp, Zea mays
  Clone ID: LIB3152-023-P1-K1-C8
gagaccaatagctttatctacttcttagcgcaaaagaacccgatcgacatcatgagggtgatgctcgttgtcttttctgtacgggcgtctgctgcaagcagtaccgacaatgtacaaaggtgtattggttatttttccgcatacattatcagggtgcttcagaatggaaactcaattttaattc

SEQ ID NO: 22306 - DNA, 376 bp, Zea mays
  Clone ID: LIB3152-023-P1-K1-D1
attgagaccaactagcaacatagaaagcacaatagtgtaccaacaatggcagccaaaatattttgcctccttatgctccttggtctttctgcaagtgctgctacggcgaccattttcccgcaatgctcgcaagctcctatagcttcccttcttcccccgtacctctcaccagcggtgtcttcggtatgtgaaaacccaattcttcaaccctacaggatccaacaggcaatcgcagctggcatcttacctttatcacccttgttcctccaacaatcatcagccctattacaacagttacctttggtgcatttattggcacaaaacatcagggcacaacaactacaacaacttgtgctagcaaaccttgctgcctact

SEQ ID NO: 22307 - DNA, 211 bp, Zea mays
  Clone ID: LIB3152-023-P1-K1-D12
aaagcacaatagtgtacttacaattgtagccaaaatatttcgcctcctgatgcgccttggtttttctgcaagtgctgctacggcgaccattttcccgaaatgctcgcaagcttctatagcttcccttcttcccccgtacctctcaccagcggtgtctcctggttttttgaaaacccaattatttaaccttacaggatccaacatgcattta

SEQ ID NO: 22308 - DNA, 376 bp, Zea mays
  Clone ID: LIB3152-023-P1-K1-D3
agaccaacaagcaacatagaaagtggaatccagtagcaacaatagagcaacaatggcgaccaagatattttccctccttatgctccttgctctttctgcatgtgttgctaacgcgacaattttccctcaatgctcacaagctcctatagcttcccttcttcccccataccttccatcaatgatagcttcagtatgtgaaaacccagctcttcaaccctataggctccaacaagcaatcgcagcaagcaacatacctttatcacccttgtttcaacaatcgccagccctatctttggtgcagtcattggtacaaaccatcagggcacagcagctgcagcaactcgtgctacctgtgatcaaccaagtagctctggca

SEQ ID NO: 22309 - DNA, 368 bp, Zea mays
  Clone ID: LIB3152-023-P1-K1-D4
acctgccaccgccggtccatgtgccgccgccggttcatctgccgccgccaccatgccactaccctactcaaccgccccggcctcagcctcatccccagccacacccatgcccgtgccaacagccgcatccaagcccgtgccagctgcagggaacctgcggcgttggcagcaccccgatcctgggccagtgcgtcgagtttctgaggcatcagtgcagcccgacggcgacgccctactgctcgcctcagtgccagtcgttgcggcagcagtgttgccagcagctcaggcaggtggagccgcagcaccggtaccaggcgatctttggcttggtccttcagtccattctgcaatagcagtcgtaaagcggt

SEQ ID NO: 22310 - DNA, 377 bp, Zea mays
  Clone ID: LIB3152-023-P1-K1-D5
caacaatccttggcacatctaaacctacaaaccatcgcaacgcaacagcaacaacagtttctgccatcactgagccacctagccgtggtgaaccctgtcgcctacttgcaacagcagctacttgcatccaacccacttgctctggcgaacgtagctgcataccagcaacaacaacgtctgcaacagtttatgccagcgctcagtcaactagccatggtgaaccctgtcgcctacctacaacagcaacaattgctttcatctagcccgctcgctgtgggcaatgcacctacgtacctacaacaacagttgctgcaacagattgtaccagctctgactcagctagctgtggcaaaccctactgcctacttgcaacagtt

SEQ ID NO: 22311 - DNA, 138 bp, Zea mays
  Clone ID: LIB3152-023-P1-K1-D6
gatcaccaaagcgtaagtgcgtattttaggattgttgaacacaacaaccatgaagagggtgatggtttttagtgagggcctggctctgtcagctgccagcgccttagcaatgcaaatgccctgcccctgcgcggtgct

SEQ ID NO: 22312 - DNA, 321 bp, Zea mays
  Clone ID: LIB3152-023-P1-K1-D7
atcagcaaagcggcagtgcgtagagaggatcgtcgaacagaacagcatgaagatggtcatcgttctcgtcgtgtgcctggctctgtcagctgccagcgcctctgcaatgcagatgccctgcccctgcgcggggctgcagggcttgtacggcgctggcgccggcctgacgacgatgatgggcgccggcgggctgtacccctacgcggagtacctgaggcagccgcagtgcagcccgctggcggcggcgccctactacgccgggtgtgggcagacgagcgccatgtaccagccgctccggcaacagtgctgccagcagcatat

SEQ ID NO: 22313 - DNA, 371 bp, Zea mays; identical to SEQ ID NO: 21342
  Clone ID: LIB3152-023-P1-K1-D8

SEQ ID NO: 22314 - DNA, 369 bp, Zea mays
  Clone ID: LIB3152-023-P1-K1-E12
cccacgcgttcgggcatttgtatttttcatctaacctttatcaccgggggtcctccaacatttatcagccctattacagcagttacctttggtgcatttattggcacaaaacatcagggcacaacaactacaacaacttgtgctagcaaaccttgctgcctacttttagcaacagcagtttcttccattcaaccaactagctgtattgaacttttgcttcttatttgcaacaacaacaactaccatacagtcagctatttgttgtctaccctcagcaattttttttatttaatcaactgacagcatttgacttttctgttttttttcagtaggtaacatttcttttcattagtcagctagctggtgtga

SEQ ID NO: 22315 - DNA, 143 bp, Zea mays
  Clone ID: LIB3152-023-P1-K1-E2
cttgctttgacaaacccagcagcattctacctacaacccatcattggtggtgccctcttttagatttcttatgagttatagttcaataataaagttttttgtctgatgtttgtggcttcccagaaataagaaagtacatttct

SEQ ID NO: 22316 - DNA, 369 bp, Zea mays
  Clone ID: LIB3152-023-P1-K1-E3
tttcagcattcagaaacacaccaagtttagctttctagcaacaacctaacaacaatggctaccaagatattagccctccttgcgcttcttgcccttttagtgagcgcaacaaatgcgttcattattccacagtgctcacttgctcctagtgccattattccacagttcctcccaccagttacttcaatgggcttcgaacatccagccgtgcaagcctacaggctacaactagcgcttgcggcgagcgtcttacaacaaccaattgcccaattgcaacaacaatccttggcacatctaaacctacaaaccatcgcaacttaacagcaacaacagtttttgtcatttctgagccatctatccgtggtgtac

SEQ ID NO: 22317 - DNA, 379 bp, Zea mays
  unsure at all n locations
  Clone ID: LIB3152-023-P1-K1-E6
gttggttgaatggaagaaattgtctacactgaaccctgctgcttatttgcagcaacaactattaccatttagccagctagctactgcctactctcaacaacaacaacttcttccatttaaccaattggccgcactgaaccccgctgcttatttgcagcagcaaatactactaccatttagccagctagctacagcaagccgtgcttccttcttgacacaacaacagttgctgccgttctaccagcagtttgcggctaaccccgcaacccttttacaactacaacaattgttgccctttgtccaacttgctttgacaaacccagcagcctnctaccaacaacacatnattggtggtgccctcttttagattgcttattag

SEQ ID NO: 22318 - DNA, 355 bp, Zea mays
  Clone ID: LIB3152-023-P1-K1-E7
attttgagcattcaaaattacacattgggaagtgcactagcaacttgcggaacagcaatggctaccaagatattagccctccttgcgctcctttccctttcagtgagcgcaacaactgcattcattattccacaatgctcacttgctcctaatgccattattccacagttcctcccatcagttacatcaatgggcatcgaacaccctattgtgcaagcctataggctacaacaagcgcttgcggcgagcgtcttacaacaaccgtttgcccaattacaacaacaatccttggcacatctaaccatacaaaccattgcaacacatcttgagcaacagtttgtgcccgtattgagcc

SEQ ID NO: 22319 - DNA, 375 bp, Zea mays
  Clone ID: LIB3152-023-P1-K1-E8
aaaaccccgggcgacccacgcgtcctttgactcgcgaacttagttctgtgtgttttacccgacaccgggcaggggcacgtctggttttatcttgcgctcgttcactccatcttaggtttttactttgacatgcacattagctactactgctgttcctgttggaggatttttcaggcttacttgttttcttattagtaattgttttatctgtggtcttaattatattttttttttgtgtcagtttttttttttttttattattcttctattcttatttgtttttttttttatttttcgtatattttcttttattatttttatttttttattttttattttttttttttttttattgactttttttttttttttttt

SEQ ID NO: 22320 - DNA, 372 bp, Zea mays
  Clone ID: LIB3152-023-P1-K1-E9
agtgaagtacactagcattatcttttcaccaatgggagccaagattggggccctccttgccctccttgctctttcagcaagcgctgctacctcgacttttattccacaatgctcacaacaatacctctctccggcgacagccgtgggatttcaatacccaactatacaatcctacatggtacaagaggccatccaagcaagcatcttacggtcattagcattaaccctccaacaaccatatgctctattgcaacagccatccttagtgcatttgtatctccaaagaatcgcggcacaacaactacaacaacagttgctaccaacaatcaatcaagtagttgcagcgaaccttgctgcttaccttcagcaaca

SEQ ID NO: 22321 - DNA, 389 bp, Zea mays
  Clone ID: LIB3152-023-P1-K1-F1
ccgggcggcccaacccgtccgccacctagcaccatagaaggcacatttgtgttccaacaatggcagccaaaatatgtggcttccttatgctccttggtctttctgcaagtgctgctaccgcaaccattttcccacaatgctcacaagctcctatagcttcctttcttcccccatacctctcaccagcggtgtcttcagtatgtgaaaacccaattcttcaaccctacaggatccaacaggcaatcgcagcaggcatcttacctttatcacccttgttcctccaacaaccgtcagccctattacagcagttacctttggtgcatttgttggcacaaaacatcaaggcacaacaactacaacaacttgtgctaggaaaccttgctggctac

SEQ ID NO: 22322 - DNA, 230 bp, Zea mays
  Clone ID: LIB3152-023-P1-K1-F10
cacaccaagcgaagcgtattagcttttacctaacaacaatggctaccaagatagtagcctttcttgcgcttcttgcccttcttgtgagctcaacaaatgcttttcataattttacaattctttattttttattattcttttatttatctgttttttctatatagttattttaatttatttttttttatttttttcttttattttatttttttatttttttctcttttatt

SEQ ID NO: 22323 - DNA, 375 bp, Zea mays
  Clone ID: LIB3152-023-P1-K1-F11
ctgccacctccggtgcatttcccaccgccggtccacctgccgccgccggtccacctgccaccgccggtccatgtgccgccgccggttcatctgccgccgccaccatgccactaccctactcaaccgccccggcctcagcctcatccccagccacacccatgcccgtgccaacagccgcatccaagcccgtgccagctgcagggaacctgcggcgttggcagcaccccgatcctgggccagtgcgtcgagtttctgaggcatcagtgcagcccgacggcgacgccctactgctcgcctcagtgccagtcgttgcggcagcagtgttgccagcagctcaggcaggtggagccgcagcaccggtaccaggcgatcttc

SEQ ID NO: 22324 - DNA, 381 bp, Zea mays
  Clone ID: LIB3152-023-P1-K1-F2
cagaaacacaccaagcgaagcacattagcaacatcctaacaacaatggctaccaagatattatccctccttgcgcttcttgcgctttttgcgagcgcaacaaatgcgttcattattccacaatgctcacttgctccaagttccattattacacagttcctcccaccagttacttcaatgggcttcgaacacccagctgtgcaagcctataggctacaacaagcaattgcggcgagcgtcttacaacaaccaatttcccagttgcaacaacaatccttggcacatctaacaatacaaaccatcgcaacgcaacagcaacaacaattcctaccagcactgagccacctagccatggtgaaccctgccgcctacttgcaacagt

SEQ ID NO: 22325 - DNA, 379 bp, Zea mays
  Clone ID: LIB3152-023-P1-K1-F3
gccctattacagcagttacctttggtccattttttggcacaaaacatcagggcacaacaactacaacaacttgtgctagcaaaccttgctgcatactctcagcaacatcagtttcttccattcaaccaactggctgcattgaactctgctgcttatttgcaacaacaattaccattcagccagctagttgctgcctacccccagcaatttcttccattcaaccaactagcagcattgaactctgctgcttatttacagcagcaacaactactaccattcagccagctagctgatgtgagccctgctgccttcttgacacaacaacagttgttgccgttctacctgcacgctatgcctaacgctggcaccctcttacaac

SEQ ID NO: 22326 - DNA, 230 bp, Zea mays
  Clone ID: LIB3152-023-P1-K1-F4
atcgagtacagtcggctaggtaatctggtggtacgacgactgacgacgacatggcggccaccagcagcaagtcgtcgtcgtcctcgagctcggcgcagcgggcagcagctgccgccctgctcgtggcggtgtccgtcctggtggtgggcgcggcggcggtgtgcgacatgagcaacgagcagttcatgttgtgccagcccgcggtggccaagacgacggacccgccggtc

SEQ ID NO: 22327 - DNA, 121 bp, Zea mays
  Clone ID: LIB3152-023-P1-K1-F6
ctcgcgtgtcctcgacatgggcgcgcagctgtcgcaggcgctgaagccggtgcggcagatgaagcatcacgcgtgcagcttcgcgctgtacgcccacgacttgcaccgccaggtggaggtc

SEQ ID NO: 22328 - DNA, 373 bp, Zea mays
  unsure at all n locations
  Clone ID: LIB3152-023-P1-K1-F7
cccacgcgtccggcacaattgtgtttcaacaatggcagccaaaatagggggcctgcttatgctccttggtctttctgcaagtgctgctacggcgaccattttcccgaaatgctcgcaagctcctatagcttcccttcttcccccgtacctctcaccagcggtgtcttcggtatgtgaaaacccaattcttcaaccctacaggatccaacaggcaatcacagctggcatcttacctttatcacccttgttcctccaacaatcatcagccctattacatcagttacctntggtgcatttattggcacaaaacatcagggcacaacaactacaacaacttgtgctagcaaaccttgctgcctactctcagcaacag

SEQ ID NO: 22329 - DNA, 337 bp, Zea mays
  Clone ID: LIB3152-023-P1-K1-F8
gccattgcttagggtagtgcgcggtttttttgaaggtggactggatgctactggaaggttatatcttgaggaagacgatgaagctgctggtgctgattggggtgatgaagacttggatattgttgatgtaagttaggtgttttcttattatttattatttttatttttttattatattttttatttttatatactttttttttactttatttttttattttttttttttttttttatttttttttttttttttattttaatattttttttttcttatttttttttttttttcattttttttttctttttattttttatttagtttttttttttttta

SEQ ID NO: 22330 - DNA, 242 bp, Zea mays
  Clone ID: LIB3152-023-P1-K1-F9
ctcggcacgcaggctagctgcacagcagcagccagagccatcccctctcctcgctacgcttcgcttcctcggcgccgattcctcctcctcctcctccaccctcgtccgtccccttccggcgcacgagctcgcccgagatggcgaacgcgagatcgggtgtcgctgtgaacgatgagtgcatgctgtagtttggcgagctgcatgtcgagaggcttgaccgcttcataactttcaaggtggac

SEQ ID NO: 22331 - DNA, 377 bp, Zea mays
  Clone ID: LIB3152-023-P1-K1-G1
taggaagcaagggaatcacatcgttttggcattcaagatgtttgcattgtttgcgctcctagctctttgtgcaaccgccactagtgctacccatatcccagggcacttgtcaccactactgatgccattggctaccatgaacccatggatgcagtactgcatgaagcaacagggggttgccaacttgctagcgtggccgaccctgatgctgcagcaactgttggccttaccgcttcagccgtgccagatgccaatgatgatgccaggtatgatgccaccgatgacaatgatgccgatgccgaatatgatgccatcgatgatggtgccgactatgatgtcaccaataacgatagctagtatgatgccaccgatgatga

SEQ ID NO: 22332 - DNA, 231 bp, Zea mays
  Clone ID: LIB3152-023-P1-K1-G10
gggtcttcagaccattatttttatttactccagagcgcagaagaacgccgatcgacaccatgagggtgttgctcgttgccctcgctcttctggctctcgctgtgagcgccaccttcacgcatacaagcggcggttgctgctgccagccaccgtcgtcggttcatataccgtcgccggtgcattctgctatcttcggttcatctgccacctttcggagcatttttcactcgt

SEQ ID NO: 22333 - DNA, 379 bp, Zea mays
  Clone ID: LIB3152-023-P1-K1-G2
caactagcaacatacatagtgaagtacactagcaacatcttagcaccaatgggagccaagatttttgccctccttgccctccttgctctttcagcaagcgctgctacctcgacttttattccacaatgctcacaacaatacctctctccggcgacagccgtgggatttcaatacccaactatacaatcctacatggtacaagaggccatccaagcaagcatcttacggtcattagcattaaccctccaacaaccatatgctctattgcaacagccatccttagtgcatctgtatctccaaagaatcgcggcacaacaactacaacaacagttgctaccaacaatcaatcaagtagttgcagcgaaccttgctgcttacc

SEQ ID NO: 22334 - DNA, 364 bp, Zea mays
  Clone ID: LIB3152-023-P1-K1-G3
attgagaccaactagcaacatagattgcacaatagtgtaccaacaatggcagccaaaatattttgcctccttatgctccttggtctttctgcaagtgctgctacggcgaccattttcccgaaatgctcgcaagctcctatagcttcccttcttcccccgtacctctcaccagcggtgtcttcggtatgtgaaaacccaattcttcaaccctacaggatccaacaggcaatcacagctggcatcttacctttatcacccttgttcctgcaacaatcatcagccctattacatcagttacctttggtgcatttattggcacaaaacatcagggcacaacaactacaacaacttgtgctagcaaacc

SEQ ID NO: 22335 - DNA, 382 bp, Zea mays; identical to SEQ ID NO: 21318
  Clone ID: LIB3152-023-P1-K1-G4

SEQ ID NO: 22336 - DNA, 369 bp, Zea mays
  Clone ID: LIB3152-023-P1-K1-G5
gagcattcagaaacacaccaagcgaagcgcactagcaacgacctaacaacaatggctaccaagatattagccctccttgcgcttcttgccctttttgtgagcgcaacaaatgcgttcattattccacaatgctcacttgctcctagtgccattattccacagttcctcccaccagttacttcaatgggcttcgaacacctagctgtgcaagccaacatgcaacaacaagcgcttgcggcgagcgtcttacaacaaccaattgcccaattgcaacaacaatccttgccacatctaacaatacaagccatcacaacgcaacagcaacaacagttcctaccagcactgagccacctagccatggtgaaccct

SEQ ID NO: 22337 - DNA, 343 bp, Zea mays
  Clone ID: LIB3152-023-P1-K1-G6
caacccgtccgaagaaacaaacaacgcaaaaggcgttgtcaattacctaccacctaacgccaccgggtactaagatattatcgcgccttgcgctctttgccctagcggagcgcacaacaaaagcgttcattattgcacactgcttacttgctcctagtgccaatatttcacagcacctttcaccagttacttcaatggactccgaacacctagctgtgcaagccaacatgcaacaacaagcgcttgcggcgagcgtcttacaacaaccaattgtccaattgcaacaacaatccttgtcacatttaacaatacaagccatcacaacgtaacagcaacaacagtt

SEQ ID NO: 22338 - DNA, 373 bp, Zea mays
  Clone ID: LIB3152-023-P1-K1-G7
tgctgtaatagggctgtttattgttttaggaacaagggtgataaagggaaggtgccagctgttacctttggtgcatttattggcacaaaacatcagggcacaacaactacaacaacttgtgctagcaaaccttgctgcctactctcagcaacagcagtttcttccattcaaccaactagctgcattgaactctgcttcttatttgcaacaacaacaactaccattcagccagctatctgctgcctacccccagcaatttcttccattcaaccaactgacagcattgaactcttctgcttatttacagcagcaacaactactaccattcagccagctaggtggtgtgagccctgctacctttttgacacaacca

SEQ ID NO: 22339 - DNA, 359 bp, Zea mays
  Clone ID: LIB3152-023-P1-K1-G8
gggtcttcagaccattagctttatctactccagagcgcagaagaacccgatcgacaccatgagggtgttgctcgttgccctcgctctcctggctctcgctgcgagcgccacctccacgcatacaagcggcggctgcggctgccagccaccgccgccggttcatctaccgccgccggtgcatctgccacctccggttcacctgccacctccggtgcatctcccaccgccggtccacctgccgtcgtcggtccacctgccaccgtcggtccatgtgccgccgccggttcatttgccgtcgtcaccatgccactaccctacttaaccgtcccggtctcagtcttatccccagccacactcat

SEQ ID NO: 22340 - DNA, 378 bp, Zea mays
  Clone ID: LIB3152-023-P1-K1-H1
ttcttccatgggactgctggctccttgttgaccatggggtattctgaaccatcgagccatggctgccaagctgactcgcctccacagtcttcgcgaacgccttggtgccaccttctcctcccatcccaatgaactgatagcactcttttccaggtatgttcaccagggcaagggaatgcttcagcgccatcagctgcttgcggagtttgatgccctgtttgatagtgacaaggagaagtatgcaccctttgaagacattcttcgtgctgctcaggaagcaattgtgctccccccatgggttgcacttgctatcaggccaaggcctggtgtctgggattacattcgggtgaatgtaagtgagctggctgtggaggagct

SEQ ID NO: 22341 - DNA, 346 bp, Zea mays
  Clone ID: LIB3152-023-P1-K1-H10
gcaacatagaaagtggtatccagtttcaacaatagagcaacaatggcgaccaagatattttccctccttatgctccttgctctttctgcatgtgttgctaacgcgacaattttccctcaatgctcacaagctcctatagcttcccttcttcccccataccttccatcaatgatagcttcagtatgtgaaaacccagctcttcaaccctataggctccaacaagcaatcgcagcaagcaacatacctttatcacccttgtttcaacaatcgccagccctatctttggtgcagtcattggtaccaaccaataaggcacagcagctgcagcaactcgggcttcctgtga

SEQ ID NO: 22342 - DNA, 255 bp, Zea mays
  Clone ID: LIB3152-023-P1-K1-H11
cccagccacacccatgcccgtgccttcagccgcatccaagcccgtgccagctgcagggaacctgcggcgttggcagcaccccgatcctgggccagtgcgtcgagtttctgaggcatcagtgcagcccgacggcgacgccctactgctcgcctcagtgccagtcgttgcggcagcagtgttgccagcagctcaggcaggtggagccgcagcaccggtaccaggcgatcttcggcttgggccttcagtccattctgc

SEQ ID NO: 22343 - DNA, 348 bp, Zea mays
  Clone ID: LIB3152-023-P1-K1-H12
agaaagcacaatagtgtaccaacaatggcagccaaaatattttgcctccttatgctccttggtctttctgcaagtgctgctacggcgaccattttcccacaatgctcacaagctcctatagcttcccttcttcccccgtacctctcaccagcggtgtcttcggtatgtgaaaacccaattcttcaaccctataggatccaacaggcaatcgcagctggcatcttacctttatcacccttgttcctccaacaatcatcaggcctattacagcagttacctttggggcatttattggcacaaaacatcagggcacaacaacttcaacaacttgtgcttgcaaacccttgt

SEQ ID NO: 22344 - DNA, 382 bp, Zea mays
  Clone ID: LIB3152-023-P1-K1-H2
caccaagcgaagcacattagcaacaacctaacaacaatggctaccaagatattatccctccttgcgcttcttgcgctttttgcgagcgcaacaaatgcgttcattattccacaatgctcacttgctccaagttccattattacacagttcctcccaccagttacttcaatgggcttcgaacacccagctgtgcaagcctataggctacaacaagcaattgcggcgagcgtcttacaacaaccaatttcccagttgcaacaacaatccttggcacatctaacaatacaaaccatcgcaacgcaacagcaacaacaattcctaccagcactgagccacctagccatggtgaaccctgccgcctacttgcaacagcagttgcttg

SEQ ID NO: 22345 - DNA, 379 bp, Zea mays
  Clone ID: LIB3152-023-P1-K1-H3
caacaagcaacatagaaagtggaattcagtagtaacaatagagcaacaatggcgaccaagagtatttttcctccttatgctccttgctctttctgcatgtgttgctaacgcgacaattttccctcaatgctcacaagctcctatagcttcccttcttcccccataccttccatcaatgatagcttcagtatgtgaaaacccagctcttcaaccctataggctccaacaagcaatcgcagcacgcaacatacctttatcacccttgtttcaacaatcgccagccctatctttggtgcagtcattggtacaaaccatcagggcacagcagctgcagcaactcgtgctacctgtgatcaaccaagtagctctggcaaacctt

SEQ ID NO: 22346 - DNA, 376 bp, Zea mays
  Clone ID: LIB3152-023-P1-K1-H4
tatcagtaccatcaatcatcattcattttagttgtataggcaccaaatcaaatctgcaacatcaattatctaactccaaaaaccatgaagctggtgcttgtggttcttgctttcattgctttagtatcaagtgtttcttgtacacagacaggcggctgcagctgtggtcaacaacaaagccatgagcagcaacatcatccacaacaacatcatccacaaaaacaacaacatcaaccaccaccacaacatcaccagcagcagcaacaccaacaacaacaagttcacatgcaaccacaaaaacattagcaacaacaagaagttcatgttcaacaacaacatcatcaaccgcagcacctacaacaacaacaacaacagc

SEQ ID NO: 22347 - DNA, 379 bp, Zea mays
  Clone ID: LIB3152-023-P1-K1-H5
ggttctccgacgaggccgtggagtggagacttccctccgcgccggccgtcgaggaggtggatgggccggacggggtcgacgtcgtccccgccgaaggcgcgttcgggttcgacaccggcgtcagggacgtggagctggttgggccggtggagctcaagcttgctggcaaccaggacggtagcctcgtcgagctccagttaccttcggggaatgccacatacacaaggcttaagaggatatttgttgcggatggcattgcattaaaggtcattggtgcacagaaagtttctgtaacccaccctcacagtataggtcttctatcaaatggaagtttgttggctagtaacaacgacctaagccaaatatggcctttgagcta

SEQ ID NO: 22348 - DNA, 165 bp, Zea mays
  Clone ID: LIB3152-023-P1-K1-H6
ccaggctctccgacaaggccgtggagtgtagactttttttcgcgccagacgtcgaggaggtatgctggttggtacggggtcaacggctgctacggcgaccgttttttcagattggtcaccagcgtctatagcgtgccgctttgcgcgccgctggagctcaagcgt

SEQ ID NO: 22349 - DNA, 149 bp, Zea mays
  Clone ID: LIB3152-023-P1-K1-H8
tcgacagccgcatccaagccctttcctttttcagggaacctgcggcgaggggagcagggtctatcctgggccagtgcgctcaagttattagaggcattagagcagtccgactgtgacgccctactgctcgccttagtgccagttgttgc

SEQ ID NO: 22350 - DNA, 371 bp, Zea mays
  Clone ID: LIB3152-023-P1-K1-H9
agaccaactagcaacatagaaagcacaatagagtaccaacaatggcaggcaaagtattttgcctacttatgctcctcggtatttctgcaagtgctgctacagcgaccattttcccgcaatgctcacaagctcctatagcttcccttcttcccccgtacctctcaccagcggtgtcttcggtatgtgaaaacccaattcttcaaccctacaggatccaacaggcaatcgcagctggcatcttacctttatcacccttgttcctccaacaatcatcagccctattacagcagttacctttggtgcatttattggcacaaaacatcagggcacaacaactacaacaacttgtgctagcaaaccttgctgcctac

SEQ ID NO: 22351 - DNA, 241 bp, Zea mays
  unsure at all n locations
  Clone ID: LIB3152-024-P1-K1-A1
agcagcagangaggagganggacgggcgggccgncgcgcagcagcagcagaagaagacgcagccggagcgagccgccgccgccagcagcagaccagacgagccagcacagaagcagcagcagcagcagcggcgggcagcccagggacgcaaccccaaggccaggaggagggcgcagaacaagccggccaagggaggacgcaaccagaaccaggaccaggggcccagcgaccgcaccaaccc

SEQ ID NO: 22352 - DNA, 352 bp, Zea mays
  Clone ID: LIB3152-024-P1-K1-A10
agcattcagaaacacaccaagcgaagcgcactagcaacgacctaacaacaatggctaccaagatattagccctccttgcgcttcttgccctttttgtgagcgcaacaaatgcgttcattattccacaatgctcacttgctcctagtgccattattccacagttcctcccaccagttacttcaatgggcttcgaacacctagctgggcaagccaacatgcaacaacaagcgcttgcggcgagcgttttacaacaaccaaatgcccaattgcaacaacaattcctgccacattttacaattcaagccattacaacgcaacagctacaacagtttctaccagcacttagccacct

SEQ ID NO: 22353 - DNA, 364 bp, Zea mays
  Clone ID: LIB3152-024-P1-K1-A11
gcaacatacatagtgaagtacagtagcaacatcttagcaccaatggcagccaagatttttgccctccttgccctccttgctctttcagcaagtgttgctaccgcgactattattccacaatgctcacaacaatacctctctccggtgacagccgcgagatttgaatacccaactatacaatcctacaggctacaagaggccatcacagcaagcatcttacggtcggtagcattgactgtccaacaaccatatgccctattggaacaaccatccttagggaatctatatcttcaaagaatcggagcacaacaactacaacagcaggtgctttcaacaatcaatcaagtagttgcagcgaaccttg

SEQ ID NO: 22354 - DNA, 154 bp, Zea mays
  Clone ID: LIB3152-024-P1-K1-A12
gacagactagcaacaaactaagcgcctccagattgcagaactggacaccatgaaagtgcggatcataggcctcgctctcctggcgctcgctgtgagcgccgcctccagtacaagcgagtgctcgcaggtgtcagacaccacccgttcatctacc

SEQ ID NO: 22355 - DNA, 366 bp, Zea mays
  Clone ID: LIB3152-024-P1-K1-A3
gcgatttcgatctcgcagccacctttttttttgttctgttgtgtatctagtagttggaggagatatgcagtttgcacttgcattggacacgaactcaggtcctcaccagataagatcttgtgagggtgatgggattgacaggttggaaaaattaagtattgggggcagaaagcaggagaaagctttgagaaataggtgctttggtggtagagttgctgcaactacacaatgtattcttacctcagatgcttgtcctgaaactcttcattctcaaacacagtcctctaggaaaaattatgctgatgcaaaccgtgtatctgctatcattttgggcggaggcactggatcttagctcttttctttgac

SEQ ID NO: 22356 - DNA, 342 bp, Zea mays
  Clone ID: LIB3152-024-P1-K1-A5
cgaacggcagattacatgctgggatcagcagtgcgttgctgagtacaatgatacacattgcaactttagttttataagctgtgagaataatggttctaatgattattctgtgtgggcaaataagacaaaagtatttgccaactgtgatgccactaatagtagtatatcatttaactacgggatgttttctagtgcactgagtaaaggtgctgtatcatctccattccttgagaagtatttcttttgcctatggtggggcttgctgcagcttagttcaagcggaaattcttttgtgacaagtgcatttattacagagaatgcatttgcgatagcaattggtgc

SEQ ID NO: 22357 - DNA, 360 bp, Zea mays
  Clone ID: LIB3152-024-P1-K1-A8
gcttatttacagcagcaacaactactaccattcagccagctagctggtgtgagccctgctaccttcttgacacaaccacagttgttgccgttctaccagcacgctgcgcctaacgctggcaccctcttacaactgcaacaattgctgccattcaaccaacttgctttgacaaacctagcagtgttctaccaacaacccatcattggtggtgccctcttttagatttcttatgagttatagttcaataataaagttttttgtctgatgtttgtggcttcccagaaataagaaagtacatttcttaaataaaaaaatatattataatttatttttattttatataaatttattaataaaaat

SEQ ID NO: 22358 - DNA, 369 bp, Zea mays
  Clone ID: LIB3152-024-P1-K1-A9
aatattttgagcattcagaaacacaccaagcgaagcacattagcaacaacctaacaacaatggctaccaagatattatccctccttgcgcttcttgcgctttttgcgagcgcaacaaatgcgttcattattccacaatgctcacttgctccaagttccattattacacagttcctcccaccagttacttcaatgggcttcgaacacccagctgtgcaagcctataggctacaacaagcaattgcggcgagcgtcttacaacaaccaatttcccagttgcaacaacaatccttggcacatctaacaatacaaaccatcgcaacgcaacagcaacaacaattcctaccagcactgagccacctagccatgg

SEQ ID NO: 22359 - DNA, 360 bp, Zea mays
  Clone ID: LIB3152-024-P1-K1-B10
gagcattcagaaacacaccaagcgaagcgcactagcaacgacctaacaacaatggctaccaagatattagccctccttgcgcttcttgccctttttgtgagcgcaacaaatgcgttcattattccacaatgctcacttgctcctagtgccattattccacagttcctcccaccagttacttcaatgggcttcgaacacctagctgtgcaagccaacatgcaacaacaagcgcttgcggcgagcgtcttacaacaaccaattgcccaattgcaacaacaatccttgccacatctaacaattcaagccattacaacgcaacagcaacaacagtttctaccagcactgagccacctagccatg

SEQ ID NO: 22360 - DNA, 291 bp, Zea mays
  Clone ID: LIB3152-024-P1-K1-B11
cggacgcgtgggagaaagaagaggaagagcagaagcgggtacaaaaggatcaagtgagaagacaagagaggaaaaaccgtgatgggtttcgtaaaatgctggaagaacatgttgctgatggcacacttaatgcaagaactcggtggcgtgattactgtgcacagataaaagattcacagtcctacttggctgtagcgtcgaacacatctggctctacaccgaaagagttatttgatgacgtgatcgaggaacttgacaaacagtttcaagaagacaagacccaaatttaag

SEQ ID NO: 22361 - DNA, 366 bp, Zea mays
  Clone ID: LIB3152-024-P1-K1-B12
agcgaagcgcactagcaacaacctatacaacaatggctaccaagatattagccctccttgcgcttcttgcccttttagtgagcgcaacaaatgcgttcattattccacagtgctcacttgctcctagtgccattattccacagttcctcccaccagttacttcaatgggcttcgaacatccagccgtgcaagcctacaggctacaactagcgcttgcggcgagcgtcttacaacaaccaattgcccaattgcaacaacaatccttggcacatctaaacctacaaaccatcgcaacgcaacagcaacaacagtttctgccattactgagccacctagcccgggtgaaccctgtcgcctacttgcaac

SEQ ID NO: 22362 - DNA, 370 bp, Zea mays
  Clone ID: LIB3152-024-P1-K1-B3
cttcggtatgtgaaaacccaattcttcaaccctacaggatccaacaggcaatcgcagctggcatcttacctttatcacccttgttcctccaacaatcatcagccctattacaacagttacctttggtgcatttattggcacaaaacatcagggcacaacaactacaacaacttgtgctagcaaaccttgctgcctactctcagcaacagcagtttcttccattcaaccaactaggttcattgaactctgcttcttatttgcaacaacaacaactaccattcagccagctacctgctgcctacccccagcaatttcttccattcaaccaactagcagcattgaactctcctgcttatttacagcagcaaca

SEQ ID NO: 22363 - DNA, 295 bp, Zea mays
  Clone ID: LIB3152-024-P1-K1-B4
agctcatcgactccagattggagaactcgacaccatgaaggtgctgatcgttgcccttgctctcctggcgctcgctgcgagcgccgcctccagtacaagcggcggctgtggctgccagacaccaccgtttcatctaccgcctccgttctatatgccgcctccgttctatctgccgccgcagctaagcccgtgccagcagttcggatcctgcggcgtcggcagcgtcggcagcccgttcctgggccagtgcgtcgagttcctgaggcaccagtgcagcccggcggcgacgccctac

SEQ ID NO: 22364 - DNA, 152 bp, Zea mays
  Clone ID: LIB3152-024-P1-K1-B6
attgataccaactagcaacatacatagtgtagtacactagcaacatcttagcaccaatgggagccaagatttttgccctccttgccctccttgctctttcagcaagcgctgctacctcgacttttattccacaatgctcacaacaatacctc

SEQ ID NO: 22365 - DNA, 108 bp, Zea mays
  unsure at all n locations
  Clone ID: LIB3152-024-P1-K1-B7
tcgcaagtacttggccagtccctctactgtttccaaatcntggaacatgcnttcagcgggcatagggacttcttctgtggctcatcgaagtgggatgaaacattggaa

SEQ ID NO: 22366 - DNA, 365 bp, Zea mays
  Clone ID: LIB3152-024-P1-K1-B8
attgagaccaacaagcaacatagaaagtggaatccagtagcaacaatagagcaacaatggcgaccaagatattttccctccttatgctccttgctctttctgcatgtgttgctaacgcgacaattttccctcaatgctcacaagctcctatagcttcccttcttcccccataccttccatcaatgatagcttcagtatgtgaaaacccagctcttcaaccctataggctccaacaagcaatcgcagcaagcaacatacctttatcacccttgtttcaacaatcgccagccctatctttggtgcagtcattggtacaaaccatcagggcacagcagctgcagcaactcgtgctacctgtgatcaac

SEQ ID NO: 22367 - DNA, 363 bp, Zea mays
  Clone ID: LIB3152-024-P1-K1-B9
gaccaactagcaacatagaaagcacaatagtgtaccaacaatggcagccaaaatattttgcttccttatgctccttggtctttctgcaagtgctgctaccgcaaccattttcccacaatgctcacaagctcctatagcttcctttcttcccccatacctctcaccagcggtgtcttcagtatgtgaaaacccaattcttcaaccctacaggatccaacaggcaatcgcagcaggcatcttacctttatcacccttgttcctccaacaaccgtcagccctattacagcagttacctttggtgcatttgttggcacaaaacatcaaggcacaacaactacaacaacttgtgctaggaaaccttgc

SEQ ID NO: 22368 - DNA, 364 bp, Zea mays
  Clone ID: LIB3152-024-P1-K1-C1
gcgaagcgcactagcaacaacctaacaacaatggctaccaagatattagccctccttgcgcttcttgcccttttagtgagcgcaacaaatgcgttcattattccacagtgctcacttgctcctagtgccattattccacagttcctcccaccagttacttcaatgggcttcgaacatccagccgtgcaagcctacaggctacaactagcgcttgcggcgagcgtcttacaacaaccaattgcccaattgcaacaacaatccttggcacatctaaacctacaaaccatcgcaacgcaacagcaacaacagtttctgccatcactgagccacctagccgtggtgaaccctgtcgcctacttgcaac

SEQ ID NO: 22369 - DNA, 317 bp, Zea mays
  Clone ID: LIB3152-024-P1-K1-C10
aagcaacatagaaagtggaatccagtagcaacaatagagcaacaatggcgaccaagatattttccctccttatgctccttgctctttctgcatgtgttgctaacgcgacaattttccctcaatgctcacaagctcctatagcttcccttcttcccccataccttccatcaatgatagcttcagtatgtgaaaacccagctcttcaaccctataggctccaacaagcaatcgcagcaagcaacatacctttatcacccttgtttcaacaatcgccagccctatctttggtgcagtcattggtacaaaccattagggca

SEQ ID NO: 22370 - DNA, 339 bp, Zea mays
  Clone ID: LIB3152-024-P1-K1-C11
gcgccctaaatgttgaccggccgtcggtgatggaagaggcggtaatgatggcgcctgcggcggtgagtagtgccgtagtaggggaccccatggagtacaatgccatactgaggaggaagctggaggaggacctcgaggccttcaaaatgtggagggcggcctccagtgttgtgacctcagatcaacgttctcaaggcttaaacaatcacactggaggtagcagcatcaggaataatccagtgcagaacaagctgatgaacggcgaagatccaatcaacaataaccacgcttaaaccgcaagccttggcgtgaggcttgctactaactttttcttgagag

SEQ ID NO: 22371 - DNA, 335 bp, Zea mays
  Clone ID: LIB3152-024-P1-K1-C12
gctccttgctctttctgcatgtgttgctaacgcgacacttgtacgtgaaggctgacaagctcgtatagctggccttctttccccataccttccatcaatgatagcttcagtgtgtgaaaacccagctcttcaaccctataggctccaacaagcaatcgcagcaagcaacatacctgtatcacccttggttcaacaatcgccagccctatctttggtgcagacattggtacaaaccatcagggcacaacagctgcagcaacttgtgctacctgtgaacaaccaagcaggtctggcaaacctttctccctactgtcaacaacaaccatttttttcat

SEQ ID NO: 22372 - DNA, 146 bp, Zea mays
  Clone ID: LIB3152-024-P1-K1-C2
caactagcaacatagaaagcacaatagtgtaccaacaatggcagctaaaatattttgcctccttatgctccttggtctttctgcaagtgctgctacggcgaccatttttccacaatgctcacaagctcctatagctttccctttct

SEQ ID NO: 22373 - DNA, 361 bp, Zea mays
  Clone ID: LIB3152-024-P1-K1-C3
gtggaatccagtagcaacaatagagcaacaatggagaccaagatattttccctccttatgctccttgctctttctacatgtgttgctaacgcgacaattttccctcaatgctcacaagctcctatagcttccctttttcccccataccttccatcaattatagcttcagtatgtgaaaacccagctcttcaaccatataggcttcaacaagcaatcgcagcaagcaacatacctttatcgcccttgttgtgtcaacaatcgccagccctatctttggtgcagtcattggtacaaaccatcagggcacaacagctgcagcaactcgtgctacctgtgatcaaccaagtagctctggcaaacc

SEQ ID NO: 22374 - DNA, 320 bp, Zea mays
  Clone ID: LIB3152-024-P1-K1-C4
agaaagtggtatacagctgcaacattatatcatcaatggcggccaagatatgttccatgcttatgctccttgctctttctgcatgtagcgctaacgcgaccatttttcctcaatactcacaagctcctatagctgcccttcttcccccatacctttcatcaatgaccgcttcagtatgtgaaaacccagcccttcaaccctacaggctccaacaagcaattcgcacaagcaacttacctttattacccctgttttttcaaccaatggcagccctatctttggtgcattcattggtaccaaccattagggcacaacaggtg

SEQ ID NO: 22375 - DNA, 276 bp, Zea mays
  Clone ID: LIB3152-024-P1-K1-C5
gaaagtggaatccagtagcaacaatagatcaacaatggcgaccaagatattttccctccttatgctccttgctctttctgcatgtgttgctaacgcgacaattttccctcaatgctcacaagctcctatagcttcccttcttcccccataccttccatcaatgatagcttcagtatgtgaaaacccagctcttcaaccctataggctccaacaagcaatcgcagcaagcaacatacctttatcacccttgtttcaacaatcgccagccctatcttt

SEQ ID NO: 22376 - DNA, 310 bp, Zea mays
  Clone ID: LIB3152-024-P1-K1-C6
atagaaagtggaatccagtagcaacaatttagcaacaatggcgaccaagatattgggcctccttatgctccttgctctttctgcatgtgttgctaacgcgacaattttcccttaatgctcacaagctcctatagctttccttcttgccccataccttccatcaatgatagcttctgtatgtgaaaacccagcttctcaaccctataggcttcaaccaggaatcgcgagaagcaacaaacctttattacccttgttttaacaatctccagcccctttcttttggtccaattatttggttcaaaaccaatta

SEQ ID NO: 22377 - DNA, 365 bp, Zea mays
  Clone ID: LIB3152-024-P1-K1-C8
atttagaccaactagcaacatatttagcacaatagtgtaccaacaatggcagccaaaatattttgcctccttatgctccttggtatttctgcaagtgctgctacggcgaccattttcccgcaatgctcacaagctcctatagcttcccttcttcccccgtaccttttaccagcggtgtcttcggtatgtgaaaacccaattcttcaaccctacaggatccaacaggcaatcgcagctggcatcttacctttatcacccttgttcctccaacaatcattagccctattacagcagttacctttggtgcatttattggcacaaaacattagggcacaacaactacaacaacttgtgctagcaaacct

SEQ ID NO: 22378 - DNA, 366 bp, Zea mays
  Clone ID: LIB3152-024-P1-K1-C9
caaatgcgtccattattccacaatgctcacttgctcctagttccattattccacagttcctcccaccagttacttcaatggccttcgaacacccagctgtgcaagcctataggctacaacaagcgattgcggcgagcgtcttacaacaaccaattgcccaattgcaacaacaatccttggcacatctaacaatacaaaccatcgcaacgcaacagcaacaacagttcctaccagcactgagccacctagccatggtgaaccctgtcgcctacttgcaacagcagctgcttgcatccaacccacttgctctagcaaacgtagttgcaaaccagcaacaacaacaactgcaacagtttttggcagcgc

SEQ ID NO: 22379 - DNA, 352 bp, Zea mays
  Clone ID: LIB3152-024-P1-K1-D1
gcaacatagaaagcacaatagtgtaccaacaatggcagccaaaatattttgcctgcttatgctccttggtatttctgcaagtgctgctacggcgaccattttcccgcaatgctcacaagctcctatagcttcccttcttcccccgtacctctcaccagcggtgtcttcggtatgtgaaaacccaattcttcaaccctacaggatccaacaggcaatcgcagctggcatcttacctttatcacccttgttcctccaacaatcatcagccctattacagcagttacctttggtgcatttattggcacaaaacatcagggcacaacaactacaacaacttgtgctagcaaacctt

SEQ ID NO: 22380 - DNA, 349 bp, Zea mays
  Clone ID: LIB3152-024-P1-K1-D10
attgagaccaactagcaacatagaaagcacaatagtgtaccaacaatggcagccaaaatattttgcctccttatgctccttggtctttctgcaagtgctgctacggcgaccattttcccgaaatgctcgcaagctcctatagcttcccttcttccctcgtacctctcaccagcggtgtctttggtatgtgaaaacccaattcttcaaccctacaggatccaacaggcaatcacagcttgcatcttacctttattacccttggtccttcaacaatcattagccctattacatcagttacctttggtgcatttattggcacaaaacattagggcacaacagctacaacaac

SEQ ID NO: 22381 - DNA, 128 bp, Zea mays
  Clone ID: LIB3152-024-P1-K1-D11
cagaccattagctttatctactccagagcgcagaagaacccgatcgacaccatgagggtgttgctcgttgccctcgctctcctggctctcgctgcgagcgccacctccacgcatacaaagcggcggct

SEQ ID NO: 22382 - DNA, 240 bp, Zea mays
  Clone ID: LIB3152-024-P1-K1-D12
aattagctcatcgactccagattggagaactcgacaccatgaaggtgctgatcgttgcccttgctctcctggcgctcgctgcgagcgccgcctccagtacaagcggcggctgtggctgccagacaccaccgtttcatctaccgcctccgttctatatgccgcctccgttctatctgccggcgcaacagcagccgcagccatggcaataccccactcaaccaccgcagctaaacccgggcc

SEQ ID NO: 22383 - DNA, 265 bp, Zea mays
  Clone ID: LIB3152-024-P1-K1-D2
ttccattattccacagttcctcccaccagttacttcaatggccttcgaacacccagctgtgcaagcctataggctacaacaagcgattgcggcgagcgtcttacaacaaccaattgcccaattgcaacaacaatccttggcacatctaacaatacaaaccatcgcaacgcaacagcaacaacagttcctaccagcactgagccacctagccatggtgaaccctgtcgcctacttgcaacagcagctgcttgcattcaacccactt

SEQ ID NO: 22384 - DNA, 352 bp, Zea mays
  Clone ID: LIB3152-024-P1-K1-D3
gcaacatagaaagcacaataagtgttctcttcaatggcagccaaaatattttgcctgcttatgctccttggtctttctgcaagtgctgctacggcgaccatttttccgaaatgctcgcaagctcctatagctttccttcttcccccgtacctctcaccagcggtgtcttcggtatgtgaaaacccaattcttcaaccctacaggatccaacaagcaatcacagctggcatcttacctttattaccctttgtttctccaacaaatcattagtcctattacatcagttaccctttggtgcatttattggcacaaaacaatatgggtcaaccacctccacaacctgtgcttgcaa

SEQ ID NO: 22385 - DNA, 371 bp, Zea mays
  Clone ID: LIB3152-024-P1-K1-D4
cgagcgtcttacaacaaccaattgtccaattgcaacaacaatccttgccacatctaacaatacaagccatcacaacgcaacagcaacaacagttcctaccagcactgagccacctagccatggtgaaccctgccgcctacttgcaagagcagctgcttgcatccaacccacttgctctggcgaacgtagttgcaaaccagcaacaacaacagctacaacagtttctgccaacgctcagtcaactagccatggtgaaccctggcggctacgtacaacaacaacaactgctttcatctagcccgctcgctgtgggcaatgcacctacatacctgcaacaacaattggtgcaacagattgtaccagctctgact

SEQ ID NO: 22386 - DNA, 242 bp, Zea mays
  Clone ID: LIB3152-024-P1-K1-D5
gtgaaccctgccgcctacttgcatcagcagttgcttgcatcaaacccacttgctctggcaaacgtagttgcaaaccagccacaacaacagctgcaacagtttctgccagcgctcagtcaactagccatggtgaaccctgccgcctacctacaacagcaacaactgctttcatctagcccgctcgctgtggccaatgcacctacatacctgcaacaacaattgttgcaacagattgtaccagc

SEQ ID NO: 22387 - DNA, 345 bp, Zea mays
  Clone ID: LIB3152-024-P1-K1-D6
caacaacaacagctacaacagtttctgtcaacgctcagtcaactagccatggtgaaccctgccgcctacgtacaacaacaacaactgctttcatctagcccgctcgctgtgggcaatgcacctacatacctgcaacaacaattgttgcaacagattgtaccagctctgactcaactagctgtggcaaaccctgttgcctacttgcaacagctgctttcattcaaccaactgactttgtcgaactctgctgcgtacctacaacagcgacaacaggtacttaatccattggtaggggctaacccattggtcggcggctttctacaggagcaacaattgctggcatac

SEQ ID NO: 22388 - DNA, 229 bp, Zea mays
  Clone ID: LIB3152-024-P1-K1-D7
attgatacacactcccatcatattttgctaacaacaacctaacaacaatgggtaccaagatattattccttcttgcgcttcttgcgctttttgcgagcagcaacaaacgcggctattattacacacagttcactagcttctaatcaatttatatcaagatcaccgctccagatacttcaatggcctttgaacacctccttcgtggagccgatgcgcttcaacaagcgat

SEQ ID NO: 22389 - DNA, 294 bp, Zea mays
  Clone ID: LIB3152-024-P1-K1-D8
gtggaatccagtagcaacaatagatcaacaatggcgaccaagatattttccctccttatgctccttgctctttctgcatgtgttgctaacgcgacaattttccctcaatgctcacaagctcctatagcttcccttcttcccccataccttccatcaatgatagcttcagtatgtgaaaacccagctcttcaaccctataggcttcaacaagcaatcgcagcaagcaacatacctttatcacccttggttcaacaatcgccagccctatctttggtggcatcattggtaccaacc

SEQ ID NO: 22390 - DNA, 128 bp, Zea mays
  Clone ID: LIB3152-024-P1-K1-E10
attgataccaactagcaacatacatagtgaagtacactagcaacatcttagcaccaatgggagccaagatttttgccctccttgccctccttgctctttagcaagcgctggtacctgactttatccac

SEQ ID NO: 22391 - DNA, 119 bp, Zea mays
  Clone ID: LIB3152-024-P1-K1-E11
attttgagcattcagaaacacaccagcgagcgcactacacgacctaacaacaaggctaccagatatagccctctggcttttgccctttggagcgcacaagcttcattttcaatgctact

SEQ ID NO: 22392 - DNA, 328 bp, Zea mays
  Clone ID: LIB3152-024-P1-K1-E12
tagcaacatagaaagcacaatagtgtaccaacaatggcagccaaaatattttgcttccttatgctccttggtctttctgcaagtgttgctaccgcaaccattttcccacaatgctcacaagctcctatagcttcccttcttcccccatacctctcaccagcggtgtctttaatgtgtgaaaacccaattggtcaaccctacaagatccaacaggcaatcgcaacaagcattttaccattatcacccttggttcttcaacaaccgtcaggcctattacagcaggtacctttggtccatttggtggcacaaaacattaaggcacaacaac

SEQ ID NO: 22393 - DNA, 340 bp, Zea mays
  Clone ID: LIB3152-024-P1-K1-E4
cccacgcgttcggaggaggagggcgatgtcgccaccgcgttcaccctcgcgcgcattctctcgatgatccccaagtcgcgcggcgggcctaccagcgtcgtcatctacgacatccacgcgctccaggagaggttttacttcggggacgatgtcctgccatgctttgagacagggatcccgctcctggtgcagcgccttcgccagcttccggacgcagaaaatatcaccattgcctttccagatgacggggcgtggaagcgggttcacaagctgttacagcacttttccatggtaggctggtacaaggttcgggaaggtgacaagagaatagtccgtataa

SEQ ID NO: 22394 - DNA, 367 bp, Zea mays
  Clone ID: LIB3152-024-P1-K1-E6
tagcaacatagaaagcacaatagtgtaccaacaatggcagccaaaatattttgcttccttatgctccttggtctttctgcaagtgctgctaccgcaaccattttcccacaatgctcacaagctcctatagctttctttctttccccatacctctcaccagcggtgtcttcagtatgtgaaaacccaattctttaaccctacaggatccaacaggcaatcgcagcaggcatcttacctttatcacccttggttcttcaacaaccgtcagtcctattacagcaggtacctttggtgcctttggtggcacaaaacattaaggtacaacaacttcaacaacttttgcttggaaacctttgttgctactttt

SEQ ID NO: 22395 - DNA, 162 bp, Zea mays
  Clone ID: LIB3152-024-P1-K1-E8
cccacgcgtccgcccacgcgtcctttacaatagtgtaccaacaatggcagccaaaatattttgcttccttatgctccttggtctttctgcaagtgttgctaccgcaaccattttcccacaatgctcacaagctcctatagcttccctttcttcctcccatac

SEQ ID NO: 22396 - DNA, 205 bp, Zea mays
  Clone ID: LIB3152-024-P1-K1-E9
ggatgaacaaggtaggatttcacaggttggggtgatggctatagcccaaggctgccctgagttgacatactgggcaatatatgtatcggacattacaaatgcagctctagaggcggttggtacatgcagcagaaatcttaatgatttccgccttggccttcttgatagagaagcacatataactgagttgccactgggacatggg

SEQ ID NO: 22397 - DNA, 245 bp, Zea mays
  Clone ID: LIB3152-024-P1-K1-F1
gcaacatagaaagcacaatagtgttccaacaatggcagccaaaatattttgcttccttatgctccttggtctttctgcaagtgttgctaccgcaaccattttcccacaatgctcacaagctcctatagcttcccttcttcccccatacctctcaccagcggtgtcttcaatgtgtgaaaacccaattgttcaaccctacaggatccaacaggcaatcgcaacaagcatcttaccattatcaccct

SEQ ID NO: 22398 - DNA, 287 bp, Zea mays
  Clone ID: LIB3152-024-P1-K1-F10
gcaacatagaaagtggaatacagtagcaacaatagagcaacaatggcggccaagatattttccatccttatgctccttgctctttctgcatgtgttgctaacgcgaccatttttcctcaatactcacaagctcctatagctgcccttctttccccataccttccatcaatgaccggttcagtatgtgaaaacccaacccttcaaccctaccggctccaacaaggcaatcgcacaaggcacttacctttattacccctggtctttcaacaatcgccaggcctatcttt

SEQ ID NO: 22399 - DNA, 131 bp, Zea mays
  Clone ID: LIB3152-024-P1-K1-F11
caacaagcaacatagaaagtggaattcagtagcaacaatagagcaacaatggcgaccaagatattttccctccttatgctccttgctctttctgcatgtgttgctaacgcgacaatttccctaatgctcac

SEQ ID NO: 22400 - DNA, 357 bp, Zea mays
  Clone ID: LIB3152-024-P1-K1-F12
aaatgacgcagagaaggttgtgaagattggaggcaatgtgctgcgcgaaggtgagtggctatcgctgaatggatcgaccggcgaagtgatcctcggaaagcagccgctctccccaccagccctcagtggcgatctgggaacattcatgtcctgggtggatgacgttagaaagctcaaggtcctggcaaacgcggatacccctgaggatgcattggctgcaccgaacaaccgggcaaaaagaatcgggttatgcccgacagagcacatgttcttcgcttcggatgagaggattaaagctgtgaggcagatgattattgcttccacagttgagctgaggcagcaagcgctggatcgcct

SEQ ID NO: 22401 - DNA, 75 bp, Zea mays
  Clone ID: LIB3152-024-P1-K1-F4
gcaattagctcatcgaatccagattgtttaactcgccaccataaaggagcggatcgttgtccttgctctcctggc

SEQ ID NO: 22402 - DNA, 196 bp, Zea mays
  Clone ID: LIB3152-024-P1-K1-F5
cggacgcgtggggaaaccatgacatgggatgatgtggatgcaataggcaaccctccttctccaaggtcagatcatgctgctgcttgccatgctgaccgctatcttttaatttttggtggggggtctcatgcaacatgttttaatgacctacatgttcttgattggcagacgatggaatggttaagacccaaacaac

SEQ ID NO: 22403 - DNA, 103 bp, Zea mays
  Clone ID: LIB3152-024-P1-K1-F6
gtgaatcgcacatagactccagttttgttgtactctcaccaaaaaggaacggatccgtgctcttgctctcttggcgctttgctgttgcgccagcaccagtaca

SEQ ID NO: 22404 - DNA, 300 bp, Zea mays
  Clone ID: LIB3152-024-P1-K1-F9
cagaaacacaccaagcgaagcgcactagcaacaacctaacaacaatggctaccaagatattatccctccttgcgcttcttgcgctttttgcgagcgcaacaaatgcgtccattattccacaatgctcacttgctcctagttccattattccacagttcctcccaccagttacttcaatggccttcgaacacccagctgtgcaagcctataggctacaacaagcgattgcggcgagcgtcttacaacaaccaattgcccaattgcaacaacaatccttggcacatttaacaatacaaacca

SEQ ID NO: 22405 - DNA, 278 bp, Zea mays
  Clone ID: LIB3152-024-P1-K1-G1
accatgtaactaatttttttgcgccaagtagtcgttttggtaccccagaagatttgaagtctttgattgatagagcacatgagcttggtttgctagttctcatggatgtggttcatagtcatgcgtcaagtaatactctggatgggttgaatggttttgatggtacagatacacattactttcacagtggtccacgtggccatcactggatgtgggattctcgcctatttaactatgggaactgggaaagtttaaagattctttttttcaatgctaga

SEQ ID NO: 22406 - DNA, 347 bp, Zea mays
  Clone ID: LIB3152-024-P1-K1-G10
tccacatcggccaggccggtatccaggtcggaaacgcgtgctgggagctgtactgccttgagcatggcattcaggctgacggtcagatgcccggtgacaagaccattgggggaggtgatgatgctttcaacaccttcttcagtgagactggtgctgggaagcacgtgccccgtgctgtttttgttgaccttggacccactgtcatcgatgaggggagaactggcacctaaccgcaggtttttcacccttggcagcttaataatgggaaggaggatgcagccaacaactttgcccgtggtcactacaccattggcaaggagaatggtgacctgtgccttgatcgcatt

SEQ ID NO: 22407 - DNA, 365 bp, Zea mays
  Clone ID: LIB3152-024-P1-K1-G11
ggagccgaagctgtagaaactttcgtgctagccgcagcaagagtcacagccctgttgctagcagtaggcatgaaaaggctgctgttatttcaggatctactcaacctaacttggggtatgcagagcacaaaagccctccaagatctcactctggggatgaccatgtgaaccaccctgaccaaaaggatgaccacatgggaaatgggaagatggaaagggttgatcttgattgctcgcccagcccacaatatgacaaggctgcttcatatagtcctgcgtacaatggcaaagccagggactcgatgagtcctaatggtcagccaaaagcagatgccaaatatgtcaaaccttctgggaaacctgag

SEQ ID NO: 22408 - DNA, 355 bp, Zea mays
  Clone ID: LIB3152-024-P1-K1-G3
gaaagcacaatagtgtaccaacaatggcagccaaaatattttgcctccttatgctccttggtctttctgcaagtgctgctacggcgaccattttcccgaaatgctcgcaagctcctatagcttcccttcttcccccgtacctctcaccagcggtgtcttcggtatgtgaaaacccaattcttcaaccctacaggatccaacaggcaatcacagctggcatcttacctttatcacccttgttccttcaacaatcatcagccctattacatcagttacctttggtgcatttattggcacaaaacattaaggcacaacaactacaacaacttgtgctagcaaaccttgctggctactt

SEQ ID NO: 22409 - DNA, 337 bp, Zea mays
  Clone ID: LIB3152-024-P1-K1-G4
gcaacatagaaagcacaatagtgtaccaacaatggcagccaaaatattttgcctccttatgctccttggtctttctgcaagtgctgctacggcgaccattttcccgaaatgctcgcaagctcctatagctttccttctttccccgtacctctcaccagcggtgtcttcggtatgtgaaaacccaattcttcaaccctacaggatccaacaggcaatcacagctggcatcttacctttatcacccttggtcctccaacaatcatcagccctattacatcaggtacctttggtgcatttattggcacaaaacattaaggcgcaacaactaccacaactt

SEQ ID NO: 22410 - DNA, 360 bp, Zea mays
  Clone ID: LIB3152-024-P1-K1-G5
gactgcttcaaacgtaccattaaggatgaaggtttctcttccttgtggaggggtaacactgctaatgttattcgttacttccctactcaggctttgaactttgcatttaaggactacttcaagaggttgttcaacttcaaaaaagatagggatggctattggaagtggtttgctggcaacctggcctctggtggtgctgctggtgcttcctctttggtttttgtgtactccctggactacgcgagaacaaaggtggcttatgacgccaaagctgccaagggaggaggtgaaaggcagttcaatgggcttgtcgatgtctaccgcaagacactcaagtctgatggtattgctgggctttac

SEQ ID NO: 22411 - DNA, 368 bp, Zea mays
  Clone ID: LIB3152-024-P1-K1-G6
aacacaccaagcgaagcgcactagcaacaacctaacaacaatggctaccaagatattagccctccttgcgcttcttgcccttttagtgagcgcaacaaatgcgttcattattccacagtgctcacttgctcctagtgccattattccacagtttctcccaccagttacttcaatgggcttcgaacatccagccgtgcaagcctacaggctacaactagcgcttgcggcgagcgtcttacaacaaccaattggccaattgcaacaacaatccttggcacatctaaacctacaaaccattgcaacgcaacagcaacaacaggttctggcatcactgagccacctagccggggtgaaccctgtcgcctact

SEQ ID NO: 22412 - DNA, 113 bp, Zea mays
  unsure at all n locations
  Clone ID: LIB3152-024-P1-K1-G7
tcggtgtgaatccagtagncaacatttgagcaacaatggtgaccaagatatttggggtgcttatgctccttgctctttctgcatggggtgctaacgcgacaatttttttaatg

SEQ ID NO: 22413 - DNA, 308 bp, Zea mays
  Clone ID: LIB3152-024-P1-K1-G8
cagaccattagctttatctactccagagcgcagaagaacccgatcgacaccatgagggtgttgctcgttgccctcgctctcctggctctcgctgcgagcgccacctccacgcatacaagcggcggctgcggctgccagccaccgccgccggttcatctaccgccgccggtgcatctgccacctccggttcacctgccacctccggtgcatcttccaccggcggtccacctgccgccgccggtccacctgccaccgccggtccatgtgccgccgccggttcatctggcggcggcaccatgccactaccc

SEQ ID NO: 22414 - DNA, 309 bp, Zea mays
  Clone ID: LIB3152-024-P1-K1-G9
agaaggcccattatggtcccaccattggcggccaaaatttttggcctcctaaggctcctgggcctttttgcaggggctgttccggcgcccattttcccgaatggttggcaggctccattggcttccttttttccccggaccctttaaccagcggggttttgggtttgggaaaccccaatttttaaaccttccaggtcccaccaggcaatcccagttggcatttaacctttatcacccttgttcctccaacattaatcagccctattacaccagttaccttgggggctttaattggcccaaaacattagg

SEQ ID NO: 22415 - DNA, 337 bp, Zea mays
  Clone ID: LIB3152-024-P1-K1-H10
cacaaacgccggcgcaaactcttgtccgagcccgacagatcttcaattccccattccgcccaccgatcgaccttcacgccagtctcggtctcttccgaaggcgtcgcgcgcggttgtttgagaggagaggaggaagatgagggagtgcatcttcgtccacatcgggcaggccggcatccaagtcggcaacgcgtgctgggaactttactgcctcgagcacggcatccagcctgatggccaagtgcctggagataagaccgcgggacatcacgatgatgccttcagcaccttcttcagccagactggtgctgggaagcacgttccccgggcaatcttt

SEQ ID NO: 22416 - DNA, 371 bp, Zea mays
  unsure at all n locations
  Clone ID: LIB3152-024-P1-K1-H11
ctgctatctacttgcaggctctaacagctactaccatttaaccaacttggggggagcccttatgcctttttactgcaacaacagcatctaccattccatctgcaagctgtggcaaacattgctgctttcttgagacaacaacattttgttgccatttttacccacaaggttgtgggaaacattaatgccttctcttgcaacagcgaacatttgcaaccatnctacccacagaatgtggcaaacatttgttgccttcttacaacaactacaaatagtgccatttatccaacatgcttttacgaattctaccaccttatttgaaccgtccaccattggtggggtcaatatctataattatttatggatgtata

SEQ ID NO: 22417 - DNA, 367 bp, Zea mays
  Clone ID: LIB3152-024-P1-K1-H12
accccgtcatcgatctcgtttcaaatccatccatcctcgtttcctccgtcccgcagcatctcaaccccatggccaagatcaagatcgggatcaatgggttcggcaggatcggaaggctggtggccagggtggccctgcagagtgacgatgtcgagctcgtcgccgtgaacgaccccttcatcagcaccgactacatgacctacatgttcaagtacgacactgtgcacggacagtggaagcaccatgaagtcaaggtgaaggactccaaaacccttctttttggtgagaaggaggttgctgtgtttggctgcaggaacccttgggagatcccgtggggttcgggtggtgctgaatattttgttgagtc

SEQ ID NO: 22418 - DNA, 366 bp, Zea mays
  Clone ID: LIB3152-024-P1-K1-H2
attcagaaacacaccaagcgaagcgcactagcaacaacctaacaacaatggctaccaagatattagccctccttgcgcttcttgcccttttagtgagcgcaacaaatgcgttcattattccacagtgctcacttgctcctagtgccattattccacagttcctcccaccagttacttcaatgggcttcgaacatccagccgtgcaagcctacaggctacaactagcgcttgcggcgagcgtcttacaacaaccaattgcccaattgcaacaacaatccttggcacatctaaacctacaaaccatcggaacgcaacagcaacaacagtttctggcatcactgagccacctagccgtggtgaaccctg

SEQ ID NO: 22419 - DNA, 361 bp, Zea mays
  Clone ID: LIB3152-024-P1-K1-H3
gcaacatagaaagcacaatagtgtaccaacaatggcagccaaaatattttgcctccttatgctccttggtctttctgcaagtgctgctacggcgaccattttcccgaaatgctcgcaagctcctatagcttcccttcttcccccgtacctctcaccagcggtgtcttcggtatgtgaaaacccaattcttcaaccctacaggatccaacaggcaatcacagctggcatcttacctttatcacccttgttcctccaacaatcatcagccctattacatcagttacctttggtgcatttattggcacaaaacatcagggcacaacaactacaacaacttgtgctagcaaaccttgctggctac

SEQ ID NO: 22420 - DNA, 371 bp, Zea mays
  Clone ID: LIB3152-024-P1-K1-H4
cccacgcgtccgattgagaccaactagcaacatagaaagcacaatagtgtaccaacaatggcagctaaaatattttgcctccttatgctccttggtctttctgcaagtgctgctacggcgaccattttcccacaatgctcacaagctcctatagcttcccttcttcccccgtacctctcaccaacggtgtcttcggtatgtgaaaacccaattcttcaaccctacaagatccaacaagcaatcgcagctggcatcttacctttatcacccttggtcctccaacaatcatcagccctattacagcagttacctttggtgcatttattggcacaaaacattaaggcacaacaactacaacaacttgtgcttgc

SEQ ID NO: 22421 - DNA, 373 bp, Zea mays
  Clone ID: LIB3152-024-P1-K1-H5
caaagcggcagtgcgtagagaggatcgtcgaacagaacagcatgaagatggtcatcgttctcgtcgtgtgcctggctctgtcagctgccagcgcctctgcaatgcagatgccctgcccctgcgcggggctgcagggcttgtacggcgctggcgccggcctgacgacgatgatgggcgccggcgggctgtacccctacgcggagtacctgaggcagccgcagtgcagcccgctggcggcggcgccctactacgccgggtgtgggcagacgagcgccatgtaccagccgcttcggcaacagtgctgtcagcagcagatgaagatgatggacgtgcagttcgtcgcgcaacagctgcagatgatgatgcagcttga

SEQ ID NO: 22422 - DNA, 374 bp, Zea mays
  Clone ID: LIB3152-024-P1-K1-H6
cccacgcgtccgtggcgaggcaaaagcattgcgaccacagacagcgcgcgcttcaaggccttttttttttgagataacaaggaggagaggaggagatggcggtcacgatcacgtgggtgaaggcgaggcagatcttcgacagccgcggcaaccccaccgtcgaggtggacgtgggccttagcgacggcagctacgcgaggggggccgtacccagcggcgcatccactggaatatatgaggccttggagttgagggatggaggatctgattatcttggcaagggtgttcttaaggctgtcagcaatgtaaataacattattggaccagcaattgttggaaaggaccccactgagcaggttgagattgacaacttt

SEQ ID NO: 22423 - DNA, 289 bp, Zea mays
  Clone ID: LIB3152-024-P1-K1-H7
attgataccaactagcaacatacatagtgaagtacagtagcaacatcttagcaccaatggcagccaagattttagccctccttgccctccttgctctttcagcaagtgttgctaccgcgactattattccacaatgctcacaacaatacctctcttctgtgacagccgcgagattttgaatacccaactattcaatcctacaggcttcaagaggccatcacatcaagcattttacggtcgttagcattgactgtccaacaacctaatgccctattgcaacaaccattcc

SEQ ID NO: 22424 - DNA, 193 bp, Zea mays
  Clone ID: LIB3152-024-P1-K1-H8
ggcaggcaggacggcgaggagggcaggaagaccgaagaccgagccgagcgggggcacgggacgggaacgggacaggaccccaaaaacgcagagccaagcggcccgggcgaccgagccgcgagaacgcgggggcgagccggccgggccccagcgagggccgggccgacgccaagggggagcggagacgccacag

SEQ ID NO: 22425 - DNA, 322 bp, Zea mays
  Clone ID: LIB3152-026-P1-K1-A1
caccatcgacaacgtcaaggccattatccaggacaaggagggcatcccaccggaccagcagcgtttgatcttcgctggcaagcagctggaggatggccgcacccttgcggattacaacatccagaaggagagcaccctccacctggtgctccgtctcaggggtggcatgcagatctttgtgaagacactcactggcaagacaatcacccttgaggtggagtcttcggataccattgacaatgtcaaggccaagatccaggacaaggagggcattccaccgcaccagcagtgccttatttttgtcggttagcacccccccccc

SEQ ID NO: 22426 - DNA, 376 bp, Zea mays
  Clone ID: LIB3152-026-P1-K1-A2
caccaagcgaagcgcactagcaacgacctaacaacaatggctaccaagatattagccctccttgcgcttcttgccctttttgtgagcgcaacaaatgcgttcattattccacaatgctcacttgctcctagtgccattattccacagttcctcccaccagttacttcaatgggcttcgaacacctagctgtgcaagccaacatgcaacaacaagcgcttgcggcgagcgtcttacaacaaccaattgcccaattgcaacaacaatccttgccacatctaacaatacaagccatcacaacgcaacagcaacaacagttcctaccagcactgagccacctagccatggtgaaccctgccgcctacttgcaagagcagc

SEQ ID NO: 22427 - DNA, 210 bp, Zea mays
  unsure at all n locations
  Clone ID: LIB3152-026-P1-K1-A3
cgcgtncgatttgtgcattcagaaacacaccttgcgttttgcactagcaacaacctaacagcaatggctaccaagatattatccctccttgcgcttcttgcgctatttgcgagcgcaacaaatgcgtacattattccacaatgctcacttgctcctagttccattatttcacaagttcttccaccagttactttaatgggcttcgaacac

SEQ ID NO: 22428 - DNA, 380 bp, Zea mays
  Clone ID: LIB3152-026-P1-K1-A4
ggcaatcgcagctggcatcttacttttattacccttgttcctccaacaatcatgagccctattacaacagttacctttggtgcatttattggcacaaaacatcagggcacaacaactacaacaacttgtgctagcaaaccttgctgcctactctcagcaacagcagtttcttccattcaaccaactaggttcattgaactctgcttcttatttgcaacaacaacaactaccattcagccagctacctgctgcctacccccagcaatttcttccattcaaccaactagcagcattgaactcttctgcttatttacagcagcaacaactactaccattcagccagctagcttgtgtgagccctgctacctttttgacacaac

SEQ ID NO: 22429 - DNA, 266 bp, Zea mays
  Clone ID: LIB3152-026-P1-K1-A7
cacgcgtacgaccaagtaaatctcactatcaacttccttttatcaatggctaccaagaccttggccggggcttgtcttatagcccttcacgggagcgcaacaatagctttcatttttccacaatgctcaactagctcctagtgccattattctcacaagttcctgccaccagttactttaatgggcttggcacaacctagctgcgcaagccaacatgcaacatcttgtgctagccgtgagcgccttactacaaccaattgcctaat

SEQ ID NO: 22430 - DNA, 393 bp, Zea mays
  Clone ID: LIB3152-026-P1-K1-B2
catcaatcatcattcatcttagtagtattttcaccaaatcaaatctgcaacatcaattatctaactccaaaaaccatgaagctggtgcttgtggttcttgctttcattgctttagtatcaagtgtttcttgtacacagacaggcggctgcagctgtggtcaacaacaaagccatgagcagcaacatcatccacaacaacatcatccacaaaaacaacaacatcaaccaccaccacaacatcaccagcagcagcaacaccaacaacaacaagttcacatgcaaccacaaaaacatcagcaacaacaagaagttcatgttcaacaacaacaacaacaaccgcagcaccaacaacaacaacaaccacagcaccaacaacaacatcaatgtgaaggg

SEQ ID NO: 22431 - DNA, 256 bp, Zea mays
  Clone ID: LIB3152-026-P1-K1-B3
gtccggcgctcgctgctagcgcctcctcttgttctatttgcggctgaggctgccagacaccaggggttttatttaccgcctccgtactatatgccgcctccgttctatctgccgccgtagttagcagcctcagttcatggcaataccccacttaaccacccgtagtatacctttgccatctagttcgtatccttcggcttttgcagcttctagtagactgttcctggttcagtgctgtccagtctcttgtggtacc

SEQ ID NO: 22432 - DNA, 358 bp, Zea mays
  unsure at all n locations
  Clone ID: LIB3152-026-P1-K1-B4
gcattcagaaacacaccaagcgaagctacctagcaacgacttaacaacaatggctaccaagatattagccctccttgcgcttcttgccctttttgtgagcgcaacaaatgcgttcattattccacaatgctcacttgctcctagtgccattataccacagttcctccgaccagttacttcaatgggcttcgaacacctagctgtgcaagcctacaggctacaacaagcgcttgcggcgagcgtcttacaacaaccaattaaccaattgcaacaacaatccttggcacatctaaccatacaaaccatcgcaacacaacagcaacaacagttnctaccagcactgagccaactagatgtg

SEQ ID NO: 22433 - DNA, 318 bp, Zea mays
  Clone ID: LIB3152-026-P1-K1-C1
acccacgcgtccgcggacgcgtggaattaagagcatttagatttacaccaagcgaagcgcactagcaacgggctaacatcaatggctaccaagattttatccctccttgcgctacttgccctttttgtgagcgcaacaaatgctttcatttttccacaatgctcacttgctcctagtgccattattccacagtttctcctaccatgtacttcaatgggcttcgaacacttatctgtgcaagccaacatgcaacaacaagtgcattgcctgatgagcgtttttacaacaaaccaatttgctccatattgctatcaaaca

SEQ ID NO: 22434 - DNA, 383 bp, Zea mays
  Clone ID: LIB3152-026-P1-K1-C2
aacaacaacagcaccaacaacaacatcaatgtgaaggccaacaacaacatcaccaacaatcacaaggccatgtgcaacaacacgaacagagccatgagcaacaccaaggacagagccatgagcaacaacatcaacaacaattccagggtcatgacaagcagcaacaaccacaacagcctcagcaatatcagcagggccaggaaaaatcacaacagcaacaatgtcattgccaggagcagcaacagactacaaggtgcagctataactactatagcagtagctcaaatctaaaaaattgtcatgaattcctaaggcagcagtgcagccctttggtaatgccttttctccaatcacgtttgatacaaccaagtagctgccaggta

SEQ ID NO: 22435 - DNA, 368 bp, Zea mays
  Clone ID: LIB3152-026-P1-K1-C3
atttagaccaactagcaacatagaaagcacaatagtgtaccaacaatggcagccaaaatattttgcctccttatgctccttggtatttctgcaagtgctgctacggcgaccattttcccgcaatgctcacaagctcctatagcttcccttcttcccccgtacctctcaccagcggtgtcttcggtatgtgaaaacccaattcttcaaccctacaggatccaacaggcaatcgcagctggcatcttacctttatcacccttgtttctccaacaattatcagccctattacagcagttacctttggtgcatttattggcacaaaacattagggcacaacacctacaacaacttgtgctagcaaacctttg

SEQ ID NO: 22436 - DNA, 386 bp, Zea mays
  Clone ID: LIB3152-026-P1-K1-D1
aagcaacatagaaagtggaatccagtagcaacaatagagcaacaatggagaccaagatattttccctccttatgctccttgctctttctacatgtgttgctaacgcgacaattttccctcaatgctcacaagctcctatagcttccctttttcccccataccttccatcaattatagcttcagtatgtgaaaacccagctcttcaaccatataggcttcaacaagcaatcgcagcaagcaacatacctttatcgcccttgttgtgtcaacaatcgccagccctatctttggtgcagtcattggtacaaaccatcagggcacaacagctgcagcaactcgtgctacctgtgatcaaccaagtagctctggcaaacctttcttcctac

SEQ ID NO: 22437 - DNA, 393 bp, Zea mays
  Clone ID: LIB3152-026-P1-K1-D11
tcgatttttagcatttagaaatttattttgcgaagcgcactagcaacaaccgaacgagcaatggctaccaagatattagccctccttgcgctacttgcccttttagtgagcgcaacaaatgcgttcattattccacagtgctcacttgctcctagtgccattatttcacagattcttccaccagttacttcaatgggcttcgaacatccagacgtgcaagcctacaggctacaactagcgcttgctgagagcgtcttacaacaaccaattgctcaatagctacatcaatttcttggcacatttaaacctacaaaccattgtaacgcaacagcaacatcagcttctgtcatcactgatccacctagctttggtgaactctgtcgactacttgaa

SEQ ID NO: 22438 - DNA, 362 bp, Zea mays
  Clone ID: LIB3152-026-P1-K1-D2
acaattcttaaaccctacaggttccaacatgcaatcgcagcaggcatcttacctttatgacccttgttccttcaacaaccgtcaggcgtattacagaagttacctttggtgcatacgatggtacatagcatcaagggacaacatctacaacaacttgtgctaggaaaccttgctggctactgtaagcaacagtagtttattccattcaaccaactgggtgcattgaactctggtgcttatttgcaacaacaactaccatgtaagtagatagctgctgcctaccaccagccatttcttccattcaacccactggcagcattgcactctgctgcttatttacaacagcatcagctaccaccatt

SEQ ID NO: 22439 - DNA, 286 bp, Zea mays
  Clone ID: LIB3152-026-P1-K1-D3
agggagttcacctcgctcggtgtgcagtgagcgactagattgttgactgcataacaaaacccatcgtcgtcggatcggagatgatgagttccgtcgtcgtggatgctgctgctaccagcagcagcgagaagaagacgtcgtggccggaggtggtgggcatgtccatcaaggaggcgacggagaccattctcaaggacatgcccaacgcgtacatccaggtgctgcctgatgggtcgcccgtgacgctggaccttcgtcccgaccgcgttcgtatcttcgttgacac

SEQ ID NO: 22440 - DNA, 344 bp, Zea mays
  Clone ID: LIB3152-026-P1-K1-D4
ggacgcccaccatcacctgccctctttgtttcgccgcctccctccgcgcgaccgatctaccctccgccaccaccatgtcgctgatcgccggggaggacttccagcatatcctgcgtttgctgaacaccaacgtggatgggaagcagaagatcatgttcgccatgacctcaatcaagggtgtcgggcgccgcttctccaacatcgtctgcaagaaggccgacatcgacatgaacaagagggccggcgagctgacgcctgatgagctggagcgcctgatgacggtcgtggccaaccctaggcagttcaaggtgccggactggttcctcaacatgaagaaggattac

SEQ ID NO: 22441 - DNA, 94 bp, Zea mays
  unsure at all n locations
  Clone ID: LIB3152-026-P1-K1-D5
ggaanncnccgggtcggacccacgccgtccgcaganaacacanccaatgcgatagcacatttatgcttcannnacctaacaaccannatggcta

SEQ ID NO: 22442 - DNA, 386 bp, Zea mays
  Clone ID: LIB3152-026-P1-K1-D6
aacacaccaagcgaagcgcactattaacttcctaacaacaatggctaccaagatattagccctccttgcgcttcttgccctttttgtgagcgcaacaaatgcgttcattattccacaatgctcacttgctcctagtgccattattccacagttcctcccaccagttacttcaatgggcttcgaacacctagctgtgcaagccaacatgcaacaacaagcgcttgcggcgagcgtcttacaacaaccaattgcccaattgcaacaacaatccttgccacatctaacaatacaagccatcacaacgcaacagcaacaacagttcctaccagcactgagccacctagccatggtgaaccctgccgcctacttgcaagagcagctgcttg

SEQ ID NO: 22443 - DNA, 301 bp, Zea mays
  Clone ID: LIB3152-026-P1-K1-E1
cccataatattttcagcattcagattcactccaagcgaagcgcactagcaacaacctgacaacaatggctaccaagatattagccctccttgcgcttcttgcccttttagtgagcgcaacaaatgcgttcattattccacagtgctcacttgctcctagtgccattattccacagttcctcccaccagttacttcaatgggcttcgaacattcagccgtgcaagcctacaggctacaactagcgcttgcggcgagcgttttacaacaaccaattgcccaattgcaacaacaatccttggca

SEQ ID NO: 22444 - DNA, 298 bp, Zea mays
  Clone ID: LIB3152-026-P1-K1-E2
ctcaaccgccccggcctcagccttatccttagccacacccatgcccgtgccaacagccgcatccaagcccgtgccagctgcagggaacctgcggcgttggcagcaccccgatcctgggccagtgcgtcgagtttctgaggcatcagtgcagcccgacggcgacgccctactgctcgcctcagtgccagtcgttgcggcagcagtgttgccagcagctcaggcaggtggagccgcagcaccggtaccaggcgatcttcggcttggtccttcagtccatcctgcagcagcagtcgcaaag

SEQ ID NO: 22445 - DNA, 274 bp, Zea mays
  Clone ID: LIB3152-026-P1-K1-E3
ggaactgtggaataatgttcttcttacttctagctgtgcaagccaacatgcaacaacagagcgcttgcggcgagcgtcttacaacaaccaattgcccaattgcaacaacaatccttgccacatctaacaatacaagccatcacaacgcaacagcaacaacagttcctaccagcactgagccacctagccatggtgaaccctgtcgcctacttgcaagagcagttgtttgcatccaacccacttgctttggcgaacgtagttgcaaaccagcaac

SEQ ID NO: 22446 - DNA, 196 bp, Zea mays
  Clone ID: LIB3152-026-P1-K1-E4
ctccaggtctctctctcctctcctatactctcaagtcccatccggatccgagacgctggaggcggagcgcccccccgtgacggcggcggcgacgatggggcgcggcaagatcgagatcaagcggatcgagaacgccaccaaccgccaggtgacctactccaagcgccggacggggatcatgaagaagtctctctta

SEQ ID NO: 22447 - DNA, 252 bp, Zea mays
  Clone ID: LIB3152-026-P1-K1-E7
accacgcgtcctatattgagcattcagaattatttttgcgaagcgcactagcaacaacctgaggcaatggctaccaagatatcatcctttcttgcgctttttgcgctatatgcgagcgcatcaaatgcttccattattccacattgctcacttgctcctagttccatttattccacagttcctcccaccatgttctttaatggctcttgaacacccagttgttcatgcctatatgctacaacaatgcgattg

SEQ ID NO: 22448 - DNA, 156 bp, Zea mays
  Clone ID: LIB3152-026-P1-K1-F1
tcgctgatatatgaaagatcacttgaagcttttttttgcaaggtaaattcgcaaatgcagagcttgggtatcatcaggaggttctgaagttctttctcatactctgactcgtcatatggagattttgcaagaccttactcaagaattctatcggct

SEQ ID NO: 22449 - DNA, 358 bp, Zea mays
  unsure at all n locations
  Clone ID: LIB3152-026-P1-K1-F12
tttncaagacgattggttttagatgttgggnagggagaggtcggaatcttgcgggaggaactggctggaccgctgggtggaggagaggtacacggacgacgagaagaacgccaagattcttgaagtggataatggtaagttatggtggtttgtgtttaagaggngcggcggcggcggcggcggccaccatnaccagtggttgtgttttatgattatgtangagcagaacagccggagctacgcgaccatgccggagtnggggggtaaggattttattattgtgcattattnttttgttagtttgtcgaccgtgggcatggcggacgaggccctgagcccgctgcgcgtggcagcggat

SEQ ID NO: 22450 - DNA, 383 bp, Zea mays
  unsure at all n locations
  Clone ID: LIB3152-026-P1-K1-F5
nncggcggcagtgtcgtatagaggaatcgtttaacttaacagcangaagaaggtcatggggctggttttgtgcctggctctcgtagttgccagcgcctttgcaatgcagatgccctgcccctgcgcggggctgcagggcttgtacggcgctggcgccggcctgacgactatgatgggcgccggcgggctgtacccctacgcggagtacctgaggcagccgtagtgcagcccgctggcggcggcgccctactacgccgggtgtgggcagacgagcgccattgtaccagccgcttccggcaacagtgctgccagcagtagatgaggatgatggacgtgcagtccgtcgcgcattagctgcagatgatgatgctacttgagcgtgc

SEQ ID NO: 22451 - DNA, 258 bp, Zea mays
  Clone ID: LIB3152-026-P1-K1-F7
aggaggtgagccaccggatgcggttacgtgagcactcgaccaaccccgggggtgccggctgcggcgcggcgtgctagatcgctaccgaccatggtggtggaggagatcgccgagggggtgaagaacctaaccgtcaccggagatgcggcggcttcaggcggagaggggcagatgaggggcggtggtggcagcagctaccgcattcaggtgttcaacaccaagaaacccctattcttttacgtcaaccttgccaagagg

SEQ ID NO: 22452 - DNA, 299 bp, Zea mays
  Clone ID: LIB3152-026-P1-K1-F8
tggacgtcagcctagcaattagcttatcgactccagattggagaactcgacaccatgaaggtgctgatcgttgcccttgctctcctggcgctcgctgcgagcgccgcctccagtacaagcggcggctgtggctgccagacaccaccgtttcatctaccgcctccgttctatatgccgcctccgttctatctgccgccgcagcagcagccgcagccatggcaataccccactcaaccaccgcagctaagcccgtgccagcagttcggatcctgctgcgtcggcagcgtcggcagcccgtt

SEQ ID NO: 22453 - DNA, 284 bp, Zea mays
  Clone ID: LIB3152-026-P1-K1-G1
cgcaaattgcaccaagaaatccatttagaggccgtcgacaggggaattaatggcgtcgtcgtctagcagcagccaccgtcgcctcatcctcgcagccgccgtcctgctctccgtgctcgcggctgccagcgccagcgccgggacctcctgcgtgccggggtgggccatcccgcacaacccgctcccgagctgccgctggtacgtgaccagccggacctgcggcatcgggccgcgcctcccgtggccggagcttgagaggagatgctgccgggagctggcggaca

SEQ ID NO: 22454 - DNA, 344 bp, Zea mays
  Clone ID: LIB3152-026-P1-K1-G2
tgagcattcagaaacacaccaagcgaagcgcactagcaacaacctaacaacaatggctaccaagatattatccctccttgcgcttcttgcgctttttgcgagcgcaacaaatgcgtccattattccacaatgctcacttgctcctagttccattattccacagttcctcccaccagttacttcaatggccttcgaacacccagctgtgcaagcctataggctacaacaagcgattgcggcgagcgtcttacaacaaccaattgcccaattgcaacaacaatcctttgcacatctaacaatacaaaccatcgcaacgcaacagcaacaacagtttctaccagcac

SEQ ID NO: 22455 - DNA, 397 bp, Zea mays
  unsure at all n locations
  Clone ID: LIB3152-026-P1-K1-G4
gcaacatagaaagtggaatccagtatcaacaatagagcaacaatggcgaccaagatattttccctccttatgctccttgctctttctgcatgtgttgctaacgcgacaattttccctcaatgctcacaagctcctatagcttcccttcttcccccataccttncatcaatgatagctttagtatgtgaaaacccacctcttcaaccctataggcttcaacaagcaattgnagtaagcaacatacctttatcacccttgtttcaacaatcgccagccctatctttggtgcagtcattggtacaaaccatcagggcccagtagttgcagcaactcgtgctacctgtgatcaaccaagtagctctggcaaacctttctccctactctcagcaacaacaat

SEQ ID NO: 22456 - DNA, 149 bp, Zea mays
  Clone ID: LIB3152-026-P1-K1-H1
tacccgagttattatatactacttttactttccgccaccttcgcttcgctagcggggcgtacccactcacccgttgtctccaaactcatttctcccgagcgccgccgcgagcctttgatccagcttttgtcatggctttccttaccgga

SEQ ID NO: 22457 - DNA, 393 bp, Zea mays
  Clone ID: LIB3152-026-P1-K1-H10
attttgagcattcagaaacacaccatgcgaagcacattagcaacaacctaacaacaatggctaccaagatattatccctccttgcgcttcttgcgctttttgcgagcgcaacaaatgcgttcattattccacaatgctcacttgctccaagttccattattacacagttcctcccaccagttacttcaatgggcttcgaacacccagctgtgcaagcctataggctacaacaagcaattgcggcgagcgtcttaccacaaccaatttcccagttgcaacaacaatccttggcacatctaacaatacaaaccatcgcaacgcaacagcaacaacaattcctaccagcactgagccacctagccatggtgaaccctgccgcctacttgcaacagc

SEQ ID NO: 22458 - DNA, 306 bp, Zea mays
  Clone ID: LIB3152-026-P1-K1-H8
tagagccgccgccgccgtctattttttcaccgaaccctagccctcgttagcggcggtttttagctcatccagccatgacgttcaagcggaggaatggcggacgcaacaagcacgggcgcggtcacgtcaagtacatccgctgctccaactgcgccaagtgctgtcccaaggataaggctatcaagcggttcttggtgaggaacattgttgagcaggctgtcgtgagagatgtgcaggaggcctgtgtacatgatggatatgttctacccaaattgattgcaaaggttcattactgtgtctcatgcg

SEQ ID NO: 22459 - DNA, 355 bp, Zea mays
  unsure at all n locations
  Clone ID: LIB3152-027-P1-K2-A1
tttaagcattcaaaaacacaccaagcgaagcgcactagcaacaacctaacaacaatggctaccaagatattagccctccttgcgcttcttgcccttttagtgagcgcaacaaatgcgttcattattccacaatgctcacttgctcctagtgccattattccacagttccttccaccagttactttaaagggcttcgaacatncaaccgggcaagcctacaggctacaactagcgcttgcggcgagcgtcttacaacaaccaattgcccaattgcaacaacaatccttggcacatctaaacctacaaaccatcgcaacgcaacagcaacaacagtttctgccatnactgagccacc

SEQ ID NO: 22460 - DNA, 362 bp, Zea mays
  Clone ID: LIB3152-027-P1-K2-A11
agaccaactagcaacatagaaagctcaatagtgtaccaacaatggcagccaaaatattttgcttccttatgctccttggtctttctgcaagtgttgctaccgcaaccattttcccacaatgctcacaagctcctatagcttcccttcttcccccatacctctcaccagcggtgtcttcaatgtgtgaaaacccaattgttcaaccctacaggatccaacaggcaatcgcaacaggcatcttaccattatcacccttgttcctccaacaaccgtcagccctattacagcagttacctttggtccatttggtggcacaaaacatcagggcacaacaactacaacaacttgtgctagcaaacctt

SEQ ID NO: 22461 - DNA, 362 bp, Zea mays
  Clone ID: LIB3152-027-P1-K2-A12
gaccaactagcaacatagaaagcactatagtgtaccaacaatggcagccaaaatattttgcctccttatgctccttggtctttctgcaagtgctgctacggcgaccattttcccgaaatgctcgcaagctcctatagcttcccttcttcccccgtacctctcaccagcggtgtcttcggtatgtgaaaacccaattcttcaaccctacaggatccaacaggcaatcacagctggcatcttacctttatcacccttgttcctccaacaatcatcagccctattacatcagttacctttggtgcatttattggcacaaaacatcagggcacaacaactacaacaacttgtgctagcaaaccttg

SEQ ID NO: 22462 - DNA, 360 bp, Zea mays
  Clone ID: LIB3152-027-P1-K2-A2
cgttcgcaacttgcaaagcacaaagctctaccatcaacggccgctgaaatattaagcctgctgacgctccttggtctttctgcaagtgctgctacggcgaccattttcccacaatgctcacaagctcctatagcttcccttcttcccccgtacctctcaccaacggtgtcttcggtatgtgaaaacccaattcttcaaccctacaggatccaacaggcaatcgcagctggcatcttacctttatcacccttgttcctccaacaatcatcagccctattacagcagttacctttggtgcatttattggcacaaaacatcagggcacaacaactacaacaacttgtgctagcaaaccttgct

SEQ ID NO: 22463 - DNA, 334 bp, Zea mays
  Clone ID: LIB3152-027-P1-K2-A3
aacatggaaggtggattgaggaaccaccattggagaaccaagggggacaaagatattttccttccttatgctcctggctctttctacatgggtggctaacgcgaaaattttccctaaatgctcacaaagcgtcctataggcttccttttttccccaaaccttcataaatatagcttcaggatgtgaaaaacccagctctttaaaccatataggcttcaacaagcaatcgcagcaagcaacatacctttatcgcccttgttgtgtcaacaatcgccagccctatctttggtgcagtcattggtacaaaccatcagggcacaacagctgcagcaac

SEQ ID NO: 22464 - DNA, 362 bp, Zea mays
  Clone ID: LIB3152-027-P1-K2-A4
gtcccataaataataattaatcttattgtcttaggcaccaaatcaaatctgcaacatcaattatttaactccaaaaaccatgaagctggtgcttgtggttcttgctttcattgctttagtatcaagtgtttcttgtacacagacaggcggctgcagctgtggtcaacaacaaagccatgagcagcaacatcatccacaacaacatcatccacaaaaacaacaacatcaaccaccaccacaacatcaccagcagcagcaacaccaacaacaacaagttcacatgcaaccacataaacatcagcaacaacaagaagttcatgttcaacaacaacaacaacaaccgcagcaccaacaacaacatc

SEQ ID NO: 22465 - DNA, 363 bp, Zea mays
  Clone ID: LIB3152-027-P1-K2-A5
gcgaagcgcactagcaacaacctaacatctttttctaccaagatattagccctccttgcgcttcttgcccttttagtgagcgcaccaaatgcgttcattattccacagtgctcacttgctcctagtgccattattccacagttcctcccaccagttacttcaatgggcttcgaacatccagccgtgcaagcctacaggctacaactagcgcttgcggcgagcgtcttacaacaaccaattgcccaattgcaacaacaatccttggcacatctaaacctacaaaccatcgcaacgcaacagcaacaacagtttctgccatcactgagccacctagccgtggtgaaccctgtcgcctacttgcaa

SEQ ID NO: 22466 - DNA, 364 bp, Zea mays
  Clone ID: LIB3152-027-P1-K2-A6
gggggctcgggacgggaacgggacatgtctcccaaaatctcagatccttcctgcccgcccgcccgtgcccgtcgacgcgtcgttcttgccggccgcgccccacctccgccctctcctcctccagggggatcggatacgccacaggctgcgcgatggtgctgtgggtcttcggctacggctccctcatctggaaccccggcttcgacttcgacgacaaaatcctcggcttcatcaagggctacaagcgcacctttaatctcgcttgcattgaccacagaggcacaccggagcatccggcgaggacctgcacgcttgaaaccgacgacgaggccatatgctggggaattgcatattgtgtcaaggg

SEQ ID NO: 22467 - DNA, 381 bp, Zea mays
  Clone ID: LIB3152-027-P1-K2-A7
tttcccggtcgaccgaccatgcgttcgcaactagcaacgtacaaagcacaattttgtaccaacaatggcagccaaaagattttgcctccttatgctccttggtctttctgcaagtgctgctacggcgaccattttcccgcaatgctcgcaagctcctatagcttcccttcttcccccgtacctctcaccagcggtgtcttcggtatgtgaaaacccaattcttcaaccctacaggatccaacaggcaatcgcagctggcatcttacctttatcacccttgttcctactacaatcatgagccctattacatcagttacctttggtgcatttattggcacaaaacatcagggcacaacatctactacatcttgtgctagcaaa

SEQ ID NO: 22468 - DNA, 354 bp, Zea mays
  Clone ID: LIB3152-027-P1-K2-A8
attgagaccaacaagcaacatagattgtggaatacagtagcaacaatagagcagcaatggcggccaagatattttccatccttatgctccttgctctttctgcatgtgttgctaacgcgaccatttttcctcaatactcacaagctcctatagctgcccttcttcccccataccttccatcaatgaccgcttcagtatgtgaaaacccagcccttcaaccctacaggctccaacaagcaatcgcaacaagcaacttacctttatcacccctgttctttcaacaatcggcaggcctatctttggtgcagtcattggtacaaaccatcatggcacaacagctgcagcaactcgtgc

SEQ ID NO: 22469 - DNA, 360 bp, Zea mays
  Clone ID: LIB3152-027-P1-K2-B1
cgccgagaaggacaaggggaagaaggccctaatctcacgctcctcccgcgccggcctccagttccctgttgggcgtatccaccgtcagctgaagcaaaggactcaggcaaatggtcgcgttggtgccaccgcagccgtctactccgctgccatcctggagtacttgactgccgaggttctggagctggctgggaatgctagcaaggatctgaaggtgaagcgtatcacccctcgccatttgcagctagccattcgtggagacgaggagctggacaccctcatcaagggcaccatcgcaggcggaggtgtcatcccgcacattcacaagtccctgatcaacaagtcctccaaggagtgaag

SEQ ID NO: 22470 - DNA, 362 bp, Zea mays
  Clone ID: LIB3152-027-P1-K2-B10
attgagaccaacaagcaacatagaatgtggaatccagtagcaacaatagagcaacaatggcgaccaagatattttccctccttatgctccttgctctttctgcatgtgttgctaacgcgacaattttccctcaatgctcacaagctcctatagcttcccttcttcccccataccttccatcaatgatagcttcagtatgtgaaaacccagctcttcaaccctataggctccaacaagcaatcgcagcaagcaacatacctttatcacccttgtttcaacaatcgccagccctatctttggtgcagtcattggtacaaaccatcagggcacagcagctgcagcaactcgtgctacctgtgatc

SEQ ID NO: 22471 - DNA, 362 bp, Zea mays
  Clone ID: LIB3152-027-P1-K2-B11
agcaacatagaaagcacaatagtgttccaacaatggcagctaaaatattttgcctccttatgctccttggtctttctgcaagtgctgctacggcgaccattttcccacaatgctcacaagctcctatagcttcccttcttcccccgtacctctcaccaacggtgtcttcggtatgtgaaaacccaattcttcaaccctacaggatccaacaggcaatcgcagctggcatcttacctttatcacccttgttcctccaacaatcatcagccctattacagcagttacctttggtgcatttattggcacaaaacatcagggcacaacaactacaacaacttgtgctagcaaaccttgctgcctac

SEQ ID NO: 22472 - DNA, 358 bp, Zea mays
  Clone ID: LIB3152-027-P1-K2-B2
ctgcaacaagaattgttgcaacagattgtaccagctctaactcagctagctgtggcaaaccctgttgcctacttgcaacagctgcttccattcaaccaactaactatgtcgaactctgttgcgtacctacaacagcgacaacagttacttaatccattggcagtggctaacccattggtcgctgccttcctacagcagcaacaattgctgccatacaaccggttctctttgatgaatcctgtcttgtcgaggcagcaacccatcgttggaggtgccatcttttagattacatatgagatgtactcgataatggtgccctcataccggcatgtgtttcctagaaataatcaatatattg

SEQ ID NO: 22473 - DNA, 361 bp, Zea mays
  Clone ID: LIB3152-027-P1-K2-B3
cggacgcgtgggttttgagcattcataatcacaccaagcgaagcgcactagcaacgacctaacaacaatggctaccaagatattagccctccttgcgcttcttgccctttttgtgagcgcaacaaatgcgttcattattccacaatgctcacttgctcctagtgccattattccacagttcctcccaccagttacttcaatgggcttcgaacacctagctgtgcaagccaacatgcaacaacaagcgcttgcggcgagcgtcttacaacaaccaattgcccaattgcaacaacaatccttgccacatctaacaatacaagccatcacaacgcaacagcaacaacagttcctaccagcactg

SEQ ID NO: 22474 - DNA, 363 bp, Zea mays
  Clone ID: LIB3152-027-P1-K2-B4
attttcagcattcagaaacacaccatgctttgcgcactagcaacaacctaacaacaatggctaccaagatattagccctccttgcgcttcttgcccttttagtgagcgcaacaaatgcgttcattattccacagtgctcacttgctcctagtgccattattccacagttcctcccaccagttacttcaatgggcttcgaacatccagccgtgcaagcctacaggctacaactagcgcttgcggcgagcgtcttacaacaaccaattgcccaattgcaacaacaatccttggcacatctaaacctacaaaccatcgcaacgcaacagcaacaacagtttctgccatcactgagccacctagccg

SEQ ID NO: 22475 - DNA, 365 bp, Zea mays
  Clone ID: LIB3152-027-P1-K2-B5
gcacaatagtgtaccaacaatggcatccaaaatattttgcctccttatgctccttggtatttctgcaagtgctgctacggcgaccattttcccgcaatgctcacaagctcctatagcttcccttcttcccccgtacctctcaccagcggtgtcttcggtatgtgaaaacccaattcttcaaccctacaggatccaacaggcaatcgcagctggcatcttacctttatcacccttgttcctccaacaatcatcagccctattacagcagttacctttggtgcatttattggcacaaaacatcagggcacaacaactacaacaacttgtgctagcaaaccttgctgcctactctcagcaacagcagt

SEQ ID NO: 22476 - DNA, 439 bp, Zea mays
  Clone ID: LIB3152-027-P1-K2-B7
gaagactccatgcaagcagatcttactcaccaacgcaaattgcaccaagaagtccatcgagaggccgtcgacaggtgaatcaatggcgtcgtcgtttagcagcatccaccgtcctcttatacttcgcagtccccccgttctgtctcttcctgtcttggcagttttgcctatttctctttttctcgttttcccttttctgtattttccccatttgtttttactctattttcttgtcatattctctcgtttcctttttttgttctttcccctctttttttatcctttttacttctgcttcttgcttccttctttgtttttattttcttttctcgtttcatcatcctttttttttttaagattttcttgtcttttcttttttttatttcttctttttcttttcttttcccctctcctttacttatttcttctttgtttttct

SEQ ID NO: 22477 - DNA, 329 bp, Zea mays
  Clone ID: LIB3152-027-P1-K2-B9
agagactgagcccttaggaaccgctggccctcttgctctagcaagggacaagcttgcggatggatctggccagccattctttgtcctcaacagtgatgtcataagcgaatacccatttgctgaactcatcaaatttcacaagtgtcatggtggtgaggcaacaattatggtcactaaggtggatgaaccatcaaaatacggtgttgtggttatggaggaggcaactggcagggtggaaaggtttgttgagaagccaaaaatatttgtgggtaacaagatcaatgctgggatttacttactgaacccatctgtccttgaccgcattgagc

SEQ ID NO: 22478 - DNA, 361 bp, Zea mays
  Clone ID: LIB3152-027-P1-K2-C1
cggacgcgtgggtcagcattcagaatcacaccaagcgaagcgcactagcaacaacctaacaacaatggctaccaagatattagccctccttgcgcttcttgcccttttagtgagcgcaacaaatgcgttcattattccacagtgctcacttgctcctagtgccattattccacagttcctcccaccagttacttcaatgggcttcgaacatccagccgtgcaagcctacaggctacaactagcgcttgcggcgagcgtcttacaacaaccaattgcccaattgcaacaacaatccttggcacatctaaacctacaaaccatcgcaacgcaacagcaacaacagtttctgccatcactgagc

SEQ ID NO: 22479 - DNA, 280 bp, Zea mays
  unsure at all n locations
  Clone ID: LIB3152-027-P1-K2-C10
tcgcggacgcgtgggcaacaagcatcanttaaagtggaatacagtagcaacaatggggcaacattggcggtcaagatattttccatccttatgctccttgctctttctgcatgtgttgctaacgcgaccatttttcctcaatactcacaagcttctatagctgtccttttttccccatacctttcatcaatgaccgcttcagtatgtgaaatcccatccctttaacccctcaggcttcaacaagcaatcgcaacatgtaacttacctttatcaccccttt

SEQ ID NO: 22480 - DNA, 363 bp, Zea mays
  Clone ID: LIB3152-027-P1-K2-C11
ccaactagcaacatacatagtgaagtacactagcaacatcttagcaccaatgggagccaagatttttgccctccttgccctccttgctctttcagcaagcgctgctacctcgacttttattccacaatgctcacaacaatacctctctccggcgacagccgtgggatttcaatacccaactatacaatcctacatggtacaagaggccatccaagcaagcatcttacggtcattagcattaaccctccaacaaccatatgctctattgcaacagccatccttagtgcatctgtatctccaaagaatcgcggcacaacaactacaacaacagttgctaccaacaatcaatcaagtagttgcagc

SEQ ID NO: 22481 - DNA, 99 bp, Zea mays
  Clone ID: LIB3152-027-P1-K2-C12
gcgttctcatgggaaagattccaccttcttcagaatactccaggctggccggggggctgttcttgctatttatgtaaggctggagcttatggaaggagt

SEQ ID NO: 22482 - DNA, 382 bp, Zea mays
  Clone ID: LIB3152-027-P1-K2-C3
ttcccggtcggcccaacccgtccggaaggtggattccagtagcaccatttgagctccattggcggccaagatattttccagccttatgctccttgctctttctgcatgtgttgctaacgcgaccatttttcctcaatactcacaagctcctatagctgcccttcttcccccataccttccatcaatgaccgcttcagtatgtgaaaacccagcccttcaaccctacaggctccaacaagcaatcgcaacaagcaacttacctttatcacccctgttctttcaacaatcgccagccctatctttggtgcagtcattggtacaaaccatcagggcacaacagctgcagcaactcgtgctaccagtgatcagccaagtagctctg

SEQ ID NO: 22483 - DNA, 312 bp, Zea mays
  unsure at all n locations
  Clone ID: LIB3152-027-P1-K2-C7
cttctatcagtaccatcaatcatctttcatcttagtagtataggcaccaagtggggtctgcaacatcaattatctaactccaaaaaccatgaagctggtgcttgtggttcttgctttcattgctttannatcaagtgcctacttgtacacagacaggcggctgcagatgaggacaacttcatttgtctttagccacatcattttttcacatctctttttttcattatatcatatacattaacctccaccacttcttttccatttcttgttatctcacttttcaactagtttcctctctttttcataatcttt

SEQ ID NO: 22484 - DNA, 255 bp, Zea mays
  Clone ID: LIB3152-027-P1-K2-C9
ctcgaggtacctccattcgcagttttttcgtgtcctcggagccgcgggagatgggggatcaggagaccgtagctgtggttgaggcacctaccctgtatcttggtgaaccgatgttttgttaaactttcttatttttaaaaaaaaaattacctttatcaggtcctttgctaccccaaaatttttcattaacaatgaaaatgaacttctgtattaagagaacactactaccatcagcagctagctgtggagcctgta

SEQ ID NO: 22485 - DNA, 364 bp, Zea mays
  Clone ID: LIB3152-027-P1-K2-D10
aactcgccgtctgccttctgcgccttcatttcggcctctgtcccttgcaagttcaatctcacctccaaccatgggtaaagagaagtcccacatcaacattgtggttattggccacgttgactctggcaagtctatcaccacaggactcctgatctacatgcttggatgcattgtcaagcttttgatcgagatgttttgtgttggactcttttcgaatacgcacacgcccctttttaagttctcttaaatttcttttatattattattgtctttattgttgtattgtggatcttatttatatgatattttacttttttttttttattttccttatcttttttattttttacttttttctcttttt

SEQ ID NO: 22486 - DNA, 136 bp, Zea mays
  Clone ID: LIB3152-027-P1-K2-D11
aactcgccgtctgtcttctgctttctcatttcggcctctgtcccttgcaagtgggatcttacctccaaccatgggtaaagagaagtcccacatcaacattgtggttttattccttgttaactattattagtttttt

SEQ ID NO: 22487 - DNA, 264 bp, Zea mays
  Clone ID: LIB3152-027-P1-K2-D12
tgctctcactgtccaccggccagatctgggtgctctctccgaagctggccgcggacggccggacagtggagctgcacaagtgcgcggtcgtcgagctcgagccggcgcggcccgtgtacgcaatggaagtcgcaatgggaaggctgctgctcggggaggttggcggtttgcgcgtcttcccgctacggggtttgatgaagggtggaaaggagagggatgtgaagaaggaagttgctgtggttgtaggaaggtagggctgtcaca

SEQ ID NO: 22488 - DNA, 380 bp, Zea mays
  Clone ID: LIB3152-027-P1-K2-D2
tcccggtcggaccaacccgtccgccaacccgtccgttggacgtaagcctatcatttagctcatcgactccagattggggaactcgacaccatgaaggtgctgatcgttgcccttgctctcctggcgctcgctgcgagcgccgcctccagtacaagcggcggctgtggctgccagacaccaccgtttcatctaccgtctccgttctatatgccgcctccgttctatctgccgccgcagcagcagccgcagccatggcaataccccactcaaccaccgcagctaagcccgtgccagcagttcggatcctgcggcgtcggcagcgtcggcagcccgttcctgggccagtgcgtcgagttcctgaggcaccagtgcagcccggc

SEQ ID NO: 22489 - DNA, 358 bp, Zea mays
  Clone ID: LIB3152-027-P1-K2-D3
gcaaattgcaccaagaaatccatcgtgaggccgtcgacaggggaattaatggcgtcggcgtctagcagcagccaccgccgcctcatcctcgcagccgccgtcctgctctccgtgctcgcggctgccagcgccagcgccgggacctcctgcgtgccggggtgggccatcccgcacaacccgctcccgagctgccgctggtacgtgaccagccggacctgcggcatcgggccgcgcctcccgtggccggagctgaagaggagatgctgccgggagctggcggacatcccggcgtactgccggtgcacggcgctgagcatcctcatggacggcgcgatcccgccgggcccggacgcgcagc

SEQ ID NO: 22490 - DNA, 365 bp, Zea mays
  Clone ID: LIB3152-027-P1-K2-D4
gccggcctgacgacgatgatgggcgccgtcgggctgtacccctacgcggagtacctgaggcagccgcagtgcagcccgctggcggcggcgccctactacgccgggtgtgggcagacgagcgccatgtaccagccgctccggcaacagtgctgccagcagcagatgaggatgatggacgtgcagtccgtcgcgcagcagctgcagatgatgatgcagcttgagcgtgccgctgccgccagcagcagcctgtacgagccagctctgatgcagcagcagcagcagctgctggcagcccagggtctcaaccccatggccatgatgatggcgcagaacatgccggccatgggtggactctaccagtacca

SEQ ID NO: 22491 - DNA, 308 bp, Zea mays
  unsure at all n locations
  Clone ID: LIB3152-027-P1-K2-D5
gattgagaccaacaagcaacatagattgttttatccagtagcaacaatagatcaacagagggagaccaagatattttccctccttatgctccttgctctttctacatgtgttgctaacgcgacaatttttcctcaatgctnanaagcttctatagcttcccttttttccccatacctttcatcaattatagcttcagtatgtgaaaacccagcttttcaaccatataggctttatcatgcatttcgaacatgctacatacctttatcgtccttgttgtgttaactgtttgcattcctttcttttttta

SEQ ID NO: 22492 - DNA, 237 bp, Zea mays
  Clone ID: LIB3152-027-P1-K2-D6
ttccggtcgaccacgcgtcggtagctactgcctactttacatcttcttcttttccattaaccaattgggcggctgaaccccgctgtttatttgcagcagcaaatactactaccatttagccagctagctacagcaagccgtgctttctttttgacacaacaacagttgctgcctgtctaccatcagtttgtggttaaccccagatccttttttcaacttcatcaatttgttgttctt

SEQ ID NO: 22493 - DNA, 131 bp, Zea mays
  Clone ID: LIB3152-027-P1-K2-D7
taaattggtctcgccctgtagcggttcattaagctgctgaggtagatggttttcttcttttttttttaggtgttggtttctcttcttctttttcttcttatatctcttttattctcttttcttcttttcta

SEQ ID NO: 22494 - DNA, 71 bp, Zea mays
  unsure at all n locations
  Clone ID: LIB3152-027-P1-K2-D8
acaatagtgtaccaacaatggcagtttaaaatatnnngcctccttatgctggggggtctttttgcaagtgc

SEQ ID NO: 22495 - DNA, 316 bp, Zea mays
  Clone ID: LIB3152-027-P1-K2-D9
cctactcctccacccagctcgctgcttccggaatccggagagctcgcgtcgcgcgtgcgcgggcgtgggtgcgtgcggcggctaagcaccagcaccaccctctcgcgtcgcgcgcgcgtctcgatggccgacggcgagccttccctcacgcgctggaccttcgaggatttcgtggtccactacgaagcgcgcttttttcttcggcgcgtggccgactgttactgcgacggatatggtataaatttacctcttgccagtctaatctctatcatactttataatattttttttttatttttatattttctatactttt

SEQ ID NO: 22496 - DNA, 161 bp, Zea mays
  unsure at all n locations
  Clone ID: LIB3152-027-P1-K2-E10
ataccaactagcaacatacatagtgtagtacagtagcaacatcttagcaccaatggcagncaagatttttgccctccttgccctacttgctatttcagcaagtgttgctaccgcttctattattccacaatgctcacaacaattcctctctccggcgacag

SEQ ID NO: 22497 - DNA, 209 bp, Zea mays
  Clone ID: LIB3152-027-P1-K2-E11
gctttatctactccagagcgcagattaacccgatcgacaccatgagggtgttgcgtcgttgccctcgctctcctggctctcgctgcgagcgccacctccacgcatacaagcggcggctgcggctgccagccaccgccgccggttcatctaccgccgccggtgcatctgccacctccgtgtcacctgccaccttcggtgcatattccacc

SEQ ID NO: 22498 - DNA, 385 bp, Zea mays
  Clone ID: LIB3152-027-P1-K2-E2
tcccgggcggaccaacccttccgaccaactagcaccatagaaagcacatttttgtaccaacaatggcagccaaaatattttgcttccttatgctccttggtctttctgcaagtgctgctaccgcaaccattttcccacaatgctcacaagctcctatagcttcctttcttcccccatacctctcaccagcggtgtcttcagtatgtgaaaacccaattcttcaaccctacaggatccaacaggcaatcgcagcaggcatcttacctttatcacccttgttcctccaacaaccgtcagccctattacagcagttacctttggtgcatttgttggcacaaaacatcaaggcacaacaactacaacaacttgtgctaggaaaccttgc

SEQ ID NO: 22499 - DNA, 366 bp, Zea mays
  Clone ID: LIB3152-027-P1-K2-E3
tcccggtccgaccaacccgtccgattccttagggaagtccactagcatctttttatcaccaatgggagccaagattggggccctccttgccctccttgctctttcagcaagcgctgctacctcgacttttattccacaatgctcacaacaatacctttctccggcgacagccgtgggatttcaatacccaactttacaatcctacatggtacaagaggccatccaagcaagcatcttacggtcattagcattaacccttcaacaaccatatgctctattgcaacagccatcctttgtgcatctggatctccaaagtattgcggcacaacaactacaacaacagttgctaccaacaatcaatcaagt

SEQ ID NO: 22500 - DNA, 360 bp, Zea mays
  Clone ID: LIB3152-027-P1-K2-E4
gctttcagaaccccaccaagcgatttgttctaccaacaacctaacaacaatgggtgccaagatattatccctccttgcgcttcttgcgctttttgcgagcgcaacaaatgcgtccattattccacaatgctcacttgctcctagttccattattccacagttcctcccaccagttacttcaatggccttcgaacacccagctgtgcaagcctataggctacaacaagcgattgcggcgagcgtcttacaacaaccaattgcccaattgcaacaacaatccttggcacatctaacaatacaaaccattgcaacgcaacagcaacaacagttcctaccagcactgagccacctagccatggt

SEQ ID NO: 22501 - DNA, 289 bp, Zea mays
  Clone ID: LIB3152-027-P1-K2-E5
cttcttaccaagcggtgtcttcggtttttgttttcccaattcttcaacccttcaggggccggacaggcaatcacaggtggcatcttacctttatcacccttgttgcttcaacaatcatcagccctattacatcagttacctttggtgcatttattggcacacaacatcatggcacaacaactacaacatcttgtgctagcaaaccttgttgcctactctcagcatcagctagtttttccattcaaccaactagtctgaatttgtactcttttttcttatttgcaactac

SEQ ID NO: 22502 - DNA, 152 bp, Zea mays
  Clone ID: LIB3152-027-P1-K2-E6
cacgcgttcgttcagaaacacaccaagcgaagcacattatttaacaacctaacaacaatggctacggggggattatccctccttgcgcttcttgcgctttttgcgagcgcaacaaatttcgtcattattccacaatgctcacttgctccaag

SEQ ID NO: 22503 - DNA, 264 bp, Zea mays
  Clone ID: LIB3152-027-P1-K2-E7
ctttcatctagcccgctcgctgtgttcaatgcacctacgtacctacaacagcgggggctgtaacagattgtaccagctctgactcatctagctgtggcataccctactgcctacttgcaacagttgctttcatttaaccaactggctgtgtcgaactctgctttgtacctacaacatcgacaacagttacttaatccactagcattggcttacccattgggcgctaactttcttgtatatcaacatattgctgccatacaacca

SEQ ID NO: 22504 - DNA, 358 bp, Zea mays
  Clone ID: LIB3152-027-P1-K2-E9
attcagaaacacaccaagcgattcttttctagcaacgacctaacaacaatgggtaccaagatattagccctccttgcgcttcttgccctttttgtgagcgcaacaaatgcgttcattattccacaatgctcacttgctcctagtgccattattccacagttcctcccaccagttacttcaatgggcttcgaacacctagctgtgcaagccaacatgcaacaacaagcgcttgcggcgagcgtcttacaacaaccaattgcccaattgcaacaacaatccttgccacatctaacaatacatgccatcacaacgcaacagcaacaacagttcctaccagcactgagccacctagccatgg

SEQ ID NO: 22505 - DNA, 362 bp, Zea mays
  Clone ID: LIB3152-027-P1-K2-F1
ggcaggcaggtcggcgaggagggcaggatgaccgaagaccgagccgtgcgggggctcgggacgggaacgggacaggaccccaaaatctcagatccttcctgcccgcccgcccgtgcccgtcgacgcgtcgttcttgccggccgcgccccacctccgccctctcctcctccagggggatcggatacgccacaggctgcgcgatggtgctgtgggtcttcggctacggctccctcatctggaaccccggcttcgacttcgacgacaaaatcctcggcttcatcaagggctacaagcgcacctttaatctcgcttgcattgaccacagaggcacaccggagcatccggcgaggacctgcacgctt

SEQ ID NO: 22506 - DNA, 360 bp, Zea mays
  Clone ID: LIB3152-027-P1-K2-F10
gagaccaactagcaacatagaaagcacaatagtgtaccaacaatggcagccaaaatattttgcttccttatgctccttggtctttctgcaagtgctgctaccgcaaccattttcccacaatgctcacaagctcctatagcttcctttcttcccccatacctctcaccagcggtgtcttcagtatgtgaaaacccaattcttcaaccctacaggatccaacaggcaatcgcagcaggcatcttacctttatcacccttgttcctccaacaaccgtcagccctattacagcagttacctttggtgcatttgttggcacaaaacatcaaggcacaacaactacaacaacttgtgctaggaaac

SEQ ID NO: 22507 - DNA, 357 bp, Zea mays
  Clone ID: LIB3152-027-P1-K2-F11
cgcagctaagcccgtgccagcagttcggatcctgcggcgtcggcagcgtcggcagcccgttcctgggccagtgcgtcgagttcctgaggcaccagtgcagcccggcggcgacgccctacggctcgccacagtgccaggcgctgcagcagcagtgctgccaccagatcaggcaggtggagccgctgcaccggtaccaggcgacatacggtgtggtcctgcagtccttcctgcagcagcagccgcagggcgagctcgcggcgctgatggcggcccatgtagcgcagcagctgacggcgatgtgcggcctgcagctgcagcagccaggtccctgcccttgcaacgcagctgccgtcggtg

SEQ ID NO: 22508 - DNA, 361 bp, Zea mays
  Clone ID: LIB3152-027-P1-K2-F12
caactagcaacatagaaagcacaattgtgtaccaacaatggcagctaaaatattttgcctccttatgctccttggtctttctgcaagtgctgctacggcgaccattttcccacaatgctcacaagctcctatagcttcccttcttcccccgtacctctcaccaacggtgtcttcggtatgtgaaaacccaattcttcaaccctacaggatccaacaggcaatcgcagctggcatcttacctttatcacccttgttcctccaacaatcatcagccctattacagcagttacctttggtgcatttattggcacaaaacatcagggcacaacaactacaacaacttgtgctagcaaaccttgct

SEQ ID NO: 22509 - DNA, 340 bp, Zea mays
  Clone ID: LIB3152-027-P1-K2-F4
gaccacgcgttcggcacattagcaacaacctaacaacaatggctaccaagatattatccctccttgcgcttcttgcgctttttgcgagcgcaacaaatgcgttcattattccacaatgctcacttgctccaagttccattattacacagttccttccaccagttacttcaatgggcttcgaacacccagctgtgcaagcctataggctacaacaagcaattgcggcgagcgttttacaacaaccaatttcccagttgcaacaacaatccttggcacatctaacaatacaaaccatcgcaacgcatcagcaacaacaatttctaccagcactgagccacct

SEQ ID NO: 22510 - DNA, 308 bp, Zea mays
  unsure at all n locations
  Clone ID: LIB3152-027-P1-K2-F5
ggcagatcgatgagcgcacgcagctttcctgatgaggatgggaccaccgacgccgacggtgcgccccagcacggtgatgcatgacaccgacacgaagaggttcagccaccggtctggcaccttccacagtcccttggcatacagcttcagctctgccttgtgcacgcggtccaaccgtcattaccgctcttgatgcatagaagttctctggttattttttattgcaatattttcacaattcatggaagaacgnntncagttgtgatactttttacaaaagttgacagtgatgcgactattctattttt

SEQ ID NO: 22511 - DNA, 360 bp, Zea mays
  Clone ID: LIB3152-027-P1-K2-F6
caactagcaacatagaaagcacaattgtgtaccaacaatggcagccaaaatattttgcttccttatgctccttggtctttctgcaagtgctgctaccgcaaccattttcccacaatgctcacaagctcctatagcttcctttcttcccccatacctctcaccagcggtgtcttcagtatgtgaaaacccaattcttcaaccctacaggatccaacaggcaatcgcagcaggcatcttacctttatcacccttgttcctccaacaaccgtcagccctattacagcagttacctttggtgcatttattggcacaaaacatcagggcacaacaactacaacaacttgtgctagcaaaccttgc

SEQ ID NO: 22512 - DNA, 360 bp, Zea mays
  Clone ID: LIB3152-027-P1-K2-F7
attttcagcattcagaaacacaccatgcgaagcgcactagcaacaacctaacaacaatggctaccaagatattagccctccttgcgcttcttgcccttttagtgagcgcaacaaatgcgttcattattccacagtgctcacttgctcctagtgccattattccacagttcctcccaccagttacttcaatgggcttcgaacatccagccgtgcaagcctacaggctacaactagcgcttgcggcgagcgtcttacaacaaccaattgcccaattgcaacaacaatccttggcacatctaaacctacaaaccatcgcaacgcaacagcaacaacagtttctgccatcactgagccacctag

SEQ ID NO: 22513 - DNA, 179 bp, Zea mays
  Clone ID: LIB3152-027-P1-K2-F8
gtttcctagaaataatcaatatattgattgacatttatctcgataaaaaaaggggaaaaaaaaaaaaaaaaaaaaaaaaaaaaaaaaaaaaaaaaaaaaaaaaaaaaaaaaaaaaaaaaaaaaaaaaaaaaaaaaatataaaaaaaaaaataaaaaaataaaataaaaatatttgggtc

SEQ ID NO: 22514 - DNA, 363 bp, Zea mays
  Clone ID: LIB3152-027-P1-K2-G1
gggccgcgtgggtttcagcattcataaacacaccaagcgaagcgcactagcaacaacctaacaacaatggctaccaagatattagccctccttgcgcttcttgcccttttagtgagcgcaacaaatgcgttcattattccacagtgctcacttgctcctagtgccattattccacagttcctcccaccagttacttcaatgggcttcgaacatccagccgtgcaagcctacaggctacaactagcgcttgcggcgagcgtcttacaacaaccaattgcccaattgcaacaacaatccttggcacatctaaacctacaaaccatcgcaacgcaacagcaacaacagtttctgccatcactgagc

SEQ ID NO: 22515 - DNA, 220 bp, Zea mays
  Clone ID: LIB3152-027-P1-K2-G10
gaatcacaccaagcgaagcgctctttctatcaacctaacaacaatggctaccaagggattagtcctccttgcgcttcttgcccttttagtgagcgcaacaaatgcgttcattattccacagtgctcactcgctcctagtgccattattccacagtttcttccaccagtttcttcaatgtgctttgtacatccagccgtgcatgcctacattctacaactt

SEQ ID NO: 22516 - DNA, 356 bp, Zea mays
  Clone ID: LIB3152-027-P1-K2-G11
agcaacatagaaagcacaatagtgttccaacaatggcagccaaaatattttgcctgcttatgctccttggtctttctgcaagtgctgctacggcgaccattttcccgaaatgctcgcaagctcctatagcttcccttcttcccccgtacctctcaccagcggtgtcttcggtatgtgaaaacccaattcttcaaccctacaggatccaacaggcaatcacagctggcatcttacctttatcacccttgttcctccaacaatcatcagccctattacatcagttacctttggtgcatttattggcacaaaacatcagggcacaacaactacaacaacttgtgctagcaaaccttgct

SEQ ID NO: 22517 - DNA, 386 bp, Zea mays
  Clone ID: LIB3152-027-P1-K2-G2
tcccggtccgaccaacccgtccggctctttctgcatgtgttgctaactcgacttttttccctcaatgctcacaagctgcgatagcttcccttcttcccccataccttccatcaatgatagcttcagtatgtgaaaacccagctcttcaaccctataggctccaacaagcaatcgcagcaagcaacatacctttatcacccttgtttcaacaatcgccagccctatctttggtgcagtcattggtacaaaccatcagggcacagcagctgcagcaactcgtgctacctgtgatcaaccaagtagctctggcaaacctttctccctactctcagcaacaacaatttcttccattcaaccaactgtctacattgaaccgtgctgcttat

SEQ ID NO: 22518 - DNA, 94 bp, Zea mays
  Clone ID: LIB3152-027-P1-K2-G5
tcgagcaacatagaaagaacaatggtgctccaacaacggcatccactagatcctggggggttatgccccttggtctttttgcaaccatttgtta

SEQ ID NO: 22519 - DNA, 353 bp, Zea mays
  Clone ID: LIB3152-027-P1-K2-G6
ttcagaaacacaccaagcgaagcgcactatcaacaacctaacaacaatggctaccaagatattagccctccttgcgcttcttgcccttttagtgagcgcaacaaatgcgttcattattccacagtgctcacttgctcctagtgccattattccacagttcctcccaccagttacttcaatgggcttcgaacatccagccgtgcaagcctacaggctacaactagcgcttgcggcgagcgtcttacaacaaccaattgcccaattgcaacaacaatccttggcacatctaaacctacaaaccatcgcaacgcaacagcaacaacagtttctgccatcactgagccacctagccg

SEQ ID NO: 22520 - DNA, 359 bp, Zea mays
  Clone ID: LIB3152-027-P1-K2-G7
ggcagtgcgtagagaggatcgttttttcagaacagcatgaagatggtcatcggtgcgtggtcgtgtgcctggctctgtcagctgccagcgcctctgcaatgcagatgccctgcccctgcgcggggctgcagggcttgtacggcgctggcgccggcctgacgacgatgatgggcgccggcgggctgtacccctacgcggagtacctgaggcagccgcagtgcagcccgctggcggcggcgccctactacgccgggtgtgggcagacgagcgccatgtaccagccggtccggcaacagtgctgccagcagcagatgaggatgatggacgtgcagtccgtcgcgcagcagctgcatatgatg

SEQ ID NO: 22521 - DNA, 357 bp, Zea mays
  Clone ID: LIB3152-027-P1-K2-G8
gcaacatagaaagcacaatagtgttctcaacaatggcagccaaaatattttgcgcgtgcttatgctccttggtctttctgcaagtgctgctacggcgaccattttcccgaaatgctcgcaagctcctatagcttcccttcttcccccgtacctctcaccagcggtgtcttcggtatgtgaaaacccaattcttcaaccctacaggatccaacaggcaatcacagctggcatcttacctttatcacccttgttcctccaacaatcatcagccctattacatcagttacctttggtgcatttattggcacaaaacatcaggtcacaacaactacaacatcttgtgctagcataccttgc

SEQ ID NO: 22522 - DNA, 368 bp, Zea mays
  Clone ID: LIB3152-027-P1-K2-G9
attgagaccaactagcaacatataatgcacaatagtgtaccaacaatggcagccggaatattttgcttccttatgctccttggtctttctgcaagtgttgcttccgtaaccatttttccactatgctcacaagctcctatagcttcccttctttcccctttccttttacttgtataattttttttgcatgttattctctttatttaatccctcacgttccttccccctcttattattatctctttttttttatcttcactcttttctttcttatttccttttcttaatttttgtttatcttattctatttttattctaacttttcataaattatctctttttgcccctatacatacttatatttatac

SEQ ID NO: 22523 - DNA, 241 bp, Zea mays
  Clone ID: LIB3152-027-P1-K2-H10
ggccgtggcgcccacgctgcgcgcctcggtgctggccgcgctgcccccgtccgaccgctgggtggtcttcgtggggccctacgagcaccactccaacctgctcacctggcgggagagcctcgcggaggtggtggaggtcggtctgcccgcccctgattgcatcggttgtcctgggcttgtgaaaacccaatttttcaaccctatagtattcaacatgtaatgtgagggggcattttatctt

SEQ ID NO: 22524 - DNA, 356 bp, Zea mays
  Clone ID: LIB3152-027-P1-K2-H11
aactagcaacatagaaagcacaatattgtaccaacaatggcagccaaaatatttggcctccttatgctccttggtctttctgcaagtgctgctacggcgaccattttcccacaatgctcacaagctcctatagcttcccttcttcccccgtacctctcaccagcggtgtcttcggtatgtgaaaacccaattcttcaaccctataggatccaacaggcaatcgcagctggcatcttacctttatcacccttgttcctccaacaatcatcagccctattacagcagttacctttggtgcatttattggcacaaaacattaaggcacaacaactacaacaacttgtgctagcaaacct

SEQ ID NO: 22525 - DNA, 360 bp, Zea mays
  Clone ID: LIB3152-027-P1-K2-H12
tcgcccacgcgtccgcgcacacactcacttccagatctcccccaaatccacccgtcgggacctccgcttcaagatgcagatctttgtgaaaaccctgaccggcaagactatcaccctcgaggtggagtcgtctgacaccattgacaacgttaaggccaagatccaggacaaggagggcatccccccagaccagcagcggctcatcttcgctggcaaacagcttgaggacgggcgcacgcttgctgactacaacatccagatggagagcaccctccaccttgtgctccgcctcaggggaggcatgcagatctttgtgaaaaccctgaccggcaagactatcaccctcgaggtggagtcctc

SEQ ID NO: 22526 - DNA, 361 bp, Zea mays
  Clone ID: LIB3152-027-P1-K2-H2
attttgagcattcagaaacacaccaagcgtagcacattagcaacaacctaacaacagtggctaccaagatattatccctccttgcgcttcttgcgctttttgcgagcgcaacaaatgcgttcattattccacaatgctcacttgctccaagttccattattacacagttcctcccaccagttacttcaatgggcttcgaacacccagctgtgcaagcctataggctacaacaagcaattgcggcgagcgtcttacaacaaccaatttcccagttgcaacaacaatccttggcacatctaacaatacaaaccatcgcaacgcaacagcaacaacaattcctaccagcactgagccacctagc

SEQ ID NO: 22527 - DNA, 339 bp, Zea mays
  unsure at all n locations
  Clone ID: LIB3152-027-P1-K2-H3
caacattgtcagccaaaatatttggcctccttaggctccttggtctttctgcaagtgctgctacggcgaccattttcccacaatgctcacaagctcctatagcttcccttcttcccccgtacctctcaccagcggtgtcttcggtatgtgaaaacccaattcttcaaccctataggatccaacaggcaatcgcagctggcatcttacctttatcacccttgttcctccaacaatcatcagccctattacagcagttacctttggtgcatntattggcacaaaacatcatggcacaacaactacaacaacttgtgctagcaaaccttgctgcctactctc

SEQ ID NO: 22528 - DNA, 265 bp, Zea mays
  unsure at all n locations
  Clone ID: LIB3152-027-P1-K2-H4
cgttcgaacaactatcaacaaacttggtgctaggttaactcttgctnnngcctactctcagncaacagcgagttgtcttccatttcataccatactgtgctgcnnattgaactctgtctgcttatttgggcaacaaccaactacncnnattcagtcatgcttagcttttgctgcctaccnnncccagcatatttctttccatttcatacccatactggcatnngcattgaacntnncttgcttgcttatttaccaacnnagcaac

SEQ ID NO: 22529 - DNA, 305 bp, Zea mays
  Clone ID: LIB3152-027-P1-K2-H5
aacatcaccaacaatttttttttttttgcaacaacactaacatagtctgatctattccaatgtcagagtcattatcaacaacatcaacaacaatttcagggtcatgacaagcagcaacatccactacatcctcacaattttatcatgtccagtaaaaatcacatcatctacaatgtcattgtcaggatcttcaacagaccacaaggcgcatctattactactattgcattagctcaaatctaaaaaacttgtcatgaattccatatgcatcattgcagcccctttgttatgccttttttccaatc

SEQ ID NO: 22530 - DNA, 144 bp, Zea mays
  Clone ID: LIB3152-027-P1-K2-H6
tatccttgtttgtcgaggcattttctcatcgttggaggtgccatcttttagatgcatatgagatgtactcgataatggtgccctcattccggcatgtgtttcctagaaataatcaatatattgattgagatttatctcaatata

SEQ ID NO: 22531 - DNA, 350 bp, Zea mays
  Clone ID: LIB3152-027-P1-K2-H7
ctcatggcaagtgcttagctcactttataatttttcacatttttcaacttctaaagcataagcatttttaactttaacatgctttttgttttccttgattaggaagtcctcttgggagtccaagagattatccttctcatggatggcgctaattaattcatttaatttctctttttgttgcatgtttaagttggcaaaaagagtacgtaaattgtcttcctcatcactagtattatcatcactagaggactcatatctagtggaggatttagatttaaccttcttctttttgtcgtcctttgccatgaggcacttgtggccgacgttggggaagagaaggcccttggtga

SEQ ID NO: 22532 - DNA, 171 bp, Zea mays
  Clone ID: LIB3152-027-P1-K2-H8
cgcaaattgcaccaagaaatccatctagaggccgtcgacaggggaattaatggcgtcgtcgtctagcagcagccaccgccgcctcatcctcgcagccgccgtcctgctctccgtgctcgcggttgtcagtgccagcgccgtgaccccctgcatgcctgtgtggtcctttct

SEQ ID NO: 22533 - DNA, 362 bp, Zea mays
  Clone ID: LIB3152-028-P1-K1-A1
cccatgcgtccgtaactagcacctttgaatgcccactagggcaccaacaatggcgggcaaaatattgcgcctggttatgctcctaggtgctgctgcaggggctgttacggcgaccagcttgcaggattgcttacatgctcctattgcttccctcctttcaccatacctgtcaccagcgggggattacgcatgtgaaaacccattccttataccccacgcgatcccacatgcaatcacagctggcataccacctttattacccctgttactacaacaatcaccagacctaccacatgagcatcctttggcgcatttattggcgcaaaacattatggcacaacatctgctacaacttgtggttg

SEQ ID NO: 22534 - DNA, 205 bp, Zea mays
  Clone ID: LIB3152-028-P1-K1-A10
gaatccacaaaacagcatcaatttgttttccaacatattctccatcctaacgcggggggctttcactacatgtgtcgccctcacgccacttgcccctcaaacgctcacaagctatctatagctttctttcttcatccatccctgccatcaattattgccccagtttgccaaaaccactcatttctaccctatccaatcctacatg

SEQ ID NO: 22535 - DNA, 339 bp, Zea mays
  Clone ID: LIB3152-028-P1-K1-A11
tccatctgcaagctgtggcaaacattgctgctttcttgagacaacaacatttgttgccattttacccacaggttgtgggaaacattaatgccttcttgcaacagcaacaattgctaccattctacccacagaatgtggcaaacattgttgccttcttacaacaacaacaattgttgccatttagccaacatgctttgacgaatcctaccaccttattgcaaccgcccaccattggtggtgccatcttctagatttttttatgatttatactgtaataataaagttctcatgctgatatgtgcgacctctcagtaataaagtattagagatctatatttt

SEQ ID NO: 22536 - DNA, 366 bp, Zea mays
  Clone ID: LIB3152-028-P1-K1-A12
caaccaattgcccaattgcaacaactatccttggcacatctaaacctacaaaccatcgcaacgcaacagcaacaacagtttctgccatcactgagccacctagccgtggtgaaccctgtcgcctacttgcaacagcagctacttgcatccaacccacttgctctggcgaacgtagctgcataccagcaacaacaacgtctgcaacagtttatgccagcgctcagtcaactagccatggtgaaccctgtcgcctacctacaacagcaacaattgctttcatctagcccgctcgctgtgggcaatgcacctacgtacctacaacaacagttgctgcaacagattgtaccagctctgactcagctagct

SEQ ID NO: 22537 - DNA, 372 bp, Zea mays
  Clone ID: LIB3152-028-P1-K1-A2
ttagaaagcacattagtgtaccaacattgtcagctaaaatattttgcctccttatgctccttggtctttctgcaagtgctgctacggcgaccattttcccacaatgctcacaagctcctatagcttcccttcttcccccgtacctctcaccaacggtgtcttcggtatgtgaaaacccaattcttcaaccctacaggatccaacaggcaatcgcagctggcatcttacctttatcacccttgttcctccaacaatcatcagccctattacagcagttacctttggtgcatttattggcacaaaacatcagggcacaacaactacaacaacttgtgctagcaaaccttgctgcctactctcagcaacagcagt

SEQ ID NO: 22538 - DNA, 365 bp, Zea mays
  Clone ID: LIB3152-028-P1-K1-A3
ccaagtcgtgcctccgctccggtcacccgtcgctccacgcaaccatgtcgaggaggaagaccagggagcccaaggaggagaacgtcacccttggacccactgtccgtgaaggagagtatgtctttggtgtcgctcacatctttgcatccttcaatgacaccttcattcatatcactgatttgtctgggagggaaactctggttcggatcaccggtggcatgaaggtgaaggctgaccgtgatgagtcgtcaccttacgctgctatgcttgctgctcaagacgtcgcacagcgctgcaaggagcttggcattactgcactgcacattaagcttcgtgccaccggaggcaacaagaccaagacccca

SEQ ID NO: 22539 - DNA, 369 bp, Zea mays
  Clone ID: LIB3152-028-P1-K1-A5
tattgataccaactagcaacatacatagtgaagtacactagcaacatcttagcaccaatgggagccaagatttttgccctccttgccctccttgctctttcagcaagcgctgctacctcgacttttattccacaatgctcacaacaatacctctctccggcgacagccgtgggatttcaatacccaactatacaatcctacatggtacaagaggccatccaagcaagcatcttacggtcattagcattaaccctccaacaaccatatgctctattgcaacagccatccttagtgcatctgtatctccaaagaatcgcggcacaacaactacaacaacagttgctaccaacaatcaatcaagtagttgca

SEQ ID NO: 22540 - DNA, 391 bp, Zea mays
  Clone ID: LIB3152-028-P1-K1-A6
aacgggcgggaccaccgcgtccgaataagccctattacataagttacctttggtgcatttattggcacaaaacataagggcacaacaactacaacaacttgtgctagcaaaccttgctgcctactctcagcaacagcagtttcttccattcaaccaactagctgcattgaactctgcttcttatttgcaacaacaacaactaccattcagccagctacctgctgcctacccccagcaatttcttccattcaaccaactggcagcattgaactctcctgcttatttacagcagcaacaactactaccattcagccagctagctggtgtgagccctgctaccttcttgatacaaccacagttgttgccgttctaccagcacgctgcgcctaac

SEQ ID NO: 22541 - DNA, 330 bp, Zea mays
  Clone ID: LIB3152-028-P1-K1-A7
cagtaccatcaatcatcattcttcttagtagtataggcaccaaaccaaatctgcggcatcaattatctaactccaaaaaccatgaagctggtgcttgtggctcttgctttcattgctttagtatcaagtgtttcttgtacacagacaggcggctgcagctgtggtcaacaacaaagccatgagcaagaacattatccacaacatcatcattcacataaacaacatcattaaccaccaccacatcatttccagctgcagctacaccaacaacaacaagttcacattgctccacaaatacatcagcaacaacaagaagttcatgttcaacaa

SEQ ID NO: 22542 - DNA, 315 bp, Zea mays
  Clone ID: LIB3152-028-P1-K1-A8
cagtaccatcaatcatcatttttcttattagtataggcaccaaatcaaatgggggacatcaattatctaactccaaaaaccatgaagctggtgcttgtggttcttgctttcattgctttagtatcaagtgttccttgttcacatacttgcgtctgtagctgttgtcaacatcaaattcatgagcattaacatcatccacaacaacatcatccacaaaaacaacaacatcaaccaccacctcatcatcaccatgctcatcatctccaacaacaacaagttcacatgcttccacaaatacatcagctacaacatgat

SEQ ID NO: 22543 - DNA, 366 bp, Zea mays
  Clone ID: LIB3152-028-P1-K1-A9
gtagcaacaatagagcaacaatggctaccaagatattttccctccttatgctccttgctctttctgcatgtgttgctaacgcgacaattttccctcaatgctcacaagctcctatagcttcccttcttcccccataccttccatcaatgatagcttcagtatgtgaaaacccagctcttcaaccctataggctccaacaagcaatcgcagcaagcaacatacctttatcacccttgtttcaacaatcgccagccctatctttggtgcagtcattggtacaaaccatcagggcacagcagctgcagcaactcgtgctacctgtgatcaaccaagtagctctggcaaacctttctccctactctcagc

SEQ ID NO: 22544 - DNA, 366 bp, Zea mays
  Clone ID: LIB3152-028-P1-K1-B10
caacaagcaacatagaaagtggaatccagtagcaacaatagagcaacaatggagaccaagatattttccctccttatgctccttgctctttctacatgtgttgctaacgcgacaattttccctcaatgctcacaagctcctatagcttccctttttcccccataccttccatcaattatagcttcagtatgtgaaaacccagctcttcaaccatataggcttcaacaagcaatcgcagcaagcaacatacctttatcgcccttgttgtgtcaacaatcgccagccctatctttggtgcagtcattggtacaaaccatcagggcacaacagctgcagcaactcgtgctacctgtgatcaaccaagta

SEQ ID NO: 22545 - DNA, 365 bp, Zea mays
  Clone ID: LIB3152-028-P1-K1-B11
tagcaacatagaaagcacaatagtgtaccaacaatggcagccaaaatattttgcctccttatgctccttggtctttctgcaagtgctgctacggcgaccattttcccgaaatgctcgcaagctcctatagcttcccttcttcccccgtacctctcaccagcggtgtcttcggtatgtgaaaacccaattcttcaaccctacaggatccaacaggcaatcacagctggcatcttacctttatcacccttgttcctccaacaatcatcagccctattacatcagttacctttggtgcatttattggcacaaaacatcagggcacaacaactacaacaacttgtgctagcaaaccttgctgcctactc

SEQ ID NO: 22546 - DNA, 366 bp, Zea mays
  Clone ID: LIB3152-028-P1-K1-B12
caactagcaacatagaaagcacaattgtgtaccaacaatggcagccaaaatattttgcctccttatgctccttggtctttctgcaagtgctgctacggcgaccattttcccgcaatgctcgcaagctcctatagcttcccttcttcccccgtacctctcaccagcggtgtcttcggtatgtgaaaacccaattcttcaaccctacaggatccaacaggcaatcgcagctggcatcttacctttatcacccttgttcctccaacaatcatcagccctattacaacagttacctttggtgcatttattggcacaaaacatcagggcacaacaactacaacaacttgtgctagcaaaccttgctgccta

SEQ ID NO: 22547 - DNA, 367 bp, Zea mays
  Clone ID: LIB3152-028-P1-K1-B2
caactatcgcccagaggtaatgatttatttcttgaaggactttgaggataagcttggcatcacaattacatgctcccaagagactgagcccttaggaaccgctggccctcttgctctagcaagggacaagcttgcggatggatctggccagccattctttgtcctcaacagtgatgtcataagcgaatacccatttgctgaactcatcaaatttcacaagtgtcatggtggtgaggcaacaattatggtcactaaggtggatgaaccatcaaaatacggtgttgtggttatggaggaggcaactggcagggtggaaaggtttgttgagaagccaaaaatatttgtgggtaacaagatcaatgctggg

SEQ ID NO: 22548 - DNA, 246 bp, Zea mays
  Clone ID: LIB3152-028-P1-K1-B4
caaccaattgcccaattgcaacatctttccttggcacatctaaacctacaaacgcatcgcatcgcaacagcagcaacagtttctgccatcagtgagccagctagccgaggagaaccatggggcctacttgcaacatgcgctgggtgggtacatgccatgtgccatcggttgattaagtgtagccctagagtgggcacgtctgcaacagtttatgtcagcgctcagtcaactagccatggggaaccc

SEQ ID NO: 22549 - DNA, 363 bp, Zea mays
  Clone ID: LIB3152-028-P1-K1-B5
cccggtatccacatacaccccaggatgctactaaactacacatctaacattcatatataaaatttcgacagcatctcctttgaaaattgcataaacgggggaagcaacaaagtataaatagatatcatgataagaaaacatataagacattaataatctgctagcaatgggaagacaaccataacaacaatgaactgaattaatcagtgcgcacgactagttaaaaacaaacatcctttgacaagaagtttctaattaaatcatggctgtgtctgggcagcattattatgagagtgaaggtggatgtgctgctactttccactcctcttgatgagcaacaagcaccttcattgagtaatgcaa

SEQ ID NO: 22550 - DNA, 187 bp, Zea mays
  Clone ID: LIB3152-028-P1-K1-B7
cggacgcgtgggttcagaccattatctttatctactccagagcgcagaagaacccgatcgacaccatgagggtgttgctcgttgccctcgctctcctggctctcgctgcgagcgccacctccactcatacaagcggcggctgttgctgccagccaccgtcgccgtttcttctaccgtcgtctgtgca

SEQ ID NO: 22551 - DNA, 192 bp, Zea mays
  Clone ID: LIB3152-028-P1-K1-B8
cggacgcgtgggttcagaccattatgtctttatctactccagagcgcagaagaacccgatcgacaccatgagggtgttgcttgttgccctcgttctcctggctcttgctgcgagcgccacctccactcatacaagcggtggttgtggttgccagccaccgccgccggatattctaccgtcgactgttgcatc

SEQ ID NO: 22552 - DNA, 144 bp, Zea mays
  Clone ID: LIB3152-028-P1-K1-B9
cagatcagcacggcagcgtagaggcggcagaacaagagatggatgtctgggtgccgcttgagtgccgccttgagcatgccctgcccctggcggggctgaggctgacgctcccgctgcacatatggcccgcgctgccctccgggt

SEQ ID NO: 22553 - DNA, 376 bp, Zea mays
  Clone ID: LIB3152-028-P1-K1-C1
gacccacgcgttcgggagagcctcactcaagataatgatttctttatatcgccagcaacgtttcagccggaggggatggaattcctattatccttaccaatgttgccgcaacgatatctaacaacagggaagtatcttaatgtcatgagagaatgtgggcacaatgttcaagtttccttgtcagacaattctaagcttatgagctttggctcaaaccaccaatatcttgaatgtataaaatctgcatatgattttgcaagtggtgaattgtttactctgatgaaagataagtatgatctcatcgggaaactccgatccctgaagcgctatttacttcttgaccaatgtgactttttgttccaatttattgatattg

SEQ ID NO: 22554 - DNA, 366 bp, Zea mays
  Clone ID: LIB3152-028-P1-K1-C10
gtctcgttcgtcatctacctctccctcctccaacccaagctaagctaaacagcttacacagcttgctccgccatcaccgtatcgagagagacagagacaggctagcgagggaatggagaggatgctggccaggctgatgcggcggcggagctccgtccccctgtccggcctcctccaccacggaggagcgcccgccccgctgcaggccgccggcgccactggggcctccccgctgatcttgtcgcaccagcagcagcagcagcacacggccgcctccgccgtcctgccggggctcaagatcagggactccgcgtcccagctgatcgggaggaccccgatggtgtacctgaacaaggtgaccgaggg

SEQ ID NO: 22555 - DNA, 365 bp, Zea mays
  Clone ID: LIB3152-028-P1-K1-C11
cagcattcagaaacacaccaagcgttgcgcactagcaacaacctaacaacaatggctaccaagatattagccctccttgcgcttcttgcccttttagtgagcgcaacaaatgcgttcattattccacagtgctcacttgctcctagtgccattattccacagttcctcccaccagttacttcaatgggcttcgaacatccagccgtgcaagcctacaggctacaactagcgcttgcggcgagcgtcttacaacaaccaattgcccaattgcaacaacaatccttggcacatctaaacctacaaaccatcgcaacgcaacatcaacaacagtttctgccatcactgagccacctagccgtggtgaa

SEQ ID NO: 22556 - DNA, 365 bp, Zea mays
  Clone ID: LIB3152-028-P1-K1-C12
aagcggcagtgcgtagagaggatcgtcgaacagaacagcatgaagatggtcatcgttctcgtcgtgtgcctggctctgtcagctgccagcgcctctgcaatgcagatgccctgcccctgcgcggggctgcagggcttgtacggcgctggcgccggcctgacgacgatgatgggcgccggcgggctgtacccctacgcggagtacctgaggcagccgcagtgcagcccgctggcggcggcgccctactacgccgggtgtgggcagacgagcgccatgtaccagccgctccggcaacagtgctgccagcagcagatgaggatgatggacgtgcagtccgtcgcgcagcagctgcagatgatgatgca

SEQ ID NO: 22557 - DNA, 363 bp, Zea mays
  Clone ID: LIB3152-028-P1-K1-C2
gaaccaagtagacgagggagaaggagatggcgaaaaaaaaggagaaggcggggaacgtgtcggtcaagccggggcactcgaacgacgtcaaccgccccaatgacaagaagggcgcgggcggcggcgccggtggcgggagccggtccgcggctaccgtgcggcggctcaagatgtacaagacgcggcccaagagggaccgctccgggaaggtgctcaggaacgattttcagtctaaagagctccccaacacccgcatcgagcccgaccgccggtggttcggcaatactcgcgttgtgggccagccacagcttgaaatgttccgggaggaactccagagtcggctttccgacaacttcagtgtca

SEQ ID NO: 22558 - DNA, 368 bp, Zea mays
  Clone ID: LIB3152-028-P1-K1-C3
caactagcaacatagaaagcacaattgtgtaccaacaatggcagccaaaatattttgcttccttatgctccttggtctttctgcaagtgctgctaccgcaaccattttcccacaatgctcacaagctcctatagcttcctttcttcccccatacctctcaccagcggtgtcttcagtatgtgaaaacccaattcttcaaccctacaggatccaacaggcaatcgcagcaggcatcttacctttatcacccttgttcctccaacaaccgtcagccctattacagcagttacctttggtgcatttgttggcacaaaacatcaaggcacaacaactacaacaacttgtgctaggaaaccttgctgcctact

SEQ ID NO: 22559 - DNA, 291 bp, Zea mays
  Clone ID: LIB3152-028-P1-K1-C4
cccacgcgtccgcagcaaaagcggcagtgcgtagagaggatcgtcgaacagaacagcatgaagatggtcatcgttctcgtcgtgtgcctggctctgtcagctgccagcgcctctgcaatgcagatgccctgcccctgcgcggggctgcagggcttgtacggcgctggcgccggcctgacgacgatgatgggcgccggcgggctgtacccctacgcggagtacctgaggcagccgtagtgcatccctgtggcggtggcgccctactacgccgggtgtgggcagactagcgcc

SEQ ID NO: 22560 - DNA, 117 bp, Zea mays
  Clone ID: LIB3152-028-P1-K1-C5
aaaaaaatattataataaataccttttttttttaaaacaaaaagataaaataaacagggggaacattttgaataatacaaaacaactgacaagaaaatgaaaaatgggggccccttt

SEQ ID NO: 22561 - DNA, 326 bp, Zea mays
  Clone ID: LIB3152-028-P1-K1-C6
ttacctttttcggttgacagcggcgagatttgattacccaactttacaatcctccaggctacaagaggccataacagcaggcatcttacggtcgttagcattgactgtccaacaaccatatgccctattgcaacaaccatccttagtgaatttatatctccaaagaatcgcagcacaacaactacaacagcagttgcttccaacaatcaatcaagtagttgcagcgaaccttgctgcttacctccagcaacaacaatttcttccattcaaccaactgacagcattgaactctcctgcttatttacagcagcaacaactactaccat

SEQ ID NO: 22562 - DNA, 345 bp, Zea mays
  Clone ID: LIB3152-028-P1-K1-C7
gttctagatgcgagcggtcgccctttttttttttttttaagatagaactgaccaaaccgacccttacatacactgatgctgacacatacaaacagacacacgcacatactgagagacacaagcatgttgacacacacatacgaccataatatataggaggcatacacactaaaacgaacacatgacatacaggaaattaaactaagtttaaattgcttattttccacgagacgaaacacgagcacggaaaatggcaagacaagagagcgacaccaccaaacatgcatgcatgggtatgctagttcacatgacactgcacgagggcccgccgccctgcctgggttg

SEQ ID NO: 22563 - DNA, 341 bp, Zea mays
  Clone ID: LIB3152-028-P1-K1-C8
gttctagatgcgagcggtcgccctttttttttttttttaagatagaactgaccaaaccgacccttacatacactgatgctgacacatacaaacagacacacgcacatactgagagacacaagcatgtcgtcacacacatacgaccataatatataggaggcatacacactaaaacgaacacatgacatacaggaaattaaactaatgttaaattgcttattttccacgagacgaaacacgtgcacggaaaatggcaagacaagagagcgacaccaccaaacatgcatgcatgggtatgctagttcacatgacactgcacgagggccctgcgtcctgcctgg

SEQ ID NO: 22564 - DNA, 367 bp, Zea mays
  Clone ID: LIB3152-028-P1-K1-C9
tagaaagcacaatagtgtaccaactttggcagccaaaatattttgcttccttatgctccttggtctttctgcaagtgctgctaccgcaaccattttcccacaatgctcacaagctcctatagcttcctttcttcccccatacctctcaccagcggtgtcttcagtatgtgaaaacccaattcttcaaccctacaggatccaacaggcaatcgcagcaggcatcttacctttatcacccttgttcctccaacaaccgtcagccctattacagcagttacctttggtgcatttgttggcacaaaacatcaaggcacaacaactacaacaacttgtgctaggaaaccttgctgcctactctcagcaacag

SEQ ID NO: 22565 - DNA, 367 bp, Zea mays
  Clone ID: LIB3152-028-P1-K1-D1
attcagaaacacaccaagcgaagcgccctttcaacaacctaacaacaatggctaccaagatattatccctccttgcgcttcttgcgctttttgcgagcgcaacaaatgcgtccattattccacaatgctcacttgctcctagttccattattccacagttcctcccaccagttacttcaatggccttcgaacacccagctgtgcaagcctataggctacaacaagcgattgcggcgagcgtcttacaacaaccaattgcccaattgcaacaacaatccttggcacatctaacaatacaaaccatcgcaacgcaacagcaacaacagttcctaccagcactgagccacctagccatggtgaaccctgt

SEQ ID NO: 22566 - DNA, 368 bp, Zea mays
  Clone ID: LIB3152-028-P1-K1-D10
attttcagcattcagaaacacaccaagcgaagcgcactagcaacaacctaacaacaatggctaccaagatattagccctccttgcgcttcttgcccttttagtgagcgcaacaaatgcgttcattattccacagtgctcacttgctcctagtgccattattccacagttcctcccaccagttacttcaatgggcttcgaacatccagccgtgcaagcctacaggctacaactagcgcttgcggcgagcgtcttacaacaaccaattgcccaattgcaacaacaatccttggcacatctaaacctacaaaccatcgcaacgcaacagcaacaacagtttctgccatcactgagccacctagccgtggtg

SEQ ID NO: 22567 - DNA, 367 bp, Zea mays
  Clone ID: LIB3152-028-P1-K1-D11
gaccaacaagcaacatagaaagtggaatccagtagcaacaatagagcaacaatggcgaccaagatattttccctccttatgctccttgctctttctgcatgtgttgctaacgcgacaattttccctcaatgctcacaagctcctatagcttcccttcttcccccataccttccatcaatgatagcttcagtatgtgaaaacccagctcttcaaccctataggctccaacaagcaatcgcagcaagcaacatacctttatcacccttgtttcaacaatcgccagccctatctttggtgcagtcattggtacaaaccatcagggcacagcagctgcagcaactcgtgctacctgtgatcaaccaagtag

SEQ ID NO: 22568 - DNA, 368 bp, Zea mays
  Clone ID: LIB3152-028-P1-K1-D2
gcacaatagtgtaccaacaatggcagctaaaatatttggcctcctaatgctcctgggtctttctgcaagtgctgctacggcgaccattttcccacaatgctcacaagctcctatagcttcccttcttcccccgtacctctcaccaacggtgtcttcggtatgtgaaaacccaattcttcaaccctacaggatccaacaggcaatcgcagctggcatcttacctttatcacccttgttcctccaacaatcatcagccctattacagcagttacctttggtgcatttattggcacaaaacatcaaggcacaacaactacaacaacttgtgctagcaaaccttgctgcctactctcagcaacagcagtttc

SEQ ID NO: 22569 - DNA, 365 bp, Zea mays
  Clone ID: LIB3152-028-P1-K1-D3
caacaagcaacatagaaagtggaatccattagcaacaatagagcaacaatggcgaccaagatattttccctccttatgctccttgctctttctgcatgtgttgctaacgcgacaattttccctcaatgctcacaagctcctatagcttcccttcttcccccataccttccatcaatgatagcttcagtatgtgaaaacccagctcttcaaccctataggctccaacaagcaatcgcagcaagcaacatacctttatcacccttgtttcaacaatcgccagccctatctttggtgcagtcattggtacaaaccatcagggcacagcagctgcagcaactcgtgctacctgtgatcaaccaagtagc

SEQ ID NO: 22570 - DNA, 369 bp, Zea mays
  Clone ID: LIB3152-028-P1-K1-D4
attttcagcattcaaaaacacaccaagcgaagcgcactagcaacaacctaacaacaatggctaccaagatattagccctccttgcgcttcttgcccttttagtgagcgcaacaaatgcgttcattattccacagtgctcacttgctcctagtgccattattccacagttcctcccaccagttacttcaatgggcttcgaacatccagccgtgcaagcctacaggctacaactagcgcttgcggcgagcgtcttacaacaaccaattgcccaattgcaacaacaatccttggcacatctaaacctacaaaccatcgcaacgcaacagcaacaacagtttctgccatcactgagccacctagccgtggtga

SEQ ID NO: 22571 - DNA, 366 bp, Zea mays
  Clone ID: LIB3152-028-P1-K1-D5
gcaacatagaaagcacaatagggtaccaccattggcggccaaaatatttggcctcctgatgctccttggtctttctgcaagtgctgctacggcgaccattttcccgcaatgctcgcaagctcctatagcttcccttcttcccccgtacctctcaccagcggtgtcttcggtatgtgaaaacccaattcttcaaccctacaggatccaacaggcaatcgcagctggcatcttacctttatcacccttgttcctccaacaatcatcagccctattacaacagttacctttggtgcatttattggcacaaaacatcagggcacaacaactacaacaacttgtgctagcaaaccttgctgcctactctca

SEQ ID NO: 22572 - DNA, 354 bp, Zea mays
  Clone ID: LIB3152-028-P1-K1-D6
tccgggtcggcccaagccttccgttggcattaagttaatcgcctccagtttgaagacctcgccacaattgaagggcctgacggtggccttggttttcttgggcctggttggaggggccgcctcaagtccaggcggcggttgtggctgccaaccaccaccgtttattttaccgcctccgttctatttgccgcctcggttctttctgccgccgaagaacaagccgcagccatggcattacccaactcaaccaccgtagctaagcccgtgccagcagttcggatcctgcggcgtcggcagcgtcggcagcccgttcctgggccagtgcgtcgagttcctgaggcaccagtgcagccc

SEQ ID NO: 22573 - DNA, 368 bp, Zea mays
  Clone ID: LIB3152-028-P1-K1-D7
ctcacttgctccaagttccattattacacagttcctcccaccagttacttcaatgggcttcgaacacccagctgtgcaagcctataggctacaacaagcaattgcggcgagcgtcttacaacaaccaatttcccagttgcaacaacaatccttggcacatctaacaatacaaaccatcgcaacgcaacagcaacaacaattcctaccagcactgagccacctagccatggtgaaccctgccgcctacttgcaacagcagttgcttgcatcaaacccacttgctctggcaaacgtagttgcaaaccagccacaacaacagctgcaacagtttctgccagcgctcagtcaactagccatggtgaaccctg

SEQ ID NO: 22574 - DNA, 368 bp, Zea mays; identical to SEQ ID NO: 22573
  Clone ID: LIB3152-028-P1-K1-D8

SEQ ID NO: 22575 - DNA, 304 bp, Zea mays
  Clone ID: LIB3152-028-P1-K1-D9
ggcaaggccaatccgaaatctcgagcgttcgcgccggcgaccacagcaaagaggaggccacagcacgacagcgccccagggttcctactctcgtcgcagcggcagcactgaggggaagatgtcgtcggtgttcagcggcgatgagaccgcccccttcttcggtttccttggcgccgccgccgctctcgttttctcatgcatgggggcggcgttcgggacggccaagagtggcgtcggcgtggcttccatgggtgtcatgcgcccagatctcgtcatgatagttcttcgtgcccgtggtcatggc

SEQ ID NO: 22576 - DNA, 244 bp, Zea mays
  Clone ID: LIB3152-028-P1-K1-E1
tcgacgtttgtgttggggaaggaaagaagaacagagaaactataaaggtgagggcctgaacgaagatgttgcgggtacgggcagggggagggcgcgactggtggcgggcagcggacccgtgccaaacaagctcactggggggttctggcggtcgaccggcggtcggcagtgggacacgcactgctctccaaccacagcctctcgccagtgtcgggcaagacaggttgctgcagggggtgcacct

SEQ ID NO: 22577 - DNA, 365 bp, Zea mays
  Clone ID: LIB3152-028-P1-K1-E10
caaaaacacacaaagggaagtgcactagcaacttcctaacaacaatggctaccaagatattagccctccttgcgctcctttccctttcagtgagcgcaacaactgcattcattattccacaatgctcacttgctcctaatgccattattccacagttcctcccatcagttacatcaatgggcatcgaacaccctattgtgcaagcctataggctacaacaagcgcttgcggcgagcgtcttacaacaaccgtttgcccaattacaacaacaatccttggcacatctaaccatacaaaccatcgcaacacaactagagcaacagtttgtgcccgcattgagccaactagccgcagtgaaccctgtc

SEQ ID NO: 22578 - DNA, 368 bp, Zea mays
  Clone ID: LIB3152-028-P1-K1-E11
caactagcaacatagaaagcacaattgtgtaccaacaatggcagccaaaatattttgcctccttatgctccttggtctttctgcaagtgctgctacggcgaccattttcccacaatgctcacaagctcctatagcttcccttcttcccccgtacctctcaccagcggtgtcttcggtatgtgaaaacccaattcttcaaccctataggatccaacaggcaatcgcagctggcatcttacctttatcacccttgttcctccaacaatcatcagccctattacagcagttacctttggtgcatttattggcacaaaacatcagggcacaacaactacaacaacttgtgctagcaaaccttgctgcctact

SEQ ID NO: 22579 - DNA, 366 bp, Zea mays
  Clone ID: LIB3152-028-P1-K1-E12
aacaacttgtgctagcaaaccttgctgcatactctcagcaacatcagtttcttgcattcaaccaactggctgcattgaactctgctgcttatttgcaacaacaattaccattcagccagctagttgctgcctacccccagcaatttcttccattcaaccaactagcagcattgaactctgctgcttatttacagcagcaacaactactaccattcagccagctacctgctgcctacccccagcaatttcttccattcaaccaactagcagcattgaactctcctgcttatttacagcagcaacaactactaccattcagccagctagctggtgtgagccctgctaccttcttgacacaaccacagt

SEQ ID NO: 22580 - DNA, 369 bp, Zea mays
  Clone ID: LIB3152-028-P1-K1-E2
aacacaccaagcgaagcgcactagctacgacctaacaacaatggctaccaagatattagccctccttgcgcttcttgccctttttgtgagcgcaacaaatgcgttcattattccacaatgctcacttgctcctagtgccattattccacagttcctcccaccagttacttcaatgggcttcgaacacctagctgtgcaagccaacatgcaacaacaagcgcttgcggcgagcgtcttacaacaaccaattgcccaattgcaacaacaatccttgccacatctaacaatacaagccatcacaacgcaacagcaacaacagttcctaccagcactgagccacctagccatggtgaaccctgccgcctactt

SEQ ID NO: 22581 - DNA, 365 bp, Zea mays
  Clone ID: LIB3152-028-P1-K1-E3
attgagaccaactagcaacatagaaagcacaatagtgtaccaacaatggcagccaaaatattttgcctccttatgctccttggtctttctgcaagtgctgctacggcgaccattttcccacaatgctcacaagctcctatagcttcccttcttcccccgtacctctcaccagcggtgtcttcggtatgtgaaaacccaattcttcaaccctataggatccaacaggcaatcgcagctggcatcttacctttatcacccttgttcctccaacaatcatcagccctattacagcagttacctttggtgcatttattggcacaaaacatcagggcacaacaactacaacaacttgtgctagcaaacct

SEQ ID NO: 22582 - DNA, 389 bp, Zea mays
  unsure at all n locations
  Clone ID: LIB3152-028-P1-K1-E4
tcccgggtccgaacccacgccgtncgtaactatgcaacatatgaaaggcacattattggtcccaacaatgggcagccaaaatattgtggcgtccttatgctccttggtctttctgcaagtgctgctaccgcaaccattttcccacaatgctcacaagctcctatagcttcctttcttcccccatacctctcaccagcggtgtcttcagtatgtgaaaacccaattcttcaaccctacaggatccaacaggcaatcgcagcaggcatcttacctttatcacccttgttccttcaacaaccgtcagccctattacagcagttacctttggtgcattttgtggcacaaaacatcaaggcacaacaactacaacaacttgtgctaggaaacct

SEQ ID NO: 22583 - DNA, 295 bp, Zea mays
  Clone ID: LIB3152-028-P1-K1-E5
gcaaatggccccaagaaatccatctagaggccgccgccaggggaattaatggcgtcgtcgtctagcagcagccaccgccgcctcatcctcgcagccgccgtcctgctctccgtgctcgcggctgccagcgccagcgccgtgacctcctgcgtgccggggagggccattccgcacaacccgttcccgagctgtcgctggtacgtgaccagccggacctgcggctttgggccgtgccttccgtggtcggagctgtagaggcgatgctgccgggagctggcagccattccagcgttct

SEQ ID NO: 22584 - DNA, 328 bp, Zea mays
  Clone ID: LIB3152-028-P1-K1-E6
ggctaccaagatattagccctccttgcgcttctggcccttttagtgagcgcaacaaatgcgttcattattccacagggctcacttgctcctagggccattattccacagttcctcccaccagttacttcaatgggcttcgaacatccagccgtgcaagcctacaggctacaactagcgcttgcggcgagcgtcttacaacatccaattgcccaattgcaacaacaatccttggcacatctaaacctacaaaccatcgcaacgcaacagcaacaacagtttctgccatcactgagccacctagccgtggtgaaccctgtcgcctacttg

SEQ ID NO: 22585 - DNA, 364 bp, Zea mays
  Clone ID: LIB3152-028-P1-K1-E7
ctgctttcatctagcccgctctttgtgggcaatgcacctacatacctgcaacaacaattgttgcaacagattgtaccagctctgactcaactagctgtggcaaaccctgttgcctacttgcaacagctgcttccattcaaccaactgactctgtcgaactctgctgcgtacctacaacagcgacaacagttacttaatccattggtagtggctaacccattggtcgccgtcttcctacagcagcaacaattgctgtcatacaaccagttctctttgatgaatcctgtcttgtcgaggcagcaacccatcgttggaggtgccatcttttagattacatatgagatgtactcgataatggtgccct

SEQ ID NO: 22586 - DNA, 364 bp, Zea mays
  Clone ID: LIB3152-028-P1-K1-E8
ctgctttcatctagcccgctctctgtgggcaatgcacctacatacctgcaacaacaattgttgcaacagattgtaccagctctgactcaactagctgtggcaaaccctgttgcctacttgcaacagctgcttccattcaaccaactgactctgtcgaactctgctgcgtacctacaacagcgacaacagttacttaatccattggtagtggctaacccattggtcgccggctttcctacagcagcaacaattgctgccatacaaccagttctttttgatgaatcctgtcttgtcgaggcagcaacccatcggtggaggtgccatcttttatattacatatgagatgtactcgataatggtgccc

SEQ ID NO: 22587 - DNA, 363 bp, Zea mays
  Clone ID: LIB3152-028-P1-K1-E9
ccaactagcaacatagaaagcacaatagtgtaccaacaatggcagccaaaatattttgcctccttatgctccttggtctttctgcaagtgctgctacggcgaccattttcccgcaatgctcgcaagctcctatagcttcccttcttcccccgtacctctcaccagcagtgtcttcggtatgtgaaaacccaattcttcaaccctacaggatccaacaggcaatcgcagctggcatcttacctttatcacccttgttcctccaacaatcatcagccctattacaacagttacctttggtgcatttattggcacaaaacatcagggcacaacaactacaacaacttgtgctagcaaaccttgctg

SEQ ID NO: 22588 - DNA, 368 bp, Zea mays
  Clone ID: LIB3152-028-P1-K1-F10
cagcattcagaaacacaccatgcgtagcgcactagcaacaacctaacaacaatggctaccaagatattagccctccttgcgcttcttgcccttttagtgagcgcaacaaatgcgttcattattccacagtgctcacttgctcctagtgccattattccacagttcctcccaccagttacttcaatgggcttcgaacatccagccgtgcaagcctacaggctacaactagcgcttgcggcgagcgtcttacaacaaccaattgcccaattgcaacaacaatccttggcacatctaaacctacaaaccatcgcaacgcaacagcaacaacagtttctgccatcactgagccacctagccgtggtgaaccc

SEQ ID NO: 22589 - DNA, 369 bp, Zea mays
  Clone ID: LIB3152-028-P1-K1-F11
cggacgcgtggggaaacacaccaagtcgaagcgcactagcaacaacctaacaacaatggctaccaagatattatccctccttgcgcttcttgcgctttttgcgagcgcaacaaatgcgtccattattccacaatgctcacttgctcctagttccattattccacagttcctcccaccagttacttcaatggccttcgaacacccagctgtgcaagcctataggctacaacaagcgattgcggcgagcgtcttacaacaaccaattgcccaattgcaacaacaatccttggcacatctaacaatacaaaccatcgcaacgcaacagcaacaacagttcctaccagcactgagccacctagccatggtgaa

SEQ ID NO: 22590 - DNA, 369 bp, Zea mays
  Clone ID: LIB3152-028-P1-K1-F12
ctcacttgctcctagtgccattataccacagttcctccgaccagttacttcaatgggcttcgaacacctagctgtgcaagcctacaggctacaacaagcgcttgcggcgagcgtcttacaacaaccaattaaccaattgcaacaacaatccttggcacatctaaccatacaaaccatcgcaacacaacagcaacaacagttcctaccagcactgagccaactagatgtggtgaaccctgtcgcctacttgcaacagcaggtgcttgcatccaacccacttgctctggcaaacgtagctgcataccaacaacaacaacaattgcaacagtttctgccagcgctcagtcaactagccatggtgaaccctgg

SEQ ID NO: 22591 - DNA, 365 bp, Zea mays
  Clone ID: LIB3152-028-P1-K1-F2
attgagaccaactagcaacatagaaagcacaatagtgtaccaacaatggcagccaaaatattttgcctccttatgctccttggtctttctgcaagtgctgctacggcgaccattttcccgaaatgctcgcaagctcctatagcttcccttcttcccccgtacctctcaccagcggtgtcttcggtatgtgaaaacccaattcttcaaccctacaggatccaacaggcaatcacagctggcatcttacctttatcacccttgttcctccaacaatcatcagccctattacatcagttacctttggtgcatttattggcacaaaacatcagggcacaacaactacaacaacttgtgctagcaaacct

SEQ ID NO: 22592 - DNA, 367 bp, Zea mays
  Clone ID: LIB3152-028-P1-K1-F3
gctcaatggcgaccaagatatttttcctccttatgctccttgctctttctgcatgtgttgctaacgcgacaattttccctcaatgctcacaagctcctatagcttcccttcttcccccataccttccatcaatgatagcttcagtatgtgaaaacccagctcttcaaccctataggctccaacaagcaatcgcagcaagcaacatacctttatcacccttgtttcaacaatcgccagccctatctttggtgcagtcattggtacaaaccatcagggcacagcagctgcagcaactcgtgctacctgtgatcaaccaagtagctctggcaaacctttctccctactctcagcaacaacaatttcttcc

SEQ ID NO: 22593 - DNA, 372 bp, Zea mays
  Clone ID: LIB3152-028-P1-K1-F4
tcgcattcagaaacacaccaagcgaagctctctagcaacaacctaacaacaatggctaccaagatattagccctccttgcgcttcttgcccttttagtgagcgcaacaaatgcgttcattattccacagtgctcacttgctcctagtgccattattccacagttcctcccaccagttacttcaatgggcttcgaacatccagccgtgcaagcctacaggctacaactagcgcttgcggcgagcgtcttacaacaaccaattgcccaattgcaacaacaatccttggcacatctaaacctacaaaccatcgcaacgcaacagcaacaacagtttctgccatcactgagccacctagccgtggtgaaccctgtc

SEQ ID NO: 22594 - DNA, 330 bp, Zea mays
  Clone ID: LIB3152-028-P1-K1-F5
gctcaggcaggtggagccgcagcaccggtaccaggcgatcttcggcttggtcctccagtccatcctgcagcagcagccgcaaagcggccaggtcgcggggctgttggcggcgcatatagcgcagcaactgacggcgatgtgcggcctgcagcagccgactccatgcccctacgctgctgtcggcggtgtgccccactgaagaaactatgtgctgtagtatagccggtggctagctagctagttgagtcatttagcggcgatgattgagtaatactgtgtcacgcattaccacagttggcagagctagcatgagcactgaccagcatgaac

SEQ ID NO: 22595 - DNA, 389 bp, Zea mays
  Clone ID: LIB3152-028-P1-K1-F6
tcccggcggaccacccgtccgagcattcagaaacacaccaagcttgttcattagcaacaacctaacaacaatggctaccaagatattatccctccttgcgcttcttgcgctttttgcgagcgcaacaaatgcgttcattattccacaatgctcacttgctccaagttccattattacacagttcctcccaccagttacttcaatgggcttcgaacacccagctgtgcaagcctataggctacaacaagcaattgcggcgagcgtcttacaacaaccaatttcccagttgcaacaacaatccttggcacatctaacaatacaaaccatcgcaacgcaacagcaacaacaattcctaccagcactgagccacctagccatggtgaaccctg

SEQ ID NO: 22596 - DNA, 363 bp, Zea mays
  Clone ID: LIB3152-028-P1-K1-F7
tatagcttcagtatgtgaaaacccatctcttcaaccatataggcttcaacaagcaatcgcagcaagcaacatacctttatcgcccttgttgtgtcaacaatcgccagccctatctttggtgcagtcattggtacaaaccatcagggcacaacagctgcagcaactcgtgctacctgtgatcaaccaagtagctctggcaaacctttctccctactctccgcaacaacaatttcttccattcaaccaactgtctacactgaaccctgctgcttatttgcagcatcaactattaccatttagccagctagctactgcctactctcaacaacaacaacttcttccatttaaccaattggccgcact

SEQ ID NO: 22597 - DNA, 365 bp, Zea mays
  Clone ID: LIB3152-028-P1-K1-F8
tatagcttcagtatgtgaaaacccatctcttcaaccatataggcttcaacaagcaatcgcagcaagcaacatacctttatcgcccttgttgtgtcaacaatcgccagccctatctttggtgcagtcattggtacaaaccatcagggcacaacagctgcagcaactcgtgctacctgtgatcaaccaagtagctctggcaaacctttctccctactctccgcaacaacaatttcttccattcaaccaactgtctacactgaaccctgctgcttatttgcagcaacaactattaccatttagccagctagctactgcctactctcaacaacaacaacttctttcatttaaccaattggccgcactga

SEQ ID NO: 22598 - DNA, 366 bp, Zea mays
  Clone ID: LIB3152-028-P1-K1-F9
aaacacaccaagcgaagcgcactatctacaacctaacaacaatggctaccaagatattagccctccttgcgcttcttgcccttttagtgagcgcaacaaatgcgttcattattccacagtgctcacttgctcctagtgccattattccacagttcctcccaccagttacttcaatgggcttcgaacatccagccgtgcaagcctacaggctacaactagcgcttgcggcgagcgtcttacaacaaccaattgcccaattgcaacaacaatccttggcacatctaaacctacaaaccatcgcaacgcaacagcaacaacagtttctgccatcactgagccacctagccgtggtgaaccctgtcgcct

SEQ ID NO: 22599 - DNA, 368 bp, Zea mays
  Clone ID: LIB3152-028-P1-K1-G1
tttgagaccaacaggcaccatagaaggtggattacagttgcaccaatagagcaacaatggcggccaagatattttccatccttatgctccttgctctttctgcatgtgttgctaacgcgaccatttttcctcaatactcacaagctcctatagctgcccttcttcccccataccttccatcaatgaccgcttcagtatgtgaaaacccagcccttcaaccctacaggctccaacaagcaatcgcaacaagcaacttacctttatcacccctgttctttcaacaatcgccagccctatctttggtgcagtcattggtacaaaccatcagggcacaacagctgcagcaactcgtgctaccagtgatcagc

SEQ ID NO: 22600 - DNA, 360 bp, Zea mays
  Clone ID: LIB3152-028-P1-K1-G10
cgcagccacctttttttttgttctgttgtgtatctagtagttggaggagatatgcagtttgcacttgcattggacacgaactcaggtcctcaccagataagatcttgtgagggtgatgggattgacaggttggaaaaattaagtattgtgggcagaaagcatgagaaagctttgagaaataggcgctttggtggaagagtttatgctactacacgctgttttattacgtaacatgcttgtattgaaactgttttattctataacacagccctttttggaagctgatactgttgcaaaccatttattttgctatatttttaagaagtagcgctatctgtgatctatcttagtttgtctagc

SEQ ID NO: 22601 - DNA, 201 bp, Zea mays
  Clone ID: LIB3152-028-P1-K1-G11
cacgcgtcgcaatagccaacagttcaatattgccttactctgttttgcagtgctgtcgaccattttcccatgctaagctcctatgcttcttttcccgaccttaccacggcttgttggaaaacccaatttaacctcagaccaacgcaccactggcattacttataccctgtctccatatacctaaccattccttgggcatat

SEQ ID NO: 22602 - DNA, 368 bp, Zea mays
  Clone ID: LIB3152-028-P1-K1-G12
gcacaatagtgtaccaacaatggctgccaaaatattttgcctccttatgctccttggtatttctgcaagtgctgctacggcgaccattttcccgcaatgctcacaagctcctatagcttcccttcttcccccgtacctctcaccagcggtgtcttcggtatgtgaaaacccaattcttcaaccctacaggatccaacaggcaatcgcagctggcatcttacctttatcacccttgttcctccaacaatcatcagccctattacagcagttacctttggtgcatttattggcacaaaacatcagggcacaacaactacaacaacttgtgctagcaaaccttgctgcctactctcagcaacagcagtttc

SEQ ID NO: 22603 - DNA, 369 bp, Zea mays; identical to SEQ ID NO: 22358
  Clone ID: LIB3152-028-P1-K1-G2

SEQ ID NO: 22604 - DNA, 370 bp, Zea mays
  Clone ID: LIB3152-028-P1-K1-G4
tgagcattcagaaacacaccaagcgaatcacattagcaacaacctaacaacaatggctaccaagatattatccctccttgcgcttcttgcgctttttgcgagcgcaacaaatgcgttcattattccacaatgctcacttgctccaagttccattattacacagttcctcccaccagttacttcaatgggcttcgaacacccagctgtgcaagcctataggctacaacaagcaattgcggcgagcgtcttacaacaaccaatttcccagttgcaacaacaatccttggcacatctaacaatacaaaccatcgcaacgcaacagcaacaacaattcctaccagcactgagccacctagccatggtgaaccct

SEQ ID NO: 22605 - DNA, 371 bp, Zea mays
  Clone ID: LIB3152-028-P1-K1-G5
aatattttgagcattcagaaacacaccatgcgaagcacattagcaacaacctaacaacaatggctaccaagatattatccctccttgcgcttcttgcgctttttgcgagcgcaacaaatgcgttcattattccacaatgctcacttgctccaagttccattattacacagttcctcccaccagttacttcaatgggcttcgaacacccagctgtgcaagcctataggctacaacaagcaattgcggcgagcgtcttacaacaaccaatttcccagttgcaacaacaatccttggcacatctaacaatacaaaccatcgcaacgcaacagcaacaacaattcctaccagcactgagccacctagccatggtg

SEQ ID NO: 22606 - DNA, 367 bp, Zea mays
  Clone ID: LIB3152-028-P1-K1-G6
caactagcaacatagaaagcacaattgtttcccaacaatggcagctaaaatatttggcctccttatgctccttggtctttctgcaagtgctgctacggcgaccattttcccacaatgctcacaagctcctatagcttcccttcttcccccgtacctctcaccaacggtgtcttcggtatgtgaaaacccaattcttcaaccctacaggatccaacaggcaatcgcagctggcatcttacctttatcacccttgttcctccaacaatcatcagccctattacagcagttacctttggtgcatttattggcacaaaacatcagggcacaacaactacaacaacttgtgctagcaaaccttgctgcctac

SEQ ID NO: 22607 - DNA, 365 bp, Zea mays
  Clone ID: LIB3152-028-P1-K1-G7
cctgtcgcctacctacaacagctattattgctttcatctagcccgctcggtgtgggcaatgcacctacgtacctacatcaacagttgctgtaacagattgtaccatctctgactcagctagctgtggcaaaccctactgcctacttgcaacagttgcttacattcaaccaactggctgtgtctaactctgctgtgtacctacaacagcgacaacagttacttaatccactagcagtggctaacccattggtcgttaacttcctgcagcagcaacaattgctgccatacaaccaggtctctttgatgaaccctgccttgcagcaacccattgctggaggtgccatcttttagattacatatgagat

SEQ ID NO: 22608 - DNA, 363 bp, Zea mays
  Clone ID: LIB3152-028-P1-K1-G8
cctgtcgcctacctacaacagttactattgctttcatctagcccgctcgcggtgggcaatgcacctacgtacctacaacaacagttgctgcaacagattgtaccagctctgactcagctagctgtggcaaaccctactgcctacttgcaacagttgcttccattcaaccaactggctgtgtcgaactctgctgtgtacctacaacagcgacaacagttacttaatccactagcagtggctaacccattggtcgctaacttcctgcagcagctacaattgctgccatacaaccagttctctttgatgaaccctgccttgcagcaacccatcgttggaggtgccattttttagattacatatgag

SEQ ID NO: 22609 - DNA, 364 bp, Zea mays
  Clone ID: LIB3152-028-P1-K1-G9
agaaagtggaatccagtagcaacaatagagcaacaatggcgaccaagatattttccctccttatgctccttgctctttctgcatgtgttgctaacgcgacaattttccctcaatgctcacaagctcctatagcttcccttcttcccccataccttccatcaatgatagcttcagtatgtgaaaacccagctcttcaaccctataggctccaacaagcaatcgcagcaagcaacatacctttatcacccttgtttcaacaatcgccagccctatctttggtgcagtcattggtacaaaccatcagggcacagcagctgcagcaactcgtgctacctgtgatcaaccaagtagctctggcaaacct

SEQ ID NO: 22610 - DNA, 364 bp, Zea mays
  Clone ID: LIB3152-028-P1-K1-H1
attggtactgagcacacaaacatatttctcgttccgttcagaaatgagaatggcatcctccgcaagtggatctctcgttttgatgtctggccatacctggagacatacactgaggatgtttccagtgaaataatgaaagaaatgcaggccaagcctgaccttatcattggcaactacagcgatggcaacctattcgccactctgctcgcgcacaagttgggagtcactcagtgtaccatcgctcatgccttggagaaaaccaaataccccaactcggacatttacttggacaaattcgacagccagtaccacttctcttgccagttcacagctgaccttattgccatgaaccacaccgatttca

SEQ ID NO: 22611 - DNA, 365 bp, Zea mays
  Clone ID: LIB3152-028-P1-K1-H10
catagaaagcacaatagtgtaccaacaatggcagctaaaatattttgcctccttatgctccttggcctttctgcaagtgctgctacggcgaccattttcccacaatgctcacaagctcctatagcttcccttcttcccccgtacctctcaccaacggtgtcttcggtatgtgaaaacccaattcttcaaccctacaggatccaacaggcaatcgcagctggcatcttacctttatcacccttgttcctccaacaatcatcagccctattacagcagttacctttggtgcatttattggcacaaaacatcagggcacaacaactacaacaacttgtgctagcaaaccttgctgcctactctcagca

SEQ ID NO: 22612 - DNA, 348 bp, Zea mays
  Clone ID: LIB3152-028-P1-K1-H11
aacaacttgttccatttaaccaattggccgcactgaaccccgctgcttatttgcagcagcaaatactactaccatttagccagctagctgcagcaagccgtgcttccttcttgacacagcaacagttgctgcctttctaccagcagtttgcggctaaccccgcaaccctcttacaactacaacaattgttgccctttgtccaacttgctttgacaaacccagcagcctcctaccaacaacacatcattggtggtgccctcttttagattgcttattagttgtaattcaataataaagttttttggatgatgtatgtggccaaccagaaataagaagttacatttccag

SEQ ID NO: 22613 - DNA, 371 bp, Zea mays
  Clone ID: LIB3152-028-P1-K1-H12
gcgctcatccccagccagacccatgcccgtgccaacagccgcattcaagcccgtgccagctgcagggaacctgcggcgttggcagcaccccgatcctgggccagtgcgtcgagttcctgaggcatcagtgcagcccgacggcgacgccctactgctcgcctcagtgccagtcgttgcggcagcagtgttgccagcagctcaggcaggtggagccgcagcaccggtaccaggcgatcttcggcttggtcctccagtccatcctgcagcagcagccgcaaagcggccaggtcgcggggctgttggcggcgcagatagcgcagcaactgacggcgatgtgcggcctgcagcagccgactccatgcccctacgct

SEQ ID NO: 22614 - DNA, 184 bp, Zea mays
  Clone ID: LIB3152-028-P1-K1-H2
gtctttctgcaagtgctgctacggcgaccattttcccacaatgctcacaagctcctatagcttcccttcttcccccgtacctctcaccaacggtgtcttcggtatgtgaaaacccaattcttcaaccctacaggatccaacaggcaatcgcagctggcatcttacctttagttctagatcgcga

SEQ ID NO: 22615 - DNA, 368 bp, Zea mays
  Clone ID: LIB3152-028-P1-K1-H3
agcattcagaaacacaccaagcgaagcgcactagcaacgacctaacaacaatggctaccaagatattagccctccttgcgcttcttgccctttttgtgagcgcaacaaatgcgttcattattccacaatgctcacttgctcctagtgccattattccacagttcctcccaccagttacttcaatgggcttcgaacacctagctgtgcaagccaacatgcaacaacaagcgcttgcggcgagcgtcttacaacaaccaattgcccaattgcaacaacaatccttgccacatctaacaatacaagccatcacaacgcaacagcaacaacagttcctaccagcactgagccacctagccatggtgaaccct

SEQ ID NO: 22616 - DNA, 370 bp, Zea mays
  unsure at all n locations
  Clone ID: LIB3152-028-P1-K1-H5
gcggaanaatcggccaaaatagtttctttaatgaaaaacacacaaagggaagtgcggtagcaacttgctaacaacaaaagtgccgaagatattagcccttcttgagctcgtttacctttcagtgtaggctacatctttacccagtacctctcaacaacggcgtgttccgaatgccattattccacagttcctcccatcaggtacatcaatgggcatcgaacaccctattgtgcaagcctataggctacaacaagcgcttgcggagagcgttttacaacaaccgtttgcccaattacaacaacaatgcttggcacatgtaaccatacaaaccatcgtagcacaactagcgcaacagtttgtgcccgcattg

SEQ ID NO: 22617 - DNA, 201 bp, Zea mays
  unsure at all n locations
  Clone ID: LIB3152-028-P1-K1-H6
aacaaanncttcaatgtaacctattttgaccaacagaaccacggtgcttatttgcagcagtgagaccggctctgtcagctgccagcgcctctgaaatgcagatgccctgcccctgcgcggggctgcagggcttgtacggcgctggcgccggcctgacgacgatgatgggcgccagagggctgtacccgtacgcggagtacc

SEQ ID NO: 22618 - DNA, 246 bp, Zea mays
  unsure at all n locations
  Clone ID: LIB3152-028-P1-K1-H7
gaacccccgggcgacccacgcgaccggcggcagagcaagcacaggancgtttcaccaaacaccaccaaaatggggagcggcgcaactgcgcccgctccgcaacaccaccacctaaccagcacccgcccgccccggcgacaagaggcatgacccccgacccccaccagcacaacaaggaaccaaacccaaactcaacctacgaaccacagcatatcaccgcatctacctaatacccagctccacaca

SEQ ID NO: 22619 - DNA, 169 bp, Zea mays
  Clone ID: LIB3152-028-P1-K1-H8
tcggcatcatataatgaacacgtatttttttcctaacacaaccaaactaggtggggggcttattcttcaaagtactctctgcaattgctcataaccgtgagccataatgtccgcaatggcccactatgctgctatagtctgcccttctacccgcccgtaccttctcacc

SEQ ID NO: 22620 - DNA, 198 bp, Zea mays
  Clone ID: LIB3152-028-P1-K1-H9
agaaagtatttccttcgtcctgaatctctgatctctcacggagttcccctgtatggcgacgcctcgctcaccgagccccagcgccgccgcgcgtctcgattctgcgccgctgctgggcggcgcctccggcggcgggtcccgtcgccgaggtggagcgcttcgtcggccctccctccgaggcgcggtgcggctgctgct

SEQ ID NO: 22621 - DNA, 345 bp, Zea mays
  Clone ID: LIB3152-029-P1-K1-A1
ctttttcgggggacggccgtgggatttcaatccccaactttccaatcctacatggtccaagaggccttccaagcaagcatcttacggtctttagcattaaccctccaacaaccatttgctctattgcaacagccatccttagtgcatctgtatctccaaagaatcgcggcacaacatctacaacaacagttgctaccaacaatcaatcaagtagctgcagcgaaccttgctgcttaccttcagcaacaacagtgtcttccattcaatcaactagatggagtgaaccctgctatctacttgcaggcacaacagcttctaccatttaaccaacttgtcgggagccct

SEQ ID NO: 22622 - DNA, 367 bp, Zea mays
  Clone ID: LIB3152-029-P1-K1-A10
cactaccctactcaaccgccccggcctcagcctcatccccagccacacccatgcccgtgccaacagccgcatccaagcccgtgccagctgcagggaacctgcggcgttggcagcaccccgatcctgggccagtgcgtcgagttcctgaggcatcagtgcagcccgacggcgacgccctactgctcgcctcagtgccagtcgttgcggcagcagtgttgccagcagctcaggcaggtggagccgcagcaccggtaccaggcgatcttcggcttggtcctccagtccatcctgcagcagcagccgcaaagcggccaggtcgcggggctgttggcggcgcagatagcgcagcaactgacggcgatgtgcg

SEQ ID NO: 22623 - DNA, 369 bp, Zea mays
  Clone ID: LIB3152-029-P1-K1-A11
attgagaccaacaagcaacatagatagtggaatccagtagcaacaatagagcaacaatggcgaccaagatattttccctccttatgctccttgctctttctgcatgtgttgctaacgcgacaattttccctcaatgctcacaagctcctatagcttcccttcttcccccataccttccatcaatgatagcttcagtatgtgaaaacccagctcttcaaccctataggctccaacaagcaatcgcagcaagcaacatacctttatcacccttgtttcaacaatcgccagccctatctttggtgcagtcattggtacaaaccatcagggcacagcagctgcagcaactcgtgctacctgtgatcaaccaag

SEQ ID NO: 22624 - DNA, 374 bp, Zea mays
  Clone ID: LIB3152-029-P1-K1-A12
atcaaccacaaccacaacattactttgtggagtaacaccaacaccatcaagtggacatgctacacacaaaaacatcagcatcatcatgatgtttatgttcaacaactgcatcgacaaccggagaaccttcaacaactgcatcaacagctcctacagcatcatttatgtgaaggtcaacaacatcattaccaacaatcacatgggcatgtgcaacatctcgaacagtgtcatgtgcaacacgaaggacagagccgtgagctacatcattaacaacattttcagggtcatgacaggcatatacaaccacaacagcctgatgcatatcatcagggccaggaaaaatcacaacagcaacactgtcattgacaggagca

SEQ ID NO: 22625 - DNA, 371 bp, Zea mays
  Clone ID: LIB3152-029-P1-K1-A3
cggacgcgtgggtagcaacaatagagcaccaatggcgaccaagatattttccctccttatgctccttgctctttctgcatgtgttgctaacgcgacaattttccctcaatgctcacaagctcctatagcttcccttcttcccccataccttccatcaatgatagcttcagtatgtgaaaacccagctcttcaaccctataggctccaacaagcaatcgcagcaagcaacatacctttatcacccttgtttcaacaatcgccagccctatctttggtgcagtcattggtacaaaccatcatggcacagcagctgcagcaactcgtgctacctgtgatcaaccaagtagctctggcaaacctttctccctact

SEQ ID NO: 22626 - DNA, 257 bp, Zea mays
  Clone ID: LIB3152-029-P1-K1-A4
aacatgcttggacgaatcctaccaccttattgcaaccgcccaccattggtggggccatcttctagattctttattattacagtttaaatcataaagttctcatgctgatatgtgcgacctctcagtaataaagttttagagatctatattttaaaaaaaaaaagataaagaaagccaaaaccaaaatataaaacaatataaaaaaaaaggaagaaaggggaacaagcaacattaccttaataaccatagattaaacg

SEQ ID NO: 22627 - DNA, 376 bp, Zea mays
  Clone ID: LIB3152-029-P1-K1-A5
gccgattccaagcccgtgccagctgctgggaacctgcggcgttggcagcacccggatcctgggccagtgcgtcgagtttctgaggcatcagtgcagcccgacggcgacgccctactgctcgcctcagtgccagtcgttgcggcagcagtgttgccagcagctcaggcaggtggagccgcagcaccggtaccaggcgatcttcggcttggtcctccagtccatcctgcagcagcagccgcaaagcggccaggtcgcggggctgttggcggcgcagatagcgcagcaactgacggcgatgtgcggcctgcagcagccgactccatgcccctacgctgctgccggcggtgtcccccactgaagaaactatgtgctgtag

SEQ ID NO: 22628 - DNA, 375 bp, Zea mays
  Clone ID: LIB3152-029-P1-K1-A6
ttgagaccaactagcaccatagaaggcacaatagtgtaccaacaatggcagccaaaatattttgcctccttatgctccttggtctttctgcaagtgctgctacggcgaccattttcccgcaatgctcgcaagctcctatagcttcccttcttcccccgtacctctcaccagcggtgtcttcggtatgtgaaaacccaattcttcaaccctacaggatccaacaggcaatcgcagctggcatcttacctttatcacccttgttcctccaacaatcatcagccctattacaacagttacctttggtgcatttattggcacaaaacatcagggcacaacaactacaacaacttgtgctagcaaaccttgctgcctact

SEQ ID NO: 22629 - DNA, 356 bp, Zea mays
  unsure at all n locations
  Clone ID: LIB3152-029-P1-K1-A7
gagaccaactagcaacatagatagctcaatagtgtaccaacaatggcagccaaaatattttgcttccttatgctccttggtctttctgcaagtgttgctaccgcaaccattttcccacaatgctcacaagctcctatagcttcccttcttcccccatacctctcaccagcggtgtcttcaatgtgtgaaaacccaattgttcaaccctacaggatccaacaggcaatcgcaacaggcatcttaccattatcacccttgttcctccaacaaccgtcagccctattacagcagttacctttggtccatttggtggcacaaaacatcanggcacaacaactacaacaacttgtgctagc

SEQ ID NO: 22630 - DNA, 367 bp, Zea mays
  Clone ID: LIB3152-029-P1-K1-A8
caactagcaacatagaaagcacaatagtgtaccaacaatggcagccaaaatatgttgcttccttatgctccttggtctttctgcaagtgctgctaccgcaaccattttcccacaatgctcacaagctcctatagcttcctttcttcccccatacctctcaccagcggtgtcttcagtatgtgaaaacccaattcttcaaccctacaggatccaacaggcaatcgcagcaggcatcttacctttatcacccttgttccttcaacaaccgtcagccctattacagcagttacctttggtgcatttgttggcacaaaacatcaaggcacaacaacttcaacaacttgtgctaggaaaccttgctgcctac

SEQ ID NO: 22631 - DNA, 365 bp, Zea mays
  Clone ID: LIB3152-029-P1-K1-A9
cgcacatatctactatactatactctaggaagcaaggacaccaccgccatggcagccaagatgcttgcattgttcgctctcctagctctttgtgcaagcgccactagtgcgacccatattccagggcacttgccaccagtcatgccattgggtaccatgaacccatgcatgcagtactgcatgatgcaacaggggcttgccagcttgatggcgtgtccgtccctgatgctgcagcaactgttggccttaccgcttcagacgatgccagtgatgatgccacagatgatgacgcctaacatgatgtcaccattgatgatgccgagcatgatgtcaccaatggtcttgccgagcatgatgtcgcaaat

SEQ ID NO: 22632 - DNA, 275 bp, Zea mays
  Clone ID: LIB3152-029-P1-K1-B1
aacaatcatatcaagtagttgcatgcgaacacttggtgcttacctccagaagcaacagcttattgcattcaatcaactagatggggtgaaccctgctatctacttgctggctcaacagctactaccatttaacctacttgtcgggagcccttatgccttcttactgcaacaacagcttctaccattccatctgcaagctgtggcaaacattgctgctgtcttgagacaacaacatttgctgccattttacccacaggttgtgggaaacattaatg

SEQ ID NO: 22633 - DNA, 372 bp, Zea mays
  Clone ID: LIB3152-029-P1-K1-B10
cagaaacacaccaagcgaagcgcactagcaacaacctaacaacaatggctaccaagatattatccctccttgcgcttcttgcgctttttgcgagcgcaacaaatgcgtccattattccacaatgctcacttgctcctagttccattattccacagttcctcccaccagttacttcaatggccttcgaacacccagctgtgcaagcctataggctacaacaagcgattgcggcgagcgtcttacaacaaccaattgcccaattgcaacaacaatccttggcacatctaacaatacaaaccatcgcaacgcaacagcaacaacagttcctaccagcactgagccacctagccatggtgaaccctgtcgcctact

SEQ ID NO: 22634 - DNA, 373 bp, Zea mays
  Clone ID: LIB3152-029-P1-K1-B11
agaccacaacaagaagaagcgtagtcgtcgccggaaggaaaggcgcggagcaagatgtcgtggcaggcgtacgtcgacgagcacctgatgtgcgagatcgaaggacagcatctcagcgccgccgccatcgtcggtcacgacggcagcgtttgggcgcagtccgagagcttccccgagttaaagcctgaggaggttgctggtatcataaaggactttgatgaacctggtactcttgcaccaactggtcttttcgttggaggtacaaagtacatggtgatccaaggtgaacctggagttgtcatccgaggaaagaagggcactgggggcattactatcaagaaaaccggcatgtccttgattattggtgtctacg

SEQ ID NO: 22635 - DNA, 361 bp, Zea mays
  Clone ID: LIB3152-029-P1-K1-B12
ggcggagagaactagacggccaaccgcgccaccctgccgaggcagccatggtgcatgttaacttctaccgcaactatgggaagactttcaagaagccaaggcggacgtatgagaaggagcgcctagatgctgagctgaagctggttggtgagtatggcctgcggtgcaagcgcgagctatggcgcgtgcagtatgccctgagccgtatcaggaatgcagatagggagctgctcaccctggatgagatgaacccacgccgtatctttgagggcgaggcactcctgcgacgcatgaacagatatggtctgcttggcgagggacagaacaagcttgattacgtgctcgccctcactgttgagaa

SEQ ID NO: 22636 - DNA, 373 bp, Zea mays
  Clone ID: LIB3152-029-P1-K1-B2
gcaacatagaaagcacaatagtgtaccatcaatggcagccaaaatattttgcttgcttatgctccttggtctttctgcaagtgttgctaccgcaaccattttcccacaatgctcacaagctcctatagcttcccttcttcccccatacctctcaccagcggtgtcttcaatgtgtgaaaacccaattgttcaaccctacaggatccaacaggcaatcgcaacaggcatcttaccattatcacccttgttcctccaacaaccgtcagccctattacagcagttacctttggtccatttggtggcacaaaacatcagggcacaacaactacaacaacttgtgctagcaaaccttgctgcatactctcagcaacat

SEQ ID NO: 22637 - DNA, 371 bp, Zea mays
  Clone ID: LIB3152-029-P1-K1-B3
attcagaaacacaccaagcgaagcgcactatcaacgacctaacaacaatggctaccaagatattagccctccttgcgcttcttgccctttttgtgagcgcaacaaatgcgttcattattccacaatgctcacttgctcctagtgccattattccacagttcctcccaccagttacttcaatgggcttcgaacacctagctgtgcaagccaacatgcaacaacaagcgcttgcggcgagcgtcttacaacaaccaattgcccaattgcaacaacaatccttgccacatctaacaatacaagccatcacaacgcaacagcaacaacagttcctaccagcactgagccacctagccatggtgaaccctgccgcc

SEQ ID NO: 22638 - DNA, 266 bp, Zea mays
  Clone ID: LIB3152-029-P1-K1-B4
cgattccgtcgccacgctccttagccactgcactaaagccatatgtccaacatggcgcaaaatatttgctctatgctctgtattttgagtgctgtcgcaccttttcccatgctacagcttatgtccttttccctcctctaccacgggctcgttggaacccattttacctacgaccacgcatcagtgcattaccttatacctgtctcacatatagcctatcacagtacttgtcattatgccaacatagccacactcacactggctgc

SEQ ID NO: 22639 - DNA, 374 bp, Zea mays
  Clone ID: LIB3152-029-P1-K1-B5
gcgaagcgcactagcaacaacctatctacaatggctaccaagatattagccctccttgcgcttcttgcccttttagtgagcgcaacaaatgcgttcattattccacagtgctcacttgctcctagtgccattattccacagttcctcccaccagttacttcaatgggcttcgaacatccagccgtgcaagcctacaggctacaactagcgcttgcggcgagcgtcttacaacaaccaattgcccaattgcaacaacaatccttggcacatctaaacctacaaaccatcgcaacgcaacagcaacaacagtttctgccatcactgagccacctagccgtggtgaaccctgtcgcctacttgcaacagcagctact

SEQ ID NO: 22640 - DNA, 376 bp, Zea mays
  Clone ID: LIB3152-029-P1-K1-B6
ctcagtgccagtcgttgcggcagcagtgttgccagcagctcaggcaggtggagccgcagcaccggtaccaggcgatcttcggcttggtcctccagtccatcctgcagcagcagccgcaaagcggccaggtcgcggggctgttggcggcgcagatagcgcagcaactgacggcgatgtgcggcctgcagcagccgactccatgcccctacgctgctgccggcggtgtcccccactgaagaaactatgtgctgtagtatagccgctggctagctagctagttgagtcatttagcggcgatgattgagtaataatgtgtcacgcatcaccatgggtggcagtgtcagtgtgagcaatgacctgaatgaacaattgaaat

SEQ ID NO: 22641 - DNA, 368 bp, Zea mays
  Clone ID: LIB3152-029-P1-K1-B7
atacatagtgaagtacactagcattatcttagcaccaatgggagccaagatttttgccctccttgccctccttgctctttcagcaagcgctgctacctcgacttttattccacaatgctcacaacaatacctctctccggcgacagccgtgggatttcaatacccaactatacaatcctacatggtacaagaggccatccaagcaagcatcttacggtcattagcattaaccctccaacaaccatatgctctattgcaacagccatccttagtgcatctgtatctccaaagaatcgcggcacaacaactacaacaacagttgctaccaacaatcaatcaagtagttgcagcgaaccttgctgcttacc

SEQ ID NO: 22642 - DNA, 369 bp, Zea mays
  Clone ID: LIB3152-029-P1-K1-B9
cggacgcgtgggccaacaggcaatcgcagctggcatcttacctttatcacccttgttcctccaacaatcatcagccctattacaacagttacctttggtgcatttattggcacaaaacatcagggcacaacaactacaacaacttgtgctagcaaaccttgctgcctactctcagcaacagcagtttcttccattcaaccaactaggttcattgaactctgcttcttatttgcaacaacaacaactaccattcagccagctacctgctgcctacccccagcaatttcttccattcaaccaactagcagcattgaactctcctgcttatttacagcagcaacaactactaccattcagccagctagctgg

SEQ ID NO: 22643 - DNA, 354 bp, Zea mays
  Clone ID: LIB3152-029-P1-K1-C1
tagcattcataaacacaccaagcgatgtgcgctagcatcaacctaacaacaagggctaccaagatattcgccctccttgcgctacttgcccttttagtgagcgcaccaaacgcgttgattaccacacagagctgacttgcccctagcgccatcatggcacagccactcccaccaggtacttcaatgggcttataacattcatccgtgcctgcctacaggctacaactcgcgcttgctgatagcgtctcacaactaccaattgccctattgcaacatcaatactgggcacatctcaacctacaatccattgtaacagcacatcaacaacagtttctgccatcactgtagccacct

SEQ ID NO: 22644 - DNA, 372 bp, Zea mays
  Clone ID: LIB3152-029-P1-K1-C10
gcaaagcggcagtgcgtagagaggatcgtcgaacagaacagcatgaagatggtcatcgttctcgtcgtgtgcctggctctgtcagctgccagcgcctctgcaatgcagatgccctgcccctgcgcggggctgcagggcttgtacggcgctggcgccggcctgacgacgatgatgggcgccggcgggctgtacccctacgcggagtacctgaggcagccgcagtgcagcccgctggcggcggcgccctactacgccgggtgtgggcagacgagcgccatgtaccagccgctccggcaacagtgctgccagcagcagatgaggatgatggacgtgcagtccgtcgcgcagcagctgcagatgatgatgcagctt

SEQ ID NO: 22645 - DNA, 370 bp, Zea mays
  Clone ID: LIB3152-029-P1-K1-C11
ctagatcgctcgctgtggccaatgcacctacatacctgcaacatcaattgttgcaacagattgtaccagctctgactcagctagttgtggcaaaccctgctgcctacttgcaacagctgcttccattcaaccaactgactatgtcgaactctgctgcgtacctacaacagcgacaacagttacttaatccactagcagtggctaacccattggtcgctgccttcctacagcagcaacaattgctgccatacaaccagttctctttgataaaccctgtcttgtcgaggcagcaacccatcgttggaggtgccatcttttagattacatatgagatgtactcgataatggtgccctcattccggcatgtgtt

SEQ ID NO: 22646 - DNA, 372 bp, Zea mays
  Clone ID: LIB3152-029-P1-K1-C12
tttgagcattcagaaacacaccaagcgaagctacctagcaacgacttaacaacaatggctaccaagatattagccctccttgcgcttcttgccctttttgtgagcgcaacaaatgcgttcattattccacaatgctcacttgctcctagtgccattataccacagttcctccgaccagttacttcaatgggcttcgaacacctagctgtgcaagcctacaggctacaacaagcgcttgcggcgagcgtcttacaacaaccaattaaccaattgcaacaacaatccttggcacatctaaccatacaaaccatcgcaacacaacagcaacaacagttcctaccagcactgagccaactagatgtggtgaaccct

SEQ ID NO: 22647 - DNA, 368 bp, Zea mays
  Clone ID: LIB3152-029-P1-K1-C2
gtcctgcagtccttcctgcagcagcagccgcagggcgagctcgcggcgctgatggcggcccaggtagcgcagcagctgacggcgatgtgcggcctgcagctgcagcagccaggtccctgcccttgcaacgcagctgccggcggtgtctactactgaggaaactatgtactgtagtaataatgtaatggagccgctgactagctacctagctcgctagtttactcatttagcggcgatgagtaacgtagtgtcacccatcaccatgggtggcagtgtgagcaatgacctgaatgaaccattgaaatggaaaggaataatatataaggaaaaaagatgattggaaactgataaaaaaaaaaaaaaataaa

SEQ ID NO: 22648 - DNA, 370 bp, Zea mays
  Clone ID: LIB3152-029-P1-K1-C3
gaccattagctttatctactccagagcgcagaagaacccgatcgacaccatgagggtgttgctcgttgccctcgctctcctggctctcgctgcgagcgccacctccacgcatacaagcggcggctgcggctgccagccaccgccgtcggttcatctaccgccgccggtgcatctgccacctccggttcacctgccacctccggtgcatcttccaccgccggtccacctgccgtcgccggtccacctgccaccgccggtccatgtgccgtcgccggttcatctgccgccgccaccatgccactaccctactcaaccgccccggcctcagcctcatccccagccacacccatgcccgtgccaacagccgcat

SEQ ID NO: 22649 - DNA, 373 bp, Zea mays
  Clone ID: LIB3152-029-P1-K1-C5
atttaatcccggctttttccttgcccaacgggctctccctcccatttcctgcgagggggttggtggcgatggccttcaagctgatcaccaagcccgcggcggcgtcgcccgctgctgcttactggggagatctcgcccgggggccgcagggtacgagccgcgttgccttcggaccatcgcccaggaacaaggggctccgcgcggccaacaactccgcaacgcccatagctaaggtagagagggttgatcgaagtgacatattgacattggatagcatcagacaagttttgattagactagaagacagcatcatatttggccttttggagagagcacagttttgttacaatgctgatacatatgatagcaatgc

SEQ ID NO: 22650 - DNA, 372 bp, Zea mays
  Clone ID: LIB3152-029-P1-K1-C6
ttttatttcctataaacacccctttttttttgctctacctacaacctaccaacagggggttcctagatattagcccttacttgcgctactagacctcttagtgtgctcaacaaatgctttcatcattccacatagctcacttgctcctaatgccactatcccacatgtcctcccaccagctactagaatcgggtgcgaacatgctgccatgcaagcctacacgctacaactagcgcttgcagggagcgtcttacaacaaccaattgcccaattgcaacaacactccttggcacatttaaacctacaaaccatctcatcgcaacatctacaactagcttctgccttctctgatccacctagccgtggtgtacc

SEQ ID NO: 22651 - DNA, 367 bp, Zea mays
  Clone ID: LIB3152-029-P1-K1-C7
caactagcaacatagaaagcacaatagtgtaccaacaatggcagccaaaatattttgcctccttatgctccttggtatttctgcaagtgctgctacggcgaccattttcccgcaatgctcacaagctcctatagcttcccttcttcccccgtacctctcaccagcggtgtcttcggtatgtgaaaacccaattcttcaaccctacaggatccaacaggcaatcgcagctggcatcttacctttatcacccttgttcctccaacaatcatcagccctattacagcagttacctttggtgcatttattggcacataacatcagggcacaacaactacaacaacttgtgctagcaaaccttgctgcctac

SEQ ID NO: 22652 - DNA, 212 bp, Zea mays
  Clone ID: LIB3152-029-P1-K1-C8
caactagcaacatagaaagcatttttttgtaccaacaatgtcatacaaaggggggtgccttctaatgctccttggtacttctgcatgtgctgttacggctaccattatccctaaatgctcacaagctcctatagcttcctttattttcacgaaccttttaccagttgtttttttacattgtgtaaacccaattcttaaacctttcaggatcc

SEQ ID NO: 22653 - DNA, 357 bp, Zea mays
  Clone ID: LIB3152-029-P1-K1-C9
atcagtaccatcaatcatcattcatcttagtagtataggcaccaaatcaaatctgcaacatcaattatctaactccaaaaaccatgaagctggtgcttgtggttcttgctttcattgctttagtatcaagtgtttcttgtacacagacaggcggctgcagctgtggtcaacaacaaagccatgagcagcaacatcatccacaacaacatcatccacaaaaacaacatcatctaccaccaccacaacatcaccagcagctgcaacaccaacaacaacaagttcacatgcaaccacataaacatcagcaacaacaagaagttcatgttcaacaacaacaacaacatccgcagcaccaac

SEQ ID NO: 22654 - DNA, 345 bp, Zea mays
  Clone ID: LIB3152-029-P1-K1-D1
tttaacctcaccaggcgaagcgcactaccaacttcctaacagcaatggttaccaagaattagccctcttagcgctccttgccactatatgtgagcgcaacaaatgcgttcattattccacaatgatcacgtgctcctagtgccgtaattccacagtgtgctccacctgtttcttaaaagggctttgaacaccgtgctgtgcatgccttcatgcaacaacaagcgcctgcggtgtgcgtgtttcaacaaccaagtgcccatactgcgacatcaagacatgccacttcttacaatacaagccataacaacgcatcagcaacaacagctactaccatcactgctccac

SEQ ID NO: 22655 - DNA, 336 bp, Zea mays
  Clone ID: LIB3152-029-P1-K1-D10
atcctgcagcagcagccgcatagcggccaggtcgcggggctgttggcggcgcagatagcgcagcaactgacggcgatgtgcggcctgcagcagccgactccatgcccctacgctgctgccggcggtgtcccccactgaagaaactatgtgctgtagtatagccgctggctagctagctagttgagtcatttagcggcgatgattgagtaataatgtgtcacgcatcaccatgggtggcagtgtcagtgtgagcaatgacctgaatgaacaattgaaatgaaaagaaaaaagtattgttccaaaaaaaaaaaaaaagggcggccgcccttcttttct

SEQ ID NO: 22656 - DNA, 371 bp, Zea mays
  Clone ID: LIB3152-029-P1-K1-D11
attcagaaacacaccaagcgttgctcattagcaacaacctaacaacaatggctaccaagatattatccctccttgcgcttcttgcgctttttgcgagcgcaacaaatgcgttcattattccacaatgctcacttgctccaagttccattattacacagttcctcccaccagttacttcaatgggcttcgaacacccagctgtgcaagcctataggctacaacaagcaattgcggcgagcgtcttacaacaaccaatttcccagttgcaacaacaatccttggcacatctaacaatacaaaccatcgcaacgcaacagcaacaacaattcctaccagcactgagccacctagccatggtgaaccctgccgcc

SEQ ID NO: 22657 - DNA, 370 bp, Zea mays
  Clone ID: LIB3152-029-P1-K1-D12
ccaactagcaacatagaaagcacaatagtgtaccaacaatggcagccaaaatattttgcctccttatgctccttggtctttctgcaagtgctgctacggcgaccattttcccacaatgctcacaagctcctatagcttcccttcttcccccgtacctctcaccagcggtgtcttcggtatgtgaaaacccaattcttcaaccctataggatccaacaggcaatcgcagctggcatcttacctttatcacccttgttcctccaacaatcatcagccctattacagcagttacctttggtgcatttattggcacaaaacatcagggcacaacaactacaacaacttgtgctagcaaaccttgctgcctactc

SEQ ID NO: 22658 - DNA, 368 bp, Zea mays
  Clone ID: LIB3152-029-P1-K1-D2
attcgcatccgcctccttttccttggagccgaagaagagggaaaggaagggaggacagccgccgccgccgccatcaccaccgtcaggatgcattccacgaacctcctgctcgaggagcccatccggatggcctccatcctcgagccctccaagcccagctacttcccggcgatgaccaagatcgtcggcactctcggccccaagtcgcgctccgtcgacacgatctccgcctgcctcaaggccggcatgtccgtcgcccggttcgatttctcgtggggggacgccgcgtaccaccaggagacgctggagaacctcaagctctccatcaagtccaccaagaagctctgcgctgtcatgctcgacaccgt

SEQ ID NO: 22659 - DNA, 375 bp, Zea mays
  Clone ID: LIB3152-029-P1-K1-D4
cacctagcaacatagaaggcacatttttgtcccaacaatggcagccaaaatattttgcctccttatgctccttggtctttctgcaagtgctgctacggcgaccattttcccacaatgctcacaagctcctatagcttcccttcttcccccgtacctctcaccagcggtgtcttcggtatgtgaaaacccaattcttcaaccctataggatccaacaggcaatcgcagctggcatcttacctttatcacccttgttcctccaacaatcatcagccctattacagcagttacctttggtgcatttattggcacaaaacatcagggcacaacaactacaacaacttgtgctagcaaaccttgctgcctactctcagca

SEQ ID NO: 22660 - DNA, 376 bp, Zea mays
  Clone ID: LIB3152-029-P1-K1-D5
gccagccaccgccgccggttcatttaccgccgccggtgcatctgccacctccggttcacctgccacctccggtgcatctcccaccgccggtccacctgccgccgccggtccacctgccaccgccggtccatgtgccgccgccggttcatctgccgtcgccaccatgccactaccctactcaaccgccccggcctcagcctcatccccagccacacccatgcccgtgccaacagccgcatccaagcccgtgccagctgcagggaacctgcggcgttggcagcaccccgatcctgggccagtgcgtcgagttcctgaggcatcagtgcagcccgacggcgacgccctactgctcgcctcagtgccagtcgttgcggca

SEQ ID NO: 22661 - DNA, 373 bp, Zea mays
  Clone ID: LIB3152-029-P1-K1-D6
cccacgcgtccgattttgagcattttgaaacacaccaagcgaagcacattagcaacaacctaacaacaatggctaccaagatattatccctccttgcgcttcttgcgctttttgcgagcgcaacaaatgcgttcattattccacaatgctcacttgctccaagttccattattacacagttcctcccaccagttacttcaatgggcttcgaacacccagctgtgcaagcctataggctacaacaagcaattgcggcgagcgtcttacaacaaccaatttcccagttgcaacaacaatccttggcacatctaacaatacaaaccatcgcaacgcaacagcaacaacaattcctaccagcactgagccacctagc

SEQ ID NO: 22662 - DNA, 365 bp, Zea mays
  Clone ID: LIB3152-029-P1-K1-D7
agaccatcaaacatgtgccagctccctctcgcagtcgccgcaatggagagcaccttcatcatgatcaagcctgacggcgtccagaggggcctcattggtgagatcatcagccgttttgagaagaagggcttctacctcaaggccttgaagcttgtgaacgtggagaggtcgtttgctgagaagcactacgccgatctcgcctccaagcccttcttccagggcctcgtggactacatcatctctggccctgtggtggccatggtctgggagggcaagagcgtcgtcacaactggccgcaagatcattggcgccaccaaccccctggcttctgagcccggcaccatccgtggcgactttgctgtcga

SEQ ID NO: 22663 - DNA, 368 bp, Zea mays
  Clone ID: LIB3152-029-P1-K1-D8
gcacaatagtgcaccaacaatggctttcaaaatattttgcttccttatgctccttggtctttctgcaagtgttgctaccgcaaccattttcccacaatgctcacaagctcctatagcttcccttcttcccccatacctatcaccagcggtgtcttcaacgtgtgaaaacccaattgttcaaccctacaggatccaacaggcattcgcaacaggcatcttaccattatcacccttgttccttcaacaaccgtctgccctattacagtagttacctttggtccatttggtggcacaaaacatgatggcacaacaactacaacaacttgtgctagcaaaccttgctgcatactctcagcaacatcagtttc

SEQ ID NO: 22664 - DNA, 367 bp, Zea mays
  Clone ID: LIB3152-029-P1-K1-D9
caatagtgtaccaacaatggcagccaaaatattttgcctccttatgctccttggtatttctgcaagtgctgctacggcgaccattttcccgcaatgctcacaagctcctatagcttcccttcttcccccgtacctctcaccagcggtgtcttcggtatgtgaaaacccaattcttcaaccctacaggatccaacaggcaatcgcagctggcatcttacctttatcacccttgttcctccaacaatcatcagccctattacagcagttacctttggtgcatttattggcacaaaacatcagggcacaacaactacaacaacttgtgctagcaaaccttgctgcctactctcagcaacagcagtttctt

SEQ ID NO: 22665 - DNA, 396 bp, Zea mays
  Clone ID: LIB3152-029-P1-K1-E1
tttcccgggtggcccaactcgtccgtgagcatttagaaacacaccatgcgaactgcactagcaacaacctaacaacatcggctgccaagatattatccctagcttgcgcttcttgcgctccttgcgagcgcaacacatgcgtacattattgcacagtgctcacttgctcctagttccatatatatcacagttcctcccaccatgttctgtaatggccttcgaacacccaattgtgcaagcctatacgctacaacaagcgatttgctgtagcgatttacaacaaccaattgcccattcgccacaacaatccttggcacatctaacaatacataccatcgcaacgcagcagctacaacagcatctaccaacactgagtcatctagccatggtgaaccc

SEQ ID NO: 22666 - DNA, 373 bp, Zea mays
  Clone ID: LIB3152-029-P1-K1-E11
tggactcgtgggcggacgcgtgttctgacgcgtgggattgagaccaacaagcgacatagaaagtggaatccagttgcaacaatagagcaacaatggcgaccaagatattttccctccttatgctccttgctctttctgcatgtgttgctaacgcgacaattttccctcaatgctcacaagctcctatagcttcccttcttcccccataccttccatcaatgatagcttcagtatgtgaaaacccagctcttcaaccctataggctccaacaagcaatcgcagcaagcaacatacctttatcacccttgtttcaacaatcgccagccctatctttggtgcagtcattggttcaaaccattcatggcacagcatc

SEQ ID NO: 22667 - DNA, 363 bp, Zea mays
  Clone ID: LIB3152-029-P1-K1-E12
caacatacctttatcacccttgtttcaacaatcgccagccctatctttggtgcagtcattggtacaaaccatcagggcacagcagctgcagcaactcgtgctacctgtgatcaaccaagtagctctggcaaacctttctccctactctcagcaacaacaatttcttccattcaaccaactgtctacattgaaccgtgctgcttatttgcagcaacaactattaccattcagccagctagctactgcctactctcagcaacaacaacttcttccatttaaccaattggccgcactgaaccccgctgcttatttgcagcagcaaatactactaccatttagccagctagctgcagcaagccgtgc

SEQ ID NO: 22668 - DNA, 181 bp, Zea mays
  Clone ID: LIB3152-029-P1-K1-E2
cctgtctttgaggttgtccgaccattccacatgctacactctatgcttcttttcccatccttaccacggttcaaggtgaaaacccatgtaacctcagatccaacgcaccacagcttaccattataccctgtctcacacctagccttacgattccttggtcatgggccaaaatagccacact

SEQ ID NO: 22669 - DNA, 371 bp, Zea mays
  Clone ID: LIB3152-029-P1-K1-E3
ccagcggtgtcttcggtatgtgaaaacccaattcttcaaccctataggatccaacaggcaatcgcagctggcatcttacctttatcacccttgttcctccaacaatcatcagccctattacagcagttacctttggtgcatttattggcacaaaacatcagggcacaacaactacaacaacttgtgctagcaaaccttgctgcctactctcagcaacaacagtttcttccattcaaccaactagctgcattgaactctgcttcttatttgcaacaacaacaactaccattcagccagctatctgctgcctacccccagcaatttcttccattcaaccaactgacagctttgaactctcctgcttatttaca

SEQ ID NO: 22670 - DNA, 364 bp, Zea mays
  Clone ID: LIB3152-029-P1-K1-E4
agaccattagctttatctactccatagcgcagaagaacccgatcgacaccatgagggtgttgctcgttgccctcgctctcctggctctcgctgcgagcgccacctccacgcatacaagcggcggctgcggctgccagccaccgccgccggttcatctaccgccgccggtgcatctgccacctccggttcacctgccacctccggtgcatctcccaccgccggtccacctgccgccgccggtccacctgccaccgccggtccatgtgccgccgccggttcatctgccgccgccaccatgccactaccctactcaaccgacccggcctcagcctcatccccagccacacccatgcccgtgccaaca

SEQ ID NO: 22671 - DNA, 375 bp, Zea mays
  Clone ID: LIB3152-029-P1-K1-E6
tctgtatctccaaagaatcgcggctcaacaactacaacaacagttgctaccaacaatcaatcaagtagttgcagcgaaccttgctgcttacctccagcaacaacagtttcttccattcaatcaactagatggggtgaaccctgctatctacttgcaggcacaacagctactaccatttaaccaacttgtcgggagcccttatgccttcttactgcaacaacagcttctaccattccatctgcaagctgtggcaaacattgctgctttcttgagacaacaacatttgttgccattttacccacaggttgtgggaaacattaatgccttcttgcaacagcaacaattgctaccattctacccacagaatgtggcaaa

SEQ ID NO: 22672 - DNA, 368 bp, Zea mays
  Clone ID: LIB3152-029-P1-K1-E7
gcaacatagaaagcacaatagtgttccaacaatggcagccaaaatattttgcttccttatgctccttggtctttctgcaagtgttgctaccgcaaccattttcccacaatgctcacaagctcctatagcttcccttcttcccccatacctctcaccagcggtgtcttcaatgtgtgaaaacccaattgttcaaccctacaggatccaacaggcaatcgcaacaggcatcttaccattatcacccttgttcctccaacaaccgtcagccctattacagcagttacctttggtccatttggtggcacaaaacatcagggcacaacaactacaacaacttgtgctagcaaaccttgctgcatactctcagc

SEQ ID NO: 22673 - DNA, 371 bp, Zea mays
  Clone ID: LIB3152-029-P1-K1-F1
tggcatcttataaagcccactattgtgccaacaatggcggccaaaattttttgcctccttatgctccttggactttctgcaagcgctgttaccgggaccattttcccgaaatgctcgcaagctcctatagctatccttctttcgccgcacctctcaccagcggtagtcttctgaatgtgaaaacccaattcttcaaccctacaggatccaacaggcaatcacagatggcattttacctttatcacccttcgtgctgcaacaatcatcagccctattacatcagttacctttggtgcatttattggcacaaaacatcagggcacaacaactacaacaacttgtgctagcaaaccttgctgactactctcagc

SEQ ID NO: 22674 - DNA, 375 bp, Zea mays
  Clone ID: LIB3152-029-P1-K1-F10
gcaacatagaaagtggaatccagttgcaacaatagagcaacaatggcgaccaagatattttccctccttatgctccttgctctttctgcatgtgttgctaacgcgacaattttccctcaatgctcacaagctcctatagtttcccttcttcccccataccttccatcaatgatagcttcagtatgtgaaaacccagctcttcaaccctataggctccaacaagcaatcgcagcaagcaacatacctttatcacccttgtttcaacaatcgccagccctatctttggtgcagtcattggtacaaaccatcagggcacagcagctgcagcaactcgtgctacctgtgatcaaccaagtagctctggcaaacctttct

SEQ ID NO: 22675 - DNA, 332 bp, Zea mays
  Clone ID: LIB3152-029-P1-K1-F11
gaccaactagcaacatagaaagcacaatagtgtaccaacaatggcagccaaaatattttgcctccttatgctccttggtctttctgcaagtgctgctacggcgaccattttcccgaaatgctcgcaagctcctatagcttcccttcttcccccgtacctctcaccagcggtgtcttcggtgtgtgaaaacccaattcttaaaccctacgggatccaacaggcaatcacagctggtctacctttataccaccgttgctccaacaacaatcatccctcttacatcagttacctttggtgcatttattggcgcaaaacattatgggacaaacaac

SEQ ID NO: 22676 - DNA, 164 bp, Zea mays
  Clone ID: LIB3152-029-P1-K1-F12
caattgctgccattcaaccaacttgctttgacaaacccagcagtgttctaccaacaacccatcattggtggtgccctcttttagatttcttatgagttatagttcaataataaagttttttatctgatgtttgtggcttcccagaaataagaaagtacatttct

SEQ ID NO: 22677 - DNA, 360 bp, Zea mays
  Clone ID: LIB3152-029-P1-K1-F2
gttggcttctcctccccctccggttcggtttcgggttcgtgaggttctccggggttcggtttcgtgggtgagcggatcgagatggcggcgtcggatgttgagtaccgctgcttcgtctgcggcctcgcctgggccacggacgaccactccctccacaacgccttcagcacctacggggaggtcctcgagtccaagatcatcctcgatcgggagacgcagaggtcccgcggcttcggcttcgtcaccttctccacggaggaggcgatgcggaacgccatcgagggcatgaacggcatggagctggacggccgctacatcaccgtcaacgaggcccagtcccgcggcggccgtggaggcggc

SEQ ID NO: 22678 - DNA, 371 bp, Zea mays
  Clone ID: LIB3152-029-P1-K1-F3
attttgagcattcagaaacacaccaagcgaagcgcactagcaacgacctaacaacaatggctaccaagatattagccctccttgcgcttcttgccctttttgtgagcgcaacaaatgcgttcattattccacaatgctcacttgctcctagtgccattattccacagttcctcccaccagttacttcaatgggcttcgaacacctagctgtgcaagccaacatgcaacaacaagcgcttgcggcgagcgtcttacaacaaccaattgcccaattgcaacaacaatccttgccacatctaacaatacaagccatcacaacgcaacagcaacaacagttcctaccagcactgagccacctagccatggtgaac

SEQ ID NO: 22679 - DNA, 343 bp, Zea mays
  Clone ID: LIB3152-029-P1-K1-F4
attttgagcattcagaaacacaccttgttaagcgcactagcaacgacctaacaacaatggctaccaagatattagccctccttgcgcttcttgccctttttgtgagcgcaacaaatgcgttcattattccacaatgctcacttgctcctagtgccattattccacagttcctcccaccagttacttcaatgggcttcgaacacctagctgtgcaagccaacatgcaacaacaagcgcttgcggcgagcgttttacaacatccaatagcccaattgcaacaacattccttgccacatttaacaatacaagccattacaacgcatcagttacaacagtttctacc

SEQ ID NO: 22680 - DNA, 170 bp, Zea mays
  Clone ID: LIB3152-029-P1-K1-F5
cacctcgtcacataagccatttccaactggcgcaaaattgtcctatgctcctggtcttttgaggttgtccgaaccatttcactgtacgctctatgcttcttttcccatccttacacgggttcaagggaaaaccaatgtaacctcagaccaagcatcacagcttaccatta

SEQ ID NO: 22681 - DNA, 195 bp, Zea mays
  Clone ID: LIB3152-029-P1-K1-F6
aaaaaaaaaaaaaaaaaaaaaaatttattttaacaaaggcaaacaaaattaaaagggggcgcctataaaaaaaaaacgctactgacatactagatcctacgatctactttcctaaggtttcgagctttctacttccattttcctggcccttactttacaaccccttgccttgcttaactctgtcgttacccaatt

SEQ ID NO: 22682 - DNA, 369 bp, Zea mays
  Clone ID: LIB3152-029-P1-K1-F7
cggaagtttgaggcaataacaggtctgtgatgcccgtgccaacagccgcatccaagcccgtgccagctgcagggaacctgcggcgttggcagcaccccgatcctgggccagtgcgtcgagtttctgaggcatcagtgcagcccgacggcgacgccctactgctcgcctcagtgccagtcgttgcggcagcagtgttgccagcagctcaggcaggtggagccgcagcaccggtaccaggcgatcttcggcttggtcctccagtccatcctgcagcagcagccgcaaagcggccaggtcgcggggctgttggcggcgcagatagcgcagcaactgacggcgatgtgcggcctgcagcagccgactccatgc

SEQ ID NO: 22683 - DNA, 348 bp, Zea mays
  Clone ID: LIB3152-029-P1-K1-F8
agctaatctacctagctacgacttatcaacaatggctaccaagatattagccgaacttgctcttattgccctttttgtgagcgcatcaaatgcgttcattattccacaatgctcacttgctcctagtgccattataccacagtttctgcgaccagttacttcaatgggctttgaacacctagctgtgcaagcctacatgctacaacaagcgcttgcggcgagcgtcttacaacaaccaattaaccaatttcaacaacaatcctcgtcacatctaaccatacaaaccattgcaacacaacagctacaacagttgctaccatcactgagccaactagttttggtgtaccc

SEQ ID NO: 22684 - DNA, 368 bp, Zea mays
  Clone ID: LIB3152-029-P1-K1-F9
cggaagtttgaggcaataacaggtctgtgatgcccgtgccaacagccgcatccaagcccgtgccagctgcagggaacctgcggcgttggcagcaccccgatcctgggccagtgcgtcgagtttctgaggcatcagtgcagcccgacggcgacgccctactgctcgcctcagtgccagtcgttgcggcagcagtgttgccagcagctcaggcaggtggagccgcagcaccggtaccaggcgatcttcggcttggtcctccagtccatcctgcagcagcagccgcaaagcggccaggtcgcggggctgttggcggcgcagatagcgcagcaactgacggcgatgtgcggcctgcagcagccgactccatg

SEQ ID NO: 22685 - DNA, 322 bp, Zea mays
  Clone ID: LIB3152-029-P1-K1-G1
tcggggatttgctccattgggttgtatgctataataagcctggctatcttaaaatctcggaggcgtgacgataacttcaagataaacgacaattgtatgcgacggctaccaaaataatttctttcttgaactgccttacttttaaatatctcatgcattatgctcctcgaatcagttctactacattgtaattccacttagaaaactttgccaccggtccgattactcactctttagatacccgaatatttatgggggtagcccccagccaggactgacattcaaaaacaaattgagagaatattattacgggtgtttatac

SEQ ID NO: 22686 - DNA, 320 bp, Zea mays
  Clone ID: LIB3152-029-P1-K1-G10
ggaataatggccttcgaacacccatctgtgcaagcctataggctacaacaagcgattgcggcgagcgtcttacaacaaccaattgcccaattgcaacaacaatccttggcacatctaacaatacaaaccatcgcaacgcaacagcaacaacagttcctaccagcactgagccatctagccatggtgaaccctgtcgcctacttgcaacagcagctgcttgcatccaacccacttgctctagcaaacgtagttgcaaaccagcaacaacaacaactgcaacagtttctgccagcgcttagtcaactagccatggtgaaccc

SEQ ID NO: 22687 - DNA, 375 bp, Zea mays
  Clone ID: LIB3152-029-P1-K1-G11
cgctgttcgcggcgacgggcgtggccgtcggcatctgcgggtttcagctcttccggaacatcactggcaacccggaagtcagggtaaacaaggcagggagggcagctggtgtgcttgagaaccatgaggaggggagacgttacgccatgcatggcctaagaagctttgtgcacgacaagactcctgagatcatgcctgcagttaacaagttcttcactgaccctaagtgaagcatgttgattggcatactactactactacttgctactggggattttacactttgctggcaactcaatatgttggggacattcatgacctctaaaagtactttgagcgcctggtgatgacttggtatatgtatgatggggggtg

SEQ ID NO: 22688 - DNA, 287 bp, Zea mays
  Clone ID: LIB3152-029-P1-K1-G12
tgctgttcgcggttacagtctttttcttcggcatctgctggtatcagcggtgggggaacatcactggcaaccctgaagtcagggtaaacatggcagggagggctgctggtgtgcttgagaaccatgaggaggggagacgttacgccatgcatggcctaagaagctttttgcactacaagacttctgagattatgcctgcaattaacaagttcttgactgaccctaagcgaagcatgttgatagtcatactactactactacttgctactggggtatttacactttgt

SEQ ID NO: 22689 - DNA, 374 bp, Zea mays
  Clone ID: LIB3152-029-P1-K1-G2
ttcgcaccggctccggtcctcctcccatcaccatcaccaccgtcgttcctctcacgagtcccgacacacgcaaaccgcacgaaccctggctggcggcgggatgacgcggcggtgctcgcactgcagccacaacgggcacaactcgcggacgtgccccaaccgcggggtcaagatcttcggggtgcgcctcaccgatggctcggccatccgcaagagcgcaagcatggggaacctctccctcctctccgcggggtcaaccagcggcggcgcgtcgcccgccgacgggcccgacctcgccgacggcggcgggggctacgcctccgacgacttcgtccaggggtcgtcctccgccagccgcgagcgtaagaaaggtg

SEQ ID NO: 22690 - DNA, 374 bp, Zea mays
  Clone ID: LIB3152-029-P1-K1-G3
ggcggcctggagttccctcgccgggcgatgttcgccagcgtcggcctcaacgtgtgcccgggcgtcccagcggggcgcgacccgcgggagcccgatcccaaggtcgtccgggcggtcgacaactgcgacatcgcgcgccagcttggcgccgccgttcccgggcagcaggccgcctgggaggcggaggaagaggcagcgaagaggaggaagcagaagggcggcggcagcaagaagcagcagcagctgggcgatctgagcctgaggaaggtcagggtcaagatcgccaacccgcacctgcggcgcctggttagcggcgccatcgccggcgccgtgtccaggacgtttgtggcgccgctggagacgatccggacgca

SEQ ID NO: 22691 - DNA, 378 bp, Zea mays
  Clone ID: LIB3152-029-P1-K1-G4
agcgaagctacctagcaacgacttaacaacaatggctaccaagatattagccctccttgcgcttcttgccctttttgtgagcgcaacaaatgcgttcattattccacaatgctcacttgctcctagtgccattataccacagttcctccgaccagttacttcaatgggcttcgaacacctagctgtgcaagcctacaggctacaacaagcgcttgcggcgagcgtcttacaacaaccaattaaccaattgcaacaacaatccttggcacatctaaccatacaaaccatcgcaacacaacagcaacaacagttcctaccagcactgagccaactagatgtggtgaaccctgtcgcctacttgcaacagcaggtgcttgc

SEQ ID NO: 22692 - DNA, 378 bp, Zea mays
  Clone ID: LIB3152-029-P1-K1-G6
cggaagtttgaggcaataacaggtctgtgatgcccgtgccaacagccgcatccaagcccgtgccagctgcagggaacctgcggcgttggcagcaccccgatcctgggccagtgcgtcgagtttctgaggcatcagtgcagcccgacggcgacgccctactgctcgcctcagtgccagtcgttgcggcagcagtgttgccagcagctcatgcaggtggagccgcagcaccggtaccaggcgatcttcggcttggtcctccagtccatcctgcagcagcagccgcaaagcggccaggtcgcggggctgttggcggcgcagatagcgcaacaactgacggcgatgtgcggcctgcagcaaccgactccatgcccctacgct

SEQ ID NO: 22693 - DNA, 366 bp, Zea mays
  Clone ID: LIB3152-029-P1-K1-G7
gcaacatacatagtgaagtacactagcaacatcttagcaccaatgggagccaagatttttgccctccttgccctccttgctctttcagcaagcgctgctacctcgacttttattccacaatgctcacaacaatacctctctccggcgacagccgtgggatttcaatacccaactatacaatcctacatggtacaagaggccatccaagcaagcatcttacggtcattagcattaaccctccaacaaccatatgctctattgcaacagccatccttagtgcatctgtatctccaaagaatcgcggcacaacaactacaacaacagttgctaccaacaatcaatcaagtagttgcagcgaaccttgct

SEQ ID NO: 22694 - DNA, 370 bp, Zea mays
  Clone ID: LIB3152-029-P1-K1-G8
ccaacaagcaacatagaaagtggaatccagtagcaacaatagagcaacaatggcgaccaagatattttccctccttatgctccttgctctttctgcatgtgttgctaacgcgacaattttccctcaatgctcacaagctcctatagcttcccttcttcccccataccttccatcaatgatagcttcagtatgtgaaaacccagctcttcaaccctataggctccaacaagcaatcgcagcaagcaacatacctttatcacccttgtttcaacaatcgccagccctatctttggtgcagtcattggtacaaaccatcagggcacagcagctgcagcaactcgtgctacctgtgatcaaccaagtagctctg

SEQ ID NO: 22695 - DNA, 372 bp, Zea mays
  Clone ID: LIB3152-029-P1-K1-G9
caccagcggtgtcttcaatgtgtgaaaacccaattgttcaaccctacaggatccaacaggcaatcgcaacaggcatcttaccattatcacccttgttcctccaacaaccgtcagccctattacagcagttacctttggtccatttggtggcacaaaacatcagggcacaacatctacaacaacttgtgctagcaaaccttgctgcatactctcagcaacatcagtttcttccattcaaccaactggctgcattgaactctgctgcttatttgcaacaacaattaccattcagccagctagttgctgcctacccccagcaatttcttccattcaaccaactagcagcattgaactctgctgcttatttacagc

SEQ ID NO: 22696 - DNA, 374 bp, Zea mays
  Clone ID: LIB3152-029-P1-K1-H10
cagatcagcaaagcggcagtgcgtagagaggatcgtcgaacagaacagcatgaagatggtcatcgttctcgtcgtgtgcctggctctgtcagctgccagcgcctctgcaatgcagatgccctgcccctgcgcggggctgcagggcttgtacggcgctggcgccggcctgacgacgatgatgggcgccggcgggctgtacccctacgcggagtacctgaggcagccgcagtgcagcccgctggcggcggcgccctactacgccgggtgtgggcagacgagcgccatgtaccagccgctccggcaacagtgctgccagcagcagatgaggatgatggacgtgcagtccgtcgcgcagcagctgcagatgatgatgc

SEQ ID NO: 22697 - DNA, 379 bp, Zea mays
  Clone ID: LIB3152-029-P1-K1-H11
ctgccgcctacctacaacagcaacaactgctttcatctagcccgctcgctgtggccaatgcacctacatacctgcaacaacaattgttgcaacagattgtaccagctctgactcagctagttgtggcaaaccctgctgcctacttgcaacagctgcttccattcaaccaactgactatgtcgaactctgctgcgtacctacaacagcgacaacagttacttaatccactagcagtggctaacccattggtcgctgccttcctacagcagcaacaattgctgccatacaaccagttctctttgataaaccctgtcttgtcgaggcagcaacccatcgttggaggtgccatcttttagattacatatgagatgtactcgat

SEQ ID NO: 22698 - DNA, 379 bp, Zea mays
  Clone ID: LIB3152-029-P1-K1-H12
caacaggctacatacaaagtggattccagttgcaacattagagcaacaatggcgaccaagatatttcccctccttatgctccttgctctttctgcatgtgtcgctaacgcgacaattttccctcaatgctcacaagctcctatagcttcccttctttccccataccttccatcaatgatagcttcagtatgtgaaaacccagctcttcaaccctataggctccaacaagcaatcgcagcaagcaacatacctttatcaccctagtttcaacaatcgccagccctatctttggtgcagtcattggtacaaaccatcagggcacagcagctgcagcaactcgtgctacctgtgatcaaccaagttgctctggcaaaccttt

SEQ ID NO: 22699 - DNA, 373 bp, Zea mays
  Clone ID: LIB3152-029-P1-K1-H2
agcaattagctcatcgactccagattggagaactcgacaccatgaaggtgctgatcgttgcccttgctctcctggcgctcgctgcgagcgccgcctccagtacaagcggcggctgtggctgccagacaccaccgtttcatctaccgcctccgttctatatgccgcctccgttctatctgccgccgcagcagcagccgcagccatggcaataccccactcaaccaccgcagctaagcccgtgccagcagttcggatcctgcggcgtcggcagcgtcggcagcccgttcctgggccagtgcgtcgagttcctgaggcaccagtgcagcccggcggcgacgccctacggctcgccacagtgccaggcgctgcagca

SEQ ID NO: 22700 - DNA, 374 bp, Zea mays
  Clone ID: LIB3152-029-P1-K1-H3
gccagcctaccaattagctaatggactccagattggagaactcgacaccatgaaggggctgatcgtggcccttgctctcctggcgctcgctgcgagcgccgcctccagtccaagcggcggctgtggctgccagacaccaccgtttcatctaccgcctccgttctatatgccgcctccgttctatctgccgccgcagcagcagccgcagccatggcaataccccactcaaccaccgcagctaagcccgtgccagcagttcggatcctgcggcgtctgcagcgtcggcagcccgttcctgggccagtgcgtcgagttcctgaggcaccagtgcagccacgcggcgacgccctacggctcgccacagtgccaggcgc

SEQ ID NO: 22701 - DNA, 383 bp, Zea mays
  Clone ID: LIB3152-029-P1-K1-H4
aacaagcaacatagaaagtggaatccagtagcaacaatagagcaacaatggagaccaagatattttccctccttatgctccttgctctttctacatgtgttgctaacgcgacaattttccctcaatgctcacaagctcctatagcttccctttttcccccataccttccatcaattatagcttcagtatgtgaaaacccagctcttcaaccatataggcttcaacaagcaatcgcagcaagcaacatacctttatcgcccttgttgtgtcaacaatcgccagccctatctttggtgcagtcattggtacaaaccatcagggcacaacagctgcagcaactcgtgctacctgtgatcaaccaagtagctctggcaaacctttct

SEQ ID NO: 22702 - DNA, 121 bp, Zea mays
  Clone ID: LIB3152-029-P1-K1-H5
cccacgcgtccgggaggtgccatcttttatattacatatgagatgtactcgataatggtgccctcataccgacgtgtgtttcctagaaataatcaatatattgattgagatttatctcgat

SEQ ID NO: 22703 - DNA, 372 bp, Zea mays
  Clone ID: LIB3152-029-P1-K1-H7
ctcccaccgccggtccacctgcctccgccggtccacctgccaccgccggtccatgtgccgccgccggttcatctgccgccgccaccatgccactaccctactcaaccgccccggcctcagcctcatccccagccacacccatgcccgtgccaacagccgcatccaagcccgtgccagctgcagggaacctgcggcgttggcagcaccccgatcctgggccagtgcgtcgagttcctgaggcatcagtgcagcccgacggcgacgccctactgctcgcctcagtgccagtcgttgcggcagcagtgttgccagcagctcaggcaggtggagccgcagcaccggtaccaggcgatcttcggcttggtcctccag

SEQ ID NO: 22704 - DNA, 110 bp, Zea mays
  Clone ID: LIB3152-029-P1-K1-H8
gtgccctcttttagatttgtcaaatcaagtgggctgaatggcaccacttgtcgcggttgtaagagggttcctgcgctagcgtcaccattccagtactatcctcaacatct

SEQ ID NO: 22705 - DNA, 338 bp, Zea mays
  Clone ID: LIB3152-029-P1-K1-H9
caggaagcaattgtgctccccccatgggttgcacttgctatcaggccaaggcctggtgtctgggattacattcgggtgaatgtaagtgagctggctgtggaggagctgagtgtttctgagtacttggcattcaaggaacagctggtggatggacaatccaaacagcaactttgtgctggacctggtttttagcccttcaatgccttctttcctcgtccttccatgtcgaagtccatcggaaatggagtggaattccttaaccgacacctgtcgtccaagttgttccaggacaaggagagtttgtaccccttgctgaacttcctcaaggctcataacta

SEQ ID NO: 22706 - DNA, 355 bp, Zea mays
  Clone ID: LIB3152-030-P1-K1-A1
caactagcaacatagaaagcacaattttgtaccaacaatggcagctaaaatatgttgcctccttatgctccttggtctttctgcaagtgctgctacggcgaccattttcccacaatgctcacaagctcctatagcttcccttcttcccccgtacctctcaccaacggtgtcttcggtatgtgaaaacccaattcttcaaccctacaggatccaacaggcaatcgcagctggcatcttacctttatcacccttgttcctccaacaatcatcagccctattacagcagttacctttggtgcatttattggcacaaaacatcagggcacaacaactacaacaacttgtgctagcaaac

SEQ ID NO: 22707 - DNA, 350 bp, Zea mays
  Clone ID: LIB3152-030-P1-K1-A10
aagcggcagtgcgtagagaggatcgtcgaacagaacagcatgaagatggtcatcgttctcgtcgtgtgcctggctctgtcagctgccagcgcctctgcaatgcagatgccctgcccctgcgcggggctgcagggcttgtacggcgctggcgccggcctgacgacgatgatgggcgccggcgggctgtacccctacgcggagtacctgaggcagccgcagtgcagcccgctggcggcggcgccctactacgccgggtgtgggcagacgagcgccatgtaccagccgctccggcaacagtgctgccagcagcagatgaagatgatggacgtgcagtccgtcgcgcagcagct

SEQ ID NO: 22708 - DNA, 355 bp, Zea mays
  Clone ID: LIB3152-030-P1-K1-A11
tgctcacttgctcctagtgccattattccacagttcctcccaccagttacttcaatgggcttcgaacacctagctgtgcaagccaacatgcaacaacaagcgcttgcggcgagcgtcttacaacaaccaattgcccaattgcaacaacaatccttgccacatctaacaatacaagccatcacaacgcaacagcaacaacagttcctaccagcactgagccacctagccatggtgaaccctgccgcctacttgcaagagcagctgcttgcatccaacccacttgctctggcgaacgtagttgcaaaccagcaacaacaacagctacaacagtttctgccaacgctcagtcaactag

SEQ ID NO: 22709 - DNA, 234 bp, Zea mays
  Clone ID: LIB3152-030-P1-K1-A12
gtgacaacagttacttaatctactagcagtggctaacccattggtcgctaacgggctgcagcagcaacaattgctgccatacaaccagttctctttgatgaaccctgccttgcagcaacccatcgttggaggtgccatcttttagattacatatgagatgtactcaacaatggtgccctcataccggcatgtgtttcctagaaataatcaatatattgattgagatttatcttg

SEQ ID NO: 22710 - DNA, 354 bp, Zea mays
  Clone ID: LIB3152-030-P1-K1-A2
cagcctagcaattagctcatcgactccagattggagaactcgacaccatgaaggtgctgatcgttgcccttgctctcctggcgctcgctgcgagcgccgcctccagtacaagcggcggctgtggctgccagacaccaccgtttcatctaccgcctccgttctatatgccgcctccgttctatctgccgccgcagcagcagccgcagccatggcaataccccactcaaccaccgcagctaagcccgtgccagcagttcggatcctgcggcgtcggcagcgtcggcagcccgttcctgggccagtgcgtcgagttcctgaggcaccagtgcagcccggcggcgacgccctacggct

SEQ ID NO: 22711 - DNA, 354 bp, Zea mays
  Clone ID: LIB3152-030-P1-K1-A3
ttcagaaacacaccaagcgaagcgcactagcaacaacctaacaacaatggctaccaagatattagccctccttgcgcttcttgcccttttagtgagcgcaacaaatgcgttcattattccacagtgctcacttgctcctagtgccattattccacagttcctcccaccagttacttcaatgggcttcgaacatccagccgtgcaagcctacaggctacaactagcgcttgcggcgagcgtcttacaacaaccaattgcccaattgcaacaacaatccttggcacatctaaacctacaaaccatcgcaacgcaacagcaacaacagtttctgccatcactgagccacctagccgt

SEQ ID NO: 22712 - DNA, 355 bp, Zea mays
  Clone ID: LIB3152-030-P1-K1-A4
gcaggtgcttgcatccaacccacttgctctggcaaacgtagctgcataccaacaacaacaacaattgcaacagtttctgccagcgctcagtcaactagccatggtgaaccctgccgcctacctacaacagcaacaactgctttcatctagccctctcgttgtgggtaatgcacctacatacctgcaacaacaattgctgcaacagattgtaccagctctgactcagctagctgtggcaaaccctgctgcctacttgcaacagctgcttccattcaaccaactgactgtgtcgaactctgctgcgtacctacaacagcgacaacagttacttaatccactagcagtgcctaaccca

SEQ ID NO: 22713 - DNA, 355 bp, Zea mays
  Clone ID: LIB3152-030-P1-K1-A5
agatgaatgggcaatctacggcggtaccggagagtttgctatggcgagaggtgtcgtcaaaagaaggtaccttgccgatagggatggcgccgggaacactgacgagctcagcatgcaggttttctgcccggtgtttggctcatcacagcaaccaaacaagcaggactccagcatctctgtcaccaagattgggttatggggtggcgaaggagggtcggcgcaggacatcacgacgacggagccaccgcagcgcctgcacagcctcaccgttcgtgccggtgccgccgtcgactccatcgagttcacgtatactgacagaggtggccagaggcgcgccgctgggcgatggggtgga

SEQ ID NO: 22714 - DNA, 352 bp, Zea mays
  Clone ID: LIB3152-030-P1-K1-A6
cacaaattagcagaacgggcaatacttgaatctctcaggaaggaacaaattgtacaaggggatgttgatgatatgatggctcaaaggttaggggctgttttcatgcctcatggtcttggccacttacttggtattgacacccatgatccaggaggctaccctgagggattggagaggcccaaggatccaggactgagctccttgcggaccacaagagaactgaaagaaggaatggttatcacagtggagccaggctgctatttcattgatgctttgctaactaaaacaagggatgatccaatttcctcaaagctcttcaactggcaagaggttgaaaagtataaaagctttg

SEQ ID NO: 22715 - DNA, 351 bp, Zea mays
  Clone ID: LIB3152-030-P1-K1-A7
agctcatcgactccagattggagaactcgacaccatgaaggtgctgatcgttgcccttgctctcctggcgctcgctgcgagcgccgcctccagtacaagcggcggctgtggctgccagacaccaccgtttcatctaccgcctccgttctatatgccgcctccgttctatctgccgccgcagcagcagccgcagccatggcaataccccactcaaccaccgcagctaagcccgtgccagcagttcggatcctgcggcgtcggcagcgtcggcagcccgttcctgggccagtgcgtcgagttcctgaggcaccagtgcagcccggcggcgacgccctacggctcgccacagtg

SEQ ID NO: 22716 - DNA, 353 bp, Zea mays
  Clone ID: LIB3152-030-P1-K1-A8
gtggaatacagtagcaacaatagagcaacaatggcggccaagatattttccatccttatgctccttgctctttctgcatgtgttgctaacgcgaccatttttcctcaatactcacaagctcctatagctgcccttcttcccccataccttccatcaatgaccgcttcagtatgtgaaaacccagcccttcaaccctacaggctccaacaagcaatcgcaacaagcaacttacctttatcacccctgttctttcaacaatcgccagccctatctttggtgcagtcattggtacaaaccatcagggcacaacagctgcagcaactcgtgctaccagtgatcagccaagtagctct

SEQ ID NO: 22717 - DNA, 351 bp, Zea mays
  Clone ID: LIB3152-030-P1-K1-A9
aagcacaatagtgtaccaacaatggcagccaaaatattttgcctccttatgctccttggtctttctgcaagtgctgctacggcgaccattttcccgaaatgctcgcaagctcctatagcttcccttcttcccccgtacctctcaccagcggtgtcttcggtatgtgaaaacccaattcttcaaccctacaggatccaacaggcaatcacagctggcatcttacctttatcacccttgttcctccaacaatcatcagccctattacatcagttacctttggtgcatttattggcacaaaacatcagggcacaacaactacaacaacttgtgctagcaaaccttgctgcctac

SEQ ID NO: 22718 - DNA, 356 bp, Zea mays
  Clone ID: LIB3152-030-P1-K1-B1
agaagctcaaatactgatctcactgatccagtatggctatggcaaaggcaggcgcgccgagggtctcggcggcccagctggtgactctcgggctatcactcctctgcgctgtcgccggcccggccgccgcgcagaactgcggctgccagccaaacgtatgctgcagcaagtttggctactgcggcacgaccgacgagtactgcggcgacgggtgccagtcgggcccgtgccgctcgggcggcggcggcagcagtggcggcggtggtgcgaacgtggctagcgtcgtcaccggctccttcttcaacggcatcaagagccaggccgggagcgggtgcgagggcaagaacttctacacc

SEQ ID NO: 22719 - DNA, 351 bp, Zea mays
  Clone ID: LIB3152-030-P1-K1-B10
ttgagaccaactagcaacatagaaagcacaatagtgtaccaacaatggcagccaaaatattttgcctccttatgctccttggtctttctgcaagtgctgctacggcgaccattttcccgaaatgctcgcaagctcctatagcttcccttcttcccccgtacctctcaccagcggtgtcttcggtatgtgaaaacccaattcttcaaccctacaggatccaacaggcaatcacagctggcatcttacctttatcacccttgttcctccaacaatcatcagccctattacatcagttacctttggtgcatttattggcacaaaacatcagggcacaacaactacaacaacttg

SEQ ID NO: 22720 - DNA, 350 bp, Zea mays
  Clone ID: LIB3152-030-P1-K1-B11
gcgccggcctgacgacgatgatgggcgccggcgggctgtacccctacgcggagtacctgaggcagccgcagtgcagcccgctggcggcggcgccctactacgccgggtgtgggcagacgagcgccatgtaccagccgctccggcaacagtgctgccagcagcagatgaggatgatggacgtgcagtccgtcgcgcagcagctgcagatgatgatgcagcttgagcgtgccgctgccgccagcagcagcctgtacgagccagctctgatgcagcagcagcagcagctgctggcagcccagggtctcaaccccatggccatgatgatggcgcagaacatgccggccatgggt

SEQ ID NO: 22721 - DNA, 345 bp, Zea mays
  Clone ID: LIB3152-030-P1-K1-B12
ctcctagtgccattattccacagttcctcccaccagttacttcaatgggcttcgaacatccagccgtgcaagcctacaggctacaactagcgcttgcggcgagcgtcttacaacaaccaattgcccaattgcaacaacaatccttggcacatctaaacctacaaaccatcgcaacgcaacagcaacaacagtttctgccatcactgagccacctagccgtggtgaaccctgtcgcctacttgcaacagcagctacttgcatccaacccacttgctctggcgaacgtagctgcataccagcaacaacaacgtctgcaacagtttatgccagcgctcagtcaactag

SEQ ID NO: 22722 - DNA, 356 bp, Zea mays
  Clone ID: LIB3152-030-P1-K1-B2
ttcagaaacacaccaagcgaagcacattagcaacaacctaacaacaatggctaccaagatattatccctccttgcgcttcttgcgctttttgcgagcgcaacaaatgcgttcattattccacaatgctcacttgctccaagttccattattacacagttcctcccaccagttacttcaatgggcttcgaacacccagctgtgcaagcctataggctacaacaagcaattgcggcgagcgtcttacaacaaccaatttcccagttgcaacaacaatccttggcacatctaacaatacaaaccatcgcaacgcaacagcaacaacaattcctaccagcactgagccacctagccatgg

SEQ ID NO: 22723 - DNA, 351 bp, Zea mays
  Clone ID: LIB3152-030-P1-K1-B4
gcctgcttgcctgcctacctacctgcgttgttgccttcttcgcctcctccccctgtggccgcaccgcagctgctgcggcggcggcagaggtgaacagcttcccgcggccttgtcctgtccggactccggggccgggaccggcagcgcagcgggctcgcgggatctcccgacccccatgcgtcggcctcggtgacagggtttgctagcggagtccatccaactataatgaattaggcacccagtacgtaatggcaacggaagtcaaacaaacttatttttcatggtcacaaggagagtcaactgaacgggatggtcctcaaggactatctgtatcccagacacttgatcatg

SEQ ID NO: 22724 - DNA, 350 bp, Zea mays
  Clone ID: LIB3152-030-P1-K1-B5
agcgaagcgcactagcaacgacctaacaacaatggctaccaagatattagccctccttgcgcttcttgccctttttgtgagcgcaacaaatgcgttcattattccacaatgctcacttgctcctagtgccattattccacagttcctcccaccagttacttcaatgggcttcgaacacctagctgtgcaagccaacatgcaacaacaagcgcttgcggcgagcgtcttacaacaaccaattgcccaattgcaacaacaatccttgccacatctaacaatacaagccatcacaacgcaacagcaacaacagttcctaccagcactgagccacctagccatggtgaaccctg

SEQ ID NO: 22725 - DNA, 351 bp, Zea mays
  Clone ID: LIB3152-030-P1-K1-B6
gggacgcgtgggggcaatcgcagcaggcatcttacctttatcacccttgttcctccaacaaccgtcagccctattacagcagttacctttggtgcatttgttggcacaaaacatcaaggcacaacaactacaacaacttgtgctaggaaaccttgctgcctactctcagcaacagcagtttcttccattcaaccaactggctgcattgaactctgctgcttatttgcaacaacaactaccattcagtcagctagctgctgcctacccccagcaatttcttccattcaaccaactggcagcattgaactctgctgcttatttacaacagcaacagctaccaccattcagcca

SEQ ID NO: 22726 - DNA, 352 bp, Zea mays
  Clone ID: LIB3152-030-P1-K1-B7
cccacgcgtccgattttgagcattcagaaacacaccaagcgaagcgcactagcaacgacctaacaacaatggctaccaagatattagccctccttgcgcttcttgccctttttgtgagcgcaacaaatgcgttcattattccacaatgctcacttgctcctagtgccattattccacagttcctcccaccagttacttcaatgggcttcgaacacctagctgtgcaagccaacatgcaacaacaagcgcttgcggcgagcgtcttacaacaaccaattgcccaattgcaacaacaatccttgccacatctaacaatacaagccatcacaacgcaacagcaacaacagttcct

SEQ ID NO: 22727 - DNA, 352 bp, Zea mays
  Clone ID: LIB3152-030-P1-K1-B8
attgagaccaactagcaacatagaaagcacaatagtgtaccaacaatggcagccaaaatattttgcctccttatgctccttggtctttctgcaagtgctgctacggcgaccattttcccgaaatgctcgcaagctcctatagcttcccttcttcccccgtacctctcaccagcggtgtcttcggtatgtgaaaacccaattcttcaaccctacaggatccaacaggcaatcacagctggcatcttacctttatcacccttgttcctccaacaatcatcagccctattacatcagttacctttggtgcatttattggcacaaaacatcagggcacaacaactacaacaacttg

SEQ ID NO: 22728 - DNA, 347 bp, Zea mays
  Clone ID: LIB3152-030-P1-K1-B9
caactagcaacatagaaagcacaatagtgtaccaacaatggcagccaaaatattttgcttccttatgctccttggtctttctgcaagtgttgctaccgcaaccattttcccacaatgctcacaagctcctatagcttcccttcttcccccatacctctcaccagcggtgtcttcaatgtgtgaaaacccaattgttcaaccctacaggatccaacaggcaatcgcaacaggcatcttaccattatcacccttgttcctccaacaaccgtcagccctattacagcagttacctttggtccatttggtggcacaaaacattagggcacaacaactacaacaacttgtgc

SEQ ID NO: 22729 - DNA, 351 bp, Zea mays
  Clone ID: LIB3152-030-P1-K1-C1
cagccacacccatgcccgtgccaacagccgcatccaagcccgtgccagctgcagggaacctgcggcgttggcagcaccccgatcctgggccagtgcgtcgagtttctgaggcatcagtgcagcccgacggcgacgccctactgctcgcctcagtgccagtcgttgcggcagcagtgttgccagcagctcacgcaggtggagccgcagcaccggtaccaggcgatcttcggcttggtcctccagtccatcctgcagcagcagccgcaaagcggccaggtcgtggggctgttggcggcgcagatagcgcagcaactgacggcgatgtgcggcctgcagcagccgacttcatgc

SEQ ID NO: 22730 - DNA, 353 bp, Zea mays
  Clone ID: LIB3152-030-P1-K1-C10
agaccaactagcaacatagaaagcacaatagtgtaccaacaatggcagccaaaatattttgcctccttatgctccttggtctttctgcaagtgctgctacggcgaccattttcccgcaatgctcgcaagctcctatagcttcccttcttcccccgtacctctcaccagcggtgtcttcggtatgtgaaaacccaattcttcaaccctacaggatccaacaggcaatcgcagctggcatcttacctttatcacccttgttcctccaacaatcatcagccctattacaacagttacctttggtgcatttattggcacaaaacatcagggcacaacaactacaacaacttgtgcta

SEQ ID NO: 22731 - DNA, 349 bp, Zea mays
  Clone ID: LIB3152-030-P1-K1-C11
ggaatccagtagcaacaatagagcaacaatggcgaccaagatattttccctccttatgctccttgctctttctgcatgtgttgctaacgcgacaattttccctcaatgctcacaagctcctatagcttcccttcttcccccataccttccatcaatgatagcttcagtatgtgaaaacccagctcttcaaccctataggctccaacaagcaatcgcagcaagcaacatacctttatcacccttgtttcaacaatcgccagccctatctttggtgcagtcattggtacaaaccatcagggcacagcagctgcagcaactcgtgctacctgtgatcaaccaagtagctctg

SEQ ID NO: 22732 - DNA, 353 bp, Zea mays
  unsure at all n locations
  Clone ID: LIB3152-030-P1-K1-C12
attttgagcattcagaaacacaccaagcgaagcacattagcaacaacctaacaacaatggctaccaagatattatccctccttgcgcttcttgcgctttttgcgagcgcaacaaatgcgttcattattccacaatgctcacttgctccaagttccattattacacagttcctcccaccagttacttcaatgggcttcgaacacccagctgtgcaagcctataggctacaacaagcaattgcggcgagcgtcttacaacaaccaatttcccagttgcaacaacaatccttggcacatctaacaatacaaaccatcgcaacgcaacagcaacaacaattnctaccagcactgagc

SEQ ID NO: 22733 - DNA, 354 bp, Zea mays
  Clone ID: LIB3152-030-P1-K1-C2
gagcattcagaaacacaccaagcgtagcacattagcaacaacctaacaacaatggctaccaagatattatccctccttgcgcttcttgcgctttttgcgagcgcaacaaatgcgttcattattccacaatgctcacttgctccaagttccattattacacagttcctcccaccagttacttcaatgggcttcgaacacccagctgtgcaagcctataggctacaacaagcaattgcggcgagcgtcttacaacaaccaatttcccagttgcaacaacaatcctggcacaatttaccattcaaaccatcggaacgcaacaagaaccacaattcctaccagcactgagccacctag

SEQ ID NO: 22734 - DNA, 353 bp, Zea mays
  Clone ID: LIB3152-030-P1-K1-C3
gagaccaactagcaacatagaaagcacaatagtgtaccaacaatggcagccaaaatattttgcttccttatgctccttggtctttctgcaagtgctgctaccgcaaccattttcccacaatgctcacaagctcctatagcttcctttcttcccccatacctctcaccagcggtgtcttcagtatgtgaaaacccaattcttcaaccctacaggatccaacaggcaatcgcagcaggcatcttacctttatcacccttgttcctccaacaaccgtcagccctattacagcagttacctttggtgcatttgttggcacaaaacatcaaggcacaacaactacaacaacttgtgct

SEQ ID NO: 22735 - DNA, 356 bp, Zea mays
  Clone ID: LIB3152-030-P1-K1-C4
ggaatccagtagcaacaatagagcaacaatggagaccaagatattttccctccttatgctccttgctctttctacatgtgttgctaacgcgacaattttccctcaatgctcacaagctcctatagcttccctttttcccccataccttccatcaattatagcttcagtatgtgaaaacccagctcttcaaccatataggcttcaacaagcaatcgcagcaagcaacatacctttatcgcccttgttgtgtcaacaatcgccagccctatctttggtgcagtcattggtacaaaccatcagggcacaacagctgcagcaactcgtgctacctgtgatcaaccaagtagctctggcaa

SEQ ID NO: 22736 - DNA, 356 bp, Zea mays
  Clone ID: LIB3152-030-P1-K1-C5
gaccaacaagcaacatagaaagtggaatccagtagcaacaatagagcaacaatggcgaccaagatattttccctccttatgctccttgctctttctgcatgtgttgctaacgcgacaattttccctcaatgctcacaagctcctatagcttcccttcttcccccataccttccatcaatgatagcttcagtatgtgaaaacccagctcttcaaccctataggctccaacaagcaatcgcagcaagcaacatacctttatcacccttgtttcaacaatcgccagccctatctttggtgcagtcattggtacaaaccatcagggcacagcagctgcagcaactcgtgctacctgtgat

SEQ ID NO: 22737 - DNA, 334 bp, Zea mays
  Clone ID: LIB3152-030-P1-K1-C6
agcattcataaacacaccaagcgaatcgcactagcaacaacctaacaacaatggctaccaagatattagccctccttgcgcttcttgcccttttagtgagcgcaacaaatgcgttcattattccacagtgctcacttgctcctagtgccattatttcacagatccttccaccagttacttaaatgggctttgaacattcagccgtgcaagcctacatgctacaactagcgctagctgatagcgtcttacaacaaccaattgcccaattgcaacaacagtactagtcgcatataaacctacagaccatcgcaacgcagcagcaacaacagtttgt

SEQ ID NO: 22738 - DNA, 351 bp, Zea mays
  Clone ID: LIB3152-030-P1-K1-C7
agcattcagaaacacaccaagcgaagcgcactagcaacaacctaacaacaatggctaccaagatattagccctccttgcgcttcttgcccttttagtgagcgcaacaaatgcgttcattattccacagtgctcacttgctcctagtgccattattccacagttcctcccaccagttacttcaatgggcttcgaacatccagccgtgcaagcctacaggctacaactagcgcttgcggcgagcgtcttacaacaaccaattgcccaattgcaacaacaatccttggcacatctaaacctacaaaccatcgcaacgcaacagcaacaacagtttctgccatcactgagccacc

SEQ ID NO: 22739 - DNA, 351 bp, Zea mays
  Clone ID: LIB3152-030-P1-K1-C8
attttgagcattcagaaacacaccatgcgaagcgcactagcaacgacctaacaacaatggctaccaagatattagccctccttgcgcttcttgccctttttgtgagcgcaacaaatgcgttcattattccacaatgctcacttgctcctagtgccattattccacagttcctcccaccagttacttcaatgggcttcgaacacctagctgtgcaagccaacatgcaacaacaagcgcttgcggcgagcgtcttacaacaaccaattgcccaattgcaacaacaatccttgccacatctaacaatacaagccatcacaacgcaacagcaacaacagttcctaccagcactga

SEQ ID NO: 22740 - DNA, 350 bp, Zea mays
  Clone ID: LIB3152-030-P1-K1-C9
cagcattcagaaacacaccaagcgaagcgcactagcaacaacctaacaacaatggctaccaagatattagccctccttgcgcttcttgcccttttagtgagcgcaacaaatgcgttcattattccacagtgctcacttgctcctagtgccattattccacagttcctcccaccagttacttcaatgggcttcgaacatccagccgtgcaagcctacaggctacaactagcgcttgcggcgagcgtcttacaacaaccaattgcccaattgcaacaacaatccttggcacatctaaacctacaaaccatcgcaacgcaacagcaacaacagtttctgccatcactgagcca

SEQ ID NO: 22741 - DNA, 118 bp, Zea mays
  Clone ID: LIB3152-030-P1-K1-D1
gggaaatctcctctatccatccctctctatctatatatgtaataatgcagtaagacgacacacattatcatgtgtggtatgaccaataatatatgcatcataataaagttttggtttt

SEQ ID NO: 22742 - DNA, 354 bp, Zea mays
  Clone ID: LIB3152-030-P1-K1-D10
ggcgatcgctatcgacttgtagcggaagccatggcgtcggcagcgctaatctgcggcacggagcagtggaaggccctccaggcgcacgtcggcgcgattcagaagacgcacctgcgcgacctgatggccgacgccgaccgatgcaaggcaatgacggctgagtatgaagggatctttctggattactcgagacagcaggcgactggtgaaaccatggagaagctccttaaattggctgacgctgcgaagctcaaggagaagattgagaagatgtttaaaggtgaaaagataaatagcacggagaacaggtcagtgcttcatgtagctctgagggctccaagagatgcagtcata

SEQ ID NO: 22743 - DNA, 352 bp, Zea mays
  Clone ID: LIB3152-030-P1-K1-D11
cagaaacacaccaagcgaagcgcactagcaacaacctaacaacaatggctaccaagatattagccctccttgcgcttcttgcccttttagtgagcgcaacaaatgcgttcattattccacagtgctcacttgctcctagtgccattattccacagttcctcccaccagttacttcaatgggcttcgaacatccagccgtgcaagcctacaggctacaactagcgcttgcggcgagcgtcttacaacaaccaattgcccaattgcaacaacaatccttggcacatctaaacctacaaaccatcgcaacgcaacagcaacaacagtttctgccatcactgagccacctagccgt

SEQ ID NO: 22744 - DNA, 334 bp, Zea mays
  Clone ID: LIB3152-030-P1-K1-D12
ctgattctgatcgcgtgaagattaaaaaagccctacgaggtgtgaaagtggaggtcacacaccgtggaaacatgcgtaggaaatatcggatatctggccttactccacaagcaacaagggagttatcattccctattgatgatcgtggtactgttaagactgtggtgcaatacttcctggagacttatggtttcagtattcagcacaccactttaccttgtttgcaagtgggcaatcagcaaagaccaaattatctgcctatggaggtctgtaagatagttgaggggcagcgctactcaaaacgacttaatgataaacagatcactgctctact

SEQ ID NO: 22745 - DNA, 364 bp, Zea mays
  Clone ID: LIB3152-030-P1-K1-D2
ggaatacccggcctcttttagatttcttatgagttatagttcaataataaagttttttatctgatgtttgtggcttcccagaaataagaaagtacatttctaaaaaaaaaaatcacccttgaaactacaacaatcaaaaaccctaatacaaaaaaaaacctaaaaagcaaaaaataaacacaaaacaaaggggaaacaacaactacaacaaaaaagaaaaaaaaaacaataaaaaaaaaaaaaggggccccccctttaaaaggccccaaactaacgaccccgccttggacccttaatttttttttttaggggcacctaaatctaattcaaccgcccctttctgactacccccagcaatggaaaa

SEQ ID NO: 22746 - DNA, 353 bp, Zea mays
  Clone ID: LIB3152-030-P1-K1-D3
agcactactaccggacgttcgacaccaaccgcgcggcgctggtggggctgtatcaggagacctccatgctcaccttcgagggccagaagttccagggcccatccgccattgccggcaagctcggatctcttcccttccaggcctgcgagcaccagatcgtcaccgtcgactgccagccgtcggggccccagggaggcatgctcgtcttcgtctccggttccatccgcaccggccccgaggagcaccccatcaagttctctcaggcattccatttgctgccggcagctgggtccttcttcgtgcagaatgacatgttccgcctgaactatggctaaaagacagccgaaaactct

SEQ ID NO: 22747 - DNA, 356 bp, Zea mays
  Clone ID: LIB3152-030-P1-K1-D4
gcaaaaaggagtttgtcatggcgtctaagcgcatcctcaaggagctgaaggacctgcagaaagacccccccacatcatgcagtgcaggtcctgctggtgaggacatgtttcattggcaagcaacaattatgggaccacctgacagtccctatgctggtggtgttttcttagtgaacattcatttcccgccagattaccccttcaaacctccaaaggtttctttcaagacaaaggtcttccatcctaatatcaacagcaatggaagtatatgccttgacattctcaaagagcagtggagccctgctttgacaatttctaaggtcctgctcttcatctgctccctgctgaccgacccc

SEQ ID NO: 22748 - DNA, 357 bp, Zea mays
  Clone ID: LIB3152-030-P1-K1-D5
aactagcaacatagaaagcacaatagtgtaccaacaatggcagctaaaatattttgcctccttatgctccttggtctttctgcaagtgctgctacggcgaccattttcccacaatgctcacaagctcctatagcttcccttcttcccccgtacctctcaccaacggtgtcttcggtatgtgaaaacccaattcttcaaccctacaggatccaacaggcaatcgcagctggcatcttacctttatcacccttgttcctccaacaatcatcagccctattacagcagttacctttggtgcatttattggcacaaaacatcagggcacaacaactacaacaacttgtgctagcaaacctt

SEQ ID NO: 22749 - DNA, 356 bp, Zea mays
  Clone ID: LIB3152-030-P1-K1-D6
gcaattagctcatcgactccagattggagaactcgacaccatgaaggtgctgatcgttgcccttgctctcctggcgctcgctgcgagcgccgcctccagtacaagcggcggctgtggctgccagacaccaccgtttcatctaccgcctccgttctatatgccgcctccgttctatctgccgccgcagcagcagccgcagccatggcaataccccactcaaccaccgcagctaagcccgtgccagcagttcggatcctgcggcgtcggcagcgtcggcagcccgttcctgggccagtgcgtcgagttcctgaggcaccagtgcagcccggcggcgacgccctacggctcgccacagt

SEQ ID NO: 22750 - DNA, 350 bp, Zea mays
  Clone ID: LIB3152-030-P1-K1-D7
ccctgtcgcctacctacaacagcaacaattgctttcatctagcccgctcgctgtgggcaatgcacctacgtacctacaacaacagttgctgcaacagattgtaccagctctgactcagctagctgtggcaaaccctactgcctacttgcaacagttgcttccattcaaccaactggctgtgtcgaactctgctgtgtacctacaacagcgacaacagttacttaatccactagcagtggctaacccattggtcgctaacttcctgcagcagcaacaattgctgccatacaaccagttctctttgatgaaccctgccttgcagcaacccatcgttggaggtgccatctttt

SEQ ID NO: 22751 - DNA, 352 bp, Zea mays
  Clone ID: LIB3152-030-P1-K1-D8
acggtgtcttcggtatgtgaaaacccaattcttcaaccctacaggatccaacaggcaatcgcagctggcatcttacctttatcacccttgttcctccaacaatcatcagccctattacagcagttacctttggtgcatttattggcacaaaacatcagggcacaacaactacaacaacttgtgctagcaaaccttgctgcctactctcagcaacagcagtttcttccattcaaccaactagctgcattgaactctgcttcttatttgcaacaacaacaactaccattcagccagctatctgctgcctacccccagcaatttcttccattcaaccaactgacagcattgaact

SEQ ID NO: 22752 - DNA, 339 bp, Zea mays
  Clone ID: LIB3152-030-P1-K1-D9
ccctccctcccactccacctatcattacaaatgcctctaccccccatcggggggggtattttaaattgattacccttgttacttcaacaatgatgatgcctattacagtaggtacctttggtgcatttattggcacaaaatatgagggcacaacaactacaacaacttgtgctagcaaaccttgctgtctactcttagcaacagcatttgcttgcattcaaccaactagctgcattgaactctgcttcttatttgcaacaacaacaactaccatttagccagctatctgatgcctacccccagaaatttcttccattcaaccaactgacagcattgaac

SEQ ID NO: 22753 - DNA, 352 bp, Zea mays
  Clone ID: LIB3152-030-P1-K1-E1
cttcggtatgtgaaaacccaattcttcaaccctacaggatccaacaggcaatcgcagctggcatcttacctttatcacccttgttcctccaacaatcatcagccctattacagcagttacctttggtgcatttattggcacaaaacatcagggcacaacaactacaacaacttgtgctagcaaaccttgctgcctactctcagcaacagcagtttcttccattcaaccaactagctgcattgaactctgcttcttatttgcaacaacaacaactaccattcagccagctatctgctgcctacccccagcaatttcttccattcaaccaactgacagcattgaactctcctgc

SEQ ID NO: 22754 - DNA, 353 bp, Zea mays
  Clone ID: LIB3152-030-P1-K1-E10
ggcaaacgtagttgcaaaccagccacaacaacagctgcaacagtttctgccagcgctcagtcaactagccatggtgaaccctgccgcctacctacaacagcaacaactgctttcatctagcccgctcgctgtggccaatgcacctacatacctgcaacaacaattgttgcaacagattgtaccagctctgactcagctagttgtggcaaaccctgctgcctacttgcaacagctgcttccattcaaccaactgactatgtcgaactctgctgcgtacctacaacagcgacaacagttacttaatccactagcagtggctaacccattggtcgctgccttcctacagcagcaac

SEQ ID NO: 22755 - DNA, 352 bp, Zea mays
  Clone ID: LIB3152-030-P1-K1-E11
agatattttccctccttatgctccttgctctttctacatgtgttgctaacgcgacaattttccctcaatgctcacaagctcctatagcttccctttttcccccataccttccatcaattatagcttcagtatgtgaaaacccagctcttcaaccatataggcttcaacaagcaatcgcagcaagcaacatacctttatcgcccttgttgtgtcaacaatcgccagccctatctttggtgcagtcattggtacaaaccatcagggcacaacagctgcagcaactcgtgctacctgtgatcaaccaagtagctctggcaaacctttctccctactctccgcaacaacaatttct

SEQ ID NO: 22756 - DNA, 355 bp, Zea mays
  Clone ID: LIB3152-030-P1-K1-E12
gaaacacaccaagcgaagcacattatcaacaacctaacaacaatggctaccaagatattatccctccttgcgcttcttgcgctttttgcgagcgcaacaaatgcgttcattattccacaatgctcacttgctccaagttccattattacacagttcctcccaccagttacttcaatgggcttcgaacacccagctgtgcaagcctataggctacaacaagcaattgcggcgagcgtcttacaacaaccaatttcccagttgcaacaacaatccttggcacatctaacaatacaaaccatcgcaacgcaacagcaacaacaattcctaccagcactgagccacctagccatggtga

SEQ ID NO: 22757 - DNA, 353 bp, Zea mays
  Clone ID: LIB3152-030-P1-K1-E2
atcgactccagatgggagaactcgacaccatgaaggtgctgatcgttgcccttgctctcctggcgctcgctgcgagcgccgcctccagtacaagcggcggctgtggctgccagacaccaccgtttcatctaccgcctccgttctatatgccgcctccgttctatctgccgccgcagcagcagccgcagccatggcaataccccactcaaccaccgcagctaagcccgtgccagcagttcggatcctgcggcgtcggcagcgtcggcagcccgttcctgggccagtgcgtcgagttcctgaggcaccagtgcagcccggcggcgacgccctacggctcgccacagtgccaggcg

SEQ ID NO: 22758 - DNA, 351 bp, Zea mays
  Clone ID: LIB3152-030-P1-K1-E3
gatcagcaaagcggcagtgcgtagagagtatcgtcgaacagaacagcatgaagatggtcatcgttctcgtcgtgtgcctggctctgtcagctgccagcgcctctgcaatgcagatgccctgcccctgcgcggggctgcagggcttgtacggcgctggcgccggcctgacgacgatgatgggcgccggcgggctgtacccctacgcggagtacctgaggcagccgcagtgcagcccgctggcggcggcgccctactacgccgggtgtgggcagacgagcgccatgtaccagccgctccggcaacagtgctgccagcagcagatgaggatgatggacgtgcagtccgtcgcgc

SEQ ID NO: 22759 - DNA, 355 bp, Zea mays
  Clone ID: LIB3152-030-P1-K1-E4
caacaagcaacatagaaagtggaatccagtagcaacaatagagcaacaatggagaccaagatattttccctccttatgctccttgctctttctacatgtgttgctaacgcgacaattttccctcaatgctcacaagctcctatagcttccctttttcccccataccttccatcaattatagcttcagtatgtgaaaacccagctcttcaaccatataggcttcaacaagcaatcgcagcaagcaacatacctttatcgcccttgttgtgtcaacaatcgccagccctatctttggtgcagtcattggtacaaaccatcagggcacaacagctgcagcaactcgtgctacctgtga

SEQ ID NO: 22760 - DNA, 284 bp, Zea mays
  Clone ID: LIB3152-030-P1-K1-E5
caactactaccattcagccagctagctggtgtgagccctgctaccttcttgacacaaccacagttgttgccgttctaccagcacgctgcgcctaacgctggcaccctcttacaactgcaacaattgctgccattcaaccaacttgctttgacaaacctagcagtgttctaccaacaacccatcattggtggtgccctcttttagatttcttatgagttatagttcaataataaagttttttgtctgatgtttgtggcttcccagaaataagaaagtacatttct

SEQ ID NO: 22761 - DNA, 357 bp, Zea mays
  Clone ID: LIB3152-030-P1-K1-E6
cagaaacacaccaagcgaagcgcactagcaacaacctaacaacaatggctaccaagatattatccctccttgcgcttcttgcgctttttgcgagcgcaacaaatgcgtccattattccacaatgctcacttgctcctagttccattattccacagttcctcccaccagttacttcaatggccttcgaacacccagctgtgcaagcctataggctacaacaagcgattgcggcgagcgtcttacaacaaccaattgcccaattgcaacaacaatccttggcacatctaacaatacaaaccatcgcaacgcaacagcaacaacagttcctaccagcactgagccacctagccatggtga

SEQ ID NO: 22762 - DNA, 351 bp, Zea mays
  Clone ID: LIB3152-030-P1-K1-E7
atagaaagcacaatagtgtaccaacaatggcagctaaaatattttgcctccttatgctccttggtctttctgcaagtgctgctacggcgaccattttcccacaatgctcacaagctcctatagcttcccttcttcccccgtacctctcaccaacggtgtcttcggtatgtgaaaacccaattcttcaaccctacaggatccaacaggcaatcgcagctggcatcttacctttatcacccttgttcctccaacaatcatcagccctattacagcagttacctttggtgcatttattggcacaaaacatcagggcacaacaactacaacaacttgtgctagcaaaccttgctg

SEQ ID NO: 22763 - DNA, 348 bp, Zea mays
  Clone ID: LIB3152-030-P1-K1-E9
ggacgtcagcctagcaattagctcatcgactccagattggagaactcgacaccatgaaggtgctgatcgttgcccttgctctcctggcgctcgctgcgagcgccgcctccagtacaagcggcggctgtggctgccagacaccaccgtttcatctaccgcctccgttctatatgccgcctccgttctatctgccgccgcagcagcagccgcagccatggcaataccccactcaaccaccgcagctaagcccgtgccagcagttcggatcctgcggcgtcggcagcgtcggcagcccgttcctgggccagtgcgtcgagttcctgaggcaccagtgcagcccggcggcga

SEQ ID NO: 22764 - DNA, 354 bp, Zea mays
  Clone ID: LIB3152-030-P1-K1-F1
ggcctacaagacgctgcgcgaccgcgcgccctacccggccagcttcatgctcgcccagctcaccggctcctacgccttcgtcctcttcgacaagtccaccaactccctgctagtcgcatctgaccccgagggcagggtgccgctcttctgggggatcaccgccgacggctgcgtcgccttctccgacgacatcgacatgctcaaaggctcatgcggcaagtcgctcgcgccgttcccgcaaggctgcttctactccaacgccctcggagggctcaagtgctacgagaaccccaagcacaaggtcaccgctgtccccgccgacgaagaagagatctgcggtgccactttcaaggt

SEQ ID NO: 22765 - DNA, 355 bp, Zea mays
  Clone ID: LIB3152-030-P1-K1-F10
gggtcttcagaccattagctttatctactccagagcgcagaagaacccgatcgacaccatgagggtgttgctcgttgccctcgctctcctggctctcgctgcgagcgccacctccacgcatacaagcggcggctgcggctgccagccaccgccgccggttcatctaccgccgccggtgcatctgccacctccggttcacctgccacctccggtgcatctcccaccgccggtccacctgccgccgccggtccacctgccaccgccggtccatgtgccgccgccggttcatctgccgccgccaccatgccactaccctactcaaccgccccggcctcagcctcatccccagccacac

SEQ ID NO: 22766 - DNA, 356 bp, Zea mays
  Clone ID: LIB3152-030-P1-K1-F11
acacaccaagcgaagcgcactagcaacgacctaacaacaatggctaccaagatattagccctccttgcgcttcttgccctttttgtgagcgcaacaaatgcgttcattattccacaatgctcacttgctcctagtgccattattccacagttcctcccaccagttacttcaatgggcttcgaacacctagctgtgcaagccaacatgcaacaacaagcgcttgcggcgagcgtcttacaacaaccaattgcccaattgcaacaacaatccttgccacatctaacaatacaagccatcacaacgcaacagcaacaacagttcctaccagcactgagccacctagccatggtgaaccc

SEQ ID NO: 22767 - DNA, 355 bp, Zea mays
  Clone ID: LIB3152-030-P1-K1-F12
gggtaatgcacctacatacctgcatcaacaattgctgcaacagattgtaccagctctgactcagctagctgtggcaaaccctgctgcctacttgcaacagctgcttccattcaaccaactgactgtgtcgaactctgctgcgtacctacaacagcgacaacagttacttaatccactagcagtgcctaacccattggtcactgccttcctacagcagcaacaattgctaccatacagccagttctctttgatgaaccctgccttgtcgtggcagcaacccatcgttggaggtgccatcttttagattacatatgagatgtaatcgataatggtgccctcataccggcatgtgttt

SEQ ID NO: 22768 - DNA, 129 bp, Zea mays
  Clone ID: LIB3152-030-P1-K1-F2
taaaaaaaaaaaaaaaaaaaaaaatttatttaaaaaaaaggggggcggggtatgggggggataaaaatttacgcacgcgtgcgcgggtaatagatattttttgttttggtataaaataaaattaaattg

SEQ ID NO: 22769 - DNA, 354 bp, Zea mays
  Clone ID: LIB3152-030-P1-K1-F3
agaaagcacaatagtgtaccaacaatggctgccaaaatattttgcttccttatgctccttggtctttctgcaagtgctgctaccgcaaccattttcccacaatgctcacaagctcctatagcttcctttcttcccccatacctctcaccagcggtgtcttcagtatgtgaaaacccaattcttcaaccctacaggatccaacaggcaatcgcagcaggcatcttacctttatcacccttgttcctccaacaaccgtcagccctattacagcagttacctttggtgcatttgttggcacaaaacatcaaggcacaacaactacaacaacttgtgctaggaaaccttgctgcctac

SEQ ID NO: 22770 - DNA, 359 bp, Zea mays
  Clone ID: LIB3152-030-P1-K1-F4
gaagaacccgatcgacaccatgagggtgttgctcgtggccctcgctctcctggctcttgctgtgagcgccacctccacgcatacaagcggcggttgcggctgccagccaccgtcgccggttcatctaccggcgccggtgcatctgccacctccggttcacctgccacctccggtgcatcttccaccgccggtccacctgccggcgccggtgcacctgccaccgccggtgcatgtgccggcgccggttcatctgccggcgccactatgccactaccctactcaaccgccccggcctcagcctcatcctcagccacacccatgcccgtgccaacagccgtatccaagcccgtgccagctgc

SEQ ID NO: 22771 - DNA, 359 bp, Zea mays
  Clone ID: LIB3152-030-P1-K1-F5
ttcagcattcagaaacacaccaagcgaagcgcactagcaacaacctaacaacaatggctaccaagatattagccctccttgcgcttcttgcccttttagtgagcgcaacaaatgcgttcattattccacagtgctcacttgctcctagtgccattattccacagttcctcccaccagttacttcaatgggcttcgaacatccagccgtgcaagcctacaggctacaactagcgcttgcggcgagcgtcttacaacaaccaattgcccaattgcaacaacaatccttggcacatctaaacctacaaaccatcgcaacgcaacagcaacaacagtttctgccatcactgagccacctagcc

SEQ ID NO: 22772 - DNA, 342 bp, Zea mays
  Clone ID: LIB3152-030-P1-K1-F6
ctctaactcagctagctgtggcaaaccctgttgcctacttgcaacagctgcttccattcaaccaactaactatgtcgaactctgttgcgtacctacaacagcgacaacagttacttaatccattggcagtggctaacccattggtcgctgccttcctacagcagcaacaattgctgccatacaaccggttctctttgatgaatcctgtcttgtcgaggcagcaacccatcgttggaggtgccatcttttagattacatatgagatgtactcgataatggtgccctcataccggcatgtgtttcctagaaataatcaatatattggttgagatttatctcgat

SEQ ID NO: 22773 - DNA, 346 bp, Zea mays
  Clone ID: LIB3152-030-P1-K1-F7
agaccaactagcaacatagaatgctcaatagtgtaccaacaatggcagccaaaatattttgcttccttatgctccttggtctttctgcaagtgttgctaccgcaaccattttcccacaatgctcacaagctcctatagcttcccttcttcccccatacctctcaccagcggtgtcttcaatgtgtgaaaacccaattgttcaaccctacaggatccaacaggcaatcgcaacaggcatcttaccattatcacccttgttcctccaacaaccgtcagccctattacagcagttacctttggtccaatttggtggcacaaaacattagggcacaacaactacaacaac

SEQ ID NO: 22774 - DNA, 352 bp, Zea mays
  Clone ID: LIB3152-030-P1-K1-F8
attcagaaacacaccaagcgaagcgcactagcaacgacctaaccacaatgggtaccaaaaatttaagcccttcttgggccttttggcctttttggggagcgcaccaaatgcgtcaattattcaacaatgttaactggctcctagtgccataattcaacagttcctcccaccagttacttcaatgggcttcgaacacctagctgtgcaagccaacatgcaacaacaagcgcttgcggcgagcgtcttacaacaaccaattgcccaattgcaacaacaatccttgccacatctaacaatacaagccatcacaacgcaacagcaacaacagttcctaccagcactgagccaccta

SEQ ID NO: 22775 - DNA, 348 bp, Zea mays
  Clone ID: LIB3152-030-P1-K1-F9
caactagcaacatagaaagcacaatagtgtaccaacaatggcagccaaaatattttgcctccttatgctccttggtatttctgcaagtgctgctacggcgaccattttcccgcaatgctcacaagctcctatagcttcccttcttcccccgtacctctcaccagcggtgtcttcggtatgtgaaaacccaattcttcaaccctacaggatccaacaggcaatcgcagctggcatcttacctttatcacccttgttcctccaacaatcatcagccctattacagcagttacctttggtgcatttattggcacaaaacatcagggcacaacaactacaacaacttgtgct

SEQ ID NO: 22776 - DNA, 348 bp, Zea mays
  Clone ID: LIB3152-030-P1-K1-G1
caatagtgtaccaacaatggcagctaaaatattttgcctccttatgctccttggtctttctgcaagtgctgctacggcgaccattttcccacaatgctcacaagctcctatagcttcccttcttcccccgtacctctcaccaacggtgtcttcggtatgtgaaaacccaattcttcaaccctacaggatccaacaggcaatcgcagctggcatcttacctttatcacccttgttcctccaacaatcatcagccctattacagcagttacctttggtgcatttattggcacaaaacatcagggcacaacaactacaacaacttgtgctagcaaaccttgctgcctactc

SEQ ID NO: 22777 - DNA, 354 bp, Zea mays
  Clone ID: LIB3152-030-P1-K1-G10
caacaatggcagccaaaatattttgcttccttatgctccttggtctttctgcaagtgctgctaccgcaaccattttcccacaatgctcacaagctcctatagcttcctttcttcccccatacctctcaccagcggtgtcttcagtatgtgaaaacccaattcttcaaccctacaggatccaacaggcaatcgcagcaggcatcttacctttatcacccttgttcctccaacaaccgtcagccctattacagcagttacctttggtgcatttgttggcacaaaacatcaaggcacaacaactacaacaacttgtgctaggaaaccttgctgcctactctcagcaacagcagtttc

SEQ ID NO: 22778 - DNA, 302 bp, Zea mays
  Clone ID: LIB3152-030-P1-K1-G11
cttatttacagcagcaacaactactaccattcagccagctagctggtgtgagccctgctaccttcttgatacaaccacagttgttgccgttctaccagcacgctgcgcctaacgctggcaccctcttacaactgcaacaattgctgccattcaaccaacttgctttgacaaacccagcagcgttctaccaacaacccatcattggtggtgccctcttttagatttcttatgagttatagttcaataataaagttttttgtctgatgtttgtggcttcccagaaataagaaagtacatttctt

SEQ ID NO: 22779 - DNA, 251 bp, Zea mays
  Clone ID: LIB3152-030-P1-K1-G12
gccctgctaccttcttgacacaactcacagttgttgccgttctaccagcacgctgcgcctaacgctggcaccctcttacaactgcaacaattgctgccattcaaccaacttgctttgacaaacccagcagcattctaccaacaacccatcattggtggtgccctcttttagatttcttatgagttatagttcaataataaagttttttgtctgatgtttgtggcttcccagaaataagaaagtacatttct

SEQ ID NO: 22780 - DNA, 185 bp, Zea mays
  Clone ID: LIB3152-030-P1-K1-G2
caactagcaacatagaaagcacaatattgtaccaataatggcagccaaaatattttgcctcattatgctccttggtctttctgcaagtgctgctacggcgagcattttcccgcaatgctcacaagctcctatagcttcccttcttcccccatacctctcaccagcgatgtcttcagtatgtgaaa

SEQ ID NO: 22781 - DNA, 348 bp, Zea mays
  Clone ID: LIB3152-030-P1-K1-G3
gcgaagcgcactagcaacaacctaacaacaatggctaccaagatattagccctccttgcgcttcttgcccttttagtgagcgcaacaaatgcgttcattattccacagtgctcacttgctcctagtgccattattccacagttcctcccaccagttacttcaatgggcttcgaacatccagccgtgcaagcctacaggctacaactagcgcttgcggcgagcgtcttacaacaaccaattgcccaattgcaacaacaatccttggcacatctaaacctacaaaccatcgcaacgcaacagcaacaacagtttctgccatcactgagccacctagccgtggtgaaccct

SEQ ID NO: 22782 - DNA, 357 bp, Zea mays
  Clone ID: LIB3152-030-P1-K1-G4
attgagaccaactagcaacatagaaagcacaatagtgtaccaacaatggcagccaaaatattttgcttccttatgctccttggtctttctgcaagtgttgctaccgcaaccattttcccacaatgctcacaagctcctatagcttcccttcttcccccatacctctcaccagcggtgtcttcaatgtgtgaaaacccaattgttcaaccctacaggatccaacaggcaatcgcaacaggcatcttaccattatcacccttgttcctccaacaaccgtcagccctattacagcagttacctttggtccatttggtggcacaaaacatcagggcacaacaactacaacaacttgtgcta

SEQ ID NO: 22783 - DNA, 56 bp, Zea mays
  Clone ID: LIB3152-030-P1-K1-G5
ccctccctcccactccacccatcattacaaatccctctccccccccccccagggga

SEQ ID NO: 22784 - DNA, 209 bp, Zea mays
  Clone ID: LIB3152-030-P1-K1-G6
cagaccattagctttatctactccagagcgcagaagaacccgatcgacaccatgagggtgttgctcgttgccctcgctctcctggctctcgctgcgagcgccacctccacgcatacaagcggcggctgcggctgccagccaccgccgccggttcatctaccgccgccggtgcatctgccacctccggttcacctgccacctccggtgca

SEQ ID NO: 22785 - DNA, 302 bp, Zea mays
  Clone ID: LIB3152-030-P1-K1-G9
cgaagccgcactgtgagagagggacgcggcctgttgtcccggcttttagacgcaacttccatcgctgcgaagctatccattcgtgttcgtcatggccgccagcgtcaccgtggaaaacctcaaccccaagggcttaaaatgtgagtatgcagtccgtggggagattgtcatccatgctcagcgcctgcagcaacaactacaaacacaaccagggtctcttccttttgatgagatcctctattgcaatattgggaatccccaatctcttggtcagcaacctgtgacattcttcagggaggttc

SEQ ID NO: 22786 - DNA, 355 bp, Zea mays
  Clone ID: LIB3152-030-P1-K1-H1
caacaagcaacatagaaagtggaatccagttgcaacaatagagcaacaatggagaccaagatattttccctccttatgctccttgctctttctacatgtgttgctaacgcgacaattttccctcaatgctcacaagctcctatagcttccctttttcccccataccttccatcaattatagcttcagtatgtgaaaacccagctcttcaaccatataggcttcaacaagcaatcgcagcaagcaacatacctttatcgcccttgttgtgtcaacaatcgccagccctatctttggtgcaggcattggtacaaaccatcagggcacaacagctgcagcaactcgtgctacctgtga

SEQ ID NO: 22787 - DNA, 357 bp, Zea mays
  Clone ID: LIB3152-030-P1-K1-H11
agcaacatagaaagtggaatccagtagcaacaatagagcaacaatggcgaccaagatattttccctccttatgctccttgctctttctgcatgtgttgctaacgcgacaattttccctcaatgctcacaagctcctatagcttcccttcttcccccataccttccatcaatgatagcttcagtatgtgaaaacccagctcttcaaccctataggctccaacaagcaatcgcagcaagcaacatacctttatcacccttgtttcaacaatcgccagccctatctttggtgcagtcattggtacaaaccatcagggcacagcagctgcagcaactcgtgctacctgtgatcaaccaagg

SEQ ID NO: 22788 - DNA, 362 bp, Zea mays
  Clone ID: LIB3152-030-P1-K1-H12
tcgcattcagaaacacaccaagctaatttcattagcaacaacctaacaacaatggctaccaagatattatccctccttgcgcttcttgcgctttttgcgagcgcaacaaatgcgttcattattccacaatgctcacttgctccaagttccattattacacagttcctcccaccagttacttcaatgggcttcgaacacccagctgtgcaagcctataggctacaacaagcaattgcggcgagcgtcttacaacaaccaatttcccagttgcaacaacaatccttggcacatttaacaatacaaaccatcgcaacgcaacagcaacaacaattcctaccagcactgagccacctagccatggt

SEQ ID NO: 22789 - DNA, 352 bp, Zea mays
  Clone ID: LIB3152-030-P1-K1-H2
gtttaagcttgtattcccacactctgtcgcagcgtcgcccgtcgccgctgagatcctagctaggaagaaatggagctctctcgcaagctcttcacggccgtcctcctcgtcatgctgctgctgctgtccgcagaggtcgggccggtggcggtggcggaggcgcggacgtgccagtcgcagagccacaggttccggggcccctgcctccgccggtccaactgcgccaacgtctgcaggaccgaggggttccccggcggcaggtgccgcggcttccgccgccgctgcttctgcaccacgcactgccactgattcgctcgcccagcggccggctggcgtcgccgtcgatcgcgcg

SEQ ID NO: 22790 - DNA, 355 bp, Zea mays
  Clone ID: LIB3152-030-P1-K1-H3
cagttacctttggtgcatttattgttacataacatcagggcacaacaactacaacaacttgtgctagcaaaccttgctgcctactctcagcaacagcagtttcttccattcaaccaactagctgcattgaactctgcttcttatttgcaacaacaacaactaccattcagccagctacctgctgcctacccccagcaatttcttgcattcaaccaactggcagcattgaactctcctgcttatttacagcagcaacaactactaccattcagccagctagctggtgtgagccctgctaccttctcgatacaaccacagttgctgcctgtttaccagcacgctgcgcctaacgctg

SEQ ID NO: 22791 - DNA, 357 bp, Zea mays
  Clone ID: LIB3152-030-P1-K1-H4
cggacgcgtgggcggacgcgtggggcaacataaaaagcacaatagtgtaccaacaatggcaggccaaaatatttggcctcctaatgctcctgggcctttttgcaggggctgttacggcgacaattttcccacattgctaacaggctcctatagcttcccttcttcccccgtacctctcaccagcggtgtcttcggtatgtgaaaacccaattcttcaaccctataggatccaacaggcaatcgcagctggcatcttacctttatcacccttgttcctccaacaatcatcagccctattacagcagttaccttgggcgcatttattggcacaaaacatgagggcacaacaactacaac

SEQ ID NO: 22792 - DNA, 323 bp, Zea mays
  Clone ID: LIB3152-030-P1-K1-H5
ctcagctagctgtggcaaaccctactgcctacttgcaacagttgcttccattcaaccaactggctgtgtcgaactctgctgtgtacctacaacagcgacaacagttacttaatccactagcagtgggtaacccattggtcgctaacttcctgcagcagcaacaattgctgccatacaaccagttctctttgatgaaccctgccttgcagcaacccatcgttggaggtgccatcttttagattacatatgagatgtactcaacaatggtgccctcataccggcatgtgttttctagaaataatcaatatattgattgagattta

SEQ ID NO: 22793 - DNA, 353 bp, Zea mays
  Clone ID: LIB3152-030-P1-K1-H6
gttcgttgctcgatcgttgcaggtaatggagaaccctgctccgagtatcgtagtgtcccccatcgccgcacctgtatcagcgaacttcagcagactcgccttccgcaacctgtacatccgacggacgggtccagacagcagggagatggtgactgtggagggaagaagaggctctagtgatcagacaggcgacatgaggtacgtgagtgacttccccgtctacgatggccgtggctccgacgccgtcctggtggctcgcgtgcagggcgtcacaaccacgttcgggaactccaaccagttcttcaccgtcgccttcgaggccggcaggctcaagggctccacgctccttaccg

SEQ ID NO: 22794 - DNA, 197 bp, Zea mays
  Clone ID: LIB3152-030-P1-K1-H7
caacaagcaacatagaaagtggaatccagtagcaacaatagagcaacaatggcgaccaagatattttccctccttatgctccttgctctttctgcatgtgttgctaacgcgacaattttccctcaatgctcacaagctcctatagctttccttcttcccccataccttccatcaatgaatagcttcagtatggtgaa

SEQ ID NO: 22795 - DNA, 339 bp, Zea mays
  Clone ID: LIB3152-030-P1-K1-H8
aacgcaaattgcaccaagaaatccatcgagaggccgtcgacaggggaattaatggcgtcgtcgtctagcagcagccaccgccgcctcatcctcgcagccgccgtcctgctctccgtgctcgcggctgccagcgccagcgccgggacctcctgcgtgccggggtgggccatcccgcacaacccgctcccgagctgccgctggtacgtgaccagccggacctgcggcatcgggccgcgcctcccgtggccggagctgaagaggagatgctgccgggagctggcggacatcccggcgtactgccggtgcacggcgctgagcatcctcatggacggcgcgatc

SEQ ID NO: 22796 - DNA, 352 bp, Zea mays
  Clone ID: LIB3152-030-P1-K1-H9
gcaacatagaaagcacaatagtgtaccaacaatggcagccaaaatattttgcttccttatgctccttggtctttctgcaagtgctgctaccgcaaccattttcccacaatgctcacaagctcctatagcttcctttcttcccccatacctctcaccagcggtgtcttcagtatgtgaaaacccaattcttcaaccctacaggatccaacaggcaatcgcagcaggcatcttacctttatcacccttgttcctccaacaaccgtcagccctattacagcagttacctttggtgcatttgttggcacaaaacatcaaggcacaacaactacaacaacttgtgctaggaaacctt

SEQ ID NO: 22797 - DNA, 365 bp, Zea mays
  Clone ID: LIB3152-031-P1-K1-A10
attgagaccaactagcaacatagaaagcacaatagtgtaccaacaatggcagccaaaatattttgcttccttatgctccttggtctttctgcaagtgctgctaccgcaaccattttcccacaatgctcacaagctcctatagcttcctttcttcccccatacctctcaccagcggtgtcttcagtatgtgaaaacccaattcttcaaccctacaggatccaacaggcaatcgcagcaggcatcttacctttatcacccttgttcctccaacaaccgtcagccctattacagcagttacctttggtgcatttgttggcacaaaacatcaaggcacaacaactacaacaacttgtgctaggaaacct

SEQ ID NO: 22798 - DNA, 362 bp, Zea mays
  Clone ID: LIB3152-031-P1-K1-A11
ggggacggggtcggcacggggcgatgaggagcagcgaggccatggagctcctgggcttccatccctactccaggccctccccttccgagatcgcagaagcatattcttgttcgaaggacggaagaagatcagggagtaggatggaagttcatgttatgcgttctggtgttccgactagccacggaagatcaaatagaacgttggttaaagccccgtttctcctcataacgtttgcagcagtttcttttggcgccttcagcgcatcaagagcgtatcaacggcaaaaggaactgtgttcctctcagaacccctttctaccatagaggaagacggtgggctctgtccatgttctcatagacgag

SEQ ID NO: 22799 - DNA, 361 bp, Zea mays
  Clone ID: LIB3152-031-P1-K1-A12
gcgatttcgatctcgcagccaccttttttttgttctgttgtgtatctagtagttggaggagatatgcagtttgcacttgcattggacacgaactcaggtcctcaccagataagatcttgtgagggtgatgggattgacaggttggaaaaattaagtattgggggcagaaagcaggagaaagctttgagaaataggtgctttggtggtagagttgctgcaactacacaatgtattcttacctcagatgcttgtcctgaaactcttcattctcaaacacagtcctctaggaaaaattatgctgatgcaaaccgtgtatctgctatcattttgggcggaggcactggatctcagctctttcctc

SEQ ID NO: 22800 - DNA, 369 bp, Zea mays
  Clone ID: LIB3152-031-P1-K1-A3
attgagaccaactagcaacatagattgctcaatattgttccaacaatggcagccaaaatattttgcctccttatgctccttggtctttctgcaagtgctgctacggcgaccattttcccgcaatgctcgcaagctcctatagcttgccttcttcccccgtacctctcaccagcggtgtcttcggtatgtgaaaacccaattcttcaaccctacaggatccaacaggcaatcgcagctggcatcttacctttatcacccttgatgctacaacaatcatcagccctattacaacagttacctttggtgcattcattggcacaaaacattatggcacatcaactacaacaacttgtgctagcaaaccttgct

SEQ ID NO: 22801 - DNA, 393 bp, Zea mays
  Clone ID: LIB3152-031-P1-K1-A5
aatttccgggccggaccaacccgtccggtcttcagaccattagctttatctactccagagcgcagaagaacccgatcgacaccatgagggtgttgctcgttgccctcgctctcctggctctcgctgcgagcgccacctccacgcatacaagcggcggctgcggctgccagccaccgccgccggttcatctaccgccgccggtgcatctgccacctccggttcacctgccacctccggtgcatctcccaccgccggtccacctgccgccgccggtccacctgccaccgccggtccatgtgccgccgccggttcatctgccgccgccaccatgccactaccctactcaaccgccccggcctcagcctcatccccagccacacccatgcccgtgcc

SEQ ID NO: 22802 - DNA, 363 bp, Zea mays
  Clone ID: LIB3152-031-P1-K1-A8
tgatgagtcagttcaattctacttcgcttaaccgccatattcatcgtacataccttgaaggcgggatcaactttgctgatggatctgtacaggtattagcggctacacaaatgcctgaagagccagctggatggttccagggtacagcagactctatcagaaaatttatctgggtactcgaggattattacagtcacaaatccattgacaacattgtaatcttgagtggcgatcagctttatcggatgaattacatggaacttgtgcagaaacatgtcgaggacgatgctgatatcactatatcatgtgctcctgttgatgagagccgagcttctaaaaatgggctagtgaagattgatcata

SEQ ID NO: 22803 - DNA, 367 bp, Zea mays
  Clone ID: LIB3152-031-P1-K1-A9
agcaaagcggcagtgcgtagagtggatcgtcgaacagaacagcatgaagatggtcatcgttctcgtcgtgtgcctggctctgtcagctgccagcgcctctgcaatgcagatgccctgcccctgcgcggggctgcagggcttgtacggcgctggcgccggcctgacgacgatgatgggcgccggcgggctgtacccctacgcggagtacctgaggcagccgcagtgcagcccgctggcggcggcgccctactacgccgggtgtgggcagacgagcgccatgtaccagccgctccggcaacagtgctgccagcagcagatgaggatgatggacgtgcagtccgtcgcgcagcagctgcagatgatgatg

SEQ ID NO: 22804 - DNA, 379 bp, Zea mays
  Clone ID: LIB3152-031-P1-K1-B1
agccttcggtttttttaattcccatcaatcatctttcatcttagtagtataggcaccaaatcaaatctgcaacatcaattatctaactccaaaaaccatgaagctggtgcttgtggttcttgctttcattgctttagtatcaagtgtttcttgtacacagacaggcggctgcagctgtggtcaacaacaaagccatgagcagcaacatcatccacaacaacatcatccacaaaaacaacaacatcaaccaccaccacaacatcaccagcagcagcaacaccaacaacaacaagttcacatgcaaccacaaaaacatcagcaacaacaagaagttcatgttcaacaacaacaacaacaaccgcagcaccaacaacaacaa

SEQ ID NO: 22805 - DNA, 361 bp, Zea mays
  Clone ID: LIB3152-031-P1-K1-B10
caactagcaacatagaaagcacaattgtgtaccaacaatggcagccaaaatattttgcctccttatgctccttggtctttctgcaagtgctgctacggcgaccattttcccacaatgctcacaagctcctatagcttcccttcttcccccgtacctctcaccagcggtgtcttcggtatgtgaaaacccaattcttcaaccctataggatccaacaggcaatcgcagctggcatcttacctttatcacccttgttcctccaacaatcatcagccctattacagcagttacctttggtgcatttattggcacaaaacatcagggcacaacaactacaacaacttgtgctagcaaaccttgct

SEQ ID NO: 22806 - DNA, 329 bp, Zea mays
  Clone ID: LIB3152-031-P1-K1-B11
cttccgttggactttaaaaacacaccaagcgaactacctagcccgacttaacaacaatggctaccaagatatagccctccttgcgcttcttgccctttttgtgagcgcaacaaatgcgttcattattccacaatgctcacttgctcctagtgccattataccacagttcctccgaccagttacttcaatgggcttcgaacacctagctgtgcaagcctacaggctacaacaagcgcttgcggcgagcgtcttacaacaaccaattaaccaattgcaacaacaatccttggcacatctaaccatacaaaccatcgcaacacaacagcaac

SEQ ID NO: 22807 - DNA, 357 bp, Zea mays
  Clone ID: LIB3152-031-P1-K1-B12
caacaagcaacatagaaagtggaatccagtagcaacaatagagcaacaatggagaccaagatattttccctccttatgctccttgctctttctacatgtgttgctaacgcgacaattttccctcaatgctcacaagctcctatagcttccctttttcccccataccttccatcaattatagcttcagtatgtgaaaacccagctcttcaaccatataggcttcaacaagcaatcgcagcaagcaacatacctttatcgcccttgttgtgtcaacaatcgccagccctatctttggtgcagtcattggtacaaaccatcagggcacaacagctgcagcaactcgtgctacctgtgatc

SEQ ID NO: 22808 - DNA, 377 bp, Zea mays
  unsure at all n locations
  Clone ID: LIB3152-031-P1-K1-B2
acccacgcgtccgcttttatcagcaccattaatcatctttttcctaaccagnaaaagctccaaatcaagggggctttatcaattatctaactccaaaaaccatgaagctggtgcttgcagtgcttgatagtaccgctgctttgtcgggaggctcgcctgggccaccgacgaccactacctgcacaacgcctttagcacctacggcgaggtcctcgagtccaagatcatcctcgatcgggcgacgccaaagtcccgcggcttcaggttcgtcaccttctccacggaggaggcgatgcggaacgccatcgagggcatgaacggcaaggagctggacggccgtaacatcaccgtcaacgaggcccagtcccgcggcggcc

SEQ ID NO: 22809 - DNA, 224 bp, Zea mays
  Clone ID: LIB3152-031-P1-K1-B3
atacatagtgaagtacactagcaacattttagcaccaatgggagccaagatttgtgccctccttgccctccttgctctttcagcaagcgctgctacctcgactttaattccacaaggctaacaaaattacctctttccggcaccagccgtgggttttaattcccaaccattccattccacatgggtcaagaagcccttccagcaagccttttaccgtcctttac

SEQ ID NO: 22810 - DNA, 367 bp, Zea mays
  Clone ID: LIB3152-031-P1-K1-B4
tgagaccaactagcaacatagaaagttctatagtgtaccaacaatggcagccaaaatattttgcttccttatgctccttggtctttctgcaagtgttgctaccgcaaccattttcccacaatgctcacaagctcctatagcttcccttcttcccccatacctctcaccagcggtgtcttcaatgtgtgaaaacccaattgttcaaccctacaggatccaacaggcaatcgcaacaggcatcttaccattatcacccttgttcctccaacaaccgtcagccctattacagcagttacctttggtccatttggtggcacaaaacatcagggcacaacaactacaacaacttgtgctagcaaaccttgct

SEQ ID NO: 22811 - DNA, 370 bp, Zea mays
  Clone ID: LIB3152-031-P1-K1-B5
tcggggacccctgggtcaacatttaaaaatcacaccaagcgaagcgcactagcaacaacctaacaacaatggctaccaagatattagccctccttgcgcttcttgcccttttagtgagcgcaacaaatgcgttcattattccacagtgctcacttgctcctagtgccattattccacagttcctcccaccagttacttcaatgggcttcgaacatccagccgtgcaagcctacaggctacaactagcgcttgcggcgagcgtcttacaacaaccaattgcccaattgcaacaacaatccttggcacatctaaacctacaaaccatcgcaacgcaacagcaacaacagtttctgccatcactgagccacct

SEQ ID NO: 22812 - DNA, 304 bp, Zea mays
  Clone ID: LIB3152-031-P1-K1-B6
tttccccaaggggggccaaatttttggccctcttggccctttggctttttaagaaggcgctgttacctggacttttattccacaatgctaacaacaatacctttctccggcgacagccgtgggatttcaatacccaactatacaatcctacatggtacaagaggccatccaagcaagcatcttacggtcattagcattaaccctccaacaaccatatgctctattgcaacagccatccttagtgcatctgtatctccaaagaatcgcggcacaacaactacaacaacagttgctaccaacaatc

SEQ ID NO: 22813 - DNA, 365 bp, Zea mays
  Clone ID: LIB3152-031-P1-K1-B7
gatcaaacaagtagcgacagctcgacaaagatttgtgagagtgatccggcgctgagaagagatggctaagatcgccgcagccgccgcggcggcggcggcgctgtgcttcgcggccctggtggccgtggccgtctgccaaggcgaggtcgagcggcagaggctcagggacctgcagtgctggcaggaggtccaggagagcccgctcgacgcgtgccgccaggtcctcgaccggcagctaaccggcggcggcgtcggcggcccgttccggtggggcaccgggctccggatgcggtgctgccagcagctccaggacgtgagccgcgagtgccgctgcgccgtcatccggagcatggtcaggggctacg

SEQ ID NO: 22814 - DNA, 365 bp, Zea mays
  Clone ID: LIB3152-031-P1-K1-B8
cccacgcgtccggttggcttctccttcccctccggttcgggttcgggttcgtgaggttctccggggttcggtttcgtgggtgagcggatcgagatggcggcgtcggatgttgagtaccgctgcttcgtcggcggcctcgcctgggccacggacgaccactccctccacaacgccttcagcacctacggcgaggtcctcgagtccaagatcatcctcgatcgggagacgcagaggtcccgcggcttcggcttcgtcaccttctccacggaggaggcgatgctgaacgccatcgagggcatgaacggcaaggagctggacggccgcaacatcaccgtcaacgaggcccagtcccgcggcggccgtgg

SEQ ID NO: 22815 - DNA, 364 bp, Zea mays
  Clone ID: LIB3152-031-P1-K1-B9
ttgagaccaacaagcaacatataatgtggaatccagtagcaacaatagagcagcagtggtgaccaagatattttccctccttatgctccttgctctttctacatgtgttgctaacgcgacaattttccctcaatgctcacaagctgctatagcttacctttttcccccatacctttcatcaattatagcttcagtatgtgaaaacccagctcttcaaccatataggcttcaacaagcaatcgcagcaagcaacatacctttatcgaccttgttgggtcaacaatagccagccctatctttggtgcagtcattggtacaaaccatcaaggcacaacagctgcagcaactcgtgctacctgtgatc

SEQ ID NO: 22816 - DNA, 236 bp, Zea mays
  Clone ID: LIB3152-031-P1-K1-C1
gcgacaacagttacttaatccactagctttggctaacccattggtcgctaacttcgtgcagcagcaacaattgctgccatacaaccagttctctttgatgaaccctgccttgcagcaacccatcgttggaggtgccatcttttagattacatatgagatgtactcaacaatggtgccctcataccggcatgtgtttcctagaaataatcaatatattgattgagatttatcttgat

SEQ ID NO: 22817 - DNA, 365 bp, Zea mays
  Clone ID: LIB3152-031-P1-K1-C11
gctttatctactccagagcgcagaagaacccgatcgacaccatgagggtgttgctcgttgccctcgctctcctggctctcgctgcgagcgccacctccacgcatacaagcggcggctgcggctgccagccaccgccgccggttcatctaccgccgccggtgcatctgccacctccggttcacctgccacctccggtgcatctcccaccgccggtccacctgccgccgccggtccacctgccaccgccggtccatgtgccgccgccggttcatctgccgtcgccaccatgccactaccctactcaaccgccccggcctcagcctcatccccagccacacccatgcccgtgccaacagccgcatcca

SEQ ID NO: 22818 - DNA, 365 bp, Zea mays
  Clone ID: LIB3152-031-P1-K1-C12
ggagagcctcactcaagattatgatgccaaatattggcagcaacgttacagcctaaaagaaggaattcctagtttccttacgaatgttgccgcaacgattctaacaacagggaagtatcttaatgttatgagagaatgtgggcacaatgttcaggtttccttgtcagacaattctaagcttatgagctttggctcaaaccaccaatatcttgaatgtataaaatctgcatatgattttgcaagtggtgaattgttgactctgatgaaagataagtatgatctcatcgggaaactccgatccctgaagcgctatctactccttgaccaaggtgactttttggtccattttatggatattgctcgag

SEQ ID NO: 22819 - DNA, 367 bp, Zea mays
  Clone ID: LIB3152-031-P1-K1-C2
attttcagcattcagaaacacaccaagcgaagcgcactagcaacaacctaacaacaatggctaccaagatattagccctccttgcgcttcttgcccttttagtgagcgcaacaaatgcgttcattattccacagtgctcacttgctcctagtgccattattccacagttcctcccaccagttacttcaatgggcttcgaacatccagccgtgcaagcctacaggctacaactagcgcttgcggcgagcgtcttacaacaaccaattgcccaattgcaacaacaatccttggcacatctaaacctacaaaccatcgcaacgcaacagcaacaacagtttctgccatcactgagccacctagccgtggt

SEQ ID NO: 22820 - DNA, 372 bp, Zea mays
  Clone ID: LIB3152-031-P1-K1-C3
cacaaaaacaacaacatcaaccaccacctcaacatcaccagcagcagcaacaccaacaacaacaagttcacatgcaaccacaaaaacatcagcaacaacaagaagttcatgttcaacaacaacaacaacaaccgcagcaccaacaacaacaacaacaacagcaccaacaacaacatcaatgtgaaggccaacaacaacatcaccaacaatcacaaggccatgtgcaacaacacgaacagagccatgagcaacaccaaggacagagccatgagcaacaacatcaacaacaattccagggtcatgacaagcagcaacaaccacaacagcctcagcaatatcagcagggccaggaaaaatcacaacagcaacaat

SEQ ID NO: 22821 - DNA, 369 bp, Zea mays
  Clone ID: LIB3152-031-P1-K1-C4
gcgaagcgcactagcaacaacctaacatcaatggctaccaagatattatccctccttgcgcttcttgcgctttttgcgagcgcaacaaatgcgtccattattccacaatgctcacttgctcctagttccattattccacagttcctcccaccagttacttcaatggccttcgaacacccagctgtgcaagcctataggctacaacaagcgattgcggcgagcgtcttacaacaaccaattgcccaattgcaacaacaatccttggcacatctaacaatacaaaccatcgcaacgcaacagcaacaacagttcctaccagcactgagccacctagccatggtgaaccctgtcgcctacttgcaacagcag

SEQ ID NO: 22822 - DNA, 367 bp, Zea mays
  Clone ID: LIB3152-031-P1-K1-C5
ctgatttgaatctagatgggccattagtcaattcaaggagaaacttgtccatatcaccacctcttgatgtgttctctaggaatgtgtcccccaagagagcactagagaggctgccaccatctcattctgtattgggacctgatcccagaaaattcactgatcgaaatggcaggtcaagatggggttcggatgatggtgcacaacggcctacaatcagtatgcttgatgaagagtacaggaagcaaagtgcaagggaacttattgatgcatatgggaatcgtcaaggacgagatgctgatgaacgacttcctaaagtgcagcgcctggatccaaatggtatggctagcagatctagtgcacgaaattg

SEQ ID NO: 22823 - DNA, 367 bp, Zea mays
  Clone ID: LIB3152-031-P1-K1-C7
ctggtgtgagccctgctaccttcttgacacaaccacaattgttgccgttctaccagcacgctgcgcctaacgctggcaccctcttacaactgcaacaattgctgccattcaaccaacttgctttgacaaacccaacagcattctaccaacaacccatcattggtggtgccctcttttagatttcttatgagttatagttcaataataaagttttttgtctgatgtttgtggcttcccagaaataagaaagtacatttctaaaaaaaaaaaaaaaaaaaaaaaaaaaaaaaaaaaaaaaaaaaaaaacaaaaaaaaaaaaaaaaaaaaaaaaaaaaaattatttaaaaaaaaaaaaaataaaacaaaa

SEQ ID NO: 22824 - DNA, 363 bp, Zea mays
  Clone ID: LIB3152-031-P1-K1-C8
cttgctcctagtgccattattccacagttcctcccaccagttacttcaatgggcttcgaacacctagctgtgcaagccaacatgcaacaacaagcgcttgcggcgagcgtcttacaacaaccaattgcccaattgcaacaacaatccttgccacatctaacaatacaagccatcacaacgcaacagcaacaacagttcctaccagcactgagccacctagccatggtgaaccctgccgcctacttgcaagagcagctgcttgcatccaacccacttgctctggcgaacgtagttgcaaaccagcaacaacaacagctacaacagtttctgccaacgctcagtcaactagccatggtgaaccct

SEQ ID NO: 22825 - DNA, 346 bp, Zea mays
  Clone ID: LIB3152-031-P1-K1-C9
cttgctcacagtaccataatctctttttttatcccaccagttacttcaatgggaggtgttctcctagctgtgcatgccaacatgcatcaacaagccctcgaagggagcgattaacaacaactaattgcccaattgcaacaacaattacttgccacatttaacaaaacaagccattaaatcgcatcagaaccaccagttgcgacaatctatgagccacataacgatgttgaaccctgccgtctacatgcaacgaactagtcatgtgaaacaaacaatctgcgcacatataagaattgcaaacatgcaacgcaacagctacaacagttttttccaacacttagtcaac

SEQ ID NO: 22826 - DNA, 395 bp, Zea mays
  Clone ID: LIB3152-031-P1-K1-D1
tgaatttccgggtcggcccaacccgtccgattttgagcattcagaaacacaccaagttaagcgcactagcaacaacctaacaacaatggctaccaagatattatccctccttgcgcttcttgcgctttttgcgagcgcaacaaatgcgtccattattccacaatgctcacttgctcctagttccattattccacagttcctcccaccagttacttcaatggccttcgaacacccagctgtgcaagcctataggctacaacaagcgattgcggcgagcgtcttacaacaaccaattgcccaattgcaacaacaatccttggcacatctaacaatacaaaccatcgcaacgcaacagcaacaacagttcctaccagcactgagccacctagccatgg

SEQ ID NO: 22827 - DNA, 364 bp, Zea mays
  Clone ID: LIB3152-031-P1-K1-D10
attttaagcattcagaaacactctttgcgaagcgcactatcaacaacctaacagcaatggcttccaagatattagccctccttgcgcttcttgcccttttagtgagcgcaacaaatgcgttcattattccacagtgctcacttgcttctagtgccattattccacagttcctcccaccagttacttaaatgggcttagaacattcatccgtgcaagcctacaggctacaactagcgcttgcggcgagcgttttacaacaaccaattgcccaattgcaacaacaatccttggcacatgtaaacctacaaaccatcggaacgcaacagcaacaacagtttctgccatcactgagccacctagccgt

SEQ ID NO: 22828 - DNA, 362 bp, Zea mays
  Clone ID: LIB3152-031-P1-K1-D11
ccaactagcaacatagaaagcactttagtgtaccaacaatggcagccaaaatattttgcttccttatgctccttggtctttctgcaagtgctgctaccgcaaccattttcccacaatgctcacaagctcctatagcttcctttcttcccccatacctctcaccagcggtgtcttcagtatgtgaaaacccaattcttcaaccctacaggatccaacaggcaatcgcagcaggcatcttacctttatcacccttgttcctccaacaaccgtcagccctattacagcagttacctttggtgcatttgttggcacaaaacatcaaggcacaacaactacaacaacttgtgctaggaaaccttgct

SEQ ID NO: 22829 - DNA, 366 bp, Zea mays
  Clone ID: LIB3152-031-P1-K1-D2
cagaccattagctttatctactccagatcgcagaagaacccgatcgacaccatgagggtgttgctcgttgccctcgctctcctggctctcgctgcgagcgccacctccggttcacctgccacctccggtgcatctcccaccgccggttcatctgccgccgccaccatgccactaccctactcaaccgccccggcctcagcctcatccccagccacacccatgcccgtgccaacagccgcatccaagcccgtgccagctgcagggaacctgcggcgttggcagcaccccgatcctgggccagtgcgtcgagttcctgaggcatcagtgcagcccgacggcgacgccctactgctcgcctcagtgcca

SEQ ID NO: 22830 - DNA, 367 bp, Zea mays
  Clone ID: LIB3152-031-P1-K1-D3
agaccattagctttatctactccagagcgcagaagaacccgatcgacaccatgagggtgttgctcgttgccctcgctctcctggctctcgctgcgagcgccaccttcacgcatacaagcggcggctgcggctgccagccaccgccgccggttcatctaccgccgccggtgcatctgccacctccggttcacctgccacctccggtgcatctcccaccgccggtccacctgccgccgccggtccacctgccaccgccggtccatgtgccgccgccggttcatctgccgccgtcaccatgccactaccctactcaaccgccccggcctcagcctcatccccagccacacccatgcccgtgccaacagcc

SEQ ID NO: 22831 - DNA, 368 bp, Zea mays
  Clone ID: LIB3152-031-P1-K1-D4
agaccaacaagcaacatagaaagtggaatccagtagcaacaatagagcaacaatggcgaccaagatattttccctccttatgctccttgctctttctgcatgtgttgctaacgcgacaattttccctcaatgctcacaagctcctatagcttcccttcttcccccataccttccatcaatgatagcttcagtatgtgaaaacccagctcttcaaccctataggctccaacaagcaatcgcagcaagcaacatacctttatcacccttgtttcaacaatcgccagccctatctttggtgcagtcattggtacaaaccatcagggcacagcagctgcagcaactcgtgctacctgtgatcaaccaagtag

SEQ ID NO: 22832 - DNA, 376 bp, Zea mays
  Clone ID: LIB3152-031-P1-K1-D5
agccttccggtactaccagagatcgaacaacttggtcctgcagctcaagaagagagtttcgtgcatttgggggccgggggcaagagagagagagagagagccatggcggcggaccagcacccgcagctgcaggaggagatgaacgacgctgccggcggcggcctcaggctgcctacagggttccgcttgcacccgagcgacttggagattgtcagcttctacctcaccaacaaggtgctcaacacgcgcttcacctgcaccgccatcacggaggccgacctaaacaagattgagccatgggacctgccgagcaaggcgaagatgggcgagaaagagtggtacttcttctaccagaaggacctgaagtacccgacgg

SEQ ID NO: 22833 - DNA, 329 bp, Zea mays
  Clone ID: LIB3152-031-P1-K1-D6
acctaacaccattggctaccaagatattagccctccttgcgcttcttgccctttttgtgagcgcaacaaatgcgttcattattccacaatgctcacttgctcctagtgccattattccacagttcctcccaccagttacttcaatgggcttcgaacacctagctgtgcaagccaacatgcaacaacaagcgcttgcggcgagcgtcttacaacaaccaattgcccaattgcaacaacaatccttgccacatctaacaatacaagccatcacaacgcaacagcaacaacagttcctaccagcactgagccacctagccatggtgaaccct

SEQ ID NO: 22834 - DNA, 364 bp, Zea mays
  Clone ID: LIB3152-031-P1-K1-D7
cccacgcgtccgctttctccctactctcagcaacaacaatttcttccattcaaccaactgtctacattgaaccgtgctgcttatttgcagcaacaactattaccattcagccagctagctactgcctactctcagcaacaacaacttcttccatttaaccaattggccgcactgaaccccgctgcttatttgcagcagcaaatactactaccatttagccagctagctgcagcaagccgtgcttccttcttgacacagcaacagttgctgcctttctaccagcagtttgcggctaaccccgcaaccctcttacaactacaacaattgttgccctttgtccaacttgctttgacaaacccagcag

SEQ ID NO: 22835 - DNA, 364 bp, Zea mays
  Clone ID: LIB3152-031-P1-K1-D8
gctgtggccaatgcacctacatacctgcaacaacaattgttgcaacagattgtaccagctctgactcagctagttgtggcaaaccctgctgcctacttgcaacagctgcttccattcaaccaactgactatgtcgaactctgctgcgtacctacaacagcgacaacagttacttaatccactagcagtggctaacccattggtcgctgccttcctacagcagcaacaattgctgccatacaaccagttctctttgataaaccctgtcttgtcgaggcagcaacccatcgttggaggtgccatcttttagattacatatgagatgtactcgataatggtgccctcattccggcatgtgtttccta

SEQ ID NO: 22836 - DNA, 364 bp, Zea mays
  Clone ID: LIB3152-031-P1-K1-D9
gatcaaacaagtagcgacagctcgacaaagattcgtgagagtgatccggcgctgagaagagatggctaagatcgccgcagccgccgcggcggcggcggcgctgtgcttcgcggccctggtggccgtggccgtctgccaaggcgaggtcgagcggcagaggctcagggacctgcagtgctggcaggaggtccaggagagcccgctcgacgcgtgccgccaggtcctcgaccggcagctaaccggcggcggcgtctgcggcccgttccggtggggcaccgggctccggatgcggtgctgccagcagctccaggacgtgagccgcgagtgccgctgcgccgccatccggagcatggtcaggggctac

SEQ ID NO: 22837 - DNA, 263 bp, Zea mays
  Clone ID: LIB3152-031-P1-K1-E1
cgggctttaagaaccacaccaagcgaagggcactagcaacaacctaacacatggctacaagatttagccctctgggctttggcctttagggccacaaaggtcatattcacaggtactgtctaggctattaagtctcacagtactaaggttgacacagcggcagcacagtcactggctgcgggcgctacacaccatgccattgcacacaatctggcattaacacaacatgacgacagcacacagtttgcatactggcacagcgg

SEQ ID NO: 22838 - DNA, 111 bp, Zea mays
  Clone ID: LIB3152-031-P1-K1-E10
taacaacacaccaataaaaaattattattattcaacaaaaaaacaaaaataaggggagaatttattaaacaataataaaacccttgccctaactaaaaaaaacaaaaagct

SEQ ID NO: 22839 - DNA, 367 bp, Zea mays; identical to SEQ ID NO: 22819
  Clone ID: LIB3152-031-P1-K1-E11

SEQ ID NO: 22840 - DNA, 363 bp, Zea mays
  Clone ID: LIB3152-031-P1-K1-E12
gaaacacaccaagcgaagcgcactatcaacaacctaacaacaatggctaccaagatattatccctccttgcgcttcttgcgctttttgcgagcgcaacaaatgcgtccattattccacaatgctcacttgctcctagttacattattccacagttcctcccaccagttacttcaatggccttcgaacacccagctgtgcaagcctataggctacaacaagcgattgcggcgagcgtcttacaacaaccaattgcccaattgcaacaacaatccttggcacatctaacaatacaaaccatcgcaacgcaacagcaacaacagttcctaccagcactgagccacctagccatggtgaaccctgtc

SEQ ID NO: 22841 - DNA, 367 bp, Zea mays
  Clone ID: LIB3152-031-P1-K1-E3
agaccattagctttatctactccagagcgcagaagaacccgatcgacaccatgagggtgttgctcgttgccctcgctctcctggctctcgctgcgagcgccacctccacgcatacaagcggcggctgcggctgccagccaccgccgccggttcatctaccgccgccggtgcatctgccacctccggttcacctgccacctccggtgcatctcccaccgccggtccacctgccgccgccggtccacctgccaccgccggtccatgtgccgccgccggttcatctgccgccgccaccatgccactaccctactcaaccgccccggcctcagcctcatccccagccacacccatgcccgtgccaacagcc

SEQ ID NO: 22842 - DNA, 369 bp, Zea mays
  Clone ID: LIB3152-031-P1-K1-E4
cagaaacacaccaagcgaagcacattatcaacaacctaacaacaatggctaccaagatattatccctccttgcgcttcttgcgctttttgcgagcgcaacaaatgcgttcattattccacaatgctcacttgctccaagttccattattacacagttcctcccaccagttacttcaatgggcttcgaacacccagctgtgcaagcctataggctacaacaagcaattgcggcgagcgtcttacaacaaccaatttcccagttgcaacaacaatccttggcacatctaacaatacaaaccatcgcaacgcaacagcaacaacaattcctaccagcactgagccacctagccatggtgaaccctgccgcct

SEQ ID NO: 22843 - DNA, 374 bp, Zea mays
  Clone ID: LIB3152-031-P1-K1-E5
agccttccgttggaccaggaccagagcgtggttgtcggcagcgcggactctggtgctgcggcttttggttttgcgactggcaacccccctagcttggctgtgaccggcggaagcgccgtggcccccgacggtggagctcaggcagctgatgcctctgcgtaccatgccgagcacacggcgttgaatgggactgtcggcgatatgggtaattacccatctacaggagctgcagagaacggcgaagccgtccccaacgagacgggcgagccggttcctgagctatcgtacgaagaagccgtgctttcagcagaagaggctaggttatggagtgttgttaccgcgaattccttagattttaatgcctggaccgcact

SEQ ID NO: 22844 - DNA, 373 bp, Zea mays
  Clone ID: LIB3152-031-P1-K1-E6
tcggttttttgtcccagaccggggggttcttgttgtggtaaccaccaaggccatgagcgggatcttcttccacaacaccatcttccacaaaaacaacaacatcaaccgccaccacaacatcaccagcagcagtaacaccaacaacaacatgttcacatgcaaccacaaaaacatcagcaaaaacaagaagttcatgttcaacaacaacaacaacatccgctggaccgacaacatcaacatcaacagcaccaacaacaacatcaatgtgaaggccaacatcaacatcaccaacaatcacaaggccatgtgcaacaacacgaacagagccatgagctacaccaaggacagagccatgagctacatcatcaacaac

SEQ ID NO: 22845 - DNA, 362 bp, Zea mays
  Clone ID: LIB3152-031-P1-K1-E7
gtgggacaacactggcatattttccgagggaagtttataggactttgttggctgcggtctttgataagtaccaagatctgcccttacataattatcaagacttcgtgtgttttcaattttctggaagtatagatgatggatttcccgtaatcacctttagttttgagggagaccttacactgaatgtttacccagatgattaccttttccagaacgggaatgatttatactgtatggggttcctggatggtggtgtacagactaaagatgggaaagatatgctcctcttaggagacttggtcctctcaaacaaactagtagtttatgacttggaaaaagaagttattggatggacagactac

SEQ ID NO: 22846 - DNA, 366 bp, Zea mays
  Clone ID: LIB3152-031-P1-K1-E8
attcagaaacacaccaagcgaagctttctagcaacaacctaacaacaatggctaccaagatattagccctccttgcgcttcttgcccttttagtgagcgcaacaaatgcgttcattattccacagtgctcacttgctcctagtgccattattccacagttcctcccaccagttacttcaatgagcttcgaacatccagccgtgcaagcctacaggctacaactagcgcttgcggcgagcgtcttacaacaaccaattgcccaattgcaacaacaatccttggcacatctaaacctacaaaccatcgcaacgcaacagcaacaacagtttctgccatcactgagccacctagccgtggtgaaccctg

SEQ ID NO: 22847 - DNA, 196 bp, Zea mays
  Clone ID: LIB3152-031-P1-K1-E9
aaaaaaaaaaaaaaaaaaaaaattttttaaaaaaaaaaaaaaaaaaaaaaaaaaagaggggtcatgcaaattataagatacctgcccttacttcacttatatgcggccgccgcgttttcggtttccctggtcccatccccgtcctctcgccgttagtcttctacttctggtgacggggtaccccctttccttgccg

SEQ ID NO: 22848 - DNA, 367 bp, Zea mays
  Clone ID: LIB3152-031-P1-K1-F1
agccttccgtttttgggctttcagaaacacaccaagcgaagcgcactagcacaacctaacacatggctccaagtattatcctcttgccttttgcccttttgcgaggcgcacataagcgttcattattccacaatgctcacttgctcctaattccattattccacagttcctcccaccagttacttcaatggccttcgaacacccagctgtgcaagcctataggctacaacaagcgattgcggcgagcgtcttacaacaaccaattgcccaattgcaacaacaatccttggcacatctaacaatacaaaccatcgcaacgcaacagcaacaacagttcctaccagcactgagccacctagccatggtg

SEQ ID NO: 22849 - DNA, 369 bp, Zea mays
  Clone ID: LIB3152-031-P1-K1-F10
tttcagcattcagaaacacaccaagcgaagcgcactagcaacaacctaacaacaatggctaccaagatattagccctccttgcgcttcttgcccttttagtgagcgcaacaaatgcgttcattattccacagtgctcacttgctcctagtgccattattccacagttcctcccaccagttacttcaatgggcttcgaacatccagccgtgcaagcctacaggctacaactagcgcttgcggcgagcgtcttacaacaaccaattgcccaattgcaacaacaatccttggcacatctaaacctacaaaccatcgcaacgcaacagcaacaacagtttctgccatcactgagccacctagccgtggtgaac

SEQ ID NO: 22850 - DNA, 368 bp, Zea mays
  Clone ID: LIB3152-031-P1-K1-F11
catctagcaacatataaagcacatttgtgtaccaacaatggcagccaaaatattttgcctccttatgctccttggtctttctgcaagtgctgctacggcgaccattttcccgaaatgctcgcaagctcctatagcttcccttcttcccccgtacctctcaccagcggtgtcttcggtatgtgaaaacccaattcttcaaccctacaggatccaacaggcaatcacagctggcatcttacctttatcacccttgttcctccaacaatcatcagccctattacatcagttacctttggtgcatttattggcacaaaacatcagggcacaacaactacaacaacttgtgctagcaaaccttgctgcctact

SEQ ID NO: 22851 - DNA, 353 bp, Zea mays
  Clone ID: LIB3152-031-P1-K1-F12
agaccattagcttaaactgctccttagcgcagcacaacccgcacgacaccatgagggtgttgctagttgccctcgctctcctggctctcgctgcgagcgccacctccacgcatacaagccgcgaggtgccgatgccagccaccgtcgtccggtcatttaccgccgccggggcatctgccagctacggctcacctgccaactcccacacatgctacaccgccggttcaactgccagcttccgttcacctgccatcgtcagtccatgtgccgccggcggcttatatgccgtcgccaccatgccactaccatactcaaccgtcacggcctaagactgattctcagccacacccatg

SEQ ID NO: 22852 - DNA, 366 bp, Zea mays
  Clone ID: LIB3152-031-P1-K1-F2
aactagcaacatagaaagcacaatagtgtaccaacaatggcagccaaaatattttgcttccttatgctccttggtctttctgcaagtgttgctaccgcaaccattttcccacaatgctcacaagctcctatagcttcccttcttcccccatacctctcaccagcggtgtcttcaatgtgtgaaaacccaattgttcaaccctacaggatccaacaggcaatcgcaacaggcatcttaccattatcacccttgttcctccaacaaccgtcagccctattacagcagttacctttggtccatttggtggcacaaaacatcagggcacaacaactacaacaacttgtgctagcaaaccttgctgcatac

SEQ ID NO: 22853 - DNA, 369 bp, Zea mays
  Clone ID: LIB3152-031-P1-K1-F3
atcgataccaactagcaacatacatagtgaagtatactagaaacaacttagcaccaatggcagccaagatttttgccctccttgccctccttgctctttcagcaagcgctgctacctcgactgttattccacaatgctcacaacaatacctctctttggcgacagccgcgagatttcaatacccaactatacaaccctacatgctacaagaggccattgcagcaagcatcttacggtcattagcatttaccctccaacaaccatatgccctattgcagcaagcatccttagtgcatcagtatctccaaagaatcgcggcacaacaactacaacaacaattgctaccaacaatcaatcaagtagttgcag

SEQ ID NO: 22854 - DNA, 370 bp, Zea mays
  Clone ID: LIB3152-031-P1-K1-F4
cagaaacacaccaagcgaagcgcactatcaacaacctaacaacaatggctaccaagatattatccctccttgcgcttcttgcgctttttgcgagcgcaacaaatgcgtccattattccacaatgctcacttgctcctagttccattattccacagttcctcccaccagttacttcaatggccttcgaacacccagctgtgcaagcctataggctacaacaagcgattgcggcgagcgtcttacaacaaccaattgcccaattgcaacaacaatccttggcacatctaacaatacaaaccatcgcaacgcaacagcaacaacagttcctaccagcactgagccacctagccatggtgaaccctgtcgccta

SEQ ID NO: 22855 - DNA, 360 bp, Zea mays
  Clone ID: LIB3152-031-P1-K1-F6
aaaggaccattgtggtcccaccattggcggccaaaatattttgcctccttatgctccttggtctttctgcaagtgctgctacggcgaccattttcccgaaatgctcgcaagctcctatagcttcccttcttcccccgtacctctcaccagcggtgtcttcggtatgtgaaaacccaattcttcaaccctacaggatccaacaggcaatcacagctggcatcttacctttatcacccttgttcctccaacaatcatcagccctattacatcagttacctttggtgcatttattggcacaaaacatcagggcacaacaactacaacaacttgtgctagcaaaccttgctgcctactctcagc

SEQ ID NO: 22856 - DNA, 363 bp, Zea mays
  Clone ID: LIB3152-031-P1-K1-F7
gatcagcaaagcggcagtgcgtagagaggatcgtcgaacagaacagcatgaagatggtcatcgttctcgtcgtgtgcctggctctgtcagctgccagcgcctctgcaatgcagatgccctgcccctgcgcggggctgcagggcttgtacggcgctggcgccggcctgacgacgatgatgggcgccggcgggctgtacccctacgcggagtacctgaggcagccgcagtgcagcccgctggcggcggcgccctactacgccgggtgtgggcagacgagcgccatgtaccagccgctccggcaacagtgctgccagcagcagatgaggatgatggacgtgcagtccgtcgcgcagcagctgcaga

SEQ ID NO: 22857 - DNA, 364 bp, Zea mays
  Clone ID: LIB3152-031-P1-K1-F9
caggtattagcggctacacaaatgcctgaagagccagctggatggttccagggtacagtcacaaatccattgacaacattgtaatcttgagtggcgatcagctttatcggatgaattacatggaacttgtgcagaaacatgtcgaggacgatgctgatatcactatatcatgtgctcctgttgatgagagccgagcttctaaaaatgggctagtgaagattgatcatactggacgtgtacttcaattctttgaaaaaccaaagggtgctgatttgaattctatgagagttgagaccaacttcctgagctatgctatagatgatgcacagaaatatccataccttgcatcaatgggcatttatgt

SEQ ID NO: 22858 - DNA, 290 bp, Zea mays
  Clone ID: LIB3152-031-P1-K1-G1
agccttccgggggccaggtcgcggggctgttggcggcgcaaatagcgcagcaactgacggcgatgtgcggtctgcagcagccgactccatgcccctacgctgctgccggcggtgtcccccactgaagaaactatgtgctgtagtatagccgctggctagctagctagttgagtcatttagcggcgatgattgagtaataatgtgtcacgcatcaccatgggtggcagtgtcagtgtgagcaatgacctgaatgaacaattgaaatgaaaagaaaaaagtattgttcccaa

SEQ ID NO: 22859 - DNA, 370 bp, Zea mays
  Clone ID: LIB3152-031-P1-K1-G10
aatgaatcagctgttggtccacttggaaaggaactatttgagagagagcaagatgatcttctttctgatctcaaagatatccccaagaaagcctgtgaccgccggatcaatgaatttgttaaacgtgctagagctgccaagatccatgcttatataataggtcatctaaagaaggagatgcctacaatgatgggcaaagcaaaagcccaacatcgactcatagacaatctgcctgatgagtttgcaaaggtgcaacgggaataccatcttccgtcgggagattttccttatgtggagcacttcaaagaggtcttgagcggttacagctttgacaagtttgagaaggtgaagcccaagatgatacaggccg

SEQ ID NO: 22860 - DNA, 303 bp, Zea mays
  Clone ID: LIB3152-031-P1-K1-G11
attttgagcattcagaaacacacttagcgaagcacattagcaacaacctaacaacaatggctaccaagatattatccctccttgcgcttcttgcgctttttgcgagcgcaacaaatgcgttcattattccacaatgctcacttgctccaagttccattattacacagttccttccaccagttacttcaatgggcttcgaacacccagctgtgcaagcctataggctacaacaagcaattgcggcgagcgtcttacaacaaccaatttcccagttgcaacaacaatcctttgcacatctaacaa

SEQ ID NO: 22861 - DNA, 371 bp, Zea mays
  Clone ID: LIB3152-031-P1-K1-G12
cttcggtatgtgaaaacccaattcttcaaccctacaggatccaacaggcaatcacagctggcatcttacctttatcacccttgttcctccaacaatcatcagccctattacatcagttacctttggtgcatttattggcacaaaacatcagggcacatcaactacaacaacttgtgctagcaaaccttgctgcctactctcagcaacagcagtttcttccattcaaccaactagctgcattgaactctgcttcttatttgcaacaacaacaactaccattcagccagctacctgctgcctacccccagcaatttcttccattcaaccaactggcagcattgaactctcctgcttatttacagcagcaacaa

SEQ ID NO: 22862 - DNA, 368 bp, Zea mays
  Clone ID: LIB3152-031-P1-K1-G2
gcacatatctactatactatactctaggaagcaaggacaccaccgccatggcagccaagatgcttgcattgttcgctctcctagctctttgtgcaagcgccactagtgcgacccatattccagggcacttgccaccagtcatgccattgggtaccatgaacccatgcatgcagtactgcatgatgcaacaggggcttgccagcttgatggcgtgtccgtccctgatgctgcagcaactgttggccttaccgcttcagacgatgccagtgatgatgccacagatgatgacgcctaacatgatgtcaccattgatgatgccgagcatgatgtcaccaatggtcttgccgagcatgatgtcgcaaatgatg

SEQ ID NO: 22863 - DNA, 368 bp, Zea mays
  Clone ID: LIB3152-031-P1-K1-G3
cccataccttccatcaatgatagcttcagtatgtgaaaacccagctcttcaaccctataggctccaacaagcaatcgcagcaagcaacatacctttatcacccttgtttcaacaatcgccagccctatctttggtgcagtcattggtacaaaccatcagggcacagcagctgcagcaactcgtgctacctgtgatcaaccaagtagctctggcaaacctttctccctactctcagcaacaacaatttcttccattcaaccaactgtctacattgaaccgtgctgcttatttgcagcaacaactattaccattcagccagctagctactgcctactctcagcaacaacaacttcttccatttaaccaat

SEQ ID NO: 22864 - DNA, 146 bp, Zea mays
  Clone ID: LIB3152-031-P1-K1-G4
cctggcgctcgctgcgagcgccgcctccagtacaagcggcggctgtggctgccagacaccaccgtttcatctaccgtctccgttctatatgccgcctccgtctatctgccgccgcagcagcagccgcagccatggaatacccacta

SEQ ID NO: 22865 - DNA, 304 bp, Zea mays
  Clone ID: LIB3152-031-P1-K1-G5
agccttccgattgaccgtgaccgtgttgttgaagccagagatgagctccacaggatgctgaacgaggatgagctacgtgatgctgtgctgcttgtttttgccaacaagcaagatcttcccaatgccatgaatgctgctgagattactgacaagcttggattacactccctgcgccagcgacactggtacatccagagcacttgtgccacaactggcgagggtctgtatgagggcctggactggctgtccagcaacattgcgagcaaggcttgaggcctaccttgaatatcaactgcgaactgac

SEQ ID NO: 22866 - DNA, 374 bp, Zea mays
  Clone ID: LIB3152-031-P1-K1-G6
tcggagggccttaaaaccattagcttaatctactccagagcgcagaagaacccgatcgacaccatgagggtgttgctcgttgccctcgctctcctggctctcgctgcgagcgccacctgcacgcatacaagcggcggctgcggctgccagccaccgccgccggttcatctaccgccgccggtgcatctgccaccttcggttcacctgccacctgcggtgcatttgccaccgccggtccacctgccagcgacggtccacctgccaccggcggtccatgtgccgtcgccggttcatatgccgtcggcaccatgccactaccctactcaaccgccccggactcagccttatccccagccacacccatgcccgtgcca

SEQ ID NO: 22867 - DNA, 171 bp, Zea mays
  Clone ID: LIB3152-031-P1-K1-G7
gtgcattgtcgcttctagtgtgacgtgtacatgattaatccatgggttattgcgtcaccgttcaagggggttcatggtcaagtagtaattatttcatatttgaaccggtcgccttgtcagatgactagactgaaacatcatgttttccgcttgagacattgtatgatttgt

SEQ ID NO: 22868 - DNA, 361 bp, Zea mays
  Clone ID: LIB3152-031-P1-K1-G8
aacaatggcagccaaaatattttgcctccttatgctccttggtctttctgcaagtgctgctacggcgaccattttcccgaaatgctcgcaagctcctatagcttcccttcttcccccgtacctctcaccagcggtgtcttcggtatgtgaaaacccaattcttcaaccctacaggatccaacaggcaatcacagctggcatcttacctttatcacccttgttcctccaacaatcatcagccctattacatcagttacctttggtgcatttattggcacaaaacatcagggcacaacaactacaacaacttgtgctagcaaaccttgctgcctactctcagcaacagcagtttcttccattc

SEQ ID NO: 22869 - DNA, 365 bp, Zea mays
  Clone ID: LIB3152-031-P1-K1-G9
ttattgagaccaactagcaacatagaaagcacaatagtgtaccaacaatggcagccaaaatattttgcctccttatgctccttggtctttctgcaagtgctgctacggcgaccattttcccgaaatgctcgcaagctcctatagcttcccttcttcccccgtacctctcaccagcggtgtcttcggtatgtgaaaacccaattcttcaaccctacaggatccaacaggcaatcacagctggcatcttacctttatcacccttgttcctccaacaatcatcagccctattacatcagttacctttggtgcatttattggcacaaaacatcagggcacaacaactacaacaacttgtgctagcaaac

SEQ ID NO: 22870 - DNA, 377 bp, Zea mays
  Clone ID: LIB3152-031-P1-K1-H1
agccgtcggttttggggctttcagaaaacacaccaagcgaagcacattagcaacaacctaacaacaatggctaccaagatattatcccctccttgggcttcttgcgctttttgcgagcgcaacaaatgcgttcattattccacaatgctcacttgctccaagttccattattacacagttcctcccaccagttacttcaatgggcttcgaacacccagctgtgcaagcctataggctacaacaagcaattgcggcgagcgtcttacaacaaccaatttcccagttgcaacaacaatccttggcacatctaacaatacaaaccatcgcaacgcaacagcaacaacaattcctaccagcactgagccacctagccatgg

SEQ ID NO: 22871 - DNA, 312 bp, Zea mays
  Clone ID: LIB3152-031-P1-K1-H10
agcgaagcgcactagcaacaacctaacaacaatggctaccaagatattagccctccttgcgcttcttgcccttttagtgagcgcaacaaatgcgttcattattccacagtgctcacttgctcctagtgccattattccacagttcctcccaccagttacttcaatgggcttcgaacattcagccgtgcaagcctacaggctacaactagcgcttgcggcgagcgtcttacaacaaccaattgcccaattgcaacaacaatccttggcacatctaaacctacaaaccatcgcaacgcaacagcaacaacagtt

SEQ ID NO: 22872 - DNA, 373 bp, Zea mays
  Clone ID: LIB3152-031-P1-K1-H11
agctaagcgctctagcaacaattgttctacaatgcataccaaggcatttgcgcggccttgcgcttcttgcccttttagtgagcgcaacaaatgcgttcattattccacagtgctcacttgctcctagtgccattattccacagtgcctcccaccagttacttcaatgggctttgaacatccagccgtgcaagcctacaggctacaactagcgcttgcggcgagcgttttacaacaaccaattgcccaattgctacaacaatccttgtcacatctaaacactacaaaccatcgcatcggatcagcatcaacagtttctgagctcaccgagccacctagccgtggtgaaccctgacgcctacttgcaacagcagc

SEQ ID NO: 22873 - DNA, 369 bp, Zea mays
  Clone ID: LIB3152-031-P1-K1-H12
cggacgcgtgggtgaatttcattttttcacctgaggtgaggaatcaggacgcaatatttttgctaagaggggtgagttcaggggcacacgaggtagcatggcaatggctgaaggaaaactgggattacatattgggagcctactctggaactctgctcacctatttcgtcaacataactgtctcgccactggccaccgacgaacatggtgatgaggcggaggagtttttcaagagcagaaccaaggcgaacatcgcgaggactgtgagacagagcatcgagagggtgaggatcaatgcccaatgggtcaagaacatcaaggccgaggctgacctcggcaacgttctcaagaagctggcttacaagcact

SEQ ID NO: 22874 - DNA, 367 bp, Zea mays
  Clone ID: LIB3152-031-P1-K1-H2
ttggcctgcacattgacccttaccacagcgacaaggccgcggatatcctggtcaacttctttgacaaatgcaagggagatccgagctactgggacaagatctcacaaggcggcctgcagagaatctatgagaagtacacctggaagctctactccgagaggctgatgaccctgaccggcgtgtacgggttctggaagtacgtgagcaacctggagaggcgcgagacccgccgctacatcgaaatgttctacgccctgaagtaccgtagcctggcaagccaggttccgctgtccttcgattagtacggggaaagaagaagaagaagaagcccaggccggagaaccatcgcctgcatttcgatctgttt

SEQ ID NO: 22875 - DNA, 371 bp, Zea mays
  Clone ID: LIB3152-031-P1-K1-H4
cccacgcgtccgcagagttctccaaagcgcgaagctccaggcagccgtcaccgtcaccgtcagggaacgcgcgcagcaatggccttttactacggcgtgggcggacagtcgtcggcgtgggcggcgccggtccatgtgccgccgccggttcatctgtcgccgccaccatgccactaccctactcaaccgccccggcctcagcctcatccccagccacacccatgcccgtgccaacagccgcatccaagcccgtgccagctgcagggaacctgcggcgttggcagcaccccgatcctgggccagtgcgtcgagttcctgaggcatcagtgcagcccgacggcgacgccctactgctcgcctcagtgccagtc

SEQ ID NO: 22876 - DNA, 376 bp, Zea mays
  Clone ID: LIB3152-031-P1-K1-H5
gtccgaatagctcatcgactccagattgtgaactcgacaccatgaaggtgctgatcgttgcccttgctctcctggcgctcgctgcgagcgccgcctccagtacaagcggcggctgtggctgccagacaccaccgtttcatctaccgcctccgttctatatgccgcctccgttctatctgccgtcgcagcagcagccgcagccatggcaataccccactcaaccaccgcagctaagcccgtgccagcagttcggatcctgcggcgtcggcagcgtcggcagcccgttcctgggccagtgcgtcgagttcctgaggcaccagtgcagcccggcggcgacgccctacggctcgccacagtgccaggcgctgcagcagca

SEQ ID NO: 22877 - DNA, 347 bp, Zea mays
  Clone ID: LIB3152-031-P1-K1-H6
caactagcaacatagaaagcacaattttgtaccaacaatggcagccaaaatattttgcctccttatgctccttggtctttctgcaagtgctgctacggcgaccattttcccgaaatgctcgcaagctcctatagcttcccttcttcccccgtacctctcaccagcggtgtcttcggtatgtgaaaacccaattcttcaaccctacaggatccaacaggcaatcacagctggcatcttacctttatcacccttgttcctccaacaatcatcagccctattacatcagttacctttggtgcatttattggcacaaaacatcagggcacaacaactacaacaacttgtgc

SEQ ID NO: 22878 - DNA, 357 bp, Zea mays
  Clone ID: LIB3152-031-P1-K1-H7
catagaaagcacaatagtgtaccaacaatggcagccaaaatattttgcctccttatgctccttggtctttctgcaagtgctgctacggcgaccattttcccgcaatgctcgcaagctcctatagcttcccttcttcccccgtacctctcaccagcggtgtcttcggtatgtgaaaacccaattcttcaaccctacaggatccaacaggcaatcgcagctggcatcttacctttatcacccttgttcctccaacaatcatcagccctattacaacagttacctttggtgcatttattggcacaaaacatcagggcacaacaactacaacaacttgtgctagcaaaccttgctgcctac

SEQ ID NO: 22879 - DNA, 240 bp, Zea mays
  unsure at all n locations
  Clone ID: LIB3152-031-P1-K1-H8
cttggtgctgcgtctcaggggtggcatgcagatcttcgtgaagacacttactggcaagacgatcacccttgaggtggagtccttagacaccattgacaacgtcaaggccaagatccaggacaaggagggcattccaccggaccagctgcggctgatcttnnccggcaagcagctggaggatggtcgcaccttgtctgactacaacatgcagaaggagaggacccttcacctggtgctccg

SEQ ID NO: 22880 - DNA, 364 bp, Zea mays
  Clone ID: LIB3152-031-P1-K1-H9
attttgagcattcagaaacacaccaagcgaagcgcactagcaacgacctaacaacaatggctaccaagatattagccctccttgcgcttcttgccctttttgtgagcgcaacaaatgcgttcattattccacaatgctcacttgctcctagtgccattattccacagttcctcccaccagttacttcaatgggcttcgaacacctagctgtgcaagccaacatgcaacaacaagcgcttgcggcgagcgtcttacaacaaccaattgcccaattgcaacaacaatccttgccacatctaacaatacaagccatcacaacgcaacagcaacaacagttcctaccagcactgagccacctagccat

SEQ ID NO: 22881 - DNA, 347 bp, Zea mays
  Clone ID: LIB3152-032-P1-K1-A10
gtccaccgcgctggtggcagtggcagtggggggcgccatttctctcggtctcgtcgcctcctctggcgtcgcgtcctgctccctgcgcgccggcggcgactcccggcggtttggcccccgactcgtcctcctgcggagaggaggcgccgagggggaggggacgaggacacggaattgcccaatatttcgttgtgccaataaggtggacgttgtgaccgaggatgacagcgtcgatggtgacgttaccgacgatggagaagaccttgaggatgcagctgatgacgccattgatgctgatgttggtaccgaagatgaactggagtcttcgctgcctgaggatgttgagt

SEQ ID NO: 22882 - DNA, 348 bp, Zea mays
  Clone ID: LIB3152-032-P1-K1-A11
agaaagcacaatagtgtaccaacaatggcagccaaaatattttgcctccttatgctccttggtctttctgcaagtgctgctacggcgaccattttcccgcaatgctcgcaagctcctatagcttcccttcttcccccgtacctctcaccagcggtgtcttcggtatgtgaaaacccaattcttcaaccctacaggatccaacaggcaatcgcagctggcatcttacctttatcacccttgttcctccaacaatcatcagccctattacaacagttacctttggtgcatttattggcacaaaacatcagggcacaacaactacaacaacttgtgctagcaaaccttgct

SEQ ID NO: 22883 - DNA, 353 bp, Zea mays
  Clone ID: LIB3152-032-P1-K1-A12
cagaccattagctttatctactccagagcgcagaagaacccgatcgacaccatgagggtgttgctcgttgccctcgctctcctggctctcgctgcgagcgccacctccacgcatacaagcggcggctgcggctgccagccaccgccgccggttcatctaccgccgccggtgcatctgccacctccggttcacctgccacctccggtgcatctcccaccgccggtccacctgccgtcgccggtccacctgccaccgccggtccatgtgccgccgccggttcatctgccgccgccaccatgccactaccctactcaaccgccccggcctcagcctcatccccagccacacccatg

SEQ ID NO: 22884 - DNA, 366 bp, Zea mays
  Clone ID: LIB3152-032-P1-K1-A2
cagaaacacaccaagcgaagctacctagcaacgacttaacaacaatggctaccaagatattagccctccttgcgcttcttgccctttttgtgagcgcaacaaatgcgttcattattccacaatgctcacttgctcctagtgccattataccacagttcctccgaccagttacttcaatgggcttcgaacacctagctgtgcaagcctacaggctacaacaagcgcttgcggcgagcgtcttacaacaaccaattaaccaattgcaacaacaatccttggcacatctaaccatacaaaccatcgcaacacaacagcaacaacagttcctaccagcactgagccaactagatgtggtgaaccctgtcg

SEQ ID NO: 22885 - DNA, 364 bp, Zea mays
  Clone ID: LIB3152-032-P1-K1-A3
gaaacacaccaagcgaagcgcactatcaacaacctaacaacaatggctaccaagatattagccctccttgcgcttcttgcccttttagtgagcgcaacaaatgcgttcattattccacagtgctcacttgctcctagtgccattattccacagttcctcccaccagttacttcaatgggcttcgaacatccagccgtgcaagcctacaggctacaactagcgcttgcggcgagcgtcttacaacaaccaattgcccaattgcaacaacaatccttggcacatctaaacctacaaaccatcgcaacgcaacagcaacaacagtttctgccatcactgagccacctagccgtggtgaaccctgtcg

SEQ ID NO: 22886 - DNA, 352 bp, Zea mays
  Clone ID: LIB3152-032-P1-K1-A4
attttgagcattcagaaacacaccaagcgaagcgcactagcaacgacctaacaacaatggctaccaagatattagccctccttgcgcttcttgccctttttgtgagcgcaacaaatgcgttcattattccacaatgctcacttgctcctagtgccattattccacagttcctcccaccagttacttcaatgggcttcgaacacctagctgtgcaagccaacatgcaacaacaagcgcttgcggcgagcgtcttacaacaaccaattgcccaattgcaacaacaatccttgccacatctaacaatacaagccatcacaacgcaacagcaacaacagttcctaccagcactgag

SEQ ID NO: 22887 - DNA, 348 bp, Zea mays
  Clone ID: LIB3152-032-P1-K1-A5
caaccatattattgagaccaacaagcaacatagaaagtggaatccagtagcaacaatagagcatcaatggagaccaagatattttccctccttatgctccttgctctttctacatgtgttgctaacgcgacaattttccctcaatgctcacaagctcctatagcttccctttttcccccataccttccatcaattatagcttcagtatgtgaaaacccagctcttcaaccatataggcttcaacaagcaatcgcagcaagcaacatacctttatcgcccttgttgtgtcaacaatcgccagccctatctttggtgcagtcattggtacaaaccatcagggcacaacag

SEQ ID NO: 22888 - DNA, 352 bp, Zea mays
  Clone ID: LIB3152-032-P1-K1-A6
ctcgatcccgcgccatggatcgcgccgaccccgcgcggggccgccttgccgtgctctcctcccacctccgtggtgcaggggccgaggaggcggcggggctggagaggtcgccggtatccgcgccggcgcccgggccccgcgccggcgcgcttgccgtggtggacgggaggaccgggaagcggcacgaggtcaaggtctccgaagacggcaccgtgcgcgccaccgacttcaagaagattaccactggaaaggacgacaagggtcttaagatttatgatcctggttaccttaacactgcccctgttcgctcgtccatctgctacatcgatggagatgagggaatccttcgcta

SEQ ID NO: 22889 - DNA, 362 bp, Zea mays
  Clone ID: LIB3152-032-P1-K1-A7
gagaccaactagcaacatataaagctcaatagtgtaccaacaatggcagccaaaatattttgcctccttatgctccttggtctttctgcaagtgctgctacggcgaccattttcccgcaatgctcgcaagctcctatagcttcccttcttcccccgtacctctcaccagcggtgtcttcggtatgtgaaaacccaattcttcaaccctacaggatccaacaggcaatcgcagctggcatcttacctttatcacccttgttcctccaacaatcatcatccctattacaacagttacctttggtgcatttattggcacaaaacattagggcacaaccaactacaacaacttgtgctagcaaacc

SEQ ID NO: 22890 - DNA, 329 bp, Zea mays
  Clone ID: LIB3152-032-P1-K1-A8
tgctgctttcttgagacaacatcatttgttgccattttacccacaggttgtgggaaacattaatgccttcttgcaacagcaacaattgctaccattctacccacagaatgtggctaacattgttgccttcttacaacaacaacaattgttgccatttagccaacatgctttgtcgaatcctaccaccttattgcaaccgcccaccattggtggtgccatcttctagattttttatgatttatactgaaataataaagttcttatgctgatatgttcgtccttttatttttaaagtattagagatttatattataaaaaaaaatataaat

SEQ ID NO: 22891 - DNA, 361 bp, Zea mays
  Clone ID: LIB3152-032-P1-K1-A9
cccaggcaggcaggtcggcgaggagggcaggaagaccgaagaccgagccgtgcgggggctcgggacgggaacgggacaggaccccaaaatctcagatccttcctgcccgcccgcccgtgcccgtcgacgcgtcgttcttgccggccgcgccccacctccgccctctcctcctccagggggatcggatacgccacaggctgcgcgatggtgctgtgggtcttcggctacggctccctcatctggaaccccggcttcgacttcgacgacaaaatcctcggcttcatcaagggctacaagcgcacctttaatctcgcttgcattgaccacagaggcacaccggagcatccggcgaggacctgca

SEQ ID NO: 22892 - DNA, 169 bp, Zea mays
  Clone ID: LIB3152-032-P1-K1-B10
caattgctgccattcaaccaacttgctttgacaaacccagcagtgttctaccaacaacccatcattggtggtgccctcttttagatttcttatgagttatagttcaataataaagttttttatctgatgtttgtggcttcccagaaataagaaagtacatttctagatt

SEQ ID NO: 22893 - DNA, 349 bp, Zea mays
  Clone ID: LIB3152-032-P1-K1-B11
gcaacatagaaagcacaatagtgtaccaacaatggcagccaaaatattttgcctccttatgctccttggtatttctgcaagtgctgctacggcgaccattttcccgcaatgctcacaagctcctatagcttcccttcttcccccgtacctctcaccagcggtgtcttcggtatgtgaaaacccaattcttcaaccctacaggatccaacaggcaatcgcagctggcatcttacctttatcacccttgttcctccaacaatcatcagccctattacagcagttacctttggtgcatttattggcacaaaacatcagggcacaacaactacaacaacttgtgctagcaaac

SEQ ID NO: 22894 - DNA, 326 bp, Zea mays
  Clone ID: LIB3152-032-P1-K1-B12
tgcaacataaaaagcacaatatttgtttctacaatggcagcctatatattatggcgggttatgctcctaggtatctcttcaagtgctgctactgcgaccattttcacgcattgcccacaagctccaatagcttcccttctttccccgtaacctcttaccatcgatgtcttcgtgatgtgaaaacccaattcttcaaccctacaggatccaacaagctatcactactggcatcttaccttttttacccatgtgcttcaacaatcattatccctatttcatcagttacctttggtgcatttattggatcaaatcattatggcacaaca

SEQ ID NO: 22895 - DNA, 363 bp, Zea mays
  Clone ID: LIB3152-032-P1-K1-B2
accattagctttatctactccagagcgcagaagaacccgatcgacaccatgagggtgttgctcgttgccctcgctctcctggctctcgctgcgagcgccacctccacgcatacaagcggcggctgcggctgccagccaccgccgccggttcatctaccgccgccggtgcatctgccacctccggttcacctgccacctccggtgcatctcccaccgccggtccacctgccgccgccggtccacctgccaccgccggtccatgtgccgccgccggttcatctgccgccgccaccatgccactaccctactcaaccgccccggcctcagcctcatccccagccacacccatgcccgtgccaacag

SEQ ID NO: 22896 - DNA, 357 bp, Zea mays
  Clone ID: LIB3152-032-P1-K1-B3
cgcaaattgcaccaagaaatccatcgagaggccgtcgacaggggaattaatggcgtcgtcgtctagcagcagccaccgccgcctcatcctcgcagccgccgtcctgctctccgtgctcgcggctgccagcgccagcgccgggacctcctgcgtgccggggtgggccatcccgcacaacccgctcccgagctgccgctggtacgtgaccagccggacctgcggcatcgggccgcgcctcccgtggccggagctgaagaggagatgctgccgggagctggcggacatcccggcgtactgccggtgcacggcgctgagcatcctcatggacggcgcgatcccgccgggcccggacgcgca

SEQ ID NO: 22897 - DNA, 353 bp, Zea mays
  Clone ID: LIB3152-032-P1-K1-B4
cttctccaccaccaccactggacgtcagcctagcaattagctcatcgactccagattggagaactcgacaccatgaaggtgctgatcgttgcccttgctctcctggcgctcgctgcgagcgccgcctccagtacaagcggcggctgtggctgccagacaccaccgtttcatctaccgcctccgttctatatgccgcctccgttctatctgccgccgcagcagcagccgcagccatggcaataccccactcaaccaccgcagctaagcccgtgccagcagttcggatcctgcggcgtcggcagcgtcggcagcccgttcctgggccagtgcgtcgagttcctgaggcaccagtg

SEQ ID NO: 22898 - DNA, 351 bp, Zea mays
  Clone ID: LIB3152-032-P1-K1-B5
agcaaagcggcagtgcgtagagaggatcgtcgaacagaacagcatgaagatggtcatcgttctcgtcgtgtgcctggctctgtcagctgccagcgcctctgcaatgcagatgccctgcccctgcgcggggctgcagggcttgtacggcgctggcgccggcctgacgacgatgatgggcgccggcgggctgtacccctacgcggagtacctgaggcagccgcagtgcagcccgctggcggcggcgccctactacgccgggtgtgggcagacgagcgccatgtaccagccgctccggcaacagtgctgccagcagcagatgaggatgatggacgtgcagtccgtcgcgcagca

SEQ ID NO: 22899 - DNA, 360 bp, Zea mays
  Clone ID: LIB3152-032-P1-K1-B7
tttcagcattcagaaacacaccaagcgaagcgcactagcaacaacctaacaacaatggctaccaagatattagccctccttgcgcttcttgcccttttagtgagcgcaacaaatgcgttcattattccacagtgctcacttgctcctagtgccattattccacagttcctcccaccagttacttcaatgggcttcgaacatccagccgtgcaagcctacaggctacaactagcgcttgcggcgagcgtcttacaacaaccaattgcccaattgcaacaacaatccttggcacatctaaacctacaaaccatcgcaacgcaacagcaacaacagtttctgccatcactgagccacctagcc

SEQ ID NO: 22900 - DNA, 359 bp, Zea mays
  Clone ID: LIB3152-032-P1-K1-B8
tggaaagctcagggcccaaagagccaagtccatgaagttcaaggatggctacatgatctcatctggtcagccagtgaacgagtacattgactcggctgtgagacacgttcttctcagacagggtgttcttggcatcaaggtgaagatcatgcttgactgggacccgaagggcaaggttggcccgatcactcctcttccggacctggtgaccatccacaccccgaaggacgaggacgagccgcgccctccggtcttggcacctcctgaggtgtaaggtcccaactgtgtccttgaaatggcagtttgatcgggtcctagataggtttctatcttacgataaggacaatgctaaggcagtt

SEQ ID NO: 22901 - DNA, 359 bp, Zea mays
  Clone ID: LIB3152-032-P1-K1-B9
tttcagcattcagaaacacaccaagcgaagcgcactatcaacaacctaacaacaatggctaccaagatattagccctccttgcgcttcttgcccttttagtgagcgcaacaaatgcgttcattattccacagtgctcacttgctcctagtgccattattccacagttcctcccaccagttacttcaatgggcttcgaacatccagccgtgcaagcctacaggctacaactagcgcttgcggcgagcgtcttacaacaaccaattgcccaattgcaacaacaatccttggcacatctaaacctacaaaccatcgcaacgcaacagcaacaacagtttctgccatcactgagccacctagc

SEQ ID NO: 22902 - DNA, 361 bp, Zea mays
  Clone ID: LIB3152-032-P1-K1-C1
tacaacaacttgtgctagcaaaccttgctgcctactctcagcaacagcagtttcttccattcaaccaactagctgcattgaactctgcttcttatttgcaacaacaacaactaccattcagccagctacctgctgcctacccccagcaatttcttccattcaaccaactggcagcattgaactctcctgcttatttacagcagcaacaactactaccattcagccagctagctggtgtgagccctgctaccttcttgatacaaccacagttgttgccgttctaccagcacgctgcgcctaacgctggcaccctcttacaactgcaacaattgctgccattcaaccaacttgctttgacaaa

SEQ ID NO: 22903 - DNA, 351 bp, Zea mays
  Clone ID: LIB3152-032-P1-K1-C10
attttgagcattcagaaacacaccttgcgaagctacctagcaacgacttaacagcaatggcttccaagatattagccctccttgcgctttttgccctttttgtgagcgcaacaaatgcgttcattatttcacaatgctcacttgctcctagtgccattataccacagtttcctccgaccagttacttcaatgggctttgaacacctatctgagcaagccttcaggctacaacaagcgcttgcggcgagcgtcttacaacaaccaatttaccaattgctacatcaatccttggcacatctaaccatacaaaccatcgctacacatcagcaacaacagttcctaccagcactg

SEQ ID NO: 22904 - DNA, 321 bp, Zea mays
  Clone ID: LIB3152-032-P1-K1-C11
agaaatgtactttcttatttctgggaagccacaaacatcatccaaaaaacttcattattgaactataactcataagcaatctaaaagagggcaccaccaatgatgggttgttggtagaacgctgttgggtttgtcaaagcaagttggttgaatggcagcaattgttgcagttgtaagagggtgccagcgttaggcgcatcgtgcaggtagaacggcaacaactgttgttgtgtcaagaaggcaacagggctcacatcagctagctggctgaatggtggtagctgttgctgttgtaaataagcagcagagttcaatgctgcc

SEQ ID NO: 22905 - DNA, 356 bp, Zea mays
  Clone ID: LIB3152-032-P1-K1-C3
aagagattgaatcaaataacttcctgaatgatcatgagagatttaaacacacaatgagaacagcacaaggagctctgattgtggcatccatcctcaacatgattcttgggttcagcacgatatggggggcatatgccaaaaagttcagtccggtgataatgacccctgttgtttgtgttgttggtcttggactattccaacttggctttccccaggttgggaaatgtgtggagattgggcttccaatgctaattcttgcggtggttgtgcaacagtatgtgccaaattacttcagttatatccatcaacgggtcaccttcttgtttgagaggtattcgttgcttctttgtatcggc

SEQ ID NO: 22906 - DNA, 351 bp, Zea mays; identical to SEQ ID NO: 22216
  Clone ID: LIB3152-032-P1-K1-C4

SEQ ID NO: 22907 - DNA, 351 bp, Zea mays
  Clone ID: LIB3152-032-P1-K1-C5
ggaatacagtagcaacaatagagcatcaatggcggccaagatattttccatccttatgctccttgctctttctgcatgtgttgctaacgcgaccatttttcctcaatactcacaagctcctatagctgcccttcttcccccataccttccatcaatgaccgcttcagtatgtgaaaacccagcccttcaaccctacaggctccaacaagcaatcgcaacaagcaacttacctttatcacccctgttctttcaacaatcgccagccctatctttggtgcagtcattggtacaaaccatcagggcacaacagctgcagcaactcgtgctaccagtgatcagccaagtagctct

SEQ ID NO: 22908 - DNA, 351 bp, Zea mays
  Clone ID: LIB3152-032-P1-K1-C6
gggcacaacaactacaacaacttgtgctagcaaaccttgctgcatactctcagcaacatcagtttcttccattcaaccaactggctgcattgaactctgctgcttatttgcaacaacaattaccattcagccagctagttgctgcctacccccagcaatttcttccattcaaccaactagcagcattgaactctgctgcttatttacagcagcaacaactactaccattcagccagctagctgatgtgagccctgctgccttcttgacacaacaacagttgttgccgttctacctgcacgctatgcctaacgctggcaccctcttacaactgcaacaattgctgccattca

SEQ ID NO: 22909 - DNA, 354 bp, Zea mays
  Clone ID: LIB3152-032-P1-K1-C7
tgcttccctcaaccgtcacctctcatgagcctacgggagcaacattggagggtacaagaatgaagggtttgttgaagtcttagctgcacagcagagcccagataatccaaactggtttcagggtactgcagatgctgtaaggcagtacttgtggttgtttgaggagcataatgtgatggaatttctaattcttgctggcgatcacctgtaccggatggactatgaaaagttcattcaggcacacagagaaacaaatgctgatattaccgttgctgccctaccgatggatgagaaacgtgcaactgcatttggcctcatgaaaattgatgaagaaaggaggatcattgagtttgc

SEQ ID NO: 22910 - DNA, 358 bp, Zea mays
  Clone ID: LIB3152-032-P1-K1-D1
gcagttcgaaaccaaggatccatccagaaggcgaggaggaagagggagaagggcgcgcgcgcgcgcagcgttcaagtggtgctggtgtcggccatggatcgggttcgcggatccgcgttcctgctcggcgtcctgctcgcaggatccctgttcgcgttttcagttgctaaggaggagaccaagaagctcggcaccgtgatcggtatcgatctcggaaccacctactcctgtgtgggtgtgtacaagaacggtcatgtcgagatcatcgccaatgaccagggtaaccgtatcacaccctcatgggttgccttcaccgatagcgagaggctcatcggtgaggctgccaagaaccaggcag

SEQ ID NO: 22911 - DNA, 348 bp, Zea mays
  Clone ID: LIB3152-032-P1-K1-D10
ggcgcctccacttcgcgttctcgcctcatctcctcccgctcaggatccggcggcgaaggtaaggcaagatgtacaccgcgaggaagaagatccagaaggataagggccttgagccctccgagttcgaggactccgtcgcccaggctttcttcgacctggagaacggtaaccaggagctcaagagcgacctcaaggacctttacatcaacggtgctatccagctggatgttgccgggagcaggaaggctgttgtgatccacgtcccataccgcttgcgcaaggccttcaggaagatccatgtcaggatcgtcagggagctggagaagaaattcagcggcaaggatgtgg

SEQ ID NO: 22912 - DNA, 349 bp, Zea mays
  Clone ID: LIB3152-032-P1-K1-D11
gcaccctttcatcagcctgcctgtccactgttggcttggtgacttcctccgctccgctcccctccgctcccgaacggtcgatctttgcatggcagcagcagctggctccaaggggcgggcgatcgctggaagcttcgtcagccgcgtcctcgccggcaaggccgcctcgccgaggagggccgtgcacgcctcggcgtacgacaagaacctggaggaacaggtgcgcccggcgttcgtgccggacgatgtgatcggcagcgccgggagccccgacaagtactggagcccccaccccaagaccggcgtgttcggcccggcggcggtggaccccaagctggcagctggtggc

SEQ ID NO: 22913 - DNA, 349 bp, Zea mays
  Clone ID: LIB3152-032-P1-K1-D12
agcaacaacaacgtctgcaactgtttatgccagcgctcagtcaactagccatggtgaaccctgtcgcctacctacaacagcaacaattgctttcatctagcccgctcgctgtgggcaatgcacctacgtacctacaacaacagttgctgcaacagattgtaccagctctgactcagctagctgtggcaaaccctactgcctacttgcaacagttgcttccattcaaccaactggctgtgtcgaactctgctgtgtacctacaacagcgacaacagttacttaatccactagcagtggctaacccattggtcgctaacttcctgcagcagcaacaattgctgccatacaa

SEQ ID NO: 22914 - DNA, 323 bp, Zea mays
  Clone ID: LIB3152-032-P1-K1-D2
ggcagcattgaactctcctgcttatttacagcagcaacaactactaccattcagccagctagctggtgtgagccctgctaccttcttgatacaaccacagttgttgccgttctaccagcacgctgcgcctaacgctggcaccctcttacaactgcaacaattgctgccattcaaccaacttgctttgacaaacccagcagcgttctaccaacaacccatcattggtggtgccctcttttagatttcttatgagttatagttcaataataaagttttttgtctgatgtttgtggcttcccagaaataagaaagtacatttctag

SEQ ID NO: 22915 - DNA, 357 bp, Zea mays
  Clone ID: LIB3152-032-P1-K1-D3
ataatgcacattattgtaccaacaatggcagccaaattattttgactccttatgctccttggtctttctgcaagtgctgcttcgggcaccatgttcccacagtgctcacaagctactatagctttccttcttcccgcgtacctgttaccagcggcgtctttacgctgtgaaaaccacacattttcaaccctatgggatccaacaggcaatcggcgctggcatatgacctttatcacccttgttgctacaacattaatacaccctattacagcagtgtccttcggtgcattgattggcacaaaacatcaaggcacaacaactacaacaacttgtgctagctaaccttgctgactactc

SEQ ID NO: 22916 - DNA, 351 bp, Zea mays
  Clone ID: LIB3152-032-P1-K1-D4
cgcacatatctactatactatactctaggaagcaaggacaccaccgccatggcagccaagatgcttgcattgttcgctctcctagctctttgtgcaagcgccactagtgcgacccatattccagggcacttgccaccagtcatgccattgggtaccatgaacccatgcatgcagtactgcatgatgcaacaggggcttgccagcttgatggcgtgtccgtccctgatgctgcagcaactgttggccttaccgcttcagacgatgccagtgatgatgccacagatgatgacgcctaacatgatgtcaccattgatgatgccgagcatgatgtcaccaatggtcttgccgagc

SEQ ID NO: 22917 - DNA, 350 bp, Zea mays
  Clone ID: LIB3152-032-P1-K1-D5
attttgagcattcagaaacacaccaagcgaagcacattagcaacaacctaacaacaatggctaccaagatattatccctccttgcgcttcttgcgctttttgcgagcgcaacaaatgcgttcattattccacaatgctcacttgctccaagttccattattacacagttcctcccaccagttacttcaatgggcttcgaacacccagctgtgcaagcctataggctacaacaagcaattgcggcgagcgtcttacaacaaccaatttcccagttgcaacaacaatccttggcacatctaacaatacaaaccatcgcaacgcaacagcaacaacaattcctaccagcactg

SEQ ID NO: 22918 - DNA, 349 bp, Zea mays
  Clone ID: LIB3152-032-P1-K1-D6
gcaacatagaaagtggaatccagtttcaacaatagagcaacaatggagaccaagatattttccctccttatgctccttgctctttctacatgtgttgctaacgcgacaattttccctcaatgctcacaagctcctatagcttccctttttcccccataccttccatcaattatagcttcagtatgtgaaaacccagctcttcaaccatataggcttcaacaagcaatcgcagcaagcaacatacctttatcgcccttgttgtgtcaacaatcgccagccctatctttggtgcagtcattggtacaaaccatcagggcacaacagctgcagcaactcgtgctacctgtga

SEQ ID NO: 22919 - DNA, 355 bp, Zea mays
  Clone ID: LIB3152-032-P1-K1-D7
aagcaacatagaaagtggaatccagtagcaacaatagagcaacaatggagaccaagatattttccctccttatgctccttgctctttctacatgtgttgctaacgcgacaattttccctcaatgctcacaagctcctatagcttccctttttcccccataccttccatcaattatagcttcagtatgtgaaaacccagctcttcaaccatataggcttcaacaagcaatcgcagcaagcaacatacctttatcgcccttgttgtgtcaacaatcgccagccctatctttggtgcagtcattggtacaaaccatcaaggcacaacagctgcagcaactcgtgctacctgtgatcaa

SEQ ID NO: 22920 - DNA, 351 bp, Zea mays
  Clone ID: LIB3152-032-P1-K1-D8
aagcaacatagaaagtggaatccagtagcaacaatagagcaacaatggagaccaagatattttccctccttatgctccttgctctttctacatgtgttgctaacgcgacaattttccctcaatgctcacaagctcctatagcttccctttttcccccataccttccatcaattatagcttcagtatgtgaaaacccagctcttcaaccatataggcttcaacaagcaatcgcagcaagcaacatacctttatcgcccttgttgtgtcaacaatcgccagccctatctttggtgcagtcattggtacaaaccatcatggcacaacagctgcagcaactcgtgctacctgtga

SEQ ID NO: 22921 - DNA, 353 bp, Zea mays
  Clone ID: LIB3152-032-P1-K1-D9
accaccacccgttggctttctcccctcgcaccggggaacgcggctgccgatccgctcccgatcccctgccctcctccttccagccgactgagattccaccaaatcggcgcccgtgcagtccccgattcgattggcaaacacgattggccgctcctgatcagctacgggatagggctggatttgatttgattggatccccaattgggtgtccgggtccgcgcgttcgggagggcgggcgggcggggggattgctttagggtttcagcgggtgcggtcgctgtgtaggcgggtagggttttgccatggcggagaagggctgcctgaagcggctccagaaggagtaccatgcgctc

SEQ ID NO: 22922 - DNA, 358 bp, Zea mays
  Clone ID: LIB3152-032-P1-K1-E1
cagaaacacaccaagcgaagcgcactagcaacaacctaacaacaatggctaccaagatattatccctccttgcgcttcttgcgctttttgcgagcgcaacaaatgcgtccattattccacaatgctcacttgctcctagttccattattccacagttcctcccaccagttacttcaatggccttcgaacacccagctgtgcaagcctataggctacaacaagcgattgcggcgagcgtcttacaacaaccaattgcccaattgcaacaacaatccttggcacatctaacaatacaaaccatcgcaacgcaacagcaacaacagttcctaccagcactgagccacctagccatggtgaa

SEQ ID NO: 22923 - DNA, 358 bp, Zea mays
  Clone ID: LIB3152-032-P1-K1-E2
gcattcagaaacacaccaagcgaagcacattagcaacaacctaacaacaatggctaccaagatattatccctccttgcgcttcttgcgctttttgcgagcgcaacaaatgcgttcattattccacaatgctcacttgctccaagttccattattacacagttcctcccaccagttacttcaatgggcttcgaacacccagctgtgcaagcctataggctacaacaagcaattgcggcgagcgtcttacaacaaccaatttcccagttgcaacaacaatccttggcacatctaacaatacaaaccatcgcaacgcaacagcaacaacaattcctaccagcactgagccacctagccatg

SEQ ID NO: 22924 - DNA, 357 bp, Zea mays
  Clone ID: LIB3152-032-P1-K1-E3
attttgagcattcagaaacacaccaagcgaagcacattagcaacaacctaacaacaatggctaccaagatattatccctccttgcgcttcttgcgctttttgcgagcgcaacaaatgcgttcattattccacaatgctcacttgctccaagttccattattacacagttcctcccaccagttacttcaatgggcttcgaacacccagctgtgcaagcctataggctacaacaagcaattgcggcgagcgtcttacaacaaccaatttcccagttgcaacaacaatccttggcacatctaacaatacaaaccatcgcaacgcaacagcaacaacaattcctaccagcactgagccacc

SEQ ID NO: 22925 - DNA, 312 bp, Zea mays
  Clone ID: LIB3152-032-P1-K1-E4
gccggcagtcgccgtcatcgatcgatcgccggaaaactaacccctaacgatgtctggagccggcgaggaggacaagaagcccgcggagggcggcgcccacatcaaccttaaggtcaagggacaggatggcaatgaggtgttctttcgcataaagaggtccacccagctgaagaagctgatgaacgcttattgtgaccgccagtctgtggacatgaatgccattgcgttcctgtttgatggccgcaggcttcgcggcgagcagacccctgatgagctggagatggaggacggcgacgagatcgacgccatgct

SEQ ID NO: 22926 - DNA, 350 bp, Zea mays
  Clone ID: LIB3152-032-P1-K1-E5
caactagcaacatagaaagcacaattgtgtaccaacaatggcagccaaaatattttgcctccttatgctccttggtctttctgcaagtgctgctacggcgaccattttcccgaaatgctcgcaagctcctatagcttcccttcttcccccgtacctctcaccagcggtgtcttcggtatgtgaaaacccaattcttcaaccctacaggatccaacaggcaatcacagctggcatcttacctttatcacccttgttcctccaacaatcatcagccctattacatcagttacctttggtgcatttattggcacaaaacatcagggcacaacaactacaacaacttgtgctag

SEQ ID NO: 22927 - DNA, 353 bp, Zea mays
  Clone ID: LIB3152-032-P1-K1-E6
agaccattagctttatctactccagagcgcagaagaacccgatcgacaccatgagggtgttgctcgttgccctcgctctcctggctctcgctgcgagcgccacctccacgcatacaagcggcggctgcggctgccagccaccgccgccggttcatctaccgccgccggtgcatctgccacctccggttcacctgccacctccggtgcatctcccaccgccggtccacctgccgccgccggtccacctgccaccgccggtccatgtgccgccgccggttcatctgccgccgccaccatgccactaccctactcaaccgccccggcctcagcctcatccccagccacacccatgc

SEQ ID NO: 22928 - DNA, 353 bp, Zea mays
  Clone ID: LIB3152-032-P1-K1-E7
attgagaccaactagcaacatagaaagcacaatagtgtaccaacaatggcagctaaaatattttgcctccttatgctccttggtctttctgcaagtgctgctacggcgaccattttcccacaatgctcacaagctcctatagcttcccttcttcccccgtacctctcaccaacggtgtcttcggtatgtgaaaacccaattcttcaaccctacaggatccaacaggcaatcgcagctggcatcttacctttatcacccttgttcctccaacaatcatcagccctattacagcagttacctttggtgcatttattggcacaaaacatcagggcacaacaactacaacaacttgt

SEQ ID NO: 22929 - DNA, 355 bp, Zea mays
  Clone ID: LIB3152-032-P1-K1-E8
ttcagaaacacaccaagcgaatcgctctagcaacaacctaacaacaatggctaccaagatattatccctccttgcgcttcttgcgctttttgcgagcgcaacaaatgcgtccattattccacaatgctcacttgctcctagttccattattccacagttcctcccaccagttacttcaatggccttcgaacacccagctgtgcaagcctataggctacaacaagcgattgcggcgagcgtcttacaacaaccaattgcccaattgcaacaacaatccttggcacatctaacaatacaaaccatcgcaacgcatcagcaacaacagttcctaccagcactgagccacctagccatg

SEQ ID NO: 22930 - DNA, 348 bp, Zea mays
  Clone ID: LIB3152-032-P1-K1-E9
ccaactagcaacatagaaagctcatttgtgtaccaacaatggcagccaaaatatgttgcttccttatgctccttggtctttctgcaagtgctgctaccgcaaccattttcccacaatgctcacaagctcctatagcttcctttcttcccccatacctctcaccagcggtgtcttcagtatgtgaaaacccaattcttcaaccctacaggatccaacaggcaatcgcagcaggcatcttacctttatcacccttgttcctccaacaaccgtcagccctattacagcagttacctttggtgcatttgttggcacaaaacatcaaggcacaacaactacaacaacttgtgc

SEQ ID NO: 22931 - DNA, 357 bp, Zea mays
  Clone ID: LIB3152-032-P1-K1-F1
ccagattggagaactcgacaccatgaaggtgctgatcgttgcccttgctctcctggcgctcgctgcgagcgccgcctccagtacaagcggcggctgtggctgccagacaccaccgtttcatctaccgcctccgttctatatgccgcctccgttctatctgccgccgcagcagcagccgcagccatggcaataccccactcaaccaccgcagctaagcccgtgccagcagttcggatcctgcggcgtcggcagcgtcggcagcccgttcctgggccagtgcgtcgagttcctgaggcaccagtgcagcccggcggcgacgccctacggctcgccacagtgccaggcgctgcagcagca

SEQ ID NO: 22932 - DNA, 206 bp, Zea mays
  Clone ID: LIB3152-032-P1-K1-F11
cgacccactcgttcgatgtcttgagaggtgtatgatttgttttagcctccgggcgcatgtgaaagggggggttcttttaacgttattttacttattctcgtgggtcggatagcggtgcaccgcccctccttttggcttcaaggccctgtctttccgggccgatccggtcggaagacattgtcaggtggtgagtttggctggtgctg

SEQ ID NO: 22933 - DNA, 352 bp, Zea mays
  Clone ID: LIB3152-032-P1-K1-F12
gagaccaacaagcaacatagaaagtttaatccagtagcaacaatagagcaacagtggcgaccaagatattttccctccttatgctccttgctctttctgcatgtgttgctaacgcgacaattttccctcaatgctcacaagctcctatagcttcccttcttcccccataccttccatcaatgatagcttcagtatgtgaaaacccagctcttcaaccctataggctccaacaagcaatcgcagcaagcaacatacctttatcacccttgtttcaacaatcgccagccctatctttggtgcagtcattggtacaaaccatcagggcacagcagctgcagcaactcgtgctacc

SEQ ID NO: 22934 - DNA, 356 bp, Zea mays
  Clone ID: LIB3152-032-P1-K1-F2
agaaagcacaatagtgtaccaacaatggcagccaaaatattttgcctccttatgctccttggtctttctgcaagtgctgctacggcgaccattttcccgaaatgctcgcaagctcctatagcttcccttcttcccccgtacctctcaccagcggtgtcttcggtatgtgaaaacccaattcttcaaccctacaggatccaacaggcaatcacagctggcatcttacctttatcacccttgttcctccaacaatcatcagccctattacatcagttacctttggtgcatttattggcacaaaacatcagggcacaacaactacaacaacttgtgctagcaaaccttgctgcctactc

SEQ ID NO: 22935 - DNA, 356 bp, Zea mays
  Clone ID: LIB3152-032-P1-K1-F3
cagaaacacaccaagcgaagcgcactagctacaacctaacaacaatggctaccaagatattagccctccttgcgcttcttgcccttttagtgagcgcaacaaatgcgttcattattccacagtgctcacttgctcctagtgccattattccacagttcctcccaccagttacttcaatgggcttcgaacatccagccgtgcaagcctacaggctacaactagcgcttgcggcgagcgtcttacaacaaccaattgcccaattgcaacaacaatccttggcacatctaaacctacaaaccatcgcaacgcaacagcaacaacagtttctgccatcactgagccacctagccgtggtg

SEQ ID NO: 22936 - DNA, 352 bp, Zea mays
  Clone ID: LIB3152-032-P1-K1-F4
gaccaactagcaacatagaaagcacaatagtgtaccaacaatggcagccaaaatattttgcctccttatgctccttggtctttctgcaagtgctgctacggcgaccattttcccgaaatgctcgcaagctcctatagcttcccttcttcccccgtacctctcaccagcggtgtcttcggtatgtgaaaacccaattcttcaaccctacaggatccaacaggcaatcacagctggcatcttacctttatcacccttgttcctccaacaatcatcagccctattacatcagttacctttggtgcatttattggcacaaaacatcagggcacaacaactacaacaacttgtgcta

SEQ ID NO: 22937 - DNA, 353 bp, Zea mays
  Clone ID: LIB3152-032-P1-K1-F7
cagaaacacaccaagcgaagcacattagcaacaacctaacaacaatggctaccaagatattatccctccttgcgcttcttgcgctttttgcgagcgcaacaaatgcgttcattattccacaatgctcacttgctccaagttccattattacacagttcctcccaccagttacttcaatgggcttcgaacacccagctgtgcaagcctataggctacaacaagcaattgcggcgagcgtcttacaacaaccaatttcccagttgcaacaacaatccttggcacatctaacaatacaaaccatcgcaacgcaacagcaacaacaattcctaccagcactgagccacctagccatg

SEQ ID NO: 22938 - DNA, 353 bp, Zea mays
  Clone ID: LIB3152-032-P1-K1-F8
gcaacatagaaagtggaatccagtttcaacaatagagcaacaatggcgaccaagatattttccctccttatgctccttgctctttctgcatgtgttgctaacgcgacaattttccctcaatgctcacaagctcctatagcttcccttcttcccccataccttccatcaatgatagcttcagtatgtgaaaacccagctcttcaaccctataggctccaacaagcaatcgcagcaagcaacatacctttatcacccttgtttcaacaatcgccagccctatctttggtgcagtcattggtacaaaccatcagggcacagcagctgcagcaactcgtgctacctgtgatcaacca

SEQ ID NO: 22939 - DNA, 352 bp, Zea mays
  Clone ID: LIB3152-032-P1-K1-F9
caactagcaacatagaaagcacaatagtgtaccaacaatggcagccaaaatattttgcttccttatgctccttggtctttctgcaagtgctgctaccgcaaccattttcccacaatgctcacaagctcctatagcttcctttcttcccccatacctctcaccagcggtgtcttcagtatgtgaaaacccaattcttcaaccctacaggatccaacaggcaatcgcagcaggcatcttacctttatcacccttgttcctccaacaaccgtcagccctattacagcagttacctttggtgcatttgttggcacaaaacatcaaggcacaacaactacaacaacttgtgctagga

SEQ ID NO: 22940 - DNA, 360 bp, Zea mays
  unsure at all n locations
  Clone ID: LIB3152-032-P1-K1-G1
gtgcggcttgtaccactcatactaccaaaataatccatgcagcagcaatgacattagtggtgtttgcaattgaagaattgtgtctacctagccgttatactcctataacggtgttaagcaataaagtaccatacattatgatgtttgtactatgatatttgaataagaatactaattgtaattataatgctactaaaaaaaaaaaaaaaaaaaaaaaaaaaaaaaaaaaaaaaaaaaaaaaaaaaaagaaataaagggaaaaaaaaaaaaaaataaaaaaaaaaaaaaaaaaaaaaaaaaatgggtgttttttttaaaaaaatattttgnttatataaaaagtgtataaaaaaaattaat

SEQ ID NO: 22941 - DNA, 349 bp, Zea mays
  Clone ID: LIB3152-032-P1-K1-G11
cagaaacacaccagcgaactctctatcacaacctaacaacaatggctaccaggatattagccctccttgcgcttcttgcccttttagtgagcgcaacaaatgcgttcattattccacagtgctcacttgctcctagtgccattattccacagttcctcccaccagttacttcaatgggcttcgaacatccagccgtgcaagcctacaggctacaactagcgcttgcggcgagcgtcttacaacaaccaattgcccaattgcaacaacaatccttggcacatctaaacctacaaaccatcgcaacgcaacagcaacaacagtttctgccatcactgagccacctagccgt

SEQ ID NO: 22942 - DNA, 350 bp, Zea mays
  Clone ID: LIB3152-032-P1-K1-G12
ggacgtcagcctagcaattagctcatcgactccagattggagaactcgacaccatgaaggtgctgatcgttgcccttgctctcctggcgctcgctgcgagcgccgcctccagtacaagcggcggctgtggctgccagacaccaccgtttcatctaccgcctccgttctatatgccgcctccgttctatctgccgccgcagcagcagccgcagccatggcaataccccactcaaccaccgcagctaagcccgtgccagcagttcggatcctgcggcgtcggcagcgtcggcagcccgttcctgggccagtgcgtcgagttcctgaggcaccagtgcagcccggcggcgacg

SEQ ID NO: 22943 - DNA, 354 bp, Zea mays
  Clone ID: LIB3152-032-P1-K1-G2
ctagcaattagctcatcgactccagattggagaactcgacaccatgaaggtgctgatcgttgcccttgctctcctggcgctcgctgcgagcgccgcctccagtacaagcggcggctgtggctgccagacaccaccgtttcatctaccgcctccgttctatatgccgcctccgttctatctgccgccgcagcagcagccgcagccatggcaataccccactcaaccaccgcagctaagcccgtgccagcagttcggatcctgcggcgtcggcagcgtcggcagcccgttcctgggccagtgcgtcgagttcctgaggcaccagtgcagcccggcggcgacgccctacggctcgcc

SEQ ID NO: 22944 - DNA, 355 bp, Zea mays
  Clone ID: LIB3152-032-P1-K1-G3
agaaacacaccaagcgaagcgcactagctacaacctaacaacaatggctaccaagatattatccctccttgcgcttcttgcgctttttgcgagcgcaacaaatgcgtccattattccacaatgctcacttgctcctagttccattattccacagttcctcccaccagttacttcaatggccttcgaacacccagctgtgcaagcctataggctacaacaagcgattgcggcgagcgtcttacaacaaccaattgcccaattgcaacaacaatccttggcacatctaacaatacaaaccatcgcaacgcaacagcaacaacagttcctaccagcactgagccacctagccatggtg

SEQ ID NO: 22945 - DNA, 355 bp, Zea mays
  Clone ID: LIB3152-032-P1-K1-G4
gcattcagaaacacaccaagcgaagcgcactagcaacaacctaacaacaatggctaccaagatattatccctccttgcgcttcttgcgctttttgcgagcgcaacaaatgcgtccatcattccacaatgctcacttgctcctagttccattattccacagttcctcccaccagttacttcaatggccttcgaacacccagctgtgcaagcctataggctacaacaagcgattgcggcgagcgtcttacaacaaccaattgcccaattgcaacaacaatccttggcacatctaacaatacaaaccatcgcaacgcaacagcaacaacagttcctaccagcactgagccacctagcc

SEQ ID NO: 22946 - DNA, 355 bp, Zea mays
  Clone ID: LIB3152-032-P1-K1-G5
caactagcaacatagaaagcacaacttctacaacaacttgtgctagcaaaccttgctgcctactctcagcaacagcagtttcttccattcaaccaactagctgcattgaactctgcttcttatttgcaacaacaacaactaccattcagccagctacctgctgcctacccccagcaatttcttccattcaaccaactggcagcattgaactctcctgcttatttacagcagcaacaactactaccattcagccagctagctggtgtgagccctgctaccttcttgatacaaccacagttgttgccgttctaccagcacgctgcgcctaacgctggcaccctcttacaactgcaac

SEQ ID NO: 22947 - DNA, 356 bp, Zea mays
  Clone ID: LIB3152-032-P1-K1-G6
gaaacacaccaagcgaagcgcactttcaacgacctaacaacaatggctaccaagatattagccctccttgcgcttcttgccctttttgtgagcgcaacaaatgcgttcattattccacaatgctcacttgctcctagtgccattattccacagttcctcccaccagttacttcaatgggcttcgaacacctagctgtgcaagccaacatgcaacaacaagcgcttgcggcgagcgtcttacaacaaccaattgcccaattgcaacaacaatccttgccacatctaacaatacaagccatcacaacgcaacagcaacaacagttcctaccagcactgagccacctagccatggtgaa

SEQ ID NO: 22948 - DNA, 348 bp, Zea mays
  Clone ID: LIB3152-032-P1-K1-G7
atcctggaaaaccttttgatggcgatgatgcagagcatatgcagtggatttattcagaggctttaaagagagcagagcttttcggtatttctggtgttacatattctttgacacagggtgttgtcaaaaatataatcccagccattgcatcaacgaatgcaattatatcggctgcttgtgcattggaagccttaaagcttatttctgggtgcagcaaaagtgtgtcaaactatctcacgtacaacggtctggaaggaacacacattaaagtaactgagtttgtcagagacaaagattgccttgtatgtgggcctggtacccttgttgagctggatacgtcatctactc

SEQ ID NO: 22949 - DNA, 351 bp, Zea mays
  Clone ID: LIB3152-032-P1-K1-G8
cggacgcgtgggcgcagatcatagagaccgaggcgcccgcggttctgctttccttccttgccccgttcacgagagaattttctggagtcttcgactcgagcagggttccgatggcgctgcaatggatgatcctggcgtgcgtggtggcggtggaagctgcggtggctgcgctggtcacgctcccggtgccccgcgctgtgcggggccagatcgtcgcgctcacgtccttgttcctgcagcccctgtccagtgtgatacccttcgccgccttccagatcctcgatctctactggaagaaggagcacagactgatgtgcacctcggagatttgcaccgccgaagagcgcattc

SEQ ID NO: 22950 - DNA, 351 bp, Zea mays
  Clone ID: LIB3152-032-P1-K1-G9
caactagcaacatagaaagcacaattgtgtaccaacaatggcagccaaaatatgttgcttccttatgctccttggtctttctgcaagtgttgctaccgcaaccattttcccacaatgctcacaagctcctatagcttcccttcttcccccatacctctcaccagcggtgtcttcaatgtgtgaaaacccaattgttcaaccctacaggatccaacaggcaatcgcaacaggcatcttaccattatcacccttgttcctccaacaaccgtcagccctattacagcagttacctttggtccatttggtggcacaaaacatcagggcacaacaactacaacaacttgtgctatc

SEQ ID NO: 22951 - DNA, 354 bp, Zea mays
  Clone ID: LIB3152-032-P1-K1-H1
gcaacatagaaagcacaatagtgtaccaacaatggcagccaaaatattttgcttccttatgctccttggtctttctgcaagtgctgctaccgcaaccattttcccacaatgctcacaagctcctatagcttcctttcttcccccatacctctcaccagcggtgtcttcagtatgtgaaaacccaattcttcaaccctacaggatccaacaggcaatcgcagcaggcatcttacctttatcacccttgttcctccaacaaccgtcagccctattacagcagttacctttggtgcatttgttggcacaaaacatcaaggcacaacaactacaacaacttgtgctaggaaaccttgc

SEQ ID NO: 22952 - DNA, 232 bp, Zea mays
  Clone ID: LIB3152-032-P1-K1-H10
gctgcttatttgcagcagcaaatactactaccatttagccagctagctgcagcaagccgtgcttccttcttgacacagcaacagttgctgcctttctaccagcagtttgcggctaaccccgcaaccctcttacaactacaacaattgttgccctttgtccaacttgctttgacaaacccagcagcctcctaccaacaacacatcattggtggtgccctcttctagatcgcga

SEQ ID NO: 22953 - DNA, 353 bp, Zea mays
  Clone ID: LIB3152-032-P1-K1-H11
gttggcacaaaacatcaaggcacatcaactacaacaacttgtgctaggaaaccttgctgcctactctcagcaacagcagtttcttccattcaaccaactggctgcattgaactctgctgcttatttgcaacaacaactaccattcagtcagctagctgctgcctacccccagcaatttcttccattcaaccaactggcagcattgaactctgctgcttatttacaacagcaacagctaccaccattcagccagctagctgatgtgagccctgttgccttcttgacacaacaacagttgttgccgttctacctgcacgctgcgcctaacgctggcaccctcttacaactgcaac

SEQ ID NO: 22954 - DNA, 357 bp, Zea mays
  Clone ID: LIB3152-032-P1-K1-H12
gcggcagtgcttaaagaggttcttcaatggccttcgaacacccagctgtgcaagcctataggctacaacaagcgattgcggcgagcgtcttacaacaaccaattgcccaattgcaacaacaatccttggcacatctaacaatacaaaccatcgcaacgcaacagcaacaacagttcctaccagcactgagccacctagccatggtgaaccctgtcgcctacttgcaacagcagctgcttgcatccaacccacttgctctagcaaacgtagttgcaaaccagcaacatcaacaactgcaacagtttctgccagcgcttagtcaactagccatggtgaaccctgccgcctacctacaac

SEQ ID NO: 22955 - DNA, 349 bp, Zea mays
  Clone ID: LIB3152-032-P1-K1-H2
atagaaagcacaatagtgtaccaacaatggcagccaaaatattttgcctccttatgctccttggtctttctgcaagtgctgctacggcgaccattttcccgaaatgctcgcaagctcctatagcttcccttcttcccccgtacctctcaccagcggtgtcttcggtatgtgaaaacccaattcttcaaccctacaggatccaacaggcaatcacagctggcatcttacctttatcacccttgttcctccaacaatcatcagccctattacatcagttacctttggtgcatttattggcacaaaacatcagggcacaacaactacaacaacttgtgctagcaaaccttgc

SEQ ID NO: 22956 - DNA, 353 bp, Zea mays
  Clone ID: LIB3152-032-P1-K1-H3
taggaaaccttgctgcctactctcagcaacagcagtttcttccattcaaccaactggctgcattgaactctgctgcttatttgcaacaacaactaccattcagtcagctagctgctgcctacccccagcaatttcttccattcaaccaactggcagcattgaactctgctgcttatttacaacagcaacagctaccaccattcagccagctagctgatgtgagccctgttgccttcttgacacaacaacagttgttgccgttctacctgcacgctgcgcctaacgctggcaccctcttacaactgcaacaattgctgccattcaaccaacttgctttgacaaacccaacagcg

SEQ ID NO: 22957 - DNA, 375 bp, Zea mays
  Clone ID: LIB3152-032-P1-K1-H4
ggcccgacccacccatgcgtaaagctcattattgtaccaacaatgtcctactaccatttatgctgccttatgctccttggtctttctgcaagtgctgctaccgcaaccattttcccacaatgctcacaagctcctatagcttcctttcttcccccatacctatcaccagcggtgtcttcagtatgtgaaaacccaattcttcaaccctacaggatccaacaggcaatcgcagcaggcatcttacctttatcacccttgttcctccaacaaccgtcagccctattacagcagttacctttggtgcatttgttggcacaaaacatcaaggcacaacaactacaacaacttgtgctaggaaaccttgctgcctactct

SEQ ID NO: 22958 - DNA, 355 bp, Zea mays
  Clone ID: LIB3152-032-P1-K1-H5
cattgaaccgtgctgcttatttgcagcaacaactattaccattcagccagctagctactgcctactctcagcaacaacaacttcttccatttaaccaattggccgcactgaaccccgctgcttatttgcagcagcaaatactactaccatttagccagctagctgcagcaagccgtgcttccttcttgacacagcaacagttgctgcctttctaccagcagtttgcggctaaccccgcaaccctcttacaactacaacaattgttgccctttgtccaacttgctttgacaaacccagcagcctcctaccaacaacacatcattggtggtgccctcttttagattgcttattagtt

SEQ ID NO: 22959 - DNA, 357 bp, Zea mays
  Clone ID: LIB3152-032-P1-K1-H6
gcggcagtgcgtagagaggatcgtcgaacagaacagcatgaagatggtcatcgttctcgtcgtgtgcctggctctgtcagctgccagcgcctctgcaatgcagatgccctgcccctgcgcggggctgcagggcttgtacggcgctggcgccggcctgacgacgatgatgggcgccggcgggctgtacccctacgcggagtacctgaggcagccgcagtgcagcccgctggcggcggcgccctactacgccgggtgtgggcagacgagcgccatgtaccagccgctccggcaacagtgctgccagcagcagatgaggatgatggacgtgcagtccgtcgcgcagcagctgcagatgat

SEQ ID NO: 22960 - DNA, 349 bp, Zea mays
  Clone ID: LIB3152-032-P1-K1-H7
gccgcaggcccgcagaggaagaggagagcctactctcctgccatggccgcgccgagtccgctcccccgcttcctgatactcctgctcgccgtaacctcctccgcgtttgccgccgccgcggcaaccggggctccggtggtgggggaggactacgtccgtccgccgccggcgcggtgccaccgcaaggcactccttagcctcttcccttggagcaagaaggaggagtccgccgcctcctccgatccgcagcaggtgcacatttctctagctggagaaaagcacatgagaataacatgggttaccaatgataactctgtcccatctgtgggggactatggaactaaagaaa

SEQ ID NO: 22961 - DNA, 352 bp, Zea mays
  Clone ID: LIB3152-032-P1-K1-H8
ccattagctttatctactccagagcgcagaagaacccgatcgacaccatgagggtgttgctcgttgccctcgctctcctggctctcgctgcgagcgccacctccacgcatacaagcggcggctgcggctgccagccaccgccgccggttcatctaccgccgccggtgcatctgccacctccggttcacctgccacctccggtgcatctcccaccgccggtccacctgccgccgccggtccacctgccaccgccggtccatgtgccgccgccggttcatctgccgccgccaccatgccactaccctactcaaccgccccggcctcagcctcatccccagccacacccatgccc

SEQ ID NO: 22962 - DNA, 342 bp, Zea mays
  Clone ID: LIB3152-032-P1-K1-H9
gagcattcagaaacacaccaagcgaatcgcactagcaacgacctaacaacaatggctaccaagatattagccctccttgcgcttcttgccctttttgtgagcgcaacaaatgcgttcattattccacaatgctcacttgctcctagtgccatcattacacaacacctcccaccagttacttcaatgggcttcgaacacctagctgctgtgcaagccatcatgcaacaaccagctcttgcgggcagcgtattacaacaacctattgcccaactgcaacaacacttgccgccacatacaacaatacacgtcattacaacgcatcagcaacaactgttcctacca

SEQ ID NO: 22963 - DNA, 110 bp, Zea mays
  Clone ID: LIB3152-033-P1-K1-A1
aaccaacttgctttgacaaacccagcagcattttaccaacaacccatcattggtggtgccggcttttagatttcttatgagttatagttcaataataaagttttttgtct

SEQ ID NO: 22964 - DNA, 409 bp, Zea mays
  Clone ID: LIB3152-033-P1-K1-A11
gggtcttcagaccattagctttatctactccagagcgcagaagaacccgatcgacaccatgagggtgttgctcgttgccctcgctctcctggctctcgctgcgagcgccacctccacgcatacaagcggcggctgcggctgccagccaccgccgccggttcatctaccgccgccggtgcatctgccacctccggttcacctgccacctccggtgcatctcccaccgccggtccacctgccgccgccggtccacctgccaccgccggtccatgtgccgccgccggttcatctgccgccgccaccatgccactaccctactcaaccgccccggcctcagcctcattcccagccacacccatgcccgtgccaacagccgcatccaagcccgtgccagctgcagggaacctgc

SEQ ID NO: 22965 - DNA, 414 bp, Zea mays
  Clone ID: LIB3152-033-P1-K1-A2
catcgccgggcatcgcacacaaacgcaacctgtagccatggcacagaagctcgcgccaccgacggcggcggccgtcgtcgtcctgctggcgctcgccttgtcggccgccgcgcagaactgcgggtgcgcgtcgggcctgtgctgcagccggttcgggtactgcgggacgggcgaggactactgcggcgccgggtgccagtcgggcccctgcgacgtgccggagaccaacaacgcgttcgtggccagcatcgtgacgccggtcttcttcgacgcgctcctcgcgcaggccgtcgccttgtgcgaggccaacggcttttacacccgcgacgccttcctcgccgtcgtcggttactacccggtgtttggccgcaccggcaccgtctacgacttcaagcgcgagatcgccgtcttttt

SEQ ID NO: 22966 - DNA, 418 bp, Zea mays
  Clone ID: LIB3152-033-P1-K1-A3
cttcagtatgtgaaaacccagctcttcaaccatataggcttcaacaagcaatcgcagcaagcaacatacctttatcgcccttgttgtgtcaacaatcgccagccctatctttggtgcagtcattggtacaaaccatcagggcacaacagctgcagcaactcgtgctacttggttgatcacagcggacgcgtgggtgcgagctgcgcgctcgccgacgtcaactacctcgagcgccctctgctcatccccaaggaggagctccttccgcgccctccccccgaggagaagctcgaggacctcgtcctcatggcacaggtgaccaagttcgcctgcggcgggttcgcggtcgggatctgcttcagccacctggtgttcgacgggcagggtgcggggcagttcctcaaggcggccggcgaga

SEQ ID NO: 22967 - DNA, 364 bp, Zea mays
  unsure at all n locations
  Clone ID: LIB3152-033-P1-K1-A4
gcattcttcaaatacttgcataagatggcaggttccgtggctatcgtggncatcttcgtcgccctcctcgccgtggccggcgaggcggctgtgttcacggtggtgaaccagtgcccgttcaccgtgtgggccgcgtccgtgccggtgggcggcgggcggcagctgaaccgcggcgagagctggcggatcacggcccccgcgggcacgacggccgcgcgcatctgggcgcgcacggtgtgccagttcgacgcgagcgggcgcgggagctgccgcacggtggactgcggcggcgtgctgcagtgcactgtgtacgggcgcgcgcccaacacgcttgcggagtacgcgctgaagcagttcaacaacc

SEQ ID NO: 22968 - DNA, 413 bp, Zea mays
  Clone ID: LIB3152-033-P1-K1-A5
attttgagcattcagaaacacaccaagcgattttcattagcaacaacctaacaacaatggctaccaagatattatccctccttgcgcttcttgcgctttttgcgagcgcaacaaatgcgttcattattccacaatgctcacttgctccaagttccattattacacagttcctcccaccagttacttcaatgggcttcgaacacccagctgtgcaagcctataggctacaacaagcaattgcggcgagcgtcttacaacaaccaatttcccagttgcaacaacaatccttggcacatctaacaatacaaaccatcgcaacgcaacagcaacaacaattcctaccagcactgagccacctagccatggtgaaccctgccgcctacttgcaacagcagttgcttgcatcaaaccca

SEQ ID NO: 22969 - DNA, 418 bp, Zea mays
  Clone ID: LIB3152-033-P1-K1-A6
cgacccacgcgttcgcaacaagcaacatagaaagtggaatccagtagtttcttttgagcaacaatggcgaccaagatattgtcccttcttatgctccttgctctttctgcatgtgttgctaacgcgacaattttccctcaatgctcacaagctcctatagcttaccttcttcccccataccttccatcaatgatagcttcagtatgtgaaaacccagctcttcaaccctataggctccaacaagcaatcgcagcaagcaacatacctttatcacccttgtttcaacaatcgccagccctatctttggtgcagtcattgttacaaaccatcagggcacagcagctgcagcaactcgtgctacctgtgatcaaccaagtagctctggcaaacctttctccctactctcagcaacaacaat

SEQ ID NO: 22970 - DNA, 299 bp, Zea mays
  Clone ID: LIB3152-033-P1-K1-A7
tgccgttctacctgcacgctgcgcctaacgctgtcaccctcttacaactgcaacaagtgctgccattcaaccaacttgctttgacaaacccaacagcgttctaccaacaacccatcattggtggtgccctcttttagattgcttatgagttatagttcaataatgaagttttttggatgatgtttgcggcttcccagaaataagaaagtacatttctaaaaaaaataaaaaatgtatataaaataattaaatttaaataaattattaaaattttgatacaaatttatcatttcttattt

SEQ ID NO: 22971 - DNA, 118 bp, Zea mays
  Clone ID: LIB3152-033-P1-K1-A8
caacaacccatcattggtggtgccctcttttatatttcttatgagttatagttcaataataaagttttttgtctgatgtttgtggcttcccagaaataagaaagtacatttctagatt

SEQ ID NO: 22972 - DNA, 409 bp, Zea mays
  Clone ID: LIB3152-033-P1-K1-A9
ggacgtcagcctagcaattagctcatcgactccagattggagaactcgacaccatgaaggtgctgatcgttgcccttgctctcctggcgctcgctgcgagcgccgcctccagtccaaggcgggggtggggctgccagacaccaacggttcatctaccggctccggtctatatgccgcctccgttctatctgccgccgcagcagcagccgcagccatggcaataccccactcaaccaccgcagctaagcccgtgccagcagttcggatcctgcggcgtcggcagcgtcggcaggccgttcctgggccagtgcgtcgaggtcctgaggcaccaatgcaggccggcggcgacgccctacgggttggcacaatgccaggcgctttaacagcagtgctgccaccagatcaagca

SEQ ID NO: 22973 - DNA, 418 bp, Zea mays
  Clone ID: LIB3152-033-P1-K1-B1
caacaagcaacatagaaagtggaatccagtagcaacaatagagcaacaatggagaccaagatattttccctccttatgctccttgctctttctacatgtgttgctaacgcgacaattttccctcaatgctcacaagctcctatagcttccctttttcccccataccttccatcaattatagcttcagtatgtgaaaacccagctcttcaaccatataggcttcaacaagcaatcgcagcaagcaacatacctttatcgcccttgttgtgtcaacaatcgccagccctatctttggtgcagtcattggtacaaaccatcagggcacaacagctgcagcaactcgtgctacctgtgatcaaccaagtagctctggcaaacctttctccctactctccgcaacaacaatttcttccattca

SEQ ID NO: 22974 - DNA, 409 bp, Zea mays
  Clone ID: LIB3152-033-P1-K1-B10
caccaagcgaagcgcactagcaacaacctatactacaatggctaccaagatattagccctccttgcgcttcttgcccttttagtgagcgcaacaaatgcgttcattattccacagtgctcacttgctcctagtgccattattccacagttcctcccaccagttacttcaatgggcttcgaacatccagccgtgcaagcctacaggctacaactagcgcttgcggcgagcgttttacaacaaccaattgcccaattgcaacaacaatccttggcacatctaaacctacaaaccatcgcaacgcaacagcaacaacagtttctgccatcactgagccacctagccgtggtgaaccctgtcggctacttgcaacagcagctacttgcatccaacccacttgctctggcgaac

SEQ ID NO: 22975 - DNA, 392 bp, Zea mays
  Clone ID: LIB3152-033-P1-K1-B11
caacaagcaacatagaaagtggaatccagtagcaacaatagagcaacaatggcgaccaagatattttccctccttatgctccttgctctttctgcatgtgttgctaacgcgacaattttccctcaatgctcacaagctcctatagcttcccttcttcccccataccttccatcaatgatagcttcagtatgtgaaaacccagctcttcaaccctataggctccaacaagcaatcgcagcaagcaacatacctttatcacccttgtttcaacaatcgccagccctatctttggtgcagtcattggtacaaaccatcagggcacagcagctgcagcaactcgtgctacctgtgatcaaccaagtagctctggcaccctcttacaactgcaacaa

SEQ ID NO: 22976 - DNA, 399 bp, Zea mays
  Clone ID: LIB3152-033-P1-K1-B12
ggaccaactagcacatagaaagcacaattttgtccaacaaggcagccaaaatattggcttcttatgctcacttggtctttctgcaagtgttgctaccgcaaccattttcccacaatgctcacaagctcctatagcttcccttcttcccccatacctctcaccagcggtgtcttcaatgtgtgaaaacccaattgttcaaccctacaggatccaacaggcaatcgcaacaggcatcttaccattatcacccttgttcctccaacaaccgtcagccctattacagcagttacctttggtccatttggtggcacaaaacatcagggcacaacaactacaacaacttgtgctagcaaaccttgctgcatactctcagcaacatcagtttttttcattcaacca

SEQ ID NO: 22977 - DNA, 389 bp, Zea mays
  Clone ID: LIB3152-033-P1-K1-B2
cttgctcctagtgccattattccacagttccttccattagttacttcaatgggcttcgaacacctagctgtgcaagccaacatgcaacaacaagcgcttgcggcgagcgtcttacaacaaccaattgcccaattgcaacaacaatccttgccacatctaacaatacaagccatcacaacgcaacagcaacaacagttcctaccagcactgagccacctagccatggtgaaccctgccgcctacttgcaagagcagctgcttgcatccaacccacttgctctggcgaacgtagttgcaaaccagcaacaacaacagctacaacagtttctgccaacgctcagtcaactagccatggtgaaccctgccgtctacgtacaacaacaacaact

SEQ ID NO: 22978 - DNA, 409 bp, Zea mays
  Clone ID: LIB3152-033-P1-K1-B3
caatttaatgatgcccccaacaaagaaagcgttggctatggagaaagtggacgtggcaagcatggagaaaaatctctagctgaatcagtgggatcacttaacattggcattattgattctgagttcatggattcaagtcctctaattcatgataaagaatcatgttttcctctagaacctgagggctccgttaatgaagataattttacagctgtgctttcacaatttaacgatgcccccaacaaagaaagtgaaggctatggagaaagtggatgtggtaagcatggagaaaaatctctagttgaatcagtgggatcacttaacattggcattgttgattctgagttcatggattcaagtcctctaattcatgataaagaatcatgttctcctctagaacctgaggact

SEQ ID NO: 22979 - DNA, 290 bp, Zea mays
  Clone ID: LIB3152-033-P1-K1-B4
caactagcaacatagaaagcacaatagtgtaccaacaatggcagccaaaatattttgcctcctttatgctccttggtctttctgcaagtgctgctacggcgaccattttcccacaatgctcacaagctcctatagcttcccttcttcccccgtacctctcaccagcggtgtcttcggtatgtgaaaacccaattcttcaaccctataggatccaacaggcaatcgcagctggcatcttacctttatcacccttgttcctccaacaatcaatagccctattacagcaagta

SEQ ID NO: 22980 - DNA, 407 bp, Zea mays
  Clone ID: LIB3152-033-P1-K1-B5
cttcggtatgtgaaaacccaattcttcaaccctacaggatccaacaggcaatcacagctggcatcttacctttatcacccttgttcctccaacaatcatcagccctattacatcagttacctttggtgcatttattggcacaaaacatcagggcacaacaactacaacaacttgtgctagcaaaccttgctgcctactctcagcaacagcagtttcttccattcaaccaactagctgcattgaactctgcttcttatttgcaacaacaacaactaccattcagccagctacctgctgcctacccccagcaatttcttccattcaaccaactggcagcattgaactctcctgcttatttacagcagcaacaactactaccattcagccagctagctggtgtgagccct

SEQ ID NO: 22981 - DNA, 405 bp, Zea mays
  Clone ID: LIB3152-033-P1-K1-B6
agaccattagctttatctactccagagcgcagattaacccgatcgacaccatgagggtgttgctcgttgccctcgctctcctggctctcgctgcgagcgccacctccacgcatacaagcggcggctgcggctgccagccaccgccgccggttcatctaccgccgccggtgcatctgccacctccggttcacctgccacctccggtgcatctcccaccgccggtccacctgccgccgccggtccacctgccaccgtcggtccatgtgccgccgccggttcatctgccgccgccaccatgccactaccctactcaaccgccccggcctcagccttatccccagccacacccatgctcgtgccaacagccgcattcaagcccgtgccagctgcagggaacctgcggcg

SEQ ID NO: 22982 - DNA, 234 bp, Zea mays
  Clone ID: LIB3152-033-P1-K1-B7
ctctatccatccctctctatctatatatgtaataatgcagtaagacgacacacattatcatgtgtggtatgaccaataatatatgcatcataataaagttttggttttaaagaaaaaaaaaaaaaaaaaaaaaaaaaaaaaaaaaaaaaaaaaaaaaaaaaaaaaaaaaaaaaaataaaaaaaaaataaaaaatatataaaaaaatataaataacgttaaatataatatcaatt

SEQ ID NO: 22983 - DNA, 414 bp, Zea mays
  Clone ID: LIB3152-033-P1-K1-B8
aagcaacatagaaagtggaatccagtatttactttagagcaacaatggcgaccaagatatggtccctccttatgctccttgctctttctgcatgtgttgctaacgcgacaattttccctcaatgctcacaagctcctatagcttcccttcttcccccataccttccatcaatgatagcttcagtatgtgaaaacccagctcttcaaccctataggctccaacaagcaatcgcagcaagcaacatacctttatcacccttgtttcaacaatcgccagccctatctttggtgcagtcattggtacaaaccatcagggcacagcagctgcagcaactcgtgctacctgtgatcaaccaagtagctctggcaaacctttctccctactctcagcaacaacaatttcttccattcaacc

SEQ ID NO: 22984 - DNA, 411 bp, Zea mays
  Clone ID: LIB3152-033-P1-K1-B9
gcgacccatattccagggcacttgccaccagttatgccattgggtaccatgaacccatgcatgcagtactgcatgatgcaacaggggcttgccagcttgatggcgtgtccgtccctgatgctgcagcaactgttggccttaccgcttcagacgatgccagtgatgatgccacagatgatgacgcctaacatgatgtcaccattgatgatgccgagcatgatgtcaccaatggtcttgccgagcatgatgtcgcaaatgatgatgccacaatgtcactgcgacgccgtctcgcagattatgctgcaacagcagttaccattcatgttcaacccaatggccatgacgattccacccatgttcttacagcaaccctttgttggtgctgcattctagatagaaatatttgtgttg

SEQ ID NO: 22985 - DNA, 416 bp, Zea mays
  Clone ID: LIB3152-033-P1-K1-C1
tcgcaacacaacagcaacaacagttcctaccagtacttagccaactagatgtggtgaaccctgtcgcctacttgcaacagcaggtgcttgcatccaacccacttgctctggcaaacgtagctgcataccaacaacaacaacaattgcaacagtttctgccagcgctcagtcaactagccatggtgaaccctgccgcctacctacaacagcaacaactgctttcatctagccctctcgttgtgggtaatgcacctacatacctgcaacaacaattgctgcaacagattgtaccagctctgactcagctagctgtggcaaaccctgctgcctacttgcaacagctgcttccattcaaccaactgactgtgtcgaactctgctgcgtacctacaacagcgacaacagttacttaatcca

SEQ ID NO: 22986 - DNA, 312 bp, Zea mays
  Clone ID: LIB3152-033-P1-K1-C10
tttcgcgtttagaacctctaaaatttccctcactcgccagtcgcagcagcacctgtagccatggacgccagcggagccggtagcaaggggaagaagggtgcggccgggcgcaaggcaggcggccccaggaagaagtcggtgacgcggtccgtcaaggccgggctgcagttccccgtcggccggatcgggcgctacctgaagaagggccggtacgcgcagcgcgtgggcactggcgcccccgtctacctcgccgccgttctggagtacctcgccgccgaggttctggagttggcagggaacgcggcgaaagac

SEQ ID NO: 22987 - DNA, 116 bp, Zea mays
  Clone ID: LIB3152-033-P1-K1-C11
cttcaaccctacaggatccaacaagcatttttttctggcatcttacctttatcacccgtgggccttcaacaatcatcagccctattacaacagttaccctttggtgcatttattgg

SEQ ID NO: 22988 - DNA, 386 bp, Zea mays
  Clone ID: LIB3152-033-P1-K1-C12
gctcatcgactccagattggagaactttacaccatgaaggtgctgatcgtgcccttgcgtcctggcgctcgctgcgagcgccgcctccagtacaagcggcggctgtggctgccagacaccaccgtttcatctaccgcctccgttctatatgccgcctccgttctatctgccgccgcagcagcagccgcagccatggcaataccccactcaaccaccgcagctaagcccgtgccagcagttcggatcctgcggcgtcggcagcgtcggcagcccgttcctggccagtgcgtcgagttcctgaggcaccagtgcagcccggcggcgacgccctacggctcgccacagtgccaggcgcttgaacagcagtgctgccaccagatcaggca

SEQ ID NO: 22989 - DNA, 416 bp, Zea mays
  Clone ID: LIB3152-033-P1-K1-C2
cggacgcgtgggttcagaaacacaccaagcgatgcatattagcaacaacctaacaacaatggctaccaagatattatccctccttgcgcttcttgcgctttttgcgagcgcaacaaatgcgttcattattccacaatgctcacttgctccaagttccattattacacagttcctcccaccagttacttcaatgggcttcgaacacccagctgtgcaagcctataggctacaacaagcaattgcggcgagcgtcttacaacaaccaatttcccagttgcaacaacaatccttggcacatctaacaatacaaaccatcgcaacgcaacagcaacaacaattcctaccagcactgagccacctagccatggtgaaccctgccgtctacttgcaacagcagttgcttgcatcaaacccac

SEQ ID NO: 22990 - DNA, 413 bp, Zea mays
  Clone ID: LIB3152-033-P1-K1-C3
ggttcccgtcgctcgtcgtgtgcgccagcgccttcttgaacgtcgtcttcgtcggcgccgagatggcgccgtggagcaagaccggcggcctcggcgacgtcctcggcggcctgccgccggccatggccgcgaacgggcaccgtgtcatggtcgtctctccccgctacgaccagtacaaggacgcctgggacaccagcgtcgtgtccgagatcaagatgggagacgggtacgagacggtcaggttcttccactgctacaagcgcggagtggaccgcgtgttcgttgaccacccactgttcctggagagggtttggggaaagaccgaggagaagatctacgggcctgtcgctggaacggactacagggacaaccagctgcggttcagcctgctatgccaggcagcacttgaagct

SEQ ID NO: 22991 - DNA, 404 bp, Zea mays
  Clone ID: LIB3152-033-P1-K1-C4
aatgatagcttcagtatgtgaaaacccagctcttcaaccctataggctccaacaagcaatcgcagcaagcaacatacctttatcacccttgtttcaacaatcgccagccctatctttggtgcagtcattggtacaaaccatcagggcacagcagctgcagcaactcgtgctacctgtgatcaaccaagtagcttttgcaaacctttttcctactttcagcaacaacaatttcttccattcaaccaactgtctacattgaaccgtgctgcttattgcagcaacaactattaccattcagccagctagctactggctactcttagcaacaacaacttttttcatttaaccaaattgccgcactgaaccccgctgcttatttgcaggaacaaatactactaccattt

SEQ ID NO: 22992 - DNA, 412 bp, Zea mays
  Clone ID: LIB3152-033-P1-K1-C5
aacatacatagtgaagtacactagcaacatcttatcaccaatgggagccaagatttttgccctccttgccctccttgctctttcagcaagcgctgctacctcgacttttattccacaatgctcacaacaatacctctctccggcgacagccgtgggatttcaatacccaactatacaatcctacatggtacaagaggccatccaagcaagcatcttacggtcattagcattaaccctccaacaaccatatgctctattgcaacagccatccttagtgcatctgtatctccaaagaatcgcggcacaacaactacaacaacagttgctaccaacaatcaatcaagtagttgcagcgaaccttgctgcttaccttcagcaacaacagtttcttccattcaatcaactagatggg

SEQ ID NO: 22993 - DNA, 337 bp, Zea mays
  unsure at all n locations
  Clone ID: LIB3152-033-P1-K1-C6
caaacgcgtccgatcttagaccaacnntagcaacatagaaagcacatattgtgtaccaacaatggcagccaaaatatgtggcctccttatgctccttggtatntctgcaagtgctgctacggcgaccattttcccgcaatgctcacaagctcctatagcttcccttcttcccccgtacctcttaccagcggtgtcttcggtatgtgaaaacccaattcttaaaccctacagggaccaacatgcaatcgcagctggcatcttacctttatcacccttggttcctccaacaataatcagcccctataacagcagttaccctntggtgcatttattggca

SEQ ID NO: 22994 - DNA, 397 bp, Zea mays
  Clone ID: LIB3152-033-P1-K1-C7
gaaatccccaaggcgaggcgttgaaaccctttttcctcttccacctcgaagcggcgcgaggagggagagtgtgagtggactcaggaggcggcgggcgaaatgaagcttaacgtcaagaccctcaagggcaccaacttcgagatcgaggcgagccccgatgcgtcggttgctgaggtgaagaggatcatcgaaactactcagggtcagagtacctacccagcagaccagcaaatgctcatataccaagggaaaattctgaaggatgagaccactttggaaagcaacggagttgctgagaacagcttccttgttataatgctgtccaaggctaaagcatcgtcaagtggagcttccactgctactgctgcaaaagctcctgcaacttcagcccaacctg

SEQ ID NO: 22995 - DNA, 411 bp, Zea mays
  Clone ID: LIB3152-033-P1-K1-C8
cgacttttattccacaatgctcacaacaatacctctctccggcgacagccgtgggatttcaatacccaactatacaatcctacatggtacaagaggccatccaagcaagcatcttacggtcattagcattaaccctccaacaaccatatgctctattgcaacagccatccttagtgcatctgtatctccaaagaatcgcggcacaacaactacaacaacagttgctaccaacaatcaatcaagtagttgcagcgaaccttgctgcttacctccagcaacaacagtttcttccattcaatcaactagatggggtgaaccctgctatctacttgcaggcacaacagctactaccatttaaccaacttgtcgggagcccttatgccttcttactgcaacaacagcttctaccat

SEQ ID NO: 22996 - DNA, 412 bp, Zea mays
  Clone ID: LIB3152-033-P1-K1-C9
caactagcaacatagaaagcacaatagtgtaccaacaatggcagccaaaatattttgcttccttatgctccttggtctttctgcaagtgctgctaccgcaaccattttcccacaatgctcacaagctcctatagcttcctttcttcccccatacctctcaccagcggtgtcttcagtatgtgaaaacccaattcttcaaccctacaggatccaacaggcaatcgcagcaggcatcttacctttatcacccttgttcctccaacaaccgtcagccctattacagcagttacctttggtgcatttgttggcacaaaacatcaaggcacaacaactacaacaacttgtgctaggaaaccttgctgcctactctcagcaacagcagtttcttccattcaaccaactggctgcattg

SEQ ID NO: 22997 - DNA, 391 bp, Zea mays
  Clone ID: LIB3152-033-P1-K1-D1
gagcattcagaaacacaccaagcgaagcgcactagcatcgacctaacaacaatggctaccaggatattagccctccttgcgcttcttgccctttttgtgagcgcaacaaatgcgttcattattccacaatgctcacttgctcctagtgccattattccacagttcctcccaccagttacttcaatgggcttcgaacacctagctgtgcaagccaacatgcaacaacaagcgcttgcggcgagcgtcttacaacaaccaattgcccaattgcaacaacaatccttgccacatctaacaatacaagccatcacaacgcaacagcaacaacagttcctaccagcactgaaccaactagccatggtgaaccctgccgcctacttgcaagagcagc

SEQ ID NO: 22998 - DNA, 407 bp, Zea mays
  Clone ID: LIB3152-033-P1-K1-D10
aacacaccaagcgaagcgcactagcaacatcctaacaacaatggctaccaagatattatccctccttgcgcttcttgcgctttttgcgagcgcaacaaatgcgtccattattccacaatgctcacttgctcctagttccattattccacagttcctcccaccagttacttcaatggccttcgaacacccagctgtgcaagcctataggctacaacaagcgattgcggcgagcgtcttacaacaaccaattgcccaattgcaacaacaatccttggcacatctaacaatacaaaccatcgcaacgcaacagcaacaacagttcctaccagcactgagccacctagccatggtgaaccctgtcgcctacttgcaacagcagctgcttgcattcaacccacttgctctag

SEQ ID NO: 22999 - DNA, 404 bp, Zea mays
  Clone ID: LIB3152-033-P1-K1-D11
caacatagaaagtggaatccagtagcaacttttgtagcaacaatggagaccaagatattttccctccttatgctccttgctctttctacatgtgttgctaacgcgacaattttccctcaatgctcacaagctcctatagcttccctttttcccccataccttccatcaattatagcttcagtatgtgaaaacccagctcttcaaccatataggcttcaacaagcaatcgcagcaagcaacatacctttatcgcccttgttgtgtcaacaatcgccagccctatctttggtgcagtcattggtacaaaccatcagggcacaacagctgcagcaactcgtgctacctgtgatcaaccaagtagctctggcaaacctttctccctactctccgcaacaacaatttct

SEQ ID NO: 23000 - DNA, 404 bp, Zea mays
  Clone ID: LIB3152-033-P1-K1-D12
gctgcaacagtttctgccagcgctcagtttacttgccatggtgaaccctgccgcctacctacaacagcaacaactgctttcatctagcccgctcgctgtggccaatgcacctacatacctgcaacaacaattgttgcaacagattgtaccagctctgactcagctagttgtggcaaaccctgctgcctacttgcaacagctgcttccattcaaccaactgactatgtcgaactctgctgcgtacctacaacagcgacaacagttacttaatccactagcagtggctaacccattggtcgctgccttcctacagcagcaacaattgctgccatacaaccagttctctttgataaaccctgtcttgtcgaggcagcaacccatcgttggaggtgccatcttttaga

SEQ ID NO: 23001 - DNA, 427 bp, Zea mays
  unsure at all n locations
  Clone ID: LIB3152-033-P1-K1-D2
cgcagggtaaccttgtcggcgttggcagcaaccccgattctgttgccagtgcgtcgagtnttctgaggcatcgagtgcagctccgacggcgacgctcctaactgctcgcctcagtgccagtcgttgcggcagcagtgttgccagcagctcaggcaggtggagccgcagcaccggtaccaggcgatctttggtttggtcctccagtccatcctgcagcagcagccgcaaagcggccaggtcgcggtgctgttggcggcgcagatagcgcagcaactgacggcgatgtgcggcctgcagcagccgactccatgcccctacgctgctgccggcggtgtcccccactgaagaaactatgtgctgtagtatagccgctggctagctagctagttgagtcatttagcggcgatgattgagtaataatgtgtca

SEQ ID NO: 23002 - DNA, 416 bp, Zea mays
  Clone ID: LIB3152-033-P1-K1-D3
ccaattcctccttcggatctcgcattcagcgcatcgcaggtgtgaaggaagggggacgcggaggaagatggggctcgcgttcgggaagctcttcagccggctcttcgccaagaaggagatgcggatcctcatggtcggcctcgacgccgccggtaaaaccaccatcctctacaagctcaagctcggcgagatcgtcaccaccatccccaccaatcggtttcaatgttgaaactgttgagtacaagaacattagcttcactgtctgggatgtcgggggtcaggacaagatcagacctctttggaggcattacttccagaacacccagggtcttatttttgttgtggacagcaatgaccgtgaccgtgttgttgaagccagagatgagctccacaggatgctgaacgaggatgagcta

SEQ ID NO: 23003 - DNA, 288 bp, Zea mays
  Clone ID: LIB3152-033-P1-K1-D4
ctagcaacatagaaagcacaatagtgtaccaactttgtcagccaaaatattttgcttccttatgctccttggtctttctgcaagtgctgctaccgcaaccattttcccacaatgctcacaagctcctatagcttcctttcttcccccatacctctcaccagcggtgtcttcagtatgtgaaaacccaattcttcaaccctacaggatccaacaggcaatcgcagcaggcatcttacctttatcacccttgttcctccaacaaccgtcaggccctattacagcaagtta

SEQ ID NO: 23004 - DNA, 382 bp, Zea mays
  unsure at all n locations
  Clone ID: LIB3152-033-P1-K1-D5
cgtcccgctgcaggtaggagcaccgcagcaccggtaccaggcttatcttcggcttggtgcctccagtccatctctggagcagcagtccgcaaagtcggccaggtcgcggggcttgttggcggcgcagataggcgcagcaacctgacgagcgatgtggcggccctgcagcagctcgacttccatgncccctaccgctgctgcgcggcggtggtcccccactcgaagaaactatgtgcctgtagtatagcccgctggctagctagctagttgagtcatttagcggcgatgattgagtaataatgtgtcacgcatcaccatgggtggcagtgtcagtgtgagcaatgacctgaatgaacaattgaaatgaaaagaaaaaagtatt

SEQ ID NO: 23005 - DNA, 408 bp, Zea mays
  Clone ID: LIB3152-033-P1-K1-D6
caacaagcaacatagaaagtggaatccagtagtttctttagagcaacaatggcgaccaagatattgtccctccttatgctccttgctctttctgcatgtgttgctaacgcgacaattttccctcaatgctcacaagctcctatagcttcccttcttcccccataccttccatcaatgatagcttcagtatgtgaaaacccagctcttcaaccctataggctccaacaagcaatcgcagcaagcaacatacctttatcacccttgtttcaacaatcgccagccctatctttggtgcagtcattggtacaaaccatcagggcacagcagctgcagcaactcgtgctacctgtgatcaaccaagtagctctggcaaacctttctccctactctcagcaacaacaatttctt

SEQ ID NO: 23006 - DNA, 410 bp, Zea mays
  unsure at all n locations
  Clone ID: LIB3152-033-P1-K1-D7
atcggaaatggagtgcaattccttaacctacatctgtcgtccaagttgttccaggacaaggagagtttgtaccccttgctgaacttcctcaaggctcataactacaagggcacgacgatgatgttgaatgacagaatccaaagccttcgtggtctccaatcatccctgagaaaggcagaggagtatctactgagtgttcctcaagacactccctactcggagttcaaccataggttccaagagcttggcttggagaagggttggggtgacactgcgaagcgtgtactcgacacactccactngcttctcgaccttcttgaggcccctgatcctgccaacttggagaagttccttggaactataccaatgatgttcaacgttgttatcctttctcctcatggctacttcgc

SEQ ID NO: 23007 - DNA, 410 bp, Zea mays
  Clone ID: LIB3152-033-P1-K1-D8
caacaagcaacatagaaagtggaatccagtatcaacaatagagcaacaatggagaccaagatattttccctccttatgctccttgctctttctacatgtgttgctaacgcgacaattttccctcaatgctcacaagctcctatagcttccctttttcccccataccttccatcaattatagcttcagtatgtgaaaacccagctcttcaaccatataggcttcaacaagcaatcgcagcaagcaacatacctttatcgcccttgttgtgtcaacaatcgccagccctatctttggtgcagtcattggtacaaaccatcagggcacaacagctgcagcaactcgtgctacctgtgatcaaccaagtagctctggcaaacctttctccctactctccgcaacaacaatttct

SEQ ID NO: 23008 - DNA, 407 bp, Zea mays
  Clone ID: LIB3152-033-P1-K1-D9
cttctccgccgcccactccatggaggacgacgccatctcgacgctcatggacatcgacgactcgccgctcagcgctgcgggggccgggttcctcgacgaggaggacggggaaggcgagatgttcttcgccccgcaccgcgcggcccgcggcggcgctggcgatgcccgcgggcccctccccttttccgggttcttcaacagcttcgacggcgccgattttgacgacgacgacctcgcctgagggaactcccacccggttcggtaacggatgttgttcgtggatcgcgaatcgtgttatgtcgataccgtgatggggtctcttaattagcgcatcgattcagactcgtttgggcaatctgaagatgtttagggatcaacattacctttgtgtacctttgtggcctatg

SEQ ID NO: 23009 - DNA, 415 bp, Zea mays
  Clone ID: LIB3152-033-P1-K1-E1
tatttagaccaactagcaacatagaaagcacaatagtgtaccaacaatggcagccaaaatattttgcctccttatgctccttggtatttctgcaagtgctgctacggcgaccattttcccgcaatgctcacaagctcctatagcttcccttcttcccccgtacctctcaccagcggtgtcttcggtatgtgaaaacccaattcttcaaccctacaggatccaacaggcaatcgcagctggcatcttacctttatcacccttgttcctccaacaatcatcagccctattacagcagttacctttggtgcatttattggcacaaaacatcagggcacaacaactacaacaacttgtgctagcaaaccttgctgcctactctcagcaacagcagtttcttccattcaaccaactagct

SEQ ID NO: 23010 - DNA, 52 bp, Zea mays
  Clone ID: LIB3152-033-P1-K1-E10
ctttccctcttcgtcttcgcttggccggtgggttgtgcggtggggatgcggt

SEQ ID NO: 23011 - DNA, 328 bp, Zea mays
  Clone ID: LIB3152-033-P1-K1-E11
gggctgcctgttccgccgcatcacgctctacggcttcgacccgccgcggatcaacgtgggcgggccgtgcttcccggcgctgggcggcatgttcgccaaggccaagtacgagaagcccggactggagctcaccaccaaggccgccgtggccaagggcaagcacggcttcctgcccatgcctaagaagtcgtacggcaagtcggacgcgttcgcggacaccatcccgatggcgtcgcacccgtcgccgttcgcggcggccgccgccgccgtcgtcgtggcggacgaggcgaccatcgccgaggcagtggcggtgtgcgcggcggcgtac

SEQ ID NO: 23012 - DNA, 411 bp, Zea mays
  Clone ID: LIB3152-033-P1-K1-E2
gtcaaacattccgtgatggtttttctattggtgtgttgtcacaggacttctttgtagacgattttaagagccaagggtcacatgtgccatacaatattgctgaattttctacccaggcttctcaaggtggttatggtgttgagttttactcaagcgccccaatctggatactctgggaattatatgaaccaaaattcacatcctggatactcccatattggtacaacaaatgacattgtatctcaggatcacatggcccatggatctcatgggatgtttacacaagcgggatataatgatccctcacaagatgagtcgtctcagattcattatggaatggctgccgctggccctttacagtcgcagggcatgatgaaccccttgtactctcaatcctatgctcactacaac

SEQ ID NO: 23013 - DNA, 409 bp, Zea mays
  Clone ID: LIB3152-033-P1-K1-E3
aatagtgtaccaacaatggcagccaaaatattttgcttccttatgctccttggtctttctgcaagtgctgctacggcgaccattttcccacaatgctcacaagctcctatagcttcccttcttcccccgtacctttcaccagcggtgtcttcggtatgtgaaaacccaattcttcaaccctataggatccaacaggcaatcgcagctggcatcttacctttatcacccttgttcctccaacaatcatcagccctattacagcagttacctttggtgcatttattggcacaaaacatcagggcacaacaactacaacaacttgtgctagcaaaccttgctgcctactctcagcaacaacagtttctttcattcaaccaactagctgcattgaactctgcttcttatttgc

SEQ ID NO: 23014 - DNA, 406 bp, Zea mays
  Clone ID: LIB3152-033-P1-K1-E5
cagaaacacaccaagcgaagcgcactagcaacgacctaacaacaatggctaccaagatattagccctccttgcgcttcttgccctttttgtgagcgcaacaaatgcgttcattattccacaatgctcacttgctcctagtgccattattccacagttcctcccaccagttacttcaatgggcttcgaacacctagctgtgcaagccaacatgcaacaacaagcgcttgcggcgagcgtcttacaacaaccaattgcccaattgcaacaacaatccttgccacatctaacaatacaagccatcacaacgcaacagcaacaacagttcctaccagcactgagccacctagccatggtgaaccctgccgcctacttgcaagagcagctgcttgcatccaacccacttgc

SEQ ID NO: 23015 - DNA, 396 bp, Zea mays
  Clone ID: LIB3152-033-P1-K1-E7
gccgcaccaggagcaaattcctcctctctcgagggcggttgcgtgctcgcgtgaagaaggccggggccctatctctccgatcgcggtagggcgttcgcagcgccgattcgagccgacgattggccgtccgcgaaggtactatttgaacactgaactaaaaattggagtttcttttcttatttgacatcttgatgtgccaaaatcaagctctcgttaaaggtcaaacaaatgggcaaaatttgggctctttgattagttttttcagtgttaagtggtgaatctactgtggtaaatgggagagctgatccagttgatctatatgccttgtgaggactattttgtcctcaataagaatatatgttcaaccatactgtgggacttgggttgcccttagat

SEQ ID NO: 23016 - DNA, 231 bp, Zea mays
  Clone ID: LIB3152-033-P1-K1-E8
tagatcgcgagcggacgccctttctttttttatgttatctgcatgctcgcgtgaagaaggaggtgtccttatctttacgatcgtggaagggtgttagaagtttttaatttagcctattattgtttctgttcgttaaggtactattatgaatattgaactaaaaattgaagtttatttttttaatagatattctagatgtgtcaaaattaagcttttgataatggttataca

SEQ ID NO: 23017 - DNA, 394 bp, Zea mays
  Clone ID: LIB3152-033-P1-K1-E9
attttgagcattcagaaacacaccaagcgaagtgcactagcaacgacctaacaacaatggctaccaagatattagccctccttgcgcttcttgccctttttgtgagcgcaacaaatgcgttcattattccacaatgctcacttgctcctagtgccattattccacagttcctcccaccagttacttcaatgggcttcgaacacctagctgtgcaagccaacatgcaacaacaagcgcttgcggcgagcgtcttacaacaaccaattgcccaattgcaacaacaatccttgccacatctaacaatacaagccatcacaacgcaacagcaacaacagttcctaccagcactgagccacctagccatggtgaaccctgccgcctacttgcaagagca

SEQ ID NO: 23018 - DNA, 342 bp, Zea mays
  Clone ID: LIB3152-033-P1-K1-F1
caaagcggcagtgcgtagagaggatcgtcgaacagaacagcatgaagatggtcatcgttctcgtcgtgtgcctggctctgtcagctgccagcgcctctgcaatgcagatgccctgcccctgcgcggggctgcagggcttgtacggcgctggcgccggcctgacgacgatgatgggcgccggcgggctgacccctacgcggagtacctgaggcagcgagtgcagccgtggcggggcccctactcccggtgtggcagacagcgcatgaccagccgtccggcacaggctgcagcagagatgggatgatggcgtgcagccgtcctcagcagctgagatgatgatgc

SEQ ID NO: 23019 - DNA, 373 bp, Zea mays
  Clone ID: LIB3152-033-P1-K1-F10
agcaaagcggcagtgcgtagagaggatcgtcttacagaacagcatgaagatggtcatcgttctcgtcgtgtgcctggctctgtcagctgccagcgcctctgcaatgcagatgccctgcccctgcgcggggctgcagggcttgtacggcgctggcgccggcctgacgacgatgatgggcgccggcgggctgtacccctacgcggagtacctgaggcagccgcagtgcagcccgctggcggcggcgccctactacgccgggtgtgggcagacgagcgccatgtaccagccgctccggcaacagtgctgccagcagcagatgaggatgatggacgtgcagtccgtcgcgcagcagctgcagatgatgatgcagctt

SEQ ID NO: 23020 - DNA, 405 bp, Zea mays
  Clone ID: LIB3152-033-P1-K1-F11
ctggacgtcagcctagcaattagctcatcgacttcagattggagaactcgacaccatgaaggtgctgatcgttgcccttgctctcctggcgctcgctgcgagcgccgcctccagtacaagcggcggctgtggctgccagacaccaccgtttcatctaccgcctccgttctatatgccgcctccgttctatctgccgccgcagcagcagccgcagccatggcaataccccactcaaccaccgcagctaagcccgtgccagcagttcggatcctgcggcgtcggcagcgtcggcagcccgttcctgggccagtgcgtcgagttcctgaggcaccagtgcagcccggcggcgacgccctacggctcgccacagtgccaggcgctgcagcagcagtgctgccaccagat

SEQ ID NO: 23021 - DNA, 403 bp, Zea mays
  Clone ID: LIB3152-033-P1-K1-F12
cccacgcgtccgcccacgcgtccgccctttctttcgcccacgcgtccgaagattttggtgaggcaatggggttctagggacaagagaaggtgaaggtcaagcagatggcttgaggatcgaggtaccatggctaatgtgaagaagcgattacttgcaagatgtcgacggactaatcagattgtgaagagtcatatagtgatgaagaccacaacattagaagacatgatttgaagtcatctgtttaactcataaatgatgagatgatttaaatcataacactcgagggtttctagctcaagacaagtgacaaagcatggtcaaaagtccaaggaagaaggtatcaaagatagaacctataaagggctcacagttgtgcagactttaagaagaagatagcagtgcg

SEQ ID NO: 23022 - DNA, 373 bp, Zea mays
  Clone ID: LIB3152-033-P1-K1-F2
cggacgcgtgggttgagaccaacaagcaacatttattgtggaatccagtagcaacaatagagcagcaatggcgaccaagatattttccctccttatgctccttgctctttctgcatgtgttgctaacgcgacaattttccctcaatgctcacaagctcctatagcttcccttcttcccccataccttccatcaatgatagcttcagtatgtgaaaacccagctcttcaaccctataggctccaacaagcaatcgcagcaagcaacatacctttatcacccttgtttcaacaatcgccagccctatctttggtgcagtcattggtacaaaccatcaaggcacagcagctgcagcaactcgtgctacctgtgatc

SEQ ID NO: 23023 - DNA, 404 bp, Zea mays
  Clone ID: LIB3152-033-P1-K1-F3
gagaccaacaagcaacatagaaagtggaatccattatcaacaatagagcaacaatggcgaccaagatattttccctccttatgctccttgctctttctgcatgtgttgctaacgcgacaattttccctcaatgctcacaagctcctatagcttcccttcttcccccataccttccatcaatgatagcttcagtatgtgaaaacccagctcttcaaccctataggctccaacaagcaatcgcagcaagcaacatacctttatcacccttgtttcaacaatcgccagccctatctttggtgcagtcattggtacaaaccatcagggcacagcagctgcagcaactcgtgctacctgtgatcaaccaagtagcttctgcaaacctttctccctactctcagcaacaa

SEQ ID NO: 23024 - DNA, 406 bp, Zea mays
  Clone ID: LIB3152-033-P1-K1-F4
atttgttgggggatactaggcgtatgaactagtatctatgcagtgggaactatatcagacagttattcaaaaatgtacctgaacaccaatagtacgttggagaacgttgcttcgaccaggattactatcttcgatctgaaactctgataagcagaattgaagacaaacgatcgggtacttggggaatatggaatttatttactgttggtttacctagtacttgcctaccagccaggcgccccaggggacgacggcaaagatacagtctcgggtattaggatggcaaaggcagcgatagataaattctactccaagtatatgttgggatcacgtaagctggtgcttgacccacattcaacgatctttggcaaaaggatgcttgtcaaaagtgcgatcatgtgctatt

SEQ ID NO: 23025 - DNA, 385 bp, Zea mays
  Clone ID: LIB3152-033-P1-K1-F6
gggagtgagtcgagatccattcccaactgcacctgctttcctcgactggtagcccgaaccctagctagcaggtcggaggcgagagagcagccatggcgcggtgcctcgcgctcgtctccctccttctcctcggcctcgcctccgccgcctccgctgccgatgcgccctttgtcgtcgcgcacaagaaggtttcgctctcccgccccaagccgggcgtcgagcgcgtcgccgtctccctcgacctctacaaccagggatccgcgactgcctatgatgtgtcacttaatgacgactcttggccaacacaagcatttgagcttgtcactggagagaaatcgaagacattgttaaggcttgaccctggtgccactgatacacacacatt

SEQ ID NO: 23026 - DNA, 407 bp, Zea mays
  Clone ID: LIB3152-033-P1-K1-F7
gctcaggcaggtggagccgcagcaccggttcctggcgatcttcggcttggtcctccagtccatcctgcagcagcagccgcaaagcggccaggtcgcggggctgttggcggcgcagatagcgcagcaactgacggcgatgtgcggcctgcagcagccgactccatgcccctacgctgctgccggcggtgtcccccactgaagaaactatgtgctgtagtatagccgctggctagctagctagttgagtcatttagcggcgatgattgagtaataatgtgtcacgcatcaccatgggtggcagtgtcagtgtgagcaatgacctgaatgaacaattgaaatgaaaagaaaaaagtattgtttccaaaaaaattattatattttatatattttttttttatttattaaaa

SEQ ID NO: 23027 - DNA, 407 bp, Zea mays
  Clone ID: LIB3152-033-P1-K1-F8
gcgggggcggcaagcaaccacgggcggagctcttagcgtcctcctcctcccgtctataaatgcccctccttttcttcctccatatataggggccatcagatccaagaagagggaagagcaccaaggaccttcggcgcccgttcaggatccacatcttcccgagcgagttcttggttgacctcttcctcttcggaccacctccaaggctcttggtgtagcttgccactctcaccaatcaagttttcatgtctgatctcgacattcagatcccaactgccttcgatcccttcgctgaggccaatgctggggactctggtgcggcagcagggtcaaaggactacgtacacgtgcgcatccagcagcgtaatggtcgcaagagcctgaccaccgtccagggattgaagaag

SEQ ID NO: 23028 - DNA, 412 bp, Zea mays
  Clone ID: LIB3152-033-P1-K1-F9
cagaaacacaccaagcgaagcgcactagcaacatcctaacaacaatggctaccaagatattatccctccttgcgcttcttgcgctttttgcgagcgcaacaaatgcgtccattattccacaatgctcacttgctcctagttccattattccacagttcctcccaccagttacttcaatggccttcgaacacccagctgtgcaagcctataggctacaacaagcgattgcggcgagcgtcttacaacaaccaattgcccaattgcaacaacaatccttggcacatctaacaatacaaaccatcgcaacgcaacagcaacaacagttcctaccagcactgagccacctagccatggtgaaccctgtcgcctacttgcaacagcagctgcttgcatccaacccacttgctctagc

SEQ ID NO: 23029 - DNA, 404 bp, Zea mays
  Clone ID: LIB3152-033-P1-K1-G1
aatagctcatcgactccagattggagaactcgacatcatgaaggtgctgatcgttgcccgtgctgtcctggcgctcgctgcgagcgccgcctccagtacaagcggcggctgtggctgccagacaccaccgtttcatctaccgcctccgttctatatgccgcctccgttctatctgccgccgcagcagcagccgcagccatggcaataccccactcaaccaccgcagctaagcccgtgccagcagttcggatcctgcggcgtcggcagcgtcggcagcccgttcctgggccagtgcgtcgagttcctgaggcaccagtgcagcccggcggcgacgccctacggctcgccacagtgccaggcgctgcagcagcagtgctgccaccagatcagggaggtggagccgt

SEQ ID NO: 23030 - DNA, 213 bp, Zea mays
  Clone ID: LIB3152-033-P1-K1-G10
aaagcggaggttgggttgccagaaccaccgttaatctaccgtctccgatctatatgccgcctccgatctatctgccgtcgcagcagcagccgcagccatggcaataccccactcaaccaccgcagctaagcccgtgccagcagttcggatcctgcggtgttggcagtgtctgcaagtccgttcctgggccagtgcgttgagttcctgaggcac

SEQ ID NO: 23031 - DNA, 306 bp, Zea mays
  unsure at all n locations
  Clone ID: LIB3152-033-P1-K1-G11
gcacaatagtgtaccaacaatggcagctaaaatattttgcctccttatgctccttggtctttctgcaagtgctgctacggcgaccattttcccacaatgctcacaagctcctatagcttcccttcttcccccgtacctctcaccaacggtgtcttcggtatgtgaaaacccaattcttcaaccctacaggatccaacaggcaatcgcagctggcatcttacctttatcaccctngttcctccaacaatcatcagccctattacagcagttaccttggtgcattattgcacaaacataggcacacac

SEQ ID NO: 23032 - DNA, 379 bp, Zea mays
  Clone ID: LIB3152-033-P1-K1-G12
cgacaagagaaaggattagaaaaaggaattattcatggacatgatctccggcagcactgcagcaacatcaacaccccacaacaaccaacaggcggtgatgttgtcatcctccattataaaggaggaagctaggggaccaaaagaaaccacaaccattgcccaaattaggtgccattgggaacctaagcccaagcccgaactacctgaggcgctcaagtgcccacgctgcgacttcaacaacaccaagttttgctactacaacaattattgcatgttacaaccacgctacttttgcaaggcttgtcggcgctattggacacatggtggtacccttcgcaatgttcccaatggtggtgggtgtcgcaagaacacacatgcc

SEQ ID NO: 23033 - DNA, 422 bp, Zea mays
  Clone ID: LIB3152-033-P1-K1-G2
tccgcccacgcgtcacgatcagggacacaaccaactacaacaacttttggctaccaacaatcaatcaagtaggtgcagcgaaccttgctgcttacctccagcaacaacagtttcttccattcaatcaactagatggggtgaaccctgctatctacttgcaggcacaacagctactaccatttaaccaacttgtcgggagcccttatgccttcttactgcaacaacagcttctaccattccatctgcaagctgtggcaaacattgctgctttcttgagacaacaacatttgttgccattttacccacaggttgtgggaaacattaatgcctttcttgcaacagcaacaattgctaccattctacccacagaatgtggcaaccatggttgccttcttacaacaacaacaattgttgccatttag

SEQ ID NO: 23034 - DNA, 415 bp, Zea mays
  Clone ID: LIB3152-033-P1-K1-G3
gaccaacaagcaacatagaaagtggaatccagtttcaacaatagagcaacaatggagaccaagatattttccctccttatgctccttgctctttctacatgtgttgctaacgcgacaattttccctcaatgctcacaagctcctatagcttccctttttcccccataccttccatcaattatagcttcagtatgtgaaaacccagctcttcaaccatataggcttcaacaagcaatcgcagcaagcaacatacctttatcgcccttgttgtgtcaacaatcgccagccctatctttggtgcagtcattggtacaaaccatcagggcacaacagctgcagcaactcgtgctacctgtgatcaaccaagtagctctggcaaacctttctccctactctccgcaacaacaatttcttt

SEQ ID NO: 23035 - DNA, 411 bp, Zea mays
  unsure at all n locations
  Clone ID: LIB3152-033-P1-K1-G4
ctgggacatccggcccgtcctcgccggtggcgttcaggcagccgccgattccagcgcagaccgctgcgtccgcgtgctcaaggggcacaccaacttcgtcttcagcgctaacttcaacccgcagaccagctcgcagatcgcttccggaggatttgattgtaccgtgcgcatatgggacgccacgagtggccggtgcacccgcgccatcgaagcgcactctgagcccgtcacctccgtgcatttcattagggacggatccatcgttgtatccggaagccatgacgggagctgcaagatctgggacgccaagagcggngcttgcctcaagacggtcatcgatgaaaagaagcccgcagtgtccttctccatgttctcgcccaatggcaaagttatcctcgttgccatgctcgt

SEQ ID NO: 23036 - DNA, 401 bp, Zea mays
  Clone ID: LIB3152-033-P1-K1-G5
ttcagcattcagaaacacaccaagcgaagcgcactatcaacaacctaacaacaatggctaccaagatattagccctccttgcgcttcttgcccttttagtgagcgcaacaaatgcgttcattattccacagtgctcacttgctcctagtgccattattccacagttcctcccaccagttacttcaatgggcttcgaacatccagccgtgcaagcctacaggctacaactagcgcttgcggcgagcgtcttacaacaaccaattgcccaattgcaacaacaatccttggcacatctaaacctacaaaccatcgcaacgcaacagcaacaacagtttctgccatcactgagccacctagccgtggtgaaccctgtcgcctacttgcaacagcagctacttgca

SEQ ID NO: 23037 - DNA, 127 bp, Zea mays
  Clone ID: LIB3152-033-P1-K1-G6
agcgctctcactagcctcgcattccgtccctgcttttctagggcaggccgctgaggtctgggagaggaggaggaggaagaaattgcctctacggttaagccgtcggattgcatgttgttccttttct

SEQ ID NO: 23038 - DNA, 400 bp, Zea mays
  Clone ID: LIB3152-033-P1-K1-G7
gagcattcagaaacacaccaagcgaagcgtactatcaacgacctaacaacaatggctaccgaggatattagccctccttgcgcttcttgccctttttgtgagcgcaacaaatgcgttcattattccacaatgctcacttgctcctagtgccattattccacagttcctcccaccagttacttcaatgggcttcgaacacctagctgtgcaagccaacatgcaacaacaagcgcttgcggcgagcgtcttacaacaaccaattgcccaattgcaacaacaatccttgccacatctaacaatacaagccatcacaacgcaacagcaacaacagttcctaccagcactgagccacctagccatggtgaaccctgccgcctacttgcaagagcagctgcttgca

SEQ ID NO: 23039 - DNA, 373 bp, Zea mays
  Clone ID: LIB3152-033-P1-K1-G8
agaaagcacaatagtgtaccaacaatggctgctataaatattttgcttccttatgctccttggtctttctgcaagtgctgctaccgcaaccattttcccacaatgctcacaagctcctatagcttcctttcttcccccatacctctcaccagcggtgtcttcagtatgtgaaaacccaattcttcaaccctacaggatccaacaggcaatcgcagcaggcatcttacctttatcacccttgttcctccaacaaccggcaagccttattacagcagttacctttggtgcatttgttggcacaaaacatcaaggcacaacaactacaacaacttgtgctaggaaaccttgctgcctactctcagcaacagcagtt

SEQ ID NO: 23040 - DNA, 394 bp, Zea mays
  Clone ID: LIB3152-033-P1-K1-G9
gttgccagcagctcaggcaggtggagccgtagtaccggtaccaggcgatcttcggcttggtcctccagtccatcctgcagcagcagccgcaaagcggccaggtcgcggggctgttggcggcgcagatagcgcagcaactgacggcgatgtgcggcctgcagcagccgactccatgcccctacgctgctgccggcggtgtcccccactgaagaaactatgtgctgtagtatagccgctggctagctagctagttgagtcatttagcggcgatgattgagtaataatgtgtcacgcatcaccatgggtggcagtgtcagtgtgagcaatgacctgaatgaacaattgaaatgaaaagaaaaaagtattgttccaaaaaatatatattttttttttt

SEQ ID NO: 23041 - DNA, 401 bp, Zea mays
  Clone ID: LIB3152-033-P1-K1-H1
cgcaatgctcgcaagctcctatagcttcccttcttccttcgtacctctcaccagcggtgtcttcggtatgtgaaaacccaattcttcaaccctacaggatccaacaggcaatcgcagctggcatcttacctttatcacccttgttcctccaacaatcatcagccctattacaacagttacctttggtgcatttattggcacaaaacatcagggcacaacaactacaacaacttgtgctagcaaaccttgctgcctactctcagcaacagcagtttcttccattcaaccaactaggttcattgaactctgcttcttatttgcaacaacaacaactaccattcagccagctacctgctgcctacccccagcaattttttccattcaaccaactagcagcattg

SEQ ID NO: 23042 - DNA, 399 bp, Zea mays
  Clone ID: LIB3152-033-P1-K1-H10
gagcattcagaaacacaccaagcgaagtttcctagcaacgacttaacaacaatggctaccaagatattagccctccttgcgcttcttgccctttttgtgagcgcaacaaatgcgttcattattccacaatgctcacttgctcctagtgccattataccacagttcctccgaccagttacttcaatgggcttcgaacacctagctgtgcaagcctacaggctacaacaagcgcttgcggcgagcgtcttacaacaaccaattaaccaattgcaacaacaatccttggcacatttaaccatacaaaccatcgtaacacaacagcaacaacagtttctaccagcactgtgccaactagatgtggggaaccctgtcgcctacttgcaacagcaggtgctttga

SEQ ID NO: 23043 - DNA, 403 bp, Zea mays
  Clone ID: LIB3152-033-P1-K1-H11
cggacgcgtgggttttcagcattcagaatcacaccaagcgaagcgcactagcaacaacctaacaacaatggctaccaagatattagccctccttgcgcttcttgcccttttagtgagcgcaacaaatgcgttcattattccacagtgctcacttgctcctagtgccattattccacagttcctcccaccagttacttcaatgggcttcgaacatccagccgtgcaagcctacaggctacaactagcgcttgcggcgagcgtcttacaacaaccaattgcccaattgcaacaacaatccttggcacatctaaacctacaaaccatcgcaacgcatcagcaacaacagtttctgccatcactgagccacctagccgtggtgaaccctgtcgcctacttgcaacag

SEQ ID NO: 23044 - DNA, 262 bp, Zea mays
  Clone ID: LIB3152-033-P1-K1-H12
ggaagggtcgggtagagcgacgcgttcggagcatagatcgagagcggcaggcgaagctcattagttttattttaacaacaatggctaccatttttttttttttttttgggatttttttttttgatattttttttttttatttttttttattttttattttttttggggaaaaaaaaattttttttttgaattaaatggggaatttgggggattgtgaaaattgaaatgggtactattgggggggggggaaaaatttatattt

SEQ ID NO: 23045 - DNA, 220 bp, Zea mays
  Clone ID: LIB3152-033-P1-K1-H2
gcaacatagaaaaggtggaatccagtagcaacaatagttcaacaatggagaccaaggatattttccctccttatgctccttgctctttctacatgtgttgctaacgcgacaattttccttaagctacagctctatgcttccttttcccaaccttcataattagctcagatggaaccagtttacataagctacagcatgagagaaactatgctgtggacat

SEQ ID NO: 23046 - DNA, 367 bp, Zea mays
  Clone ID: LIB3152-033-P1-K1-H3
gcgaagcacattagcaacaacctaacaacaatggctaccaagatattatccctccttgcgcttcttgcgctttttgcgagcgcaacaaatgcgttcattattccacaatgctcacttgctccaagttccattattacacagttcctcccaacagttacttcaatgggcttcgaacacccagctgtgcaagcctataggctacaacaagcaattgcggcgagcgtcttacaacaaccaatttcccagttgcaacaacaatccttggcacatctaacaatacaaaccatcgcaacgcaacagcaacaacaaattctaccagcactgagccacctagccatggtgaaccctgccgcctacttgcaacagc

SEQ ID NO: 23047 - DNA, 350 bp, Zea mays
  Clone ID: LIB3152-033-P1-K1-H4
agcctagcaattagctcatcgactccagattgtttaactcgacaccatgaaggtgctgatcgttgcccttgctctcctggcgctcgctgcgagcgccgcctccagtacaagcggcggctgtggctgccagacaccaccgtttcatctaccgcctccgttctatatgccgcctccgttctatctgccgccgcagcagcagccgcagccatggcaataccccactcaaccaccgcagctaagcccgtgccagcagttcggatcctgcggcgtcggcagcgtcggcagcccgttcctgggccagtgcgtcgagttcctgaggcaccagtgcagcccgggggcgacgccctacg

SEQ ID NO: 23048 - DNA, 370 bp, Zea mays
  unsure at all n locations
  Clone ID: LIB3152-033-P1-K1-H5
aagcaacatagaaagtggaatccagtagcaacattagagcaacaatggcgaccaagatattttccctccttatgctccttgctctttctgcatgtgttgctaacgcgacaattttccctcaatgctcacaagctcctatagcttcccttcttcccccataccttccatcaatgatagcttcagtatgtgaaaacccagctcttcaaccctataggctccaacaagcaatcgcagcaagcaacatacctttatcacccttgtntcaacaatcgccagccctatctttggtgcagtcattggtacaaaccatcagggcacagcagctgcagcaactcgtgctacctgtgatcaaccaaggtagctttggcaa

SEQ ID NO: 23049 - DNA, 356 bp, Zea mays
  Clone ID: LIB3152-033-P1-K1-H6
acccattctgagcattcagaaacacaccaagcgaagtttactatcaacgacctaacaacaatggctaccaagatattagccctccttgcgcttcttgccctttttgtgagcgcaacaaatgcgttcattattccacaatgctcacttgctcctagtgccattattccacagttcctcccaccagttacttcaatgggcttcgaacacctagctgtgcaagccaacatgcaacaacaagcgcttgcggcgagcgtcttacaacaaccaattgcccaattgcaacaacaatccttgccacatctaacaatacaagccatcacaacgcaacagcaacaacagtttctaccagcactgag

SEQ ID NO: 23050 - DNA, 270 bp, Zea mays
  Clone ID: LIB3152-033-P1-K1-H8
cggacgcgtgggtttcagcattcagaaacacattaagcgaagcgcactagcaacaacctaacaacaatggctaccaagatattagccctccttgcgcttcttgcccttttagtgagcgcaacaaatgcgttcattattccacagtgctcacttgctcctagtgccattattccacagttcctcccaccagttacttcaatgggcttcgaacatccagccgggcaagcctacaggctacaactagcgcttgcggtgagctgtttacaacaa

SEQ ID NO: 23051 - DNA, 125 bp, Zea mays
  unsure at all n locations
  Clone ID: LIB3152-033-P1-K1-H9
attttcagcattcagaaacacaccaagcgtaagcgtcactancaacaacctaacaacaatggctaccaagatattagccctccttgcgcttcttgcccttttagtgagcgcaacaaatgcgttca

SEQ ID NO: 23052 - DNA, 261 bp, Zea mays
  unsure at all n locations
  Clone ID: LIB3152-034-P1-K1-A1
ggaaacattaatgccttcttgcaacagcaacatttgctaccattctacccacagaatgtggcgaaacattgttgccttcttacaacaacaacaattgttgccatttagccaacatgctttgacgaatcctaccaccttattgcaaccgcccaccattggtggtgccatcttctagattttntatgatttatactgtaataataaagttctcatgctgatatgtgcgacctctcagtataaagtattagagatctattattt

SEQ ID NO: 23053 - DNA, 355 bp, Zea mays
  Clone ID: LIB3152-034-P1-K1-A10
ggaaacccggcccgacccacgcgtccgcttcagtatgtgaaaacccatctcttcaaccatttatgcttcaacaagcaatcgcagcaggcaacataccttccatcaattatagcttcagtatgtgaaaacccagctcttcaaccatataggcttcaacaagcaatcgcagcaagcaacatacctttatcgcccttgttgggtcaacaatcgccagccctatctttggtgcagtcattggtacaaaccatcagggcacaacagctgcagcaactcgtgcttcctgtgatcaaccaagtagctctggcaaaccttttttcctacttttcgcaacaacaatttctttcatttaaccaac

SEQ ID NO: 23054 - DNA, 421 bp, Zea mays
  Clone ID: LIB3152-034-P1-K1-A11
cgctagcaacatacatagtgaagtacagtagctttattttagcaccaatggcagccaaggggggtgccctccttgccctccttgctctttcagcaagtgttgctaccgcgactattattccacaatgctcacaacaatacctctctccggtgacagccgcgagatttgaatacccaactatacaatcctacaggctacaagaggccatcacagcaagcatcttacggtcgttagcattgactgtccaacaaccatatgccctattgcaacaaccatccttagtgaatctatatctccaaagaatcgcagcacaacaactacaacagcagttgcttccaacaatcaatcaagtagttgcagcgaaccttgctgcttaccttcagcaacaacaatttcttccattcaatcaactagctggggt

SEQ ID NO: 23055 - DNA, 426 bp, Zea mays
  Clone ID: LIB3152-034-P1-K1-A12
acccggcccgacccacgcgtccgccgcctacctacaacagcaacaactgcttttatttatccctctcgttgtgggtaatgcgggtacatacctgcaacaacaattgctgcaacagattgtaccagctctgactcagctagctgtggcaaaccctgctgcctacttgcaacagctgcttccattcaaccaactgactgtgtcgaactctgctgcgtacctacaacagcgacaacagttacttaatccactagcagtgcctaacccattggtcactgccttcctacagcagcaacaattgctaccatacagccagttctctttgatgaaccctgccttgtcgtggcagcaacccatcgctggaggtgtcatcttttagattacatatgagatgtaatcgataatggtgccctcataccggaatgtgtt

SEQ ID NO: 23056 - DNA, 343 bp, Zea mays
  unsure at all n locations
  Clone ID: LIB3152-034-P1-K1-A2
gcaacattagaaaggtggaatacttagtagcaaccaatttgagtcatctaatggcgnngccaagatatttggccagtgccttatgtctccttgctctttcntgcatcgtgttgctaacccgcgaccatttttcctcaatacctcacnnaagctcctatagctgcccttcttcccccataccttccatcaatgaccgcttcagtatgtgaaaacccagcccttcaaccctacaggctccaacaagcaatcgcaacaagcaacttacctttatcacccctgttctttcaacaatcgccagccctatctttggggcagtcattggtacaaaccatcaaggcacaac

SEQ ID NO: 23057 - DNA, 402 bp, Zea mays
  Clone ID: LIB3152-034-P1-K1-A3
attgagaccaacaagcaacatagaaagtggaattcattagcaacaatagagcaacaatggcgaccaagatattttccctccttatgctccttgctctttctgcatgtgttgctaacgcgacaattttccctcaatgctcacaagctcctatagcttcccttcttcccccataccttccatcaatgatagcttcagtatgtgaaaacccagctcttcaaccctataggctccaacaagcaatcgcagcaagcaacatacctttatcacccttgtttcaacaatcgccagccctatctttggtgcagtcattggtacaaaccatcagggcacagcagctgcagcaactcgtgctacctgtgatcaaccaagtagctctggcaaacctttcttcctactctcagc

SEQ ID NO: 23058 - DNA, 460 bp, Zea mays
  unsure at all n locations
  Clone ID: LIB3152-034-P1-K1-A5
cggcncgaccccacgcgtnccgcttggctcctagnntgccattattccactagttcctttttttcatgttacttcaatgggncttcgaggggggcagtccgtgcaagctctacagtgctactaactagcgctttgctgcgaagcgtcttacaacaacccaattgcccaattgcaacaacaatctcttggcacatctaaacctacaaaccatcgcaacgcaacagcaacaacagtttctgccatcactgagccacctagccgtggtgaaccctgtcgcctacttgcaacagcagctacttgcatccaacccacttgctctggcgaacgtagctgcataccagcaacaacaacgtctgcaacagtttatgccagcgctcagtcaactagccatggtgaaccctgtcgcctacctacaacagcaacaattgctttcatctagcccgctcgctgtgggcaatgc

SEQ ID NO: 23059 - DNA, 363 bp, Zea mays
  unsure at all n locations
  Clone ID: LIB3152-034-P1-K1-A6
gggcccgaccaacgcttccgnagaccaacaagcaaaaaataaagtggaatctaatactatcaattgagcaacaatggcgacgaagatattttccttccttatgctccttgctattactgcatgtgttgctaacacgacaattatactctcaatgctcacaagctcctatagcttcccttcttcccccataccttccatcaatgatagcttcagtatgtgaaaacccagctcttcaaccctataggctccaacaagcaatctcagcaagcaacatacctttatcacccttgttttaacaattgccagccctatcttttggtgcagacattggtacaaaccatcagggcacagtagctgcatcat

SEQ ID NO: 23060 - DNA, 271 bp, Zea mays
  Clone ID: LIB3152-034-P1-K1-A7
acccactctttcgctgacgcacaatcacattcttaaccggtttcattattaatcaccaaaacaccaacgctcgccataaatataaaccttcctgatcatcctacatttttcgttacctcaacataacacttcatcatttcataaaaccttctaacttctaattccatcattacaaaccccataccatcaatcactgaaagctacatcatacacacacctatccatgcaaacctatatcatcaaacaatcaataccagcattcaacatcaat

SEQ ID NO: 23061 - DNA, 54 bp, Zea mays
  Clone ID: LIB3152-034-P1-K1-A9
atcacctactatagtcaacatcacctgtcttatattcattccaatccacaccaa

SEQ ID NO: 23062 - DNA, 52 bp, Zea mays
  Clone ID: LIB3152-034-P1-K1-B10
gcacacactatacgcaacaaaaccggacttttttttattcctatccacatca

SEQ ID NO: 23063 - DNA, 398 bp, Zea mays
  Clone ID: LIB3152-034-P1-K1-B11
tcggaacaaggccaagaccatggatatggccaggcttctcttctcctaaaatttggctaagcgcatctcctttccatgcaacctttccatgactagtgtcagctaaacttggttcttgcactaatagttccttcaacgcaaccttgtaaaagcataagtgtactcattaagcgttatggaagaagtatttcaaatcagtaaaatgtagcacatttgcaaagtttattgtaccacatgtgggtttgtgttctttgtgatgttactcttgtgtgtattgatatacaatacagccctatggtggtattcttctctgaatctctttctctttgttccaaattatattttcttaatttatgtaaggacattactgtttgttctagaattttaattttcttttt

SEQ ID NO: 23064 - DNA, 402 bp, Zea mays
  Clone ID: LIB3152-034-P1-K1-B12
tgccactaccctactcaaccgccccggcctcagtctcatccccagccacacccatgcccgtgccaacagccgcatccaagcccgtgccagctgcagggaacctgcggcgttggcagcaccccgatcctgggccagtgcgtcgagtttctgaggcatcagtgcagcccgacggcgacgccctactgctcgcctcagtgccagtcgttgcggcagcagtgttgccagcagctcaggcaggtggagccgcagcaccggtaccaggcgatcttcggcttggtcctccagtccatcctgcagcagcagccgcaaagcggccaggtcgcggggctgttggcggcgcagatagcgcagcaactgacggcgatgtgcggcctgcagcagccgactccatgcccctacgct

SEQ ID NO: 23065 - DNA, 313 bp, Zea mays
  Clone ID: LIB3152-034-P1-K1-B2
tcgaaaaaaaaaaaaaataaaaaaaaaaaaaaaaaattttttaaaaaaaaaaaaaaaaaaaaaaaaaaaaataaaaaaaaataaatataataaaaaaaataattaataaataaatggggtggtagattttgtgtatttattttattctttttttttatttttttttttgtttttatttttttttttttttatattttttttttttttttttttttttttttatttttttttttttttttttttgtttttatttttttattttttttttttttttttttttttattattttttttttttttttttttttttttt

SEQ ID NO: 23066 - DNA, 289 bp, Zea mays
  Clone ID: LIB3152-034-P1-K1-B3
aattagctcatcgactccagattggagaactcttcaccatgaaggtgctgatcgttgcccttgctctcctggcgctcgctgcgagcgcctcctacagtacaagcggcggctgtgtcttgtcattcactaccgtttcatctaccgccttcgttctatttgccgcctccgaactatctgccgccgtattagcattctcatcctttttaattacctctctttaccatcttattttaattctttgtctgtatatctatttctttatcgttctttgtgttttcatacttttttt

SEQ ID NO: 23067 - DNA, 77 bp, Zea mays
  Clone ID: LIB3152-034-P1-K1-B7
gaaaggaataatatataaggaaaaaagatgtttttatactaaaaaaaaaaaaaaaaagaggggaaattttaaaatca

SEQ ID NO: 23068 - DNA, 371 bp, Zea mays
  Clone ID: LIB3152-034-P1-K1-B8
caacaagcaacatagaaagtggaatccagtttctatcaatagagcaacaatggagaccaagatattttccctccttatgctccttgctctttctacatgtgttgctaacgcgacaattttccctcaatgctcacaagctcctatagcttccctttttcccccataccttccatcaattatagcttcagtatgtgaaaacccagctcttcaaccatataggcttcaacaagcaatcgcagcatgcaacatacctttatcgcccttgttgtgtcaacaatcgccagccctatctttggtgcagtcattgtgacaaaccattatggcacaacagctgcagcaactcgtgctaccttgtgatcaaccaagtagct

SEQ ID NO: 23069 - DNA, 166 bp, Zea mays
  Clone ID: LIB3152-034-P1-K1-B9
agcacccatctctcgctcgaactccggacttttttcatctcctcccgacatctactttgggaggctcgcgaaccttcacaatggcctcaaccgttgtgtcggtcgacgtgaagctctacaagcttcgtgctgaggacgccaaacttattcagatcagcgagatctt

SEQ ID NO: 23070 - DNA, 437 bp, Zea mays
  unsure at all n locations
  Clone ID: LIB3152-034-P1-K1-C1
cgggnnggaccaacgcgtccgcgatgaagaagaccagttcccctttcctgattgttttgttcctcacagcagcagccatgggggccgagccggagaagcaggcggcccccgcggcacaggagacggccgtgcacatcgtgtacgttgaccgccccgaggacgccgaccctgaggagttccacatccgcaccctcacccccgtcctcggcagcgaacagaaggccagggacgcagtgctctaccactacaagaacgccgccagcggcttctccgcgaagctcaccccccagcaggtcaaggatctcaaggagcaaccaggtgttctccaggttgtgccgagccagacttaccagctacatggtcctgggtctggcactcaccagggcacgacacacaccttgggccttatgtgaaggcgtatgagaatcaagaagatt

SEQ ID NO: 23071 - DNA, 409 bp, Zea mays
  Clone ID: LIB3152-034-P1-K1-C10
aggcaatcacagctggcatcttacctttattatccttgttcctccaacaatcatcagccctattacatcagttacctttggtgcatttattggcacaaaacatcagggcacaacaactacaacaacttgtgctagcaaaccttgctgcctactctcagcaacagcagtttcttccattcaaccaactagctgcattgaactctgcttcttatttgcaacaacaacaactaccattcagccagctacctgctgcctacccccagcaatttcttccattcaaccaactggcagcattgaactctcctgcttatttacagcagcaacaactactaccattcagccagctagctggtgtgagccctgctaccttcttgatacaaccacagttgttgccgttctaccagcacgc

SEQ ID NO: 23072 - DNA, 415 bp, Zea mays
  Clone ID: LIB3152-034-P1-K1-C12
ctcatcgactccagattggagaactcgacaccatgaaggtgctgatcgttgcccttgctgtcctggcgctcgctgcgagcgccgcctccagtacaagcggcggctgtggctgccagacaccaccgtttcatctaccgcctccgttctatatgccgcctccgttctatctgccgccgcagcagcagccgcagccatggcaataccccactcaaccaccgcagctaagcccgtgccagcagttcggatcctgcggcgtcggcagcgtcggcagcccgttcctgggccagtgcgtcgagttcctgaggcaccagtgcagcccggcggcgacgccctacggctcgccacagtgccaggcgctgcagcagcagtgctgccaccagatcaagcaggtggagccgatgcaccggtaccaggc

SEQ ID NO: 23073 - DNA, 409 bp, Zea mays
  Clone ID: LIB3152-034-P1-K1-C2
accaagcgaagctacctagcaacgacttaacaacaatggctaccaagatattagccctccttgcgcttcttgccctttttgtgagcgcaacaaatgcgttcattattccacaatgctcacttgctcctagtgccattataccacagttcctccgaccagttacttcaatgggcttcgaacacctagctgtgcaagcctacaggctacaacaagcgcttgcggcgagcgtcttacaacaaccaattaaccaattgcaacaacaatccttggcacatctaaccatacaaaccatcgcaacacaacagcaacaacagttcctaccagcactgagccaactagatgtggtgaaccctgtcgcctacttgcaacagcaggtgcttgcatccaacccacttgctctggcaaacgt

SEQ ID NO: 23074 - DNA, 418 bp, Zea mays
  Clone ID: LIB3152-034-P1-K1-C3
cggacgcgtgggttcagaaacacaccaagcgattcgcactagcaacaacctaacaacaatgggtaccaagatattatccctccttgcgcttcttgcgctttttgcgagcgcaacaaatgcgtccattattccacaatgctcacttgctcctagttccattattccacagttcctcccaccagttacttcaatggccttcgaacacccagctgtgcaagcctataggctacaacaagcgattgcggcgagcgtcttacaacaaccaattgcccaattgcaacaacaatccttggcacatctaacaatacaaaccatcgcaacgcaacagcaacaacagttcctaccagcactgagccacctagccatggtgaaccctgtcgcctacttgcaacaagagctgtttgcattcaacccactt

SEQ ID NO: 23075 - DNA, 147 bp, Zea mays
  Clone ID: LIB3152-034-P1-K1-C5
tggcgctttgttcggaaatccggtgcccgctctttgttcgatgaacttctaccaccaccggaggggtatgtgggcagcagctggccaggtggacatgggggcagcggctggccagatggacatggtagcagctggctctggcgctgt

SEQ ID NO: 23076 - DNA, 261 bp, Zea mays
  Clone ID: LIB3152-034-P1-K1-C6
ccaactagcatcatataaggcacattactgttttttctattggcagccaaaatattttgccgggcgatgctccttggactatctgcaagtgctgctacggtgaccattttcccgaaatgctcgcaagctcctaaagctttccttctttcctcgtacctatcaccagcggtgtcttatgtatgtgaaaacctatttcttcaaccttacatgattcaacagtcaatcacatatttctattttacttttattcacccttgtttc

SEQ ID NO: 23077 - DNA, 393 bp, Zea mays
  Clone ID: LIB3152-034-P1-K1-C7
ccaacaagcaacatagaaagtggaatacatttttatacaatagagcaacaatggcggccgggatattttccatccttatgctccttgctctttctgcatgtgttgctaacgcgaccatttttcctcaatactcacaagctcctatagctgcccttctttcctcatacctttcatcaatgaccgcttcagtatgtgaaaacccagtccttcaaccctacaggctccaacaagcaatcgcatcaagcaacatatccttatcgcccttgttgtgttaacaaatctccagccctttttttggtgcattcatttggtactaaccatctaggcacaactaatttattattctgggcctctgtgtgattaatctaatagtatttgcttgcttttatttcc

SEQ ID NO: 23078 - DNA, 413 bp, Zea mays
  Clone ID: LIB3152-034-P1-K1-C8
gagcattcagaaacacaccaagcgaagcgtctattatcaacgacctaacaacaatggctacggggatattatccctccttgcgcttcttgccctttttgtgagcgcaacaaatgcgttcattattccacaatgctcacttgctcctagtgccattatttcacagttcctcccaccagttacttcaatgggcttcgaacacctagctgtgcatgccaacatgcaacaacaagcgcttgcggcgagcgtcttacaacaaccaattgcccaattgtaacaacaatccttgccacatctaacaatacaagccattacaacgcatcagcaacaacagtttctaccagctctgagccacctagccatggtgaaccctgccgcctacttgcaagagtagttgcttgcattccacccactt

SEQ ID NO: 23079 - DNA, 398 bp, Zea mays
  Clone ID: LIB3152-034-P1-K1-C9
ggcaatcacagctggcatcttacctttattattcttgttcctccaacaatcatcaggccgattacatcagttacctttggtgcatttattggcacaaaacatcagggcacaacaactacaacaacttgtgctagcaaaccttgctgcctactctcagcaacagcagtttcttccattcaaccaactagctgcattgaactctgcttcttatttgcaacaacaacaactaccattcagccagctacctgctgtctacccccagcaatttcttccattcaaccaactggcagcattgaactctcctgcttatttacagcagcaacaactactaccattcagccagctagctggtgtgagccctgctaccttcttgatacaaccacagttgttgtcgttct

SEQ ID NO: 23080 - DNA, 417 bp, Zea mays
  Clone ID: LIB3152-034-P1-K1-D1
attgagaccaactagcaacatagaaagcacaattgtttaccaacaatggcagccaaaatattgtgcctccttatgctccttggtctttctgcaagtgctgccacggcgaccattttcccgcaatgctcgcaagctcctatagcttcccttcttcccccgtacctctcaccagcggtgtcttcggtatgtgaaaacccaattcttcaaccctacaggatccaacaggcaatcgcagctggcatcttacctttatcacccttgttcctccaacaatcatcagccctattacaacagttacctttggtgcatttattggcacaaaacattagggcacaacaactacaacaacttgtgctagcaaaccttgctgtctactctcagcaacagcagtttcttccattcaaccaactaggttca

SEQ ID NO: 23081 - DNA, 413 bp, Zea mays
  Clone ID: LIB3152-034-P1-K1-D10
tagcaacatagaaagcacaatagtgtaccatctttggcagccaaaatattttgcctccttatgctccttggtctttctgcaagtgctgctacggcgaccattttcccgaaatgctcgcaagctcctatagcttcccttcttcccccgtacctctcaccagcggtgtcttcggtatgtgaaaacccaattcttcaaccctacaggatccaacaggcaatcacagctggcatcttacctttatcacccttgttcctccaacaatcatcagccctattacatcagttacctttggtgcatttattggcacaaaacatcagggcacaacatctacaacaacttgtgctagcaaaccttgttgtcaacttttagtaacagtagtttcttccattctacctactagcttgattgaactc

SEQ ID NO: 23082 - DNA, 319 bp, Zea mays
  Clone ID: LIB3152-034-P1-K1-D11
cggacgcgtgggcggacgcgtgggctggactacatgcctagcaattagctcatcgactgcggattggagaactcgacaccatgaaggtgctgatcgttgcccttgctctcctggcgctcgctgcgagcgccgcctccagtacaagcggcggctgtggctgccagacaccaccgtttcatctaccgcctccgttctatatgccgcctccgttctatctgccgtcgcagcagcatccgcagccatggcattacctcactcaaccaccgcagctaatcccgtgccagcagttcggatcctgcggtttttgcagctgtcttta

SEQ ID NO: 23083 - DNA, 392 bp, Zea mays
  Clone ID: LIB3152-034-P1-K1-D12
cggacgcgtgggctggacgtcagcctagctttttgctcatcgactccagattggagaagcgcgcaccatgaaggtgctgatcgttgcccttgctctcctggcgctcgctgcgagcgccgcctccagtacaagcggcggctgtggctgccagacaccaccgtttcatctaccgcctccgttctatatgccgccttcgttctatctgccgccgcagcagcagccgcagccatggcaataccccactcaaccaccgcagctaagcccgtgccagcagttcggatcctgcggcgtcggcagcgtcggcagcccgttcctgggccagtgcgtcgagttcctgaggcaccagtgcagcccggcggcgacgccctacggctcgtcacagtgccaggcgc

SEQ ID NO: 23084 - DNA, 410 bp, Zea mays
  Clone ID: LIB3152-034-P1-K1-D2
ttgaagagctgggttttcaaccatataggcttcaacaagcaatcgcagcaagcaacatacctgtatcgcccttgttgtgtcaacaatcgccagccctatctttggtgcagtcattggtacaaaccatcagggcacaacagctgcagcaactcgtgctacctgtgatcaaccaagtagctctggcaaacctttctccctactctccgcaacaacaatttcttccattcaaccaactgtctacactgaaccctgctgcttatttgcagcaacaactattaccatttagccagctagctactgtctactctcaacaacaacaacttcttccatttaaccaattggccgcactgaaccccgctgcttatttgcagcagcaaatactactaccatttagccagttagcttcagta

SEQ ID NO: 23085 - DNA, 420 bp, Zea mays
  Clone ID: LIB3152-034-P1-K1-D3
cagaaacacaccaagcgaagcgcactagcaacatcctaacaacaatggctaccaagatattatccctccttgcgcttcttgcgctttttgcgagcgcaacaaatgcgtccattattccacaatgctcacttgctcctagttccattattccacagttcctcccaccagttacttcaatggccttcgaacacccagctgtgcaagcctataggctacaacaagcgattgcggcgagcgtcttacaacaaccaattgcccaattgcaacaacaatccttggcacatctaacaatacaaaccatcgcaacgcaacagcaacaacagtttctaccagcactgagccacctagccatggtgaaccctgtcgcctacttgcaacagcagctgcttgcatccaacccacttgctctagcaaacgtag

SEQ ID NO: 23086 - DNA, 438 bp, Zea mays
  Clone ID: LIB3152-034-P1-K1-D5
cggggcggaccaacgcgtccgggaacacttgtcaccgcaggtccagagacagataatggcatgctggatagcctaggggatgtattgaagctgctggatgtttcatctgctgaaaatgttctgccaacaacatacggtagcttacaacctccactcgggaaacatcgcttgaagattgttgagttcatctctgttcttctatcaattggtagtgcagctgccgaaacacgactgattcaactaggagcaatcaagcatgctatagatctattttttgagtacccgtttaacaacttcttgcaccaccatgtcgagaatatcatcggctcatgtttggagagtaagcaggatcgactgattggccatgtccttgatgactgtaaacttgttacaagaattttggatgcagagaagaactctgctctgtcgtcagattta

SEQ ID NO: 23087 - DNA, 393 bp, Zea mays
  Clone ID: LIB3152-034-P1-K1-D6
attttgagcattcaaaaacacaccaagcgatgctctctagcaacaacctaacaacaatggcgtgcgaatatattatccctccttgcgcttcttgcgctttttgcgagcgcaacaaatgcgtccattattccacaatgctcacttgctcctagttccattattccacagttcctcccaccagttacttcaatggccttcgaacacccagctgtgcaagcctataggctacaacaagcgattgctgcgagcgtcttacaacaaccaattgcccaattgcaacatcaatccttgtcacatttaacaatacataccattgtaacgcaacatcaacaacagttcctaccagcactgagccacctagccatggtgaaccctgtcgtctacttgcaacag

SEQ ID NO: 23088 - DNA, 335 bp, Zea mays
  Clone ID: LIB3152-034-P1-K1-D7
gcgaagcacattagcaacaacctaacaacttttgctaccaagatattatccctccttgcgcttcttgcgctttttgcgagcgcaacaaatgcgttcattattccacaatgcttacttgcttcaagttccattattacacaggttcttccaccagttactttaatgggctttgaacacccatctgtgcatgcctattggcttcaacaagcaattgcggtgagcgtttttcaacaaccaatattccatttgcaacaacaatccttgttcacatttaacaattcataccattgcaactcaacagcatcactattttctactactactgagccacctat

SEQ ID NO: 23089 - DNA, 259 bp, Zea mays
  Clone ID: LIB3152-034-P1-K1-D8
attcagaaacacaccaagcgaagcacatttttttctaacctaacaacaatggctaccaagagattattcctccttgcgcttcttgcgctttttgcgagcgcaacaaatgcgttcattattccacaatgctcacttgctccaagtttcattattacacagttccttccaccagttactttaatgggcttctaacacccagttgtgcaagcctataggcttcaacatgcatttgctgctagctgattacaacaactaatat

SEQ ID NO: 23090 - DNA, 310 bp, Zea mays
  Clone ID: LIB3152-034-P1-K1-D9
attcagaaacacaccaagcgaagcgcactattttctacctaacaacaatggctaccaaggggtttgcctttcttgcgcttcttgccctttttgtgagcgcaacaaatgcgttcattattccacaatgctcacttgttcctagtgccattatttcacagttccttccaccagttactataatgggtctttaacacctagctgtgcatgccatcatgctacaacaagcgcttgctttgtgcttttttcatcatccaatttttctattgcatcaacaatttcatgtcacatttatcattacaagtctttatat

SEQ ID NO: 23091 - DNA, 377 bp, Zea mays
  Clone ID: LIB3152-034-P1-K1-E1
gcgagactgcgagagagagagagagttgtacaaggctcgtcgccggccgcactgtaggggtaccttgagcctgttcaccgccgtcgcctgccgcctcacatccacagcatccatggccgacacagctcgcctcttcatgctggtggcggtggccacggcggcgctcgccggccgctcagacggcgcgtggtgcgtgtgccggtcggacctggcggacagcgcgctgcagaagacgctggactacgcgtgcggcggcggcgccgactgcaagcccattctgcagggcggcgcctgcttcgtcctggacaccgttaaggcccactgcttctacgccgacaacagcttttaccagcgcatcggtcagaacgtgcttgcct

SEQ ID NO: 23092 - DNA, 297 bp, Zea mays
  Clone ID: LIB3152-034-P1-K1-E11
caacaagcaacatagaaagtggaatccagtttttatcaatagagcaacaatggagaccaagatattttccctccttatgctccttgctctttctacatgtgttgctaacgcgacaattttccctcaatgctcacaagctcctatagctttcctttttcccccataccttccatcaattatagctttagtatgtgaaaacccagctcttcaaccatataggcttcaacaagcaatcgcagcatgcaacatacctttatcgtccttgttgtgtcaacattcatcagtcctatctttgtt

SEQ ID NO: 23093 - DNA, 412 bp, Zea mays
  Clone ID: LIB3152-034-P1-K1-E12
tgcatttgttggcacaaaacatcaaggcacaacaactacaacaacttgtgctaggaaaccttgctgcctactctcagcaacagcagtttcttccattcaaccaactggctgcattgaactctgctgcttatttgcaacaacaactaccattcagtcagctagctgctgcctacccccagcaatttcttccattcaaccaactggcagcattgaactctgctgcttatttacaacagcaacagctaccaccattcagccagctagctgatgtgagccctgttgccttcttgacacaacaacagttgttgccgttctacctgcacgctgcgcctaacgctggcaccctcttacaactgcaacaattgctgccattcaaccaacttgctttgacaaacccaacagcgttctacca

SEQ ID NO: 23094 - DNA, 280 bp, Zea mays
  Clone ID: LIB3152-034-P1-K1-E2
ctcgtccatgtcctcctgattcctcttggcgatcgagggagtggccaaccggtgataatctagctagccagcctcgccatgcctcgccagaggaccctcgcctccgcggcggcgggcgggcggctgctgctcgtggtggcggcggtcctgctgtgcctgtccgtgcctccggggcgcgcggcacccccgggcgcggaggtcgcggagtttcctgggttcacgggcaaacttcccttcaagtactacgtcgggtacgtaacagttggtcgacttgagcatc

SEQ ID NO: 23095 - DNA, 396 bp, Zea mays
  Clone ID: LIB3152-034-P1-K1-E3
gcaattagctcatcgactccagattggagaactcgtcaccatgaaggtgctgatcgttgcccttgctctcctggcgctcgctgcgagcgccgcctccagtacaagcggcggctgtggctgccagacaccaccgtttcatctaccgcctccgttctatatgccgcctccgttctatctgccgccgcagcagcagccgcagccatggcaataccccactcaaccaccgcagctaagcccgtgccagcagttcggatcctgcggcgtcggcagcgtcggcagcccgttcctgggccagtgcgtcgagttcctgaggcaccagtgcagcccggcggcgacgccctacggctcgccacagtgccaggcgctgcagcagcagtgctgccaccagatcaggca

SEQ ID NO: 23096 - DNA, 242 bp, Zea mays
  Clone ID: LIB3152-034-P1-K1-E5
agaccaacaagcaacatagaaagtggaatccattttcatcaatagagcaacaatggcgaccaagatattttccctccttatgctccttgctctttccgcatgtgttgctaacgcgacaatttttccttaatgctcacaagcttctatagctttcctttttaccccataccttccatcaatgattgcttctagattttgattacctctctcttcaaccctatacgctccaacaagctctctct

SEQ ID NO: 23097 - DNA, 350 bp, Zea mays
  Clone ID: LIB3152-034-P1-K1-E8
ggaagtcgggcacctcagggcgatcaagctgatgttgaggggcttcccgaggccgttgctggacatcagcgcggccaacttcggcaagatcatcgagcaagcgctgaacgcgacgctggacccgcccttcgacccctacgagaacagtctcaacttccttgtcgccttctacatcatcctctacgtcggactcaccggttacgtcggcgccaaccccaggctacttacctcttatgccagaaagctgttggtgtagctgcttgtggtggagtctggtcttgattcggggatatgaactctattttttttgctcttgtcgcggcgtgttctttgtttcttctacttgattg

SEQ ID NO: 23098 - DNA, 274 bp, Zea mays
  Clone ID: LIB3152-034-P1-K1-E9
atcactactcaaacctttaaatgagcgttttgatgagaggacagggcgcttgacacagcgtgacattaaccatggcgaaacaaacgggctaccagaagtgcatactggtgtgcatacattaatggaaggactaaaccaaaggaagcgcccaactaagctgacaatggaccaaacactgcagcaagttgttcaggcgaaggttagtgagacaaaaaatagcacaaaggagaggaccttgaaggtgaacgtcacatagaatgacactgaacaagat

SEQ ID NO: 23099 - DNA, 240 bp, Zea mays
  Clone ID: LIB3152-034-P1-K1-F1
ctggatcacagtgctcagtaccggtgacttgcactattttgcagaaaaatgttgaaacccaaactcagcttttgaaaaactactgtaacttgagacagttttaatagtcgagagctttccttagtttcagcagctctatccgagtactccaatcactgtagtttagtgctgcctgagatgcaactaaaatctgtttggacagggaggattatttcttgggaaatttactggtttttggtg

SEQ ID NO: 23100 - DNA, 392 bp, Zea mays
  Clone ID: LIB3152-034-P1-K1-F10
caacaagcaacatagaaagtggaatccagtattaacaatagagcaacaatggcgaccaagatattttccctccttatgctccttgctctttctgcatgtgttgctaacgcgacaattttccctcaatgctcacaagctcctatagcttcccttcttcccccataccttccatcaatgatagcttcagtatgtgaaaacccagctcttcaaccctataggctccaacaagcaatcgcagcaagcaacatacctttatcacccttgtttcaacaatcgccagccctatctttggtgcagtcattggtacaaaccatcagggcacagcagctgcagcaactcgtgctacctgtgatcaaccaagtatctctggcaaacctttctccctactttca

SEQ ID NO: 23101 - DNA, 112 bp, Zea mays
  Clone ID: LIB3152-034-P1-K1-F11
gcggcagtgcgtagagaggatcgtcgaacttttcagcatgaagatggtcatcgttctcgtcgtgtgccaggctatgtcagatgccaacgcctttgcaatgcatatgccctgc

SEQ ID NO: 23102 - DNA, 174 bp, Zea mays
  Clone ID: LIB3152-034-P1-K1-F12
cttctatcagttccatcaatcatagtttattttagtagtgtaggcaccaaataaaatctgcagcatcaattatctaactccaaaaaccatgaagctggtgcttgtgcgtttcgctatcattgctttagaatcaagggttacatagtacacagacaggcggctgcagatgtggtc

SEQ ID NO: 23103 - DNA, 327 bp, Zea mays
  Clone ID: LIB3152-034-P1-K1-F2
caaagcggcagtgcgtagagaggatcgtcgaacagaacagcatgaagatggtcatcgttctcgtcgtgtgcctggctctgtcagctgccagcgcctctgcaatgcagatgccctgcccctgcgcggggctgcagggcttgtacggcgctggcgccggcctgacgacgatgatgggcgccggcgggctgtacccctacgcggagtacctgaggcagccgcagtgcagcccgctggcggcggcgccctactacgccgggtgtgggcagacgagcgccatgtaccagccgctccggcaacagtgctgccagcagcagatgatgattatgg

SEQ ID NO: 23104 - DNA, 378 bp, Zea mays
  Clone ID: LIB3152-034-P1-K1-F4
attttcagcattcagaaacacaccaagcgaagcgcactagcaacaacctaacaacaatggctaccaagatattagccctccttgcgcttcttgcccttttagtgagcgcaacaaatgcgttcattattccacagtgctcacttgctcctagtgccattattccacagttcctcccaccagttactttaatgggctacgaacatccagccgtgcaagcctacaggctacaactagcgcttgcggcgagcgtattacaacaaccaattgccctaatgctacaacaattccttggcacatctaaacctacaaaccattgttacgtaacagcatcaacagtttctgtcatcacttgaccatctagtcgttgtgttcctcttt

SEQ ID NO: 23105 - DNA, 190 bp, Zea mays
  unsure at all n locations
  Clone ID: LIB3152-034-P1-K1-F6
aancncggcgcncgcaccgacgaagaacgaagttaaangcgacacccggagcgaaaagcagaagcccgcgaaccaccgaggagacgaacgcaaggggcgcccgaagccaacaggcggagggcacgacggccagggcgacacgccaaaagacacacccaacacccccccgcggggcgagggacgaggagaa

SEQ ID NO: 23106 - DNA, 415 bp, Zea mays
  Clone ID: LIB3152-034-P1-K1-F7
attttgagcattcagaaacacaccaagcgtatttctacctagcaacgacttaacaacaatggctaccaagatattagccctccttgcgcttcttgccctttttgtgagcgcaacaaatgcgttcattattccacaatgctcacttgctcctagtgccattataccacagttcctccgaccagttacttcaatgggcttcgaacacctagctgtgcaagcctacaggctacaacaagcgcttgctgcgagcgtcttacaacaaccaattaaccaattgcaacaacaattcttggcacatctaaccatacaaaccattgcaacacaacagcaacaacagtttctaccagcactgatccaactagatgtggtgaaccctgtcgcctacttgcaacagcaggtgcttgcatccaaccca

SEQ ID NO: 23107 - DNA, 265 bp, Zea mays
  Clone ID: LIB3152-034-P1-K1-F8
gagaccaactagcaacatagaaagcacatttttgtaccaacaatggcagccaaaatattttgcttccttatgctccttggtctttctgcaagtgctgctaccgcaaccattttcccacaatgctcacaggctggctatggcgtgcgttcttcccccatacctctcaccagcggtgtcttcagtatgtgaatacccaattcttcaaccctacaggatccaacatgcaatttttgcaggtatcttacttttattcatccttgtttct

SEQ ID NO: 23108 - DNA, 421 bp, Zea mays
  unsure at all n locations
  Clone ID: LIB3152-034-P1-K1-G1
attttgagcattcaaaaacacacaaagggaagtgtactagcaccttcctaacaacaatggctaccaagatattagccctccttgcgctcctttccctttcagtgagcgcaacaactgcattcattattccacaatgctcacttgctcctaatgccattattccacagttcctcccatcagttacatcaatgggcatcgaacaccctattgtgcaagcctataggctacaacaagcgcttgcggcgagcgtcttacaacaaccgtttgcccaattacaacaacaatccttggcacatctaaccatacaaaccatcgcaacacaactagagcaacagtttgtgcccgcattgagccaactagccgcagtgaaccctgtctcctactngcaacagcaactgcttgcatccaacccacttgctct

SEQ ID NO: 23109 - DNA, 397 bp, Zea mays
  Clone ID: LIB3152-034-P1-K1-G10
gtgcaagcctataggctacaacaagcgattgttgtgagcgtcttacaacaaccaattgcccaattgttacaacaatccttggcacatctaacaatacaaaccatcgcaacgcaacagcaacaacagttcctaccagcactgagccacctagccatggtgaaccctgtcgcctacttgcaacagcagctgcttgcatccaacccacttgctctagcaaacgtagttgcaaaccagcaacaacaacaactgcaacagtttctgccagcgcttagtcaactagccatggtgaaccctgccgcctacctacaacagcaacaactgctttcatctagcccgctcgctgtggccaatgcacctacatacctgcaacaagaattgttgcaacagattgtaccag

SEQ ID NO: 23110 - DNA, 335 bp, Zea mays
  Clone ID: LIB3152-034-P1-K1-G11
attgataccaactagcaacatacatagtgtatttcactagcaacatctcagcaccaatgggagccaagatttttgccctccttgccctccttgctctttcagcaagcgctgctacctcgactattattccacaatgcttacaacaatacctctctccggcgacagccgtgggattgcaatacccaactatacaatcctacatggtacaagaggccatccaagcaagcatcctacggccattagcattaaccctccaacaaccatatgctctattgcaacagccattcttagtgcatttgtatcttcaaagaatcgcggcacatcaactacaacaa

SEQ ID NO: 23111 - DNA, 397 bp, Zea mays
  Clone ID: LIB3152-034-P1-K1-G12
cccccataccttccatcaatgatagcttcattttgtgaaaacccagctcttcaaccctataggctccaacaagcaatcgcagcacgcaacatacctttatcacccttgtttcaacaatcgccagccctatctttggtgcagttattggtacaaaccattagggcacagcagctgcagcaactcgtgctacctgtgatcaaccaagtagctctggcaaacctttctccctactctcagcaacaacaatttctttcattcaaccaactgtctacattgaaccgtgctgcttatttgcagcaacaactattaccattcagccagctagctactgcctacttttagctacaacaacttctttcatttaaccaattggctcgactgaaccccgctgtttatt

SEQ ID NO: 23112 - DNA, 347 bp, Zea mays
  Clone ID: LIB3152-034-P1-K1-G2
ccggccggaatacccggccgaccacgcgtccggcggctgtggctgccagacaccaccgtttcatctaccgcctccgttctatatgccgcctccggtctatctgccgccgcagcagcagccgcagccatggcaataccccactcaaccaccgcagctaagcccgtgccagcagttcggatcctgcggcgtcggcagcgtcggcagcccgttcctgggccagtgcgtcgagttcctgaggcaccagtgcagcccggcggcgacgccctacggctcgccacagtgccaggcgctgcagcagcagtgctgccaccagatcaggcaggtggagtcgctgcaccggtaccagg

SEQ ID NO: 23113 - DNA, 421 bp, Zea mays
  Clone ID: LIB3152-034-P1-K1-G3
aacacaccaagcgaagcgcactagcaacgacctaacaacaatggctaccaagatattagccctccttgcgcttcttgccctttttgtgagcgcaacaaatgcgttcattattccacaatgctcacttgctcctagtgccattattccacagttcctcccaccagttacttcaatgggcttcgaacacctagctgtgcaagccaacatgcaacaacaagcgcttgcggcgagcgtcttacaacaaccaattgcccaattgcaacaacaatccttgccacatctaacaatacaagccatcacaacgcaacagcaacaacagttcctaccagcactgagccacctagccatggtgaaccctgccgcctacttgcaagagcagctgcttgcatccaacccacttgctctggcgaacgtagttgca

SEQ ID NO: 23114 - DNA, 178 bp, Zea mays
  Clone ID: LIB3152-034-P1-K1-G4
gatcagcaaagcggcagtgcgtagagaggatcgttttacagaacagcatgaagatggtcatcgttctcgtcgtgtgcctggctctgtcagctgccagcgcctctgcaatgcagatgccctgcccctgcgcggtgctgcagggcttgtacggcgctggctccggcctgacgactatgat

SEQ ID NO: 23115 - DNA, 408 bp, Zea mays
  Clone ID: LIB3152-034-P1-K1-G5
ccaactagcaacatagaaagcacaatagtgtaccatcaatggcagccaaaatattttgcctccttatgctccttggtctttctgcaagtgctgctacggcgaccattttcccgaaatgctcgcaagctcctatagcttcccttcttcccccgtacctctcaccagcggtgtcttcggtatgtgaaaacccaattcttcaaccctacaggatccaacaggcaatcacagctggcattttacctttatcacccttgatccttcaacaatcatcagccctattacatcagttacctttggtgcatttattggcacaaaacatcagggcacaacaactacaacaacttgtgctagcaaaccttgctgcctactctcagtaacagcagtttcttccattcaaccaactagctt

SEQ ID NO: 23116 - DNA, 340 bp, Zea mays
  Clone ID: LIB3152-034-P1-K1-G6
attttcagcattcagaaacacaccaagcgaagttcactagcaacaacctaacaacaatggctaccaagatattagccctccttgcgcttcttgcccttttagtgagcgcaacaaatgcgttcattattccacagtgctcacttgctcctagtgccattattccacagttccttccaccagttacttcaatgggctttgaacattcagccgtgcaagcctacaggctacaactagcgcttgcggcgagcgtcttacaacaaccaattgcccaattgcaacaacaattcttggcacatttaaacctacaaaccatcgtaacgcatcatcatcaacaagtttt

SEQ ID NO: 23117 - DNA, 406 bp, Zea mays
  Clone ID: LIB3152-034-P1-K1-G7
atttcgagcattgaaaaacacaccaagctttgtttcctatcaacaacttaacaacatggggtaccaagatattagccctgcttgcgctacttgcccttttagcgagcacaacaaatgcgttcattattccacaatgctcacttgctcctagtgacataataccacagttgcttctaccagctactttaatgagctttgaacactcaaccatgcaagcctacatgctacaacacgtgcttgaggctagcgtcttacaccaacaaaatgcctaattgcaacaacaatttctgggcacatttaaactctacaaaccattttaactcaacagcaacaacagtttctgccagcattgagccaactagttgtgttgaaccctgtcttctactatcaacagaagctacttgta

SEQ ID NO: 23118 - DNA, 418 bp, Zea mays
  Clone ID: LIB3152-034-P1-K1-G8
gcaacatagaaagcacaatagtgtaccaacaatggcagctaaaatattttgcctccttatgctccttggtctttctgcaagtgctgctacggcgaccattttcccacaatgctcacaagctcctatagcttcccttcttcccccgtacctctcaccaacggtgtcttcggtatgtgaaaacccaattcttcaaccctacaggatccaacaggcaatcgcagctggcatcttacctttatcacccttgttcctccaacaatcatcagccctattacagcagttacctttggtgcatttattggcacaaaacatcagggcacaacaactacaacaacttgtgctagcaaaccttgctgcctactctcagcaacagcagtttcttccattcaaccaactagctgcattgaactctgcttct

SEQ ID NO: 23119 - DNA, 368 bp, Zea mays
  Clone ID: LIB3152-034-P1-K1-G9
gtttcatacaatgcgcaacagagaacgatttatttctgagcaaaaatataaccacggggggctctatgatatcagttcatgggctgctacataaaccattctaccgcaatgcatacaagcccctatagccaccctgctagctccatactatcttaccaatagccacatctgtatgtggaaactcaattattaaactccacactatccaacatgcaatatcaaatatcaaatcaccattaacacctttgtttcttcaacattccttatccataatacataaaccacattttatgtaatgattgccttcaaatcataatggacaaataattactactacttgacttcggcaatcttacctacatactctt

SEQ ID NO: 23120 - DNA, 241 bp, Zea mays
  Clone ID: LIB3152-034-P1-K1-H1
gatccatgcccttttctccgacccgtttcgggtgttttggtacaaatggctaagccgtaacttctctgtatcatcgaacgatgccaagaggttgcttcaggagtttgtcaacaaacatggaaccgacatccaggtgatttacagtgtgtcggggtggatgaagagcaatcccgcaaattatagagcaaagctcgattgacgcccaaaacttgaagaagcaaggcatggattaagaagattg

SEQ ID NO: 23121 - DNA, 393 bp, Zea mays
  Clone ID: LIB3152-034-P1-K1-H10
aaatggtagtagtatttggccagctagctacatcaagccccgcttccttcttgacacaacaacaattgcttccgttctaccagcagtttgtggctaaccccgcaacccttttacaactgcaacagttgctgccctttgtccaacttgctttgacaaacccagcagccttctaccaacaacacatcattggcggtgccctcttttagattgcttattagttgtcattcaataatgaagttttttggctgatgtatgtggcctcctagaaataagaagttatatttccaatagataaattatatcttcaaaaatatcaaatgatttattttagcatgttattattatacttattctatttatatttcttctaaaatgtatttttttttatatatt

SEQ ID NO: 23122 - DNA, 331 bp, Zea mays
  Clone ID: LIB3152-034-P1-K1-H11
gtttattccaatccacaacacaaagcgatttattcttaagcatcacaacatcgacggggggagtttctataataactctaggtacatttaatactttaaaccataccaatgcatacataacaatcaattaccaccatcatcagaacattctaccgacgctgaacccatttttattcttacaacaccattctcttgcatccaacctacttcctgtagcaaacctagtatccatctatcaacaacaacaattgtcccttattctgccagcggctatataactacccatattctaacctgttgcctatctacaaacgatacatctgcatcaatt

SEQ ID NO: 23123 - DNA, 171 bp, Zea mays
  Clone ID: LIB3152-034-P1-K1-H12
ctctctcgtcctcgtcccgactcgcagtttttttatgatggtgaccaacatggtggagggggggtctaacacggtcactaagccgatcgacaccatgctcgccgtcatgggcgacagtcgacgttgactacgacgtgctgggcgctgaccctaacgcagcgccgcttttag

SEQ ID NO: 23124 - DNA, 277 bp, Zea mays
  Clone ID: LIB3152-034-P1-K1-H2
tccagatcagcaaagcggcagtgcgtagagagtatcgtcgaacagaacagcatgaagatggtcatcgttctcgtcgtgtgcctggctctgtcagctgccagcgcctctgcaatgcagatgccctgcccctgcgcggggctgcagggcttgtacggcgctggcgccggcctgacgacgatgatgggcgccggcgggctgtacccctacgcggagtacctgaggcagtcgcagtgcagcccgctggcggcggcgccctactacgccgggtgtgggcaga

SEQ ID NO: 23125 - DNA, 414 bp, Zea mays
  Clone ID: LIB3152-034-P1-K1-H3
ctagcaacatagaaagcacaatagtgtaccaacattgtcagccaaaatattttgcttccttatgctccttggtctttctgcaagtgctgctaccgcaaccattttcccacaatgctcacaagctcctatagcttcctttcttcccccatacctctcaccagcggtgtcttcagtatgtgaaaacccaattcttcaaccctacaggatccaacaggcaatcgcagcaggcattttacctttatcacccttgttccttcaacaaccgtcagccctattacagcagttacctttggtgcatttgttggcacaaaacatcaaggcacaacaactacaacatcttgtgctaggaaaccttgttgtctactttcagcaacaacagtttctttcattcaaccaactggctgcatttgaact

SEQ ID NO: 23126 - DNA, 418 bp, Zea mays
  Clone ID: LIB3152-034-P1-K1-H4
agcgaagcgcactagcaacaacctaacaacaatggctaccaagatattagccctccttgcgcttcttgcccttttagtgagcgcaacaaatgcgttcattattccacagtgctcacttgctcctagtgccattattccacagttcctcccaccagttacttcaatgggcttcgaacatccagccgtgcaagcctacaggctacaactagcgcttgcggcgagcgtcttacaacaaccaattgcccaattgcaacaacaatccttggcacatctaaacctacaaaccatcgcaacgcaacagcaacaacagtttctgccatcactgagccacctagccgtggtgaaccctgtcgcctacttgcaacagcagctacttgcatccaacccacttgctctggcgaacgtagctgcataccag

SEQ ID NO: 23127 - DNA, 267 bp, Zea mays
  Clone ID: LIB3152-034-P1-K1-H6
aaaagcgcccgagcggccgtttccataccaccactggtcttcaccctttttcttatctactccagagcgcagaagacccgatcgacaccatgagggtgttgctcgttgccctcgctctcctggctctcgctgcgagcgccacctccacgcatacaagcggcggctgcggctgccagccaccgacgccggttcatctaccgccgccggtgcatctgccaccttcggttcacctgccatcttcggtgcatattccacctgctgttcacc

SEQ ID NO: 23128 - DNA, 312 bp, Zea mays
  Clone ID: LIB3152-034-P1-K1-H7
attgagaccaactagcaacatagaaagcacttattgtaccaataatggcagccaagggagtttgcctcattatgctccttggtctttctgcaagggctgctaccgggaggattttcccgcaatgctcacaagctcctatagctttccttcttcccccatacctctcaccagcgatgttttcagtatgtgaaaatccaattcttctaccctacaggatccaacaggcaatcgcagcaggcatcttacctttatcacccttggtccttcaacaattattagccctattacagctgtttcccttggtgcatttat

SEQ ID NO: 23129 - DNA, 415 bp, Zea mays
  Clone ID: LIB3152-034-P1-K1-H8
gcaacatagaaagcacaatagtgtaccaacattggcagccaaaatattttgcctccttatgctccttggtctttctgcaagtgctgctacggcgaccattttcccgaaatgctcgcaagctcctatagcttcccttcttcccccgtacctctcaccagcggtgtcttcggtatgtgaaaacccaattcttcaaccctacaggatccaacaggcaatcacagctggcatcttacctttatcacccttgttcctccaacaatcatcagccctattacatcagttacctttggtgcatttattggcacaaaacatcagggcacaacaactacaacaacttgtgctagcaaaccttgctgcctactctcagcaacagcagtttcttccattcaaccaactagctgcattgaactctgct

SEQ ID NO: 23130 - DNA, 408 bp, Zea mays
  Clone ID: LIB3152-034-P1-K1-H9
gccaatggagaaccctccgagcatcctagtgactcccatggctccggccatgtcggcgcagttcacaagaatcaccttcagcaacctgtttgtccgtcgggctggcccaggcagcacggagctgaccgtggagggaaggccatccgaccagctgggcaggagaaacctcactgacagccccgtatttgacggccgtggccctgacgccagcctcgtggctcgcgtacagggagtcgctacccagatgggcgacgtgcgccagttgtacaccgtcgtgttccaggagaggccgctcaagggctccacgctcgtcaccgaaggcgcgatgacggaagggtcagacgagtgggcgatctacggcggaactggagtgttcgcgatggcgagaggcgtcataaggagaacgtt

SEQ ID NO: 23131 - DNA, 418 bp, Zea mays
  Clone ID: LIB3152-035-P1-K1-A1
cggcagtgcgtagagaggatcgtcgaacagaacagcatgaagatggtcatcgttctcgtcgtgtgcctggctctgtcagctgccagcgcctctgcaatgcagatgccctgcccctgcgcggggctgcagggcttgtacggcgctggcgccggcctgacgacgatgatgggcgccggcgggctgtacccctacgcggagtacctgaggcagccgcagtgcagcccgctggcggcggcgccctactacgccgggtgtgggcagacgagcgccatgtaccagccgctccggcaacagtgctgccggcagcagatgaggatgatggacgtgcagtccgtcgcgcagcagctgcagatgatgatgcagcttgagcgtgccgctgccgccagcagcagcctgtacgagccagctctgatgcagc

SEQ ID NO: 23132 - DNA, 426 bp, Zea mays
  Clone ID: LIB3152-035-P1-K1-A10
ggtcttcagaccattagctttatctactccagatcgcagaagaacccgatcgacaccatgagggtgttgctcgttgccctcgctctcctggctctcgctgcgagcgccacctccacgcatacaagcggcggctgcggctgccagccaccgccgccggttcatctaccgccgccggtgcatctgccacctccggttcacctgccacctccggtgcatctcccaccgccggtccacctgccgccgccggtccacctgccaccgccggtccatgtgccgccgccggttcatctgccgccgccaccatgccactaccctactcaaccgccccggcctcagcctcatccccagccacacccatgcccgtgccaacagccgcatccaagcccgtgccagctgcagggaacctgcggcgttggcagcacccct

SEQ ID NO: 23133 - DNA, 389 bp, Zea mays
  Clone ID: LIB3152-035-P1-K1-A11
ggcaggaagaccgaagaccgtgccgtgcggggtcccgggacgggaacgggacaggaccggaggatcttagatccttcctgcccgcccgcccgtgcccgtcgacgcgtcgttcttgccggtcgcgccccaccttcgccctctcctcctccagggggatcggatacgccacaggctgcgcgatggtgctgtgggtcttcggctacggctccctcatctggaaccccggctttgactttgacgacaaaatctttggtttcatcaagggctacaagcgcacctttaatcttgcttgcattgaccacagtggcacaccggagcattcggcgaggacctgctcgcttgaaaccgacgacgaggccttatgctggtgaattgcatattgcgttaag

SEQ ID NO: 23134 - DNA, 196 bp, Zea mays
  Clone ID: LIB3152-035-P1-K1-A12
aaagcacaatagtgtaccaacaatggcagtcaatatattttgcttccttatgctccttggtctttctgcaagtgttgctaccgcaaccattttcccacaatgctcacaagctcctatagcttcccttcttcccccatacctctcaccagcggtgtcttcaatgtgtgaaaacccaattgttcaaccctacaggatc

SEQ ID NO: 23135 - DNA, 442 bp, Zea mays
  unsure at all n locations
  Clone ID: LIB3152-035-P1-K1-A2
ggccggcccacgcgncgcgctnctatcagnnccancnnncntcatncaacttagttgtctnggcnccaaatcaaatctgcagcatcaattatctaactccaaaaaccatgaagctggtgcttgtggttcttgctttcattgctttagtatcaagtgtttcttgtacacagacaggcggctgcagctgtggtcaacaacaaagccatgagcagcaacatcatccacaacaacatcatccacaaaaacaacaacatcaaccaccaccacaacatcaccagcagcagcaacaccaacaacaacatgttcacatgcaaccacaaaaacatcagcaacaacaagaagttcatgttcaacaacaacaacaacaaccgcagcaccaacaacaacaacaacaacagcaccaacaacaacatcaatgtgaaggccaacaacaacatcacca

SEQ ID NO: 23136 - DNA, 280 bp, Zea mays
  Clone ID: LIB3152-035-P1-K1-A3
gaagggccggcccacgcgtccgcgcacgctcctggacacagaagtatgccatgggttagtagcaaggctaaaagctggccaaactggtgaatgtgccggaccccaaatcgttatcacctaaataaccagtcaagtcgcaagtatgaatggacttttgaggaccattgtgccctgttgaactcatgtattaccttgtgaagtccgttgtgtctggtttctacctgaccgtttcgttatctgatgctgtttctttaatatctgatgctgcttcattaaccat

SEQ ID NO: 23137 - DNA, 359 bp, Zea mays
  Clone ID: LIB3152-035-P1-K1-A4
caactagcaacatagaaagcacaatagtgtacctacattggcagctaaaatattttgcctccttatgctccttggtctttctgcaagtgctgctacggcgaccattttcccacaatgctcacaagctcctatagcttcccttcttcccccgtacctctcaccaacggtgtcttcggtatgtgaaaacccaattcttcaaccctacaggatccaacaggcaatcgcagctggcatcttacctttatcacccttgttcctccaacaatcatcagcccctattacagcagttaccctttggtgcatttaattggcacataacatcagggcacaacaactacaacaacttgtgctagcaaacc

SEQ ID NO: 23138 - DNA, 419 bp, Zea mays
  Clone ID: LIB3152-035-P1-K1-A6
caggggaggcatgcagatctttgtgaaaaccctttctttcaagactatcaccctcgaggtggagtgctctgacaccattgacaacgtcaaggccaagatccaggacaaggagggcatccctccagaccagcagcggctcatctttgctgggaagcagcttgaggacgggcgcacgcttgccgactacaacatccagaaggagagcaccctccacttggtgctgcgcctcaggggaggcatgcagatcttcgtgaagaccctgaccggcaaaactatcaccctcgaggtggagtcttcagacaccatcgacaacgtcaaggccaagatccaggacaaggagggcattcccccagaccagcagcggctcatctttgctggaaagcagcttgaggacgggcgcacgctggccgactacaaca

SEQ ID NO: 23139 - DNA, 357 bp, Zea mays
  unsure at all n locations
  Clone ID: LIB3152-035-P1-K1-A7
acccacgcgnccggtccaactagcaacatagaaagcacaattttgtttcaacaatggcagccaaaatatggggctggcttatgctccttggtctttctgcaagtgctgctaccgcaaccattttcccacaatgctcacaagctcctatagcttcctttcttcccccatacctctcaccagcggtgtcttcagtatgtgaaaacccaattcttcaaccctacaggatccaacaggcaatcgcagcaggcatcttacctttatcacccttgttcctncaacaaaccgtaggcctattacaagcagtacctttggtgcatttgttggcacaaaacattaaggcacaacaactacaacaac

SEQ ID NO: 23140 - DNA, 206 bp, Zea mays
  unsure at all n locations
  Clone ID: LIB3152-035-P1-K1-A8
tttgcctccttntgctccttgntctttctncnggtgctgctncggcgnccnttttccccccctgctcncnngctcctntngcttcccttcttcccccgtccctctcnccnncggtgtcttcggtttgtgnnnccccnnttcttcnnccctcccggntccnncnggcnntcgcngctggcntcttncctttntcncccttgttcctc

SEQ ID NO: 23141 - DNA, 415 bp, Zea mays
  Clone ID: LIB3152-035-P1-K1-A9
atttagaccaactagcaacatagaaagcacaatattgtaccaacaatggcagccaaaatattttgcctccttatgctccttggtatttctgcaagtgctgctacggcgaccattttcccgcaatgctcacaagctcctatagcttcccttcttcccccgtacctctcaccagcggtgtcttcggtatgtgaaaacccaattcttcaaccctacaggatccaacaggcaatcgcagctggcatcttacctttatcacccttgttcctccaacaatcatcagccctattacagcagttacctttggtgcatttattggcacaaaacatcagggcacaacaactacaacaacttgtgctagcaaaccttgctgcctactctcagcaacagcagtttcttccattcaaccaactagctg

SEQ ID NO: 23142 - DNA, 402 bp, Zea mays
  unsure at all n locations
  Clone ID: LIB3152-035-P1-K1-B1
ancaancancanncancnnagnagnanaggcaccaaatcaaancngcaacancaannatcnaacgccaaaaaccangaagcnggngcnngnggnncnngcnnncanngcnnnagnancaagngnnncngggacacagacaggcggcngcagcngnggncaacaacaaagccangagcagcaacancanccacaacaacancagccacaaaaacaacaacancaaccaccaccacaacagcaccagcagcagcaacaccaacaacaacaaggncacangcaaccacaaaaacancagcaacaacaagaagnncangnncaacaacaacaacaacaaccgcagcaccaacaacaacaacaacaacagcaccaacaacaacancaaggggaaggccaacaacaac

SEQ ID NO: 23143 - DNA, 422 bp, Zea mays
  Clone ID: LIB3152-035-P1-K1-B10
attgagaccaacaagcaacatagaaagtggaattcagtagcaacaatagagcaacaatggcgaccaagatattttccctccttatgctccttgctctttctgcatgtgttgctaacgcgacaattttccctcaatgctcacaagctcctatagcttcccttcttcccccataccttccatcaatgatagcttcagtatgtgaaaacccagctcttcaaccctataggctccaacaagcaatcgcagcaagcaacatacctttatcacccttgtttcaacaatcgccagccctatctttggtgcagtcattggtacaaaccatcagggcacagcagctgcagcaactcgtgctacctgtgatcaaccaagtagctctggcaaacctttcttccctactcttagcaacaaccaattctttcatt

SEQ ID NO: 23144 - DNA, 400 bp, Zea mays
  Clone ID: LIB3152-035-P1-K1-B11
ggcaagcccctcttcttctcgctttacgactggttcctcgagcatggctctgtctacaagcttgcttttggacccaaatcgttcgttgttgtctctgaccctatcgttgctagacacatcctccgggagaacgctttctgttatgataagggagttctcgctgaaattttaaaacccataatggggaagggtcttatacctgctgaccttgatacctggaagcaaaggagaaaagttataacacctgggttccatgccttattcatagaagctatggtgaggacatttacgaaatgttcagagagaacaatttcaaagcttgaggagcttactgaaagtgaaggtcgtgaacaaaattcgacttttgtggaccttgaagctgagttctccaatttggcac

SEQ ID NO: 23145 - DNA, 291 bp, Zea mays
  Clone ID: LIB3152-035-P1-K1-B12
attcgaggaactatgttcagaccttatagacaggcttaaaactcctgttaataatgccttaagagatgccaagttgtctgtcagtgatctagatgaagttattcttgtgggtggatccacccgaatccctgcagttcaagaacttgtgaggaagcttaccgacaaagatcccaatgttacggtcaaccctgatgaggttgtttctcttggggcagctgtgcagggtggggttttggcaggagacgtgaaagatgtagttcttctggatgttacttcatttatcttttggtt

SEQ ID NO: 23146 - DNA, 417 bp, Zea mays
  Clone ID: LIB3152-035-P1-K1-B2
tgagcatcagaaacacaccaagcgaagcgcactagctacaacctaacaacaatggctaccaagatattatccctccttgcgcttcttgcgctttttgcgagcgcaacaaatgcgtccattattccacaatgctcacttgctcctagttccattattccacagttcctcccaccagttacttcaatggccttcgaacacccagctgtgcaagcctataggctacaacaagcgattgcggcgagcgtcttacaacaaccaattgcccaattgcaacaacaatccttggcacatctaacaatacaaaccatcgcaacgcaacagcaacaacagttcctaccagcactgagccacctagccatggtgaaccctgtcgcctacttgcaacagcagctgcttgcatccaacccacttgctcta

SEQ ID NO: 23147 - DNA, 412 bp, Zea mays
  Clone ID: LIB3152-035-P1-K1-B3
tgagaccaacaagcaacatagaaagtggaatccagtttcaacaatagagcaacaatggcgaccaagatattttccctccttatgctccttgctctttctgcatgtgttgctaacgcgacaattttccctcaatgctcacaagctcctatagcttcccttcttcccccataccttccatcaatgatagcttcagtatgtgaaaacccagctcttcaaccctataggctccaacaagcaatcgcagcaagcaacatacctttatcacccttgtttcaacaatcgccagccctatctttggtgcagtcattggtacaaaccatcagggcacagcagctgcagcaactcgtgctacctgtgatcaaccaagtagctctggcaaacctttctccctactctcagcaacaacaatttc

SEQ ID NO: 23148 - DNA, 425 bp, Zea mays
  unsure at all n locations
  Clone ID: LIB3152-035-P1-K1-B4
gaccacgcgttcgttgagaccacangcaacatagaaagtggaatacagttcaacaatagagcaacaatggcggccaagatattttccatccttatgctccttgctctttctgcatgtgttgctaacgcgaccatttttcctcaatactcacaagctcctatagctgcccttcttcccccataccttccatcaatgaccgcttcagtatgtgaaaacccagcccttcaaccctacaggctccaacaagcaatcgcaacaagcaacttacctttatcacccctgttctttcaacaatcgccagccctatctttggtgcagtcattggtacaaaccatcagggcacaacagctgcagcaactcgtgctaccagtgatcagccaagtagctctggcaaaccttttctcctactcttagcaacaacaatt

SEQ ID NO: 23149 - DNA, 313 bp, Zea mays
  Clone ID: LIB3152-035-P1-K1-B5
cggacgcgtgggcggacgcgtgggcggacgcgtgggtttgagcattcagaaacacaccaagcgaagcacattagcaacaacctaacaacaatggctaccaagatattatccctccttgcgcttcttgcgctttttgcgagcgcaacaaatgcgttcattattccacaatgctcacttgctccaagttccattattacacagttcctcccaccagttacttcaatgggcttcgaacacccagctgtgcaagcctataggctacaacaagcaattgcggcgagcgtcttacaacaaccaattttccagttgcaac

SEQ ID NO: 23150 - DNA, 389 bp, Zea mays
  Clone ID: LIB3152-035-P1-K1-B6
gagctagtttctccattgatagagatggccggaggtggagcttctcaattgaacaggagcatcttgttgcgcagcctaaggtgctgatggcatccagaaaggggaagaagacgtcttctgaggcagagtcagaaaaggattgtgatgttgttgctccaaacagtgcagaggaaggtcaagaatcctatgacgatggaaaggaagaagacactactgagaatgtagcggaagaaggaaaaacaaagtctgcggaagcgaaccaggaagtagagaaagtagaaactagagcagaagagtgtgaaggtgggacagtaccagtgatacataggaggaagaagagtggtgagttaccagattgcctcctgttgatgatgtatgagccgaagctc

SEQ ID NO: 23151 - DNA, 418 bp, Zea mays
  Clone ID: LIB3152-035-P1-K1-B7
aagcgaagcacattagcaacaacctaacatcatttgctaccaagatattatccctccttgcgcttcttgcgctttttgcgagcgcaacaaatgcgttcattattccacaatgctcacttgctccaagttccattattacacagttcctcccaccagttacttcaatgggcttcgaacacccagctgtgcaagcctataggctacaacaagcaattgcggcgagcgtcttacaacaaccaatttcccagttgcaacaacaatccttggcacatctaacaatacaaaccatcgcaacgcaacagcaacaacaattcctaccagcactgagccacctagccatggtgaaccctgccgcctacttgcaacagcagttgcttgcatcaaacccacttgctctggcaaacgtagttgcaaacca

SEQ ID NO: 23152 - DNA, 409 bp, Zea mays
  unsure at all n locations
  Clone ID: LIB3152-035-P1-K1-B8
agaccanagctnnactactccagagcgcattttaacccgatcgacaccatgagggtgttgctcgttgccctcgctctcctggctctcgctgcgagcgccacctccacgcatacaagcggcggctgcggctgccagccaccgccgccggttcatctaccgccgccggtgcatctgccacctccggttcacctgccacctccggtgcatctcccaccgccggtccacctgccgccgccggtccacctgccaccgccggtccatgtgccgccgccggttcatctgccgccgccaccatgccactaccctactcaacctgcccggcctcagcctcattcccagccacacccatgcccgtgccaacagccgcatccaagcccgtgccagctgcagggaacctgcggcgttggca

SEQ ID NO: 23153 - DNA, 414 bp, Zea mays
  Clone ID: LIB3152-035-P1-K1-B9
cagtcattggtacaaaccatcagggcacaacagttgcagcaactcgtgctacctgtgatcaaccaagtagctctggcaaacctttctccctactctccgcaacaacaatttcttccattcaaccaactgtctacactgaaccctgctgcttatttgcagcaacaactattaccatttagccagctagctactgcctactctcaacaacaacaacttcttccatttaaccaattggccgcactgaaccccgctgcttatttgcagcagcaaatactactaccatttagccagctagctacagcaagccgtgcttccttcttgacacaacaacagttgctgccgttctaccagcagtttgcggctaaccccgcaaccctcttacaactacaacaattgttgccctttgtccaactt

SEQ ID NO: 23154 - DNA, 420 bp, Zea mays
  Clone ID: LIB3152-035-P1-K1-C1
tagcaacatagaaagcacaatagtgtaccaacattggcagccaaaatattttgcttccttatgctccttggtctttctgcaagtgttgctaccgcaaccattttcccacaatgctcacaagctcctatagcttcccttcttcccccatacctctcaccagcggtgtcttcaatgtgtgaaaacccaattgttcaaccctacaggatccaacaggcaatcgcaacaggcatcttaccattatcacccttgttcctccaacaaccgtcagccctattacagcagttacctttggtccatttggtggcacaaaacattagggcacaacaactacaacaacttgtgctagcaaaccttgctgcatactctcagcaacatcagtttctttcattcaaccaactggctgcattgaactctgctgct

SEQ ID NO: 23155 - DNA, 152 bp, Zea mays
  unsure at all n locations
  Clone ID: LIB3152-035-P1-K1-C10
canncaaccaacnagcngcaangaacncngcanacaaaaagcaacaacaacaacaaccaggcagccagcaancngcggccaacccccagcaaanacnnccaagcaaccaacggacagcaangaacncaccagcggagagacagcagcaacaa

SEQ ID NO: 23156 - DNA, 334 bp, Zea mays
  Clone ID: LIB3152-035-P1-K1-C11
gcaacatagaaagcacaatagtgtaccaacaatggcagccaaaatattttgcttccttatgctccttggtctttctgcaagtgttgctaccgcaaccattttcccacaatgctcacaagctcctatagcttccctttttccccaatacctttaccagcggtgtcttcaatgtgtgaaaacccaattggtcaaccctacaggatccaacaggcaatcgcaacaggcatcttaccattatcacccttgttcctccaacaaccgtcagccctattacagcagttacctttggtccatttggtggcacaaaacattaaggcacaacaactacaacaac

SEQ ID NO: 23157 - DNA, 406 bp, Zea mays
  Clone ID: LIB3152-035-P1-K1-C12
agggcaccggaaaatccaaggggttcgcgttcctcgcgtacgaggaccagagaagcacgattcttgctgttgacaatttgaatggagctaaagttcttgggaggatcataaaggttgaccatgtgagcaagtacaagaagaaggaagaggaagatgaggaggagctgcagaagaagagggaggcccgtggagtctgctatgctttccagaaaggcgagtgcaaccgcggagcttcctgcagatattcgcatgatgagcagagaaatgcaaacaccggttggggttctaaagaggatagtggtgcacgatgggagcatgacaaacacagtgatgtaccgaagagccgaggcatgtgctatgctttccagaagggagagtgcaaccgttgagcattctgcaaattttg

SEQ ID NO: 23158 - DNA, 261 bp, Zea mays
  Clone ID: LIB3152-035-P1-K1-C2
cccacgcgtccgcagaaacacaccaagcgaagcacattagcaacaacctaacaacaatggctaccaagatattatccccccttgcgcttcttgcgctttttgcgagcgcaacaaatgcgttcattattccacaatgctcacttgctccaagttccattattacacagttcctcccaccagttacttcaatgggcttcgaacacccagctgtgcaagcctataggctacaacaagcaattgcggcgagcgtcttacaacaac

SEQ ID NO: 23159 - DNA, 420 bp, Zea mays
  Clone ID: LIB3152-035-P1-K1-C4
cagaaacacaccaagcgaagcgcactagcaacgacctatcaacaatggctaccaagatattagccctccttgcgcttcttgccctttttgtgagcgcaacaaatgcgttcattattccacaatgctcacttgctcctagtgccattattccacagttccttccaccagttacttcaatgggcttcgaacacctagctgtgcaagccaacatgcaacaacaagcgcttgcggcgagcgtcttacaacaaccaattgcccaattgcaacaacaatccttgccacatctaacaatacaagccatcacaacgcaacagcaacaacaagttctaccagcactgagccacctagccatggtgaaccctgccgcctacttgcaagagcagctgcttgcattcaacccactgctctgcgaacgtagtt

SEQ ID NO: 23160 - DNA, 356 bp, Zea mays
  Clone ID: LIB3152-035-P1-K1-C5
gccacctagccatggtgaaccctgccgcctacttgcaacagcagttgcttgcatcaaacccacttgctctggcaaacgtagttgcaaaccagccacaacaacagctgcaacagtttctgccagcgctcagtcaactagccatggtgaaccctgccgcctacctacaacagcaacaactgcttttatctagcccgctcgctgtggccaatgcacctacatacctgcaacaacaattgttgcaacagattgtaccagctctgacttagcttgttgtggtacaccctgctgcctacttgtaacagctgcttccatttcaaccaactgactatgttgaactctgctgcgtacctacaaca

SEQ ID NO: 23161 - DNA, 365 bp, Zea mays
  Clone ID: LIB3152-035-P1-K1-C6
agcaacatagaaagtggaatccagtagcaacaatagagcaacaatggagaccaagatattttccctccttatgctccttgctctttctacatgtgttgctaacgcgacaattttccctcaatgctcacaagctcctatagcttccctttttcccccataccttccatcaattatagcttcagtatgtgaaaacccagctcttcaaccatataggcttcaacaagcaatcgcagcaagcaacatacctttatcgcccttgttgtgtcaacaaatcgcagccctatctttggtgcagtcattggtacaaaccatcagggcacaacagctgcagcaacttgtgctacctgtgatcaaccaagtagctc

SEQ ID NO: 23162 - DNA, 415 bp, Zea mays
  Clone ID: LIB3152-035-P1-K1-C7
attttgagcattcataaacacaccaagctttttttttctagcaacaacctaacaacaatgggtaccaagatattatccctccttgcgctacttgcgctttttgcgagcgcaacatatgcgttcattattccacaatgctcacttgctcctagttccattattccacagttcctcccaccagttactttaatggcctttgaacacccagctgtgcaagcctatatgctacaacatgcgattgcggcgagcgttttacaacaactaattgcccaattgcatcaacatttcttggcacatttaacaatacataccatcgcaacgcaacagcaacaacagttcctaccagcactgagccacctagtcatggtgaaccctgtcgcttacttgaacaatagctgcttgcatccaacccatt

SEQ ID NO: 23163 - DNA, 412 bp, Zea mays
  Clone ID: LIB3152-035-P1-K1-C8
ggacgtcagcctagcaattagctcatcgactccagattggagaactcgacaccatgaaggtgctgatcgttgcccttgctctcctggcgctcgctgcgagcgccgcctccagtacaagcggcggctgtggctgccagacaccaccgtttcatctaccgcctccgttctatatgccgcctccgttctatctgccgccgcagcagcagccgcagccatggcaataccccactcaaccaccgcagctaagcccgtgccagcagttcggatcctgcggcgtcggcagcgtcggcagcccgttcctgggccagtgcgtcgagttcctgaggcaccagtgcagcccggcggcgacgccctacggctcgccacagtgccaggcgctgcagcagcagtgctgccaccagatcaggcaggt

SEQ ID NO: 23164 - DNA, 160 bp, Zea mays
  Clone ID: LIB3152-035-P1-K1-C9
cagaccattagctatatctactccagattttttttgaacccgaccgacaccatgagggggtggttcgttgccctcgttctcctggttctctctactagcgccacctttacgcatacaagctgcgtttgtggctgacagccactgtcgccgattttatcta

SEQ ID NO: 23165 - DNA, 414 bp, Zea mays
  Clone ID: LIB3152-035-P1-K1-D1
gcaattagctcatcgactccagattggagaactcgacaccatgaaggtgctgatcgttgcccttgctctcctggcgctcgctgcgagcgccgcctccagtacaagcggcggctgtggctgccagacaccaccgtttcatctaccgcctccgttctatatgccgcctccgttctatctgccgccgcagcagcagccgcagccatggcaataccccactcaaccaccgcagctaagcccgtgccagcagttcggatcctgcggcgtcggcagcgtcggcagcccgttcctgggccagtgcgtcgagttcctgaggcaccagtgcagcccggcggcgacgccctacggctcgccacagtgccaggcgctgcagcagcagtgctgccaccagatcaggcaggtggagccgctgcaccg

SEQ ID NO: 23166 - DNA, 412 bp, Zea mays
  Clone ID: LIB3152-035-P1-K1-D10
agaccattagctttatctactccagagcgcattttaacccgatcgacaccatgagggtgttgctcgttgccctcgctctcctggctctcgctgcgagcgccacctccacgcatacaagcggcggctgcggctgccagccaccgtcgccggttcatctaccgccgccggtgcatttgccacctccggttcacctgtcacctccggtgcatctcccaccgccggtccacctgccgccgccggtccacctgccaccgccggtccatgtgccgccgacggttcatctgccgccgtcaccatgccactaccctactcaacccgctcggtctcaatcttattcctagccccacccatgcccgtgccaacagccgcatccaagtccgtgccagttgcagggaaacctgcggcgttggca

SEQ ID NO: 23167 - DNA, 420 bp, Zea mays
  Clone ID: LIB3152-035-P1-K1-D11
gctgccgctccagccttaactgttttgttaaagatgggttcctggcttcctgctgaccaatttagtatcaaggtcttgccaactattgtcaagctttttgcctccaatgaccgagctatccgagcatgtcttttgcatcacataaatcagtttggggaatcaatgtcagctcaaattgttgacgaacaagtttttcctcatgtagccactggcttctctgatactgatggtactattcgtgaactgacattgaagtcgatgctcgtattagcaccaaaattatctcagcgtacaatctcaggatctctcttaaaatatctctctaagctacaggtggacgaagaacctggtatcaggacaaacacgacaattcttcttggcaatattgcaggctacatgaacgatgggacaaggaagaga

SEQ ID NO: 23168 - DNA, 280 bp, Zea mays
  unsure at all n locations
  Clone ID: LIB3152-035-P1-K1-D12
gccaagcgtncgggcgaatcaggacccggtattttttgctcaagcctatgaaaaaaacggtgcagtatgtcctaatgaaatgaccgatgaaaagaacttttacggaagggttgacaaactggaggctatacgccatggtggagttcagtgcccagtgttgagcaaagaggccatgattgatgcctgggcactgtactaaggaccggacaagggtgcagaaacaggtgctttaataactggtggattacccgaacgcgagatgaaaaacatgttgaaaatt

SEQ ID NO: 23169 - DNA, 365 bp, Zea mays
  unsure at all n locations
  Clone ID: LIB3152-035-P1-K1-D2
tgagaccaactagcaacatagaaagcacaatagtgtaccaacaatggcagccaaaatattttgcctccttatgctccttggtctttctgcaagtgctgctacggcgaccattttcccgaaatgctcgcaagctcctatagcttcccttcttcccccgtacctctcaccagcggtgtcttcggtatgtgaaaacccaattcttcaaccctacaggatccaacaggcaatcacagctggcatcttacctttatcacccttgttcctccaacaatcatcagccctattacatcagttacctntggtgcatttattggcacaaaacattaaggcacaacaactacaacaacttgtgctagcaaaccttg

SEQ ID NO: 23170 - DNA, 389 bp, Zea mays
  unsure at all n locations
  Clone ID: LIB3152-035-P1-K1-D3
caactagcaacatagaaagcacaatagtgtaccatcattggcagccaaaatatttngcctccttatgctccttggtctttctgcaagtgctgctacggcgaccattttcccgaaatgctcgcaagctcctatagcttcccttctttccccgtacctctcaccagcggtgtcttcggtatgtgaaaacccaattcttcaaccctacaggatccaacaggcaatcacagctggcatcttacctttatcacccttgttcctccaacaatcatcagccctattacatcagttacctttggtgcatttattggcacaaaacattatggcacaacaactacaacaacttgtgctagcaaaaccttgttgcctactcttagcaacagcagtttctt

SEQ ID NO: 23171 - DNA, 412 bp, Zea mays
  Clone ID: LIB3152-035-P1-K1-D4
cggacgcgtgggtgagaccaactagcaacatataaagctcaatagtgtaccaacaatggcaggcaaaatattttgcctccttatgctccttggtctttctgcaagtgctgctacggcgaccattttcccacaatgctcacaagctcctatagcttcccttcttcccccgtacctctcaccagcggtgtcttcggtatgtgaaaacccaattcttcaaccctataggatccaacaggcaatcgcagctggcatcttacctttatcacccttgttcctccaacaatcatcagccctattacagcagttacctttggtgcatttattggcacaaaacattatggcacaacaactacaacaacttgtgctagcaaaccttgctgtctactctcagcaacaacagtttctttcattt

SEQ ID NO: 23172 - DNA, 428 bp, Zea mays
  Clone ID: LIB3152-035-P1-K1-D5
gcattcagaaacacaccaagcgaagcgcactagtaactacctaacaacaatggctaccaagatattagccctccttgcgcttcttgccctttttgtgagcgcaacaaatgcgttcattattccacaatgctcacttgctcctagtgccattattccacagttcctcccaccagttacttcaatgggcttcgaacacctagctgtgcaagccaacatgcaacaacaagcgcttgcggcgagcgtcttacaacaaccaattgcccaattgcaacaacaatccttgccacatctaacaatacaagccatcacaacgcaacagcaacaacagtttctaccagcactgagccacctagccatggtgaaccctgccgtctacttgcaagagcagctgcttgcattcaacccacttgctctggcgaacgtagttg

SEQ ID NO: 23173 - DNA, 420 bp, Zea mays
  Clone ID: LIB3152-035-P1-K1-D6
gaaagcacaatagtgtaccaacaatggcagccaaaattttttgcttccttatgctccttggtctttctgcaagtgttgctaccgcaaccattttcccacaatgctcacaagctcctatagcttcccttcttcccccatacctctcaccagcggtgtcttcaatgtgtgaaaacccaattgttcaaccctacaggatccaacaggcaatcgcaacaggcatcttaccattatcacccttgttcctccaacaaccgtcagccctattacagcagttacctttggtccatttggtggcacaaaacatcagggcacaacaactacaacaacttgtgctagcaaaccttgctgcatactctcagcaacatcagtttcttccattcaaccaactggctgcattgaactctgctgcttatttgcaac

SEQ ID NO: 23174 - DNA, 386 bp, Zea mays
  Clone ID: LIB3152-035-P1-K1-D7
agcattcagaaacacaccaagcgaagcgcactatcaacaacctaacaacaatggctaccaagatattagccctccttgcgcttcttgcccttttagtgagcgcaacaaatgcgttcattattccacagtgctcacttgctcctagtgccattattccacagatcctcccaccagttacttcaatgggcttcgaacattcagccgtgcaagcctacaggctacaactagcgcttgcggcgaccgttatcacccttcgtcctgcaacaatcatcagccctatcacatcacgtacctttggcgcatttattggcacaaaacatcacggcacaacatctacaacatcttgcgctagcaaaccgtgctgcctactctcaacaacagcagtt

SEQ ID NO: 23175 - DNA, 115 bp, Zea mays
  unsure at all n locations
  Clone ID: LIB3152-035-P1-K1-D8
ttnttagcattcacaaacacaccaagctattttttctatcaacaacctaacaacaatggggagctagatattagctctttcttgcgcttcttgccctttaagtgagcgcaacaat

SEQ ID NO: 23176 - DNA, 413 bp, Zea mays
  Clone ID: LIB3152-035-P1-K1-D9
tggcaacatagaaagcacaatagtgtactttctatttggcagccaaaatattttgcctgcttatgctccttggtatttctgcaagtgctgctacggcgaccattttcccgcaatgctcacaagctcctatagcttcccttcttcccccgtacctctcaccagcggtgtcttcggtatgtgaaaacccaattcttcaaccctacaggatccaacaggcaatcgcagctggcatcttacctttatcacccttgttcctccaacaatcatcagccctattacagcagttacctttggtgcatttattggcacaaaacatcaggtcacaacaactacaacaacttgtgctagcaaaccttgctgtctactctcagcaacagcagtttcttccattcaaccaactagctgcattgaac

SEQ ID NO: 23177 - DNA, 420 bp, Zea mays
  Clone ID: LIB3152-035-P1-K1-E1
gcaacatagaaagcacaatagtgtaccaacaatggcagccaaaatattttgcctccttatgctccttggtctttctgcaagtgctgctacggcgaccattttcccgaaatgctcgcaagctcctatagcttcccttcttcccccgtacctctcaccagcggtgtcttcggtatgtgaaaacccaattcttcaaccctacaggatccaacaggcaatcacagctggcatcttacctttatcacccttgttcctccaacaatcatcagccctattacatcagttacctttggtgcatttattggcacaaaacatcagggcacaacaactacaacaacttgtgctagcaaaccttgctgcctactctcagcaacagcagtttcttccattcaaccaactagctgcattgaactctgcttctta

SEQ ID NO: 23178 - DNA, 421 bp, Zea mays
  Clone ID: LIB3152-035-P1-K1-E10
cagaaacacaccaagcgaagctacctagcaacgtcttaacaacaatggctaccaagatattagccctccttgcgcttcttgccctttttgtgagcgcaacaaatgcgttcattattccacaatgctcacttgctcctagtgccattataccacagttcctccgaccagttacttcaatgggcttcgaacacctagctgtgcaagcctacaggctacaacaagcgcttgcggcgagcgtcttacaacaaccaattaaccaattgcaacaacaatccttggcacatctaaccatacaaaccatcgcaacacaacagcaacaacagttcctaccagcactgagccaactagatgtggtgaaccctgtcgcctacttgcaacagcaggtgcttgcatccaacccacttgctctggcaaacgtagc

SEQ ID NO: 23179 - DNA, 393 bp, Zea mays
  Clone ID: LIB3152-035-P1-K1-E11
cacatatctactatactatactctaggaagcaaggacaccaccgccatggcagccaagatgcttgcattgttcgctctcctagctctttgtgcaagcgccactagtgcgacccatattccagggcacttgccaccagtcatgccattgggtaccatgaacccatgcatgcagtactgcatgatgcaacaggggcttgccagcttgatggcgtgtccgtccctgatgctgcagcaactgttggccttaccgcttcagacgatgccagtgatgatgccacagatgatgacgcctaacatgatgtcaccattgatgatgccgagcatgatgtcaccaatggtcttgccgagcatgatgtcgcaaatgatgatgccacaatgtcactgcgacgccgt

SEQ ID NO: 23180 - DNA, 395 bp, Zea mays
  Clone ID: LIB3152-035-P1-K1-E2
cggacgcgtgggcagaccattagctttatctactccagagcgcagaagaacccgatcgacaccatgagggtgttgctcgttgccctcgctctcctggctctcgctgcgagcgccacctccacgcatacaagcggcggctgcggctgccagccaccgccgccggttcatctaccgccgccggtgcatctgccacctccggttcacctgccacctccggtgcatctcccaccgccggtccacctgccgccgccggtccacctgccaccgccggtccatgtgccgccgccggttcatctgccgccgccaccatgccactaccctactcaaccgccccggcctcagcctcatcctcagccacacccatgcccgtgccaacagccgcattcaagcccgtg

SEQ ID NO: 23181 - DNA, 423 bp, Zea mays
  Clone ID: LIB3152-035-P1-K1-E3
agctcatcgactccagattggagaactcgacaccatgttaggtgctgatcgttgcccttgctctcctggcgctcgctgcgagcgccgcctccagtacaagcggcggctgtggctgccagacaccaccgtttcatctaccgcctccgttctatatgccgcctccgttctatctgccgccgcagcagcagccgcagccatggcaataccccactcaaccaccgcagctaagcccgtgccagcagttcggatcctgcggcgtcggcagcgtcggcagcccgttcctgggccagtgcgtcgagttcctgaggcaccagtgcagcccggcggcgacgccctacggctcgccacagtgccaggcgctgcagcagcagtgctgccaccagatcaggcaggtggagccgctgcaccggtaccaggcgacat

SEQ ID NO: 23182 - DNA, 449 bp, Zea mays
  Clone ID: LIB3152-035-P1-K1-E4
ggaataccgggccgaccacgcgtccggaaagcacaatagtgtaccaacaatggcagcttttagtttttgcctccttatgctccttggtctttctgcaagtgctgctacggcgaccatttttccacaatgctcacaagctcctatagcttcccttcttcccccgtacctctcaccaacggtgtcttcggtatgtgaaaacccaattcttcaaccctacaggatccaacaggcaatcgcagctggcatcttacctttatcacccttgttccttcaacaatcatcagccctattacagcagttacctttggtgcatttattggcacaaaacatcagggcacatcaactacaacaactttgtgctagcaaacctttgctgcctactctcagcaacagcagtttctttcattcaaaccactagctgcattgaactctggtttttattttgcaac

SEQ ID NO: 23183 - DNA, 153 bp, Zea mays
  Clone ID: LIB3152-035-P1-K1-E5
cttaccaggtccagacatagcaaggattgacagtactgtgagctctttcttgattctatgggtggaggatcttggcatagatctcgcaaaccagttaagtgaatgctcttaacttaactaaggtgaccaatatcactgatgccaatgctttat

SEQ ID NO: 23184 - DNA, 422 bp, Zea mays
  unsure at all n locations
  Clone ID: LIB3152-035-P1-K1-E6
ctactatactatactctaggaagcaaggacaccaccgtcatggcagccaagatgcttgcattgttcgctctcctagctctttgtgcaagcgccactagtgcgacccatattccagggcacttgccaccagtcatgccattgggtaccatgaacccatgcatgcagtactgcatgatgcaacaggggcttgccagcttgatggcgtgtccgtccctgatgctgcagcaactgttggccttaccgcttcagacgatgccagtgatgatgccacagatgatgacgcctaacatgatgtcaccattgatgatgccgagcatgatgtcaccaatggtcttgccgagcatgatgtcgcaaatgatgatgccacaatgtcactgcgacgccgtctcgcagattatgctgcaacagcangtaccattcat

SEQ ID NO: 23185 - DNA, 310 bp, Zea mays
  Clone ID: LIB3152-035-P1-K1-E7
gtacaacaactacaacaacttgagctaggaaactttgctgcctactctcagcaacaggagttgcttccattcaaccaactggctgcattgaactctgctgcttattagcaacaacaactaccattcagcagcttgctgctggctacccccagcaaattctttcattcaaccaactggcagcattgaactctgctgtttatttacaacaacaacaggttccaccattcagtcaggtagctgatgggagccctgatgccttcttggcacaactacaggtggtggccgtttatctggacgctgcgcctaacgc

SEQ ID NO: 23186 - DNA, 417 bp, Zea mays
  Clone ID: LIB3152-035-P1-K1-E8
cagaaacacaccaagcgaagcgcactagcaacattctaacaacaatggctaccaagatattatccctccttgcgcttcttgcgctttttgcgagcgcaacaaatgcgtccattattccacaatgctcacttgctcctagttccattattccacagttcctcccaccagttacttcaatggccttcgaacacccagctgtgcaagcctataggctacaacaagcgattgcggcgagcgtcttacaacaaccaattgcccaattgcaacaacaatccttggcacatctaacaatacaaaccatcgcaacgcaacagcaacaacagttcctaccagcactgagccacctagccatggtgaaccctgtcgcctacttgcaacagcagctgcttgcatccaacccacttgctctagcaaacg

SEQ ID NO: 23187 - DNA, 415 bp, Zea mays
  Clone ID: LIB3152-035-P1-K1-E9
attgagaccaactagcaacatagaaagcacaattttgtaccaacaatggcagccaaaatattttgcttccttatgctccttggtctttctgcaagtgctgctaccgcaaccattttcccacaatgctcacaagctcctatagcttcctttcttcccccatacctctcaccagcggtgtcttcagtatgtgaaaacccaattcttcaaccctacaggatccaacaggcaatcgcagcaggcatcttacctttatcacccttgttcctccaacaaccgtcagccctattacagcagttacctttggtgcatttgttggcacaaaacattaaggcacaacaactacaacaacttgtgctaggaaaccttgctgcctactctcagcaacagcagtttcttccattcaaccaactggctg

SEQ ID NO: 23188 - DNA, 359 bp, Zea mays
  Clone ID: LIB3152-035-P1-K1-F1
acagcattgaactctcctgcttatttacagcagtttacttctactaccattcagccagctagctggtgtgagccctgctaccttcttgacacaaccacagttgttgccgttctaccagcacgctgcgcctaacgctggcaccctcttacaactgcaacaattgctgccattcaaccaacttgctttgacaaacccagcagcattctaccaacaacccatcattggtggtgccctcttttagatttcttatgagttatagttcaataataaagttttttgtctgatgtttgtggcttcccagaaataagaaagtacatttctagttataaaaaatttaataattaaattttataaataat

SEQ ID NO: 23189 - DNA, 338 bp, Zea mays
  Clone ID: LIB3152-035-P1-K1-F10
ttttgagcattcagaaacacaccaagcgatgcacattagcaacaacctaacaacaatggctaccaagatattatccctccttgcgcttcttgcgctttttgcgagcgcaacaaatgcgttcattattccacaatgctcacttgctccaagttccattattacacagttcctcccaccagttacttcaatgggcttcgaacacccagctgtgcaagcctataggcttcaacaagcaattgcggcgagcgttttacaacaaccaattttccagtttgaacaacaatccttggcacattttacaatacaaaccaattgatcgctacagcaacaacaatttc

SEQ ID NO: 23190 - DNA, 402 bp, Zea mays
  Clone ID: LIB3152-035-P1-K1-F12
cttgtcgtgtcgatctcaggtcgtgagcgcgccgttgatgcgttcgtcgtcctgggcctggacctcgaccagcatatgccaatcctcattcagaaaatggtaaacaaaaacaaacagctagaggcagtcaaattcattcaagctcttaatatagcgcacaaatacgctttgttgcctattatgagatcgtacattgatcatgccgcagttgctggtaagatgatccgcatcaggggagatgatcttgctactcagaatgcagctgatgcaaaagagcgcacacttattggaacattgcagaagttcattaaggaacagaagctagaagaactgcccatttttgaagaagctaacaagcgaatggcacatttggatcagcaaagtgctgagagaaaaagaact

SEQ ID NO: 23191 - DNA, 414 bp, Zea mays
  Clone ID: LIB3152-035-P1-K1-F2
tagaaagcacaatagtgtaccaacaatggcagcctaattattttgcctccttatgctccttggtatttctgcaagtgctgctacggcgaccattttcccgcaatgctcacaagctcctatagcttcccttcttcccccgtacctctcaccagcggtgtcttcggtatgtgaaaacccaattcttcaaccctacaggatccaacaggcaatcgcagctggcatcttacctttatcacccttgttcctccaacaatcatcagccctattacagcagttacctttggtgcatttattggcacaaaacatcagggcacaacaactacaacaacttgtgctagcaaaccttgctgcctactctcagcaacagcagtttcttccattcaaccaactagctgcattgaactctgcttctta

SEQ ID NO: 23192 - DNA, 423 bp, Zea mays
  Clone ID: LIB3152-035-P1-K1-F3
agcattcagaaacacaccaagcgaagcgcactatcatctacctaacaacaatggctaccaagatattagccctccttgcgcttcttgccctttttgtgagcgcaacaaatgcgttcattattccacaatgctcacttgctcctagtgccattattccacagttcctcccaccagttacttcaatgggcttcgaacacctagctgtgcaagccaacatgcaacaacaagcgcttgcggcgagcgtcttacaacaaccaattgcccaattgcaacaacaatccttgccacatctaacaatacaagccatcacaacgcatcagcaacaacagtttctaccagcactgagccacctagccatggtgaaccctgccgtctacttgcaagagcagctgcttgcatccaacccacttgctcttgcgaacg

SEQ ID NO: 23193 - DNA, 416 bp, Zea mays
  Clone ID: LIB3152-035-P1-K1-F5
gcaacatagaaagcacaatagtgtaccaacaatgtcattcaaaatattttgcctccttatgctccttggtctttctgcaagtgctgctacggcgaccattttcccgcaatgctcgcaagctcctatagcttcccttcttcccccgtacctctcaccagcggtgtcttcggtatgtgaaaacccaattcttcaaccctacaggatccaacaggcaatcgcagctggcatcttacctttatcacccttgttcctccaacaatcatcagccctattacaacagttacctttggtgcatttattggcacaaaacatcagggcacaacaactacaacaacttgtgctagcaaaccttgttgcctactctaagaaacagcagtttcttccattcaaccaacttggttcattgaactctggtt

SEQ ID NO: 23194 - DNA, 385 bp, Zea mays
  unsure at all n locations
  Clone ID: LIB3152-035-P1-K1-F7
atacctgcttacaagatcctggtacaagcatgntgtgaagcgattatcctgagccacttttgttaggttctttgtttacagctgattcaacaaatttcttatctgcatctggaagcataagtaaccagcaaaattctggatccagctctagttccatgctcaggcctgctgttaatgttggaacacatgtccctgagttcaacgtatctcagccaagtacaactttaagaggttcatctgatgtgttcaggaggtccttaatttctgctggcatttctcattctagaagttcaagcattccattgcagcaccgtggaaattcattcacatcacatgagattaggaatcaatagccgggatcaagctctcgtgcacattatcagta

SEQ ID NO: 23195 - DNA, 383 bp, Zea mays
  unsure at all n locations
  Clone ID: LIB3152-035-P1-K1-F8
catcaatcatcattcatcttagtagtattggtanctaaatcaaatctgcaacatcaattatctaactccaaaaaccatgaagctggtgcttgtggttcttgctttcattgctttagtatcaagtgtttcttgtacacagacaggcggctgcagctgtggtcaacaacaaagccatgagcagcaacatcatccacaacaacatcatccacaaaaacaacaacatcaaccaccaccacaacatcaccagcagtagcaacaccaacaacaacaagtttacatgcaaccacaaaaacattagcaacaacaagaagttcatgttcaacaacaacaacaacaaccgcagttccaacaacatcaacaacaacagcaccaacaacaacatt

SEQ ID NO: 23196 - DNA, 299 bp, Zea mays
  Clone ID: LIB3152-035-P1-K1-F9
atagaaagcacaatagtgtaccaacaatgtcagttaaaatattttgcctccttatgctccttggtctttctgcaagtgctgctacggcgaccattttcccacaatgctcacaagctcctatagcttcccttcttcccccgtacctctcaccaacggtgtcttcggtatgtgaaaacccaattctttaaccctacaggatccaacaggcaatcgcagctggcatcttacctttatcacccttgttccttcaacaattatcaaccctattacagcagttacctttggtgcatttattggca

SEQ ID NO: 23197 - DNA, 387 bp, Zea mays
  Clone ID: LIB3152-035-P1-K1-G1
attgagaccaacaagcaacatagaaagtggaatccagtagcaacaatagagcaacaatggagaccaagatattttccctccttatgctccttgctctttctacatgtgttgctaacgcgacaattttccctcaatgctcacaagctcctatagcttccctttttcccccataccttccatcaattatagcttcagtatgtgaaaacccagctcttcaaccatataggcttcaacaagcaatcgcagcaagcaacatacctttatcgcccttgttgtgtcaacaatcgccagccctatctttggtgcagtcattggtacaaaccatcagggcacaacagctgcagcaactcgtgctacctgtgatcaaccaagtagctctggcaaacc

SEQ ID NO: 23198 - DNA, 363 bp, Zea mays
  Clone ID: LIB3152-035-P1-K1-G10
ccggcagttcgcgacaccatgagctccacggagtgcggcggcggcggcggcgccaagacgtcgtggcctgaggtggtcgggctgagcgtggaggacgccaagaaggtgatcctcaaggacaagcccgacgccgacatcgtggtgctgcccgtcggctccgtggtgaccgcggattatcgccctaaccgtgtccgcatcttcgtcgacatcgtcgcccagacgccccacgtcggctgataatatataagctagccgctatttcctttccatgccccagaacttgaaataaatatatatacgatgaaataacgccggcattgccgaataatggatgtgtgaattctcactaattaagtaatgcat

SEQ ID NO: 23199 - DNA, 410 bp, Zea mays
  Clone ID: LIB3152-035-P1-K1-G11
gcaacatagaaagcacaatagtgtaccaacaattgcagccaaaatattttgcctccttatgctccttggtctttctgcaagtgctgctacggcgaccattttcccacaatgctcacaagctcctatagcttcccttcttcccccgtacctctcaccagcggtgtcttcggtatgtgaaaacccaattcttcaaccctataggatccaacaggcaatcgcagctggcatcttacctttatcacccttgttcctccaacaatcatcagccctattacagcagttacctttggtgcatttattggcacataacatcagggcacaacaactacaacaacttgtgctagcaaaccttgctgcctactctcagcaacaacagtttcttccattcaaccaactagcttgcattgaac

SEQ ID NO: 23200 - DNA, 425 bp, Zea mays
  unsure at all n locations
  Clone ID: LIB3152-035-P1-K1-G12
gagcattcagaaacacaccaagcgaagcgcactagcaacaacctaacaacaatggctaccaagatattatccctccttgcgcttcttgcgctttttgcgagcgcaacaaatgcgtccattattccacaatgctcacttgctcctagttccattattccacagttcctcccaccagttacttcaatggccttcgaacacccagctgtgcaagcctataggctacaacaagcgattgcggcgagcgtcttacaacaaccaattgcccaattgcaacaacaatccttggcacatctaacaatacaaaccatcgcaacgcaacagcaacaacagttcctaccagcactgagccacctagccatggtgaaccctgtcgcctacttgcaacagcagctgcttgcatncaacccacttgctctagcanacgt

SEQ ID NO: 23201 - DNA, 409 bp, Zea mays
  Clone ID: LIB3152-035-P1-K1-G2
gttacctttggtgcatttattggcacaaaacatcatgtcacaacaactacaacaacttgtgctagcaaaccttgctgcctactctcagcaacagcagtttcttccattcaaccaactaggttcattgaactctgcttcttatttgcaacaacaacaactaccattcagccagctacctgctgcctacccccagcaatttcttccattcaaccaactagcagcattgaactctcctgcttatttacagcagcaacaactactaccattcagccagctagctggtgtgagccctgctaccttcttgacacaaccacagttgttgccgttctaccagcacgttgcgcctaacgctggcaccctttaacaactgcaacaattgctgccattcaaccaacttgctttgacaaac

SEQ ID NO: 23202 - DNA, 423 bp, Zea mays
  unsure at all n locations
  Clone ID: LIB3152-035-P1-K1-G3
tagaaagcacaatagtgtaccaacaatggcagccaaaatattttgcttccttatgctccttggtctttctgcaagtgttgctaccgcaaccattttcccacaatgctcacaagctcctatagcttcccttcttcccccatacctctcaccagcggtgtcttcaatgtgtgaaaacccaattgttcaaccctacaggatccaacaggcaatcgcaacaggcatcttaccattatcacccttgttcctccaacaaccgtcagccctattacagcagttacctttggtccatntggtggcacaaaacatcagggcacaacaactacaacaacttgtgctagcaaaccttgctgcatactctcagcaacatcagtttctttcattcaaccaactggctgcattgaactctgctgcttatttgcaaca

SEQ ID NO: 23203 - DNA, 251 bp, Zea mays
  Clone ID: LIB3152-035-P1-K1-G4
cggacgcgtgggttgagcattcagaaacacaccaagctaagcgcactagcaacgacctaacaacaatggctaccaagatattagccctccttgcgcttcttgccctttttgtgagcgcaacaaatgcgttcattatttcacaatgctcacttgctcctagtgccattattccacagtttcttccaccagctactctaatgggcttctaacacccatctgtgcaagccaacatgcaacaacaagtgcttgtg

SEQ ID NO: 23204 - DNA, 430 bp, Zea mays
  Clone ID: LIB3152-035-P1-K1-G5
cagcattcagaaacacaccaagcgaagcgcactagcaacaacctaacaacaatggctaccaagatattagccctccttgcgcttcttgcccttttagtgagcgcaacaaatgcgttcattattccacagtgctcacttgctcctagtgccattattccacagttcctcccaccagttacttcaatgggcttcgaacatccagccgtgcaagcctacaggctacaactagcgcttgcggcgagcgtcttacaacaaccaattgcccaattgcaacaacaatccttggcacatctaaacctacaaaccatcgcaacgcaacagcaacaacagtttctgccatcactgagccacctagccgtggtgaaccctgtcgcctacttgcaacagcagctacttgcatccaacccacttgctctggcgaacgtagctg

SEQ ID NO: 23205 - DNA, 378 bp, Zea mays
  Clone ID: LIB3152-035-P1-K1-G6
ctgcaacaagaattgttgcaacagattgtaccatctctaactcagctagctgtggcaaaccctgttgcctacttgcaacagctgcttccattcaaccaactaactatgtcgaactctgttgcgtacctacaacagcgacaacagttacttaatccattggcagtggctaacccattggtcgctgccttcctacagcagcaacaattgctgccatacaaccggttctctttgatgaatcctgtcttgtcgaggcagcaacccatcgttggaggtgccatcttttagattacatatgagatgtactcgataatggtgccctcataccggcatgtgtttcctagaaataatcaatatattggttgagatttatctcgatat

SEQ ID NO: 23206 - DNA, 149 bp, Zea mays
  Clone ID: LIB3152-035-P1-K1-G7
tcgatccaatccatatcagcaaagcggcagtttttttttagtatcgacgaacatatcagaatgcggagtgtcatcgttctacatgtgtgcctggctttagaagcatgtcatttcctacgtaatgcatatgcctcgcccctgtgcgtagc

SEQ ID NO: 23207 - DNA, 417 bp, Zea mays
  Clone ID: LIB3152-035-P1-K1-G8
cagaaacacaccaagcgaagcgcactagcaacatcctaacaacaatggctaccaagatattagccctccttgcgcttcttgcccttttagtgagcgcaacaaatgcgttcattattccacagtgctcacttgctcctagtgccattattccacagttcctcccaccagttacttcaatgggcttcgaacatccagccgtgcaagcctacaggctacaactagcgcttgcggcgagcgtcttacaacaaccaattgcccaattgcaacaacaatccttggcacatctaaacctacaaaccatcgcaacgcaacagcaacaacagtttctgccatcactgagccacctagccggggtgaaccctgtcgcctacttgcaacagcagctacttgcattcaacccacttgctctggcgaacg

SEQ ID NO: 23208 - DNA, 404 bp, Zea mays
  Clone ID: LIB3152-035-P1-K1-G9
ccgcaaaccagcgcaagcccttccctgacagcggcggcgacatggtgctcgaggcgacgatgatctgcatagacaactcggagtggatgcggaacggcgactacgccccgtcgcggttccaggcgcaggccgatgccgtcaacctcatatgcggtgccaagacccagtcgaacccggagaacacagtaggcgtgatgacgatggccgggaagggcgtccgcgtgcttgtcactcccaccagcgacctcgggaagattctcgcctgtatgcacgggttggaagttggtgctgaggcaaacttggctgcggcaatccaggttgctcagcttgcgctaaagcatcgccagaacaagaggcagcagcagaggattatagcattcatcggaagtcctgtgaagtacgac

SEQ ID NO: 23209 - DNA, 422 bp, Zea mays
  unsure at all n locations
  Clone ID: LIB3152-035-P1-K1-H1
tcagaaacacaccaagcgaagctacctagcaacgacttaacaacaatggctaccaagatattagccctccttgcgcttcttgccctttttgtgagcgcaacaaatgcgttcattattccacaatgctcacttgctcctagtgccattataccacagttcctccgaccagttacttcaatgggcttcgaacacctagctgtgcaagcctacaggctacaacaagcgcttgcggcgagcgtcttacaacaaccaattaaccaattgcaacaacaatccttggcacatctaaccatacaaaccatcgcaacacaacagcaacaacagttcctaccagcactgagccaactagatgtggtgaaccctgtcgcctacttgcaacagcaggtgcttgcatccaacccacttgctctggcanacgtagc

SEQ ID NO: 23210 - DNA, 402 bp, Zea mays
  Clone ID: LIB3152-035-P1-K1-H10
gcaacatagaaagtggaatacagtagcaacaatagagcaacaatggcggccaagatattttccatccttatgctccttgctctttctgcatgtgttgctaacgcgaccatttttcctcaatactcacaagctcctatagctgcccttcttcccccataccttccatcaatgaccgcttcagtatgtgaaaacccagcccttcaaccctacaggctccaacaagcaatcgcaacaagcaacttacctttatcacccctgttctttcaacaatcgccagccctatctttggtgcagtcattggtacaaaccatcagggcacaacagctgcagcaactcgtgctaccagtgatcagccaagtagctctggcaaacctttctccctactctcagcaacaacaattt

SEQ ID NO: 23211 - DNA, 406 bp, Zea mays
  Clone ID: LIB3152-035-P1-K1-H11
accaactagcaacatagaaagcacaatagtgtaccaacaatggcagccaaaatattttgcctccttatgctccttggtctttctgcaagtgctgctacggcgaccattttcccgaaatgctcgcaagctcctatagcttcccttcttcccccgtacctctcaccagcggtgtcttcggtatgtgaaaacccaattcttcaaccctacaggatccaacaggcaatcacagctggcatcttacctttatcacccttgttcctccaacaatcatcagccctattacatcagttacctttggtgcatttattggcacaaaacatcagggcacaacaactacaacaacttgtgctagcaaaccttgcttctactctcagcaacagcagtttttttcattaaccaacttgct

SEQ ID NO: 23212 - DNA, 454 bp, Zea mays
  Clone ID: LIB3152-035-P1-K1-H12
accggatggatcccggtcgcccacgcgtcgaactagcaacatagaaagcacaatagtgtaccaacaatggcagccaaaatattttgcctccttatgctccttggtctttctgcaagtgctgctacggcgaccattttcccgaaatgctcgcaagctcctatagcttcccttcttcccccgtacctctcaccagcggtgtcttcggtatgtgaaaacccaattcttcaaccctacaggatccaacaggcaatcacagctggcatcttacctttatcacccttgttcctccaacaatcatcagccctattacatcagttacctttggtgcatttattggcacaaaacatcagggcacaacaactacaacaacttgtgctagcaaaccttgctgcctactctcagcaacagcagtttcttccattcaaccaactagctgcattgaactctgcttctt

SEQ ID NO: 23213 - DNA, 399 bp, Zea mays
  Clone ID: LIB3152-035-P1-K1-H2
agaaagtggaatccagtagcaacaatagagcatcatttgcgaccaagatattttccctccttatgctccttgctctttctgcatgtgttgctaacgcgacaattttccctcaatgctcacaagctcctatagcttcccttcttcccccataccttccatcaatgatagcttcagtatgtgaaaacccagctcttcaaccctataggctccaacaagcaatcgcagcaagcaacatacctttatcacccttgtttcaaacaatcgccagccctatctttggtgcaagcattggtacaaaccatcagggcacaacagttgcagcaactcgtgctacctgtgatcaaccaagtagcttttggcaaacctttttccctacttttagcaacaacaatttttttc

SEQ ID NO: 23214 - DNA, 424 bp, Zea mays
  Clone ID: LIB3152-035-P1-K1-H3
gcgaagcgcactagcaacaacctaacaacaatgtctaccaagatattagccctccttgcgcttcttgcccttttagtgagcgcaacaaatgcgttcattattccacagtgctcacttgctcctagtgccattattccacagttcctcccaccagttacttcaatgggcttcgaacatccagccgtgcaagcctacaggctacaactagcgcttgcggcgagcgtcttacaacaaccaattgcccaattgcaacaacaatccttggcacatctaaacctacaaaccatcgcaacgcaacagcaacaacagtttctgccatcactgagccacctagccgtggtgaaccctgtcgcctacttgcaacagcagctacttgcatccaacccacttgctctggcgaacgtagctgcataccagcaacaac

SEQ ID NO: 23215 - DNA, 426 bp, Zea mays
  Clone ID: LIB3152-035-P1-K1-H4
agaaacacaccaagcgaagctacctagcaacgtcttaacaacaatggctaccaagatattagccctccttgcgcttcttgccctttttgtgagcgcaacaaatgcgttcattattccacaatgctcacttgctcctagtgccattataccacagttcctccgaccagttacttcaatgggcttcgaacacctagctgtgcaagcctacaggctacaacaagcgcttgcggcgagcgtcttacaacaaccaattaaccaattgcaacaacaatccttggcacatctaaccatacaaaccatcgcaacacaacagcaacaacagttcctaccagcactgagccaactagatgtggtgaaccctgtcgcctacttgcaacagcaggtgcttgcatccaacccacttgctctggcaaacgtagctgcata

SEQ ID NO: 23216 - DNA, 392 bp, Zea mays
  Clone ID: LIB3152-035-P1-K1-H5
cagaaacacaccaagcgaagcgcactagcaacattctaacaacaatggctaccaagatattagccctccttgcgcttcttgcccttttagtgagcgcaacaaatgcgttcattattccacagtgctcacttgctcctagtgccattattccacagttcctcccaccagttacttcaatgggcttcgaacatccagccgtgcaagcctacaggctacaactagcgcttgcggcgagcgtcttacaacaaccaattgcccaattgcaacaacaatccttggcacatctaaacctacaaaccatcgcaacgcaacagcaacaacagtttctgccatcactgagccacctagccgtggtgaaccctgtcgcctacttgcaacagcagctacttgca

SEQ ID NO: 23217 - DNA, 426 bp, Zea mays
  Clone ID: LIB3152-035-P1-K1-H6
agtcgcaccagtttcatccaaagcacaatacaactagctatggtgaaccctgccacatacctgcaacagcaacaactgctttcatctagcccactcgctgtgggcaatgcggctacatacctgcaacagcagctgctacaacagatcgtaccggctcttagtcagctagttgtggcgaaccctactgcctacttacaacagcttcttccattcaaccaactagatgtggcaaactctgctgcgtacctacaacagcggcagcaactacttaatccacttgcagcggctaacccattggtcgccgccttcctgcaacagcaacaatttctgccatacaaccaaatctctttgatgaaccttgccttgtcaaggcagcaaccgatcgttggaggtgccatcttttagattacaaatgagatgtacttg

SEQ ID NO: 23218 - DNA, 319 bp, Zea mays
  Clone ID: LIB3152-035-P1-K1-H7
attttgagcattcagaaacacaccaagcgtttctcactagcaacaacctaacaacaatggctaccaagatattatccctccttgcgcttcttgcgctttttgcgagcgcaacaaatgcgtccattattccacaatgctcacttgctcctagttccattattccacagttcctcccaccagattcttcaatggccttcgaacacccagctgtgcaagcctataggctacaacaagcgattgcggcgagcgttttacaacaaccaattgcccaattgcaacaacaatttctggcacatctaacaatacaaaccattgcaac

SEQ ID NO: 23219 - DNA, 420 bp, Zea mays
  Clone ID: LIB3152-035-P1-K1-H8
ggtatgtgaaaacccaattcttcaaccctacattatccaacaggcaatcgcagctggcatcttacctttatcacccttgttcctccaacaatcatcagccctattacagcagttacctttggtgcatttattggcacaaaacatcagggcacaacaactacaacaacttgtgctagcaaaccttgctgcctactctcagcaacagcagtttcttccattcaaccaactagctgcattgaactctgcttcttatttgcaacaacaacaactaccattcagccagctatctgctgcctacccccagcaatttcttccattcaaccaactgacagcattgaactcttctgcttatttacagcagcaacaactactaccattcagccagctagctggtgtgagccctgctaccttcttgacaca

SEQ ID NO: 23220 - DNA, 408 bp, Zea mays
  Clone ID: LIB3152-035-P1-K1-H9
acctcactgggagggtggatatgaggcattttgtgaagacaattcagtatcttattggctctggaatggatcctaggactgaaaataatccttatcttggtttcatctacacctccttccaagagcgggcgaccttcatctcgcatgggaacactgctcgtcatgccaaggactttggcgacttaaagctcgcacaaatctgtggcatcatcgcctcagatgagaagcgacatgaaactgcgtacaccaagatcgtggagaagttgtttgagatcgaccctgatggtaccgtggttgctctggctgacatgatgaagaagaagatctcaatgcctgcccacctgattgttgacggtcaggacgacaagctgtttgagcacttcttcatggtcgcgcagaggctttggc

SEQ ID NO: 23221 - DNA, 278 bp, Zea mays
  Clone ID: LIB3152-036-P1-K1-A1
attttgagcattcagaaacacaccaagcgaagcgcactagcaacaacctaacaacaatggctaccaagatattatccctccttgcgcttcttgcgctttttgcgagcgcaacaaatgcgtccattattccacaatgctcacttgctcctagttccattattccacaggtccttccaccaggtactttaatggccttcgaacacccaagtgggccaggcttttaggttccaccaggcgatggcgggaggcgtttaacaccacccaattgcccaattgca

SEQ ID NO: 23222 - DNA, 420 bp, Zea mays
  Clone ID: LIB3152-036-P1-K1-A10
gtttcttgtacacagacaggcggctgcagctgtggtcaacaacaaagccatgagcagcaacatcatccacaacaacatcatccacaaaaacaacaacatcaaccaccaccacaacatcaccagctgcagcaactcgtgctacctgtgatcaaccaagtagctctggcaaacctttctccctactctccgcaacaacaatttcttccattcaaccaactgtctacactgaaccctgctgcttatttgcagcaacaactattaccatttagccagctagctactgcctactctcaacaacaacaactttttccatttaaccaattggccgcactgaaccccgctgcttatttgcagcagcaaatactactaccatttaaccagctagctacagcaagccgttgcttcttcttgacacaacaa

SEQ ID NO: 23223 - DNA, 436 bp, Zea mays
  Clone ID: LIB3152-036-P1-K1-A11
cggacgcgtgggtagcaacatagaaagcacaatagtgtaccaacaatggcagccaaaatattttgcctccttatgctccttggtctttctgcaagtgctgctacggcgaccattttcccgaaatgctcgcaagctcctatagcttcccttcttcccccgtacctctcaccagcggtgtcttcggtatgtgaaaacccaattcttcaaccctacaggatccaacaggcaatcacagctggcatcttacctttatcacccttgttcctccaacaatcatcagccctattacatcagttacctttggtgcatttattggcacaaaacatcagggcacaacaactacaacaacttgtgctagcaaaccttgctgcctactctcagcaacagcagtttcttccattcaaccaactagctgcattgaactctgcttcttatt

SEQ ID NO: 23224 - DNA, 321 bp, Zea mays
  Clone ID: LIB3152-036-P1-K1-A12
gcaaattgcaccaagaaatccatcgagtgtccttcgacaggggaattaatggcgtcgggtgctagcatcatccacctccgcctcatcctcgcagccgccgtcctgctctccgtgctcgcgtctgccatcgcctgtcccattacctccttgtttccttcgttcttcattctctttaatcctttttttgctattacctattcttttcccttctcactcttcctctatttctttcacttgtgttctctcttttattactcttttttcctttcttcattttttattcttatatctttcttttacccattcgtttctatattattt

SEQ ID NO: 23225 - DNA, 436 bp, Zea mays
  Clone ID: LIB3152-036-P1-K1-A2
attttgagcattcagaaacacaccaagcgaagcgcactatcaacaacctaacaacaatggctaccaagatattatccctccttgcgcttcttgcgctttttgcgagcgcaacaaatgcgtccattattccacaatgctcacttgctcctagttccattattccacagttcctcccaccagttacttcaatggccttcgaacacccagctgtgcaagcctataggctacaacaagcgattgcggcgagcgttttacaacaaccaattgcccaattgcaacaacaattcttgtcacatctaacaatacaaaccatcgcaacgcaacagcaacaacagttcctaccagcactgagccacctagccatggtgaaccctgtcgcctacttgcaacaagagcttgtttgcatccaacccacttgctctagcaaacgtagttg

SEQ ID NO: 23226 - DNA, 451 bp, Zea mays
  Clone ID: LIB3152-036-P1-K1-A3
caacaagcaacatagaaagtggaatccagtagcaacaatagagcaacaatggcgaccaagatattttccctccttatgctccttgctctttctgcatgtgttgctaacgcgacaattttccctcaatgctcacaagctcctatagcttcccttcttcccccataccttccatcaatgatagcttcagtatgtgaaaacccagctcttcaaccctataggctccaacaagcaatcgcagcaagcaacatacctttatcacccttgtttcaacaatcgccagccctatctttggtgcagtcattggtacaaaccatcagggcacagcagctgcagcaactcgtgctacctgtgatcaaccaagtagctctggcaaacctttctccctactctcagcaacaacaatttttttccattcaaccaactgtctacattgaaccgtgctgcttatttg

SEQ ID NO: 23227 - DNA, 434 bp, Zea mays
  Clone ID: LIB3152-036-P1-K1-A4
cagcattcagaaacacaccaagcgaagcgcactagcaacaacctaacaacaatggctaccaagatattagccctccttgcgcttcttgcccttttagtgagcgcaacaaatgcgttcattattccacagtgctcacttgctcctagtgccattattccacagttcctcccaccagttacttcaatgggcttcgaacatccagccgtgcaagcctacaggctacaactagcgcttgcggcgagcgtcttacaacaaccaattgcccaattgcaacaacaatccttggcacatctaaacctacaaaccatcgcaacgcaacagcaacaacagtttctgccatcactgagccacctagccgtggtgaaccctgtcgcctacttgcaacagcagctacttgcatccaacccacttgctctggcgaacgtagctgcata

SEQ ID NO: 23228 - DNA, 426 bp, Zea mays
  Clone ID: LIB3152-036-P1-K1-A5
gcattcagaaacacaccaagcgaagcgcactattatcatcctaacaacaatggctaccaagatattatccctccttgcgcttcttgcgctttttgcgagcgcaacaaatgcgtccattattccacaatgctcacttgctcctagttccattattccacagttcctcccaccagttacttcaatggccttcgaacacccagctgtgcaagcctataggctacaacaagcgattgcggcgagcgtcttacaacaaccaattgcccaattgcaacaacaattcttggcacatctaacaatacaaaccatttcaacgcaacagcaacaacagttcctaccagcactgagccacctagccatggtgaaccctgtcgcctacttgcaacagcagctgcttgcatccaacccacttgctttagcaaacgtagt

SEQ ID NO: 23229 - DNA, 442 bp, Zea mays
  Clone ID: LIB3152-036-P1-K1-A6
gcattcagaaacacaccaagcgaagcgcactatcaacaacctaacaacaatggctaccaagagattagccctccttgcgcttcttgcccttttagtgagcgcaacaaatgcgttcattattccacagtgctcacttgctcctagtgccattattccacagttcctcccaccagttacttcaatgggcttcgaacatccagccgtgcaagcctacaggctacaactagcgcttgcggcgagcgtcttacaacaaccaattgcccaattgcaacaacaatccttggcacatctaaacctacaaaccatcgcaacgcaacagcaacaacagtttctgccatcactgagccacctagccgtggtgaaccctgtcgcctacttgcaacagcagctacttgcatccaacccacttgctctggcgaacgtagctgcataccagcaacaa

SEQ ID NO: 23230 - DNA, 380 bp, Zea mays
  Clone ID: LIB3152-036-P1-K1-A7
gaccgaccgaattcggcacgccacgcttcggcacaagaaagcacctagcgtaccaacattggcagacaaaatcttcagcctctttatggttcttgttctttctggaggtgctggtgctgtgagcatgcgcaacaaatgctcgcatgattctatagcgctcatttgttcctagttccattaaccaacagtgtcttcgacctgtgactacaaaggtcttcaaacatacaggtgtgaacgggtattggctgcagcaagcgaacgttgatagcgcttgacaataacacattgatcagtcgtatcacatcagctagctacgtgtgcatttatagaccatagcatgaggcagcaacaactgctacaactagcgctgggacacctag

SEQ ID NO: 23231 - DNA, 274 bp, Zea mays
  Clone ID: LIB3152-036-P1-K1-A8
ccacaacaactgcaacaacttgtgctagcaatccttgctgcatactctcagcaacatcagtttttttcattcaaccaactggctgtattgaactctgctgcttatctgcaacaacaattaccatacaggcagctagtggctgcctacccccagcaatcttttccattcaaccaactagcagcattgaactctgctgcttatttacagcagcaacaactactaccattcagtcaggtagctgatgtgagccctgctggcttcatgacacaacaac

SEQ ID NO: 23232 - DNA, 432 bp, Zea mays
  Clone ID: LIB3152-036-P1-K1-A9
caacatagaaagcacaatagtgtaccaacaatggcagctaaaatattttgcctccttatgctccttggtctttctgcaagtgctgctacggcgaccattttcccacaatgctcacaagctcctatagcttcccttcttcccccgtacctctcaccaacggtgtcttcggtatgtgaaaacccaattcttcaaccctacaggatccaacaggcaatcgcagctggcatcttacctttatcacccttgttcctccaacaatcatcagccctattacagcagttacctttggtgcatttattggcacaaaacatcagggcacaacaactacaacaacttgtgctagcaaaccttgctgcctactttaagcacagcagttttttccattcaaccaactagctgcattgaactctgctttttatttgcaacaacaac

SEQ ID NO: 23233 - DNA, 443 bp, Zea mays
  Clone ID: LIB3152-036-P1-K1-B1
ccaagcgaagcgcactagcaacgacctaacaacaatggctaccaagatattagccctccttgcgcttcttgccctttttgtgagcgcaacaaatgcgttcattattccacaatgctcacttgctcctagtgccattattccacagttcctcccaccagttacttcaatgggcttcgaacacctagctgtgcaagccaacatgcaacaacaagcgcttgcggcgagcgtcttacaacaaccaattgcccaattgcaacaacaatccttgccacatctaacaatacaagccatcacaacgcaacagcaacaacagtttctaccagcactgagccacctagccatggtgaaccctgccgtctacttgcaagagcagctgcttgcattcaacccacttgctctggcgaacgtagttgcaaccagcaacaacaacagcttcaacagtt

SEQ ID NO: 23234 - DNA, 437 bp, Zea mays
  Clone ID: LIB3152-036-P1-K1-B10
cagttcctcccaccagttacttcaatgttcttttaacacccagctgtgcaagcctataggctacaacaagcgattgcggcgagcgtcttacaacaaccaattgcccaattgcaacaacaatccttggcacatctaacaatacaaaccatcgcaacgcaacagcaacaacagttcctaccagcactgagccacctagccatggtgaaccctgtcgcctacttgcaacagcagctgcttgcatccaacccacttgctctagcaaacgtagttgcaaaccagcaacaacaacaactgcaacagtttctgccagcgcttagtcaactagccatggtgaaccctgccgcctacctacaacagcaacaactgctttcatctagcccgctcgctgtggccaatgcacctacatacctgcaacaagaattgttgcaacagattgt

SEQ ID NO: 23235 - DNA, 355 bp, Zea mays
  Clone ID: LIB3152-036-P1-K1-B11
ggctacttcgctcagtccaatgtgcttgtataccctgacactggcggtcaggttgtgtacattctggatcaagtccgtgctttggagaatgagatgcttctgaggattaagcagcaaggccttgatatcactccgaagatcctcattgttaccaggctgttgcctgatgctgctgggactacgtgcggtcagcggctggagaaggtcattggtactgagcacacagacatcattcgcgttccgttcagaaatgagaatggcatcctccgcaagtggatctctcgttttgatgtctggccatacctggagacatacactgaggatgtttccagtgaaataatgaatgaaatgcatg

SEQ ID NO: 23236 - DNA, 416 bp, Zea mays
  Clone ID: LIB3152-036-P1-K1-B12
atgggagccaagatttttgccctccttgccctccttgctctttcagcaagcgctgctacctcgacttttattccacaatgctcacaacaatacctctctccggcgacagccgtgggatttcaatacccaactatacaatcctacatggtacaagaggccatccaagcaagcatcttacggtcattagcattaaccctccaacaaccatatgctctattgcaacagccatccttagtgcatctgtatctccaaagaatcgcggcacaacaactacaacaacagttgctaccaacaatcaatcaagtagttgcagcgaaccttgctgcttacctccagcaacaacagtttcttccattcaatcaactagatggggtgaaccctgctatctacttgcaggcacaacagcttctaccatt

SEQ ID NO: 23237 - DNA, 436 bp, Zea mays
  Clone ID: LIB3152-036-P1-K1-B2
caactagcaacatagaaagcacaatagtgtaccaacaatggcagccaaaatattttgcctccttatgctccttggtctttctgcaagtgctgctacggcgaccattttcccacaatgctcacaagctcctatagcttcccttcttcccccgtacctctcaccagcggtgtcttcggtatgtgaaaacccaattcttcaaccctataggatccaacaggcaatcgcagctggcatcttacctttatcacccttgttcctccaacaatcatcagccctattacagcagttacctttggtgcatttattggcacaaaacatcagggcacaacaactacaacaacttgtgctagcaaaccttgctgcctactttcagcaacaacagtttctttcattcaaccaactagctggattgaactctgcttcttaattgcaacaa

SEQ ID NO: 23238 - DNA, 298 bp, Zea mays
  Clone ID: LIB3152-036-P1-K1-B3
cgctgcaccggtaccaggcgacatacggtgtgtgtcctgcagtccttcctgcagcagcagccgcagggcgagctcgcggcgctgatggcggcccaggtagcgcagcagctgacggcgatgtgcggcctgcagctgcagcagccaggtccctgcccttgcaacgcagctgccggcggtgtctactactgaggaaactatgtactgtagtaattatgtaatggagccgttgactaagctacctagcttggttgtttacttattcagcgttgatgagtaactgtattgttacccattacca

SEQ ID NO: 23239 - DNA, 438 bp, Zea mays
  Clone ID: LIB3152-036-P1-K1-B4
cggacgcgtggggcaacatataaagtggaatactttttcaacaatagagcaacaatggcgggcaagatattttccatccttatgctccttgctctttctgcatgtgttgctaacgcgaccatttttcctcaatactcacaagctcctatagctgcccttcttcccccataccttccatcaatgaccgcttcagtatgtgaaaacccagcccttcaaccctacaggctccaacaagcaatcgcaacaagcaacttacctttatcacccctgttctttcaacaatcgccagccctatctttggtgcagtcattggtacaaaccatcagggcacaacagctgcagcaactcgtgctaccagtgatcagtcaagtagctttggcaaccttttctcctactcttagcaacaacaatttctttcattcaaccaactgtttacac

SEQ ID NO: 23240 - DNA, 437 bp, Zea mays
  Clone ID: LIB3152-036-P1-K1-B5
ctccgtctcggcctccccctccactccccgccttcgaacatccggcgccatccgcacccccgcaccccaactcccctcgtccttcacggtcgcgatggtggtgtccatggcgtcgccttaggggcgatcgatctaggagaaagtgctggagcacgtggcgtcgtaccaccagcaacaacggaggcagaagctacgcaagagcctcacctacaccggcggcgagctctcgttcgctgttcggggccatggggacgacctcgtcttcacgttcgtcggggcatagaaggaggacatgcctcttgagcacgtcttcaaaatcattagttatttcatcttgcaacagatccgatggcaaaagtgtgtgtttatggttcctgagtcagatgatctttttttaagttttagatgtgatagatattagtatgaaagataaaaac

SEQ ID NO: 23241 - DNA, 437 bp, Zea mays
  Clone ID: LIB3152-036-P1-K1-B6
gcattcagaaacacaccaagcgaagcgcactagtaacaacctaacaacaatggctaccaagatattagccctccttgcgcttcttgcccttttagtgagcgcaacaaatgcgttcattattccacagtgctcacttgctcctagtgccattattccacagttcctcccaccagttacttcaatgggcttcgaacatccagccgtgcaagcctacaggctacaactagcgcttgcggcgagcgtcttacaacaaccaattgcccaattgcaacaacaatccttggcacatctaaacctacaaaccatcgcaacgcaacagcaacaacagtttctgccatcactgagccacctagccgtggtgaaccctgtcgcctacttgcaacagcagctacttgcatccaacccacttgctctggcgaacgtagctgcataccagc

SEQ ID NO: 23242 - DNA, 414 bp, Zea mays
  Clone ID: LIB3152-036-P1-K1-B7
ccgcaagttgcccttccagcgcctcgtccgtgtgatcgcgcaggacttcaagaccgatctccgcttccagtcctccgccgtcgccgcgctgcaggaggccgccgaggcctacctcgtggggctctttgaggacactaacctctgcgccatccacgccaagcgcgtcaccatcatgcccaaggacatccagctcgcgcgccgcatcaggggagagagggcctgagcgaggcgagctcctctcaccgtaggcggcgtcgttgttgcttcggtcctgcttgtaggacttgtgcttttctttggttcccttctggtgggagggggcatcttggtaccaatgggcttggtttttagattcttaagggatagatgagtttgtttaattttcttggtttaccttgttttgatttatttttt

SEQ ID NO: 23243 - DNA, 336 bp, Zea mays
  Clone ID: LIB3152-036-P1-K1-B8
gcgagtcgccgccggcactgcccggcacggttctcttctccggcgaaggcggagctcgttacggggattccacatccgttaatcggtcccaccggatccctcgccgcctcccacgggccgggccgcgccgtggcgcgcgcgcaggccgagatgcggaagaggatggagagcgtcgacgatctgatcgaggaggcaaaactgcgcaccgtctggtgggcgctctgcattttcgtcgacttcttactttctcacgcgtgagcacgttcccttttgttcctctctgtttccgtgcctaatttgcgtccggattgggttttgtgtttcgtgtgggccgtt

SEQ ID NO: 23244 - DNA, 195 bp, Zea mays
  Clone ID: LIB3152-036-P1-K1-B9
gagcattcagaaacacaccaagcgaagttcactatgcaacgacctaacaacaatggctaccaagatattagccctccttgcgcttcttgccctttttgtgagcgcaacaaatgcgttcattattccacaatgctcacttgctcctagtgccattatttcacagatccttccaccagtttctttaatgggctttga

SEQ ID NO: 23245 - DNA, 325 bp, Zea mays
  Clone ID: LIB3152-036-P1-K1-C1
attgagaccaactagcaacatagaaagcacaatagtgttccaacaatggcagccaaaatattttgcctccttatgctccttggtctttctgcaagtgctgctacggcgaccattttcccacaatgctcacaagctcctatagcttcccttcttcccccgtacctctcaccagcggtgtcttcggtatgtgaaaacccaattcttcaaccctataggatccaacaggcaatcgcagctggcatcttacctttatcacccttgttcctccaacaatcatcagccctataacagcagttacccttggtgcatttattggcacaaaata

SEQ ID NO: 23246 - DNA, 434 bp, Zea mays
  Clone ID: LIB3152-036-P1-K1-C10
caccaagcgaagcgcactagcaacaacctaacatcaatggctaccaagatattagccctccgggcgcttcttgcccttttagtgagcgcaacaaatgcgttcattattccacagtgctcacttgctcctagtgccattattccacagttcctcccaccagttacttcaatgggcttcgaacatccagccgtgcaagcctacaggctacaactagcgcttgcggcgagcgtcttacaacaaccaattgcccaattgcaacaacaatccttggcacatctaaacctacaaaccatcgcaacgcaacagcaacaacagtttctgccatcactgagccacctagccgtggtgaaccctgtcgcctacttgcaacagcagctacttgcatccaacccacttgcttctgcgaacgtagctgcataccagcaacaacaacg

SEQ ID NO: 23247 - DNA, 254 bp, Zea mays
  Clone ID: LIB3152-036-P1-K1-C11
ctcatccgaattcccaggcaggcaggtcggcgtggagggcaggaagaccgaagaccgagccgtgcgggggctcgggacgggaacgggacaggaccccaaaatctcagatccttcctgcccgcccgcccgtgcccgttgacgcgtctttctttccggtctgtccctaccttttttcttttcttttttaggtggatcgtttacgccacatgctgtgcgatggtgtttttggtttttgattactgattccttaattt

SEQ ID NO: 23248 - DNA, 229 bp, Zea mays
  Clone ID: LIB3152-036-P1-K1-C12
aatacatacacatcgatgccttccagtttacctgtacgcaacatgttcgcgtaattcccgccgagtgtgagctcttgcatgagcactcgcgaaccacatgtggcgcttgtttgctgtgcaagtgcaagtgagtgcagtgaccggctctcgctcgttcttaatcattgtacccgtttcgctggtctcaaaaaataaaaaaaaattattatattattatttatataaatat

SEQ ID NO: 23249 - DNA, 444 bp, Zea mays
  Clone ID: LIB3152-036-P1-K1-C2
attttgagcattcagaaacacaccaagcgaagcacattttcaacaacctaacaacaatggctaccaagatattatccctccttgcgcttcttgcgctttttgcgagcgcaacaaatgcgttcattattccacaatgctcacttgctccaagttccattattacacagttcctcccaccagttacttcaatgggcttcgaacacccagctgtgcaagcctataggctacaacaagcaattgcggcgagcgtcttacaacaaccaatttcccagttgcaacaacaatccttggcacatctaacaatacaaaccatcgcaacgcaacagcaacaacaattcctaccagcactgagccacctagccatggtgaaccctgccgcctacttgcaacagcagttgcttgcattaaactcacttgctctggcaaacgtagttgaaaaccagc

SEQ ID NO: 23250 - DNA, 437 bp, Zea mays
  Clone ID: LIB3152-036-P1-K1-C3
ctcaaccgccccggcctcagcctcatccccagtcacacccatgcccgtgccaacagccgcatccaagcccgtgccagctgcagggaacctgcggcgttggcagcaccccgatcctgggccagtgcgtcgagtttctgaggcatcagtgcagcccgacggcgacgccctactgctcgcctcagtgccagtcgttgcggcagcagtgttgccagcagctcaggcaggtggagccgcagcaccggtaccaggcgatcttcggcttggtcctccagtccatcctgcagcagcagccgcaaagcggccaggtcgcggggctgttggcggcgcaaatagcgcagcaactgacggcgatgtgcggtctgcagcagccgactccatgcccctacgctgttgcccggggttgccccccactgaagaaactttgtgctgtagtatag

SEQ ID NO: 23251 - DNA, 382 bp, Zea mays
  unsure at all n locations
  Clone ID: LIB3152-036-P1-K1-C4
gcaacatagaaagcacaatagtgtaccaacaatggcagccaaaatattttgcctccttatgctcctgggtctttctgcaagtgctgctacggcgaccattttcccgaaatgctcgcaagctcctatagcttcccttcttcccccgtacctctcaccagcggtgtcttcggtatgtgaaaacccaattcttcaaccctacaggatccaacaggcaatcacagctggcatcttacctttatcacccttgntcctccaacaatcatcagccctattacatcagttacctttggtgcatttattggcacaaaacattagggcacaacaactacaacaacttgtgctagcaaaccttgctgcctactttcagcaacaagcagtttct

SEQ ID NO: 23252 - DNA, 110 bp, Zea mays
  Clone ID: LIB3152-036-P1-K1-C5
cggacgcgtgggcgggacgagaccagcagccgttcaccatcccatccgaaccctgctgctcccctcgccgggttcgcgtgaggctgtgtgctgctgggaggagggggaag

SEQ ID NO: 23253 - DNA, 328 bp, Zea mays
  Clone ID: LIB3152-036-P1-K1-C7
caattagctcatcgactccagattggagaacttgacaccatgaaggtgctgatcgttgcccttgctctcctggcgctcgctgcgagcgccgcctccagtacaagcggcggctgtggctgccagacaccaccgtttcatctaccgcctccgttctatatgccgcctccgttctatctgccgccgcagcagcagccgcagccatggcaataccccactcaaccaccgcagctaagcccgtgccagcagttcggatcctgcggcgtcggcagcgtcggcagcccgttcctgggccagtgcgtcgagttcctgaggcaccagtgcagcccgg

SEQ ID NO: 23254 - DNA, 444 bp, Zea mays
  Clone ID: LIB3152-036-P1-K1-C8
cagaaacacaccaagcgaagcgcactatcaacaacctaacaacaatggctaccaagatattatccctccttgcgcttcttgcgctttttgcgagcgcaacaaatgcgtccattattccacaatgctcacttgctcctagttccattattccacagttcctcccaccagttacttcaatggccttcgaacacccagctgtgcaagcctataggctacaacaagcgattgcggcgagcgtcttacaacaaccaattgcccaattgcaacaacaatccttggcacatctaacaatacaaaccatcgcaacgcaacagcaacaacagttcctaccagcactgagccacctagccatggtgaaccctgtcgcctacttgcaacagcagctgcttgcattcaacccacttgctctagcaaacgtagttgcaaaccagcaacaacaacaac

SEQ ID NO: 23255 - DNA, 385 bp, Zea mays
  Clone ID: LIB3152-036-P1-K1-C9
ctccttgctctttctgcatgtgttgcttacgctacaattttccctcaatgctcacaagctcctatagcttcccttcttcccccataccttccatcaatgatagcttcagtatgtgaaaacccagctcttcaaccctataggctccaacaagcaatcgcagcaagcaacatacctttatcacccttgattcaacaatcgccagccctatctttggtgcagtcattggtacaaaccatcagggcacagcagctgcagcaactcgtgctacctgtgatcaaccaagtagctttggcaaaccttttttcctactcttagtaacaacaatttttttcttccaaccaactgtctacattgaaccgtgccgtttatttgcttcaacaacttt

SEQ ID NO: 23256 - DNA, 405 bp, Zea mays
  Clone ID: LIB3152-036-P1-K1-D1
cccacgcgtccgtttgcctccttatgctccttggtctttctgcaagtgctgctacggcgaccatttgcccgaaatgctcgcaagctcctatagcttcccttcttcccccgtacctctcaccagcggtgtcttcggtatgtgaaaacccaattcttcaaccctacaggatccaacaggcaatcacagctggcatcttacctttatcacccttgttcctccaacaatcatcagccctattacatcagttacctttggtgcatttattggcacaaaacatcagggcacaacaactacaacaacttgtgctagcaaaccttgctgcctactctcagcaacagcagtttcttccattcaaccaactagctgcattgaactctgcttcttatttgcaacaacaacaactac

SEQ ID NO: 23257 - DNA, 435 bp, Zea mays
  Clone ID: LIB3152-036-P1-K1-D10
agaaagcacaatagtgtaccaacaatggcagccaaaatattttgcttccttatgctccttggtctttctgcaagtgttgctaccgcaaccattttcccacaatgctcacaagctcctatagcttcccttcttcccccatacctctcaccagcggtgtcttcaatgtgtgaaaacccaattgttcaaccctacaggatccaacaggcaatcgcaacaggcatcttaccattatcacccttgttcctccaacaaccgtcagccctattacagcagttacctttggtccatttggtggcacaaaacatcagggcacaacaactacaacaacttgtgctagcaaaccttgctgcatactctcagcaacatcagtttcttccattcaaccaactggctgcattgaactctgctgcttatttgcaacaacaattaccattc

SEQ ID NO: 23258 - DNA, 72 bp, Zea mays
  unsure at all n locations
  Clone ID: LIB3152-036-P1-K1-D11
gtaagacgacacacattattacatatattgatagagagggatggatngnggagattgggcaatttttattaa

SEQ ID NO: 23259 - DNA, 323 bp, Zea mays
  Clone ID: LIB3152-036-P1-K1-D12
agaccaactagcaacatagaaagcacatttgttttccaacaatggcagccaaaatattgggccttcttatgctccttggtctttctgcaagtgctgctacggcgaccattttcccgcaatgctcgcaagctcctatagcttcccttcttcccccgtacctctcaccagcggtgtcttcggtatgtgaaaacccaatttcttaaccctacaggatccaacaggcaatctgcagctggcatcttacctttatcacccttgttccttcaacaattcataacccttataccaacaggtacctttggtgcatttattggcacaaaaac

SEQ ID NO: 23260 - DNA, 442 bp, Zea mays
  Clone ID: LIB3152-036-P1-K1-D2
attttgagcattcagaaacacaccaagcgaagcacattatcaacaacctaacaacaatggctaccaagatattatccctccttgcgcttcttgcgctttttgcgagcgcaacaaatgcgttcattattccacaatgctcacttgctccaagttccattattacacagttcctcccaccagttacttcaatgggcttcgaacacccagctgtgcaagcctataggctacaacaagcaattgcggcgagcgtcttacaacaaccaatttcccagttgcaacaacaatccttggcacatctaacaatacaaaccatcgcaacgcaacagcaacaacaattcctaccagcactgagccacctagccatggtgaaccctgccgcctacttgcaacagcagttgcttgcatcaaacccacttgctctggcaaacgtagttgcaaacca

SEQ ID NO: 23261 - DNA, 428 bp, Zea mays
  unsure at all n locations
  Clone ID: LIB3152-036-P1-K1-D3
ccgcaacaacaatttcttccattcaaccaactgtctacactgaaccctgctgcttatttgcagcaacaactattaccatttagccaacaagcaacatagaaagtggaatccagtagcaacaatagagcaacaatggagaccaagatattttccctccttatgctccttgctctttctacatgtgttgctaacgcgacaattttccctcaatgctcacaagctcctatagcttccctttttcccccataccttccatcaattatagcttcagtatgtgaaaacccagctcttcaaccatataggcttcaacaagcaatcgcagcaagcaacatacctttatcgcccttgttgtgtcaacaatcggcagccctatctttggtgcagtcattggtacanaccatcagggcacaacagctgcagcaactcgt

SEQ ID NO: 23262 - DNA, 135 bp, Zea mays
  Clone ID: LIB3152-036-P1-K1-D4
ctgatatacagcaccaaggagaggtttcagcttaatatgaagaagagatttgctggccacattgtggcaggttatgcttgtcaggtgaacttttcacctgatgggaggtttgtgatgtctggtgatggcaagggt

SEQ ID NO: 23263 - DNA, 387 bp, Zea mays
  Clone ID: LIB3152-036-P1-K1-D5
gcacaacaactacaacaactcgtgctagcaaactttgttgcctactctcagcaacagcagtgggcgcttgggtgcatttgttggcacaaaacatcatggcacaacatctacaacaactcgtgctagcaaaccttgctgcctacttttagcaacaacagtttctgtcattcaaccaactagctgcattgaactctgctgcttatttgcagcaacaacaactactaccattcagccagctagctgctgtctacccccggcaattttttccattcaaccaactggcagcattgaactctttatgcttatgtacaacaacaacaactactaccatttagtcatgttagctgttgtgagccctgctgtctttttgacacagtatcatttgtt

SEQ ID NO: 23264 - DNA, 363 bp, Zea mays
  Clone ID: LIB3152-036-P1-K1-D6
agcggcagtgcgtagagaggatcgtcgaacagttcatcatgaagatggtcatcgttctcgtcgtgtgcctggctctgtcagctgccagcgcctctgcaatgcagatgccctgcccctgcgcggggctgcagggcttgtacggcgctggcgccggcctgacgacgatgatgggcgccggcgggctgtacccctacgcggagtacctgaggcagccgcagtgcagcccgctggcggcggcgccctactacgccgggtgtgggcagacgagcgccatgtaccagccgctccggcaacagtgctgccagcagcagatgaggatgatggacgtgcagtccgtcgcgcagcagctgcagatgatgatgc

SEQ ID NO: 23265 - DNA, 240 bp, Zea mays
  Clone ID: LIB3152-036-P1-K1-D8
atccaatccagatcagcaaagcggcagtgcgtttagaggatcgtcgaacagaacagcatgaagatggtcatcgttctcgtcgtgtgcctggctctgtcagctgccagcgcctctgcaatgcagatgccctgcccctgcgcggggctgcagggcttgtacggcgctggcgccggcctgacgacgatgatgggcgccggcgggctgtacccttacgcggagtaccttgggcagtcttagtgc

SEQ ID NO: 23266 - DNA, 327 bp, Zea mays
  Clone ID: LIB3152-036-P1-K1-D9
attattgagaccaactagcaacatagaaagcacaatagtgtaccaacaatggcagccaaaagattttgcttccttatgctccttggtctttctgcaagtgttgctaccgcaaccattttcccacaatgctcacaagctcctatagcttcccttcttcccccatacctctcaccagcggtgtcttcaatgtgtgaaaacccaattgttcaaccctacaggatccaacaggcaatcgcaacaggcattttaccattatcacccttgttcctccaacaaccgtcagccctattacagcagttacctttggtccatttgggggccaaaaca

SEQ ID NO: 23267 - DNA, 391 bp, Zea mays
  unsure at all n locations
  Clone ID: LIB3152-036-P1-K1-E1
aaagttctctctctccgtatctcgcttcgccaccgccggcgagaggtagggtttcgtgcgccaccgtcacttacgcccgccatggccgagacctccacgtatcagattctggtgcgtctcctcgacgggcgtaccagatgtctccgcttctccacgcccaccgtttccggcgccgtgctcctcgacgccgtcgcgtcgatctatcgcgttcccgncgacgctctccgcctcgtcaccggcggcatcgacgtatctgcctcttacgtcctcgccgcagcagctgatggccagttcccctactcgtcagcgctccttcgccttcgaggaagccggcgaccgccagctagaaaagctcgccgagaacttcattaaaaagaaggccaaggaagcg

SEQ ID NO: 23268 - DNA, 406 bp, Zea mays
  Clone ID: LIB3152-036-P1-K1-E10
gctcctagtgccattattccacagttcctcccttcagttacttcaatgggcttcgaacatccagccgtgcaagcctacaggctacaactagcgcttgcggcgagcgtcttacaacaaccaattgcccaattgcaacaacaatccttggcacatctaaacctacaaaccatcgcaacgcaacagcaacaacagtttctgccatcactgagccacctagccgtggtgaaccctgtcgcctacttgcaacagcagctacttgcattcaacccacttgctctggcgaacgtagctgcataccagcaacaacaacgtctgcaacagtttatgccagcgctcagtcaactagccatggtgaaccctgtcgcctacctacaacagcaacaattgcttttatttagcccgctcg

SEQ ID NO: 23269 - DNA, 432 bp, Zea mays
  Clone ID: LIB3152-036-P1-K1-E11
tgagcattcagaaacacaccaagcgaagcgcactagcaacgacctaacaacaatggctaccgagatattagccctccttgcgcttcttgccctttttgtgagcgcaacaaatgcgttcattattccacaatgctcacttgctcctagtgccattattccacagttcctcccaccagttacttcaatgggcttcgaacacctagctgtgcaagccaacatgcaacaacaagcgcttgcggcgagcgtcttacaacaaccaattgcccaattgcaacaacaatccttgccacatctaacaatacaagccatcacaacgcaacagcaacaacagttcctaccagcactgagccacctagccatggtgaaccctgccgcctacttgcaagagcagctgcttgcatccaacccacttgctctggcgaacgtagttgc

SEQ ID NO: 23270 - DNA, 434 bp, Zea mays
  Clone ID: LIB3152-036-P1-K1-E12
gcaacatagaaagcacaatagtgtaccaacaatggcagccaaaatattttgcctccttatgctccttggtctttctgcaagtgctgctacggcgaccattttcccgcaatgctcgcaagctcctatagcttcccttcttcccccgtacctctcaccagcggtgtcttcggtatgtgaaaacccaattcttcaaccctacaggatccaacaggcaatcgcagctggcatcttacctttatcacccttgttcctccaacaatcatcagccctattacaacagttacctttggtgcatttattggcacaaaacatcagggcacaacaactacaacaacttgtgctagcaaaccttgctgcctactctcagcaacagcagtttcttccattcaaccaactaggttcattgaactctgcttcttatttgcaacaacaac

SEQ ID NO: 23271 - DNA, 232 bp, Zea mays
  Clone ID: LIB3152-036-P1-K1-E2
cagatcagcaaagcggcagtgcgtagagaggatcgtcgtacagaacagcatgaagatggtcatcgttctcgtcgtgtgcctggctctgtcagctgccagcgcctctgcaatgcagatgccctgcccctgcgcggggctgcagggcttgtacggcgctggcgccggcctgacgacgatgatgggcgccggcgggctgtacccctacgcggagtacctgaggcagtcttagtgc

SEQ ID NO: 23272 - DNA, 445 bp, Zea mays
  Clone ID: LIB3152-036-P1-K1-E3
cagcattcagaaacacaccaagcgaagcgcactagcatcaacctaacaacaatggctaccaagatattagccctccttgcgcttcttgcccttttagtgagcgcaacaaatgcgttcattattccacagtgctcacttgctcctagtgccattattccacagttcctcccaccagttacttcaatgggcttcgaacatccagccgtgcaagcctacaggctacaactagcgcttgcggcgagcgtcttacaacaaccaattgcccaattgcaacaacaatccttggcacatctaaacctacaaaccatcgcaacgcaacagcaacaacagttttctgccatcactgagccacctagccgtggggaaccctgtcggctacttgcaacagcagctacttgcatccaacccacttgctcttgccgaacgtagctgcataccagcaaca

SEQ ID NO: 23273 - DNA, 57 bp, Zea mays
  Clone ID: LIB3152-036-P1-K1-E4
gaccattagctttatctactccagagcgcagattaaccttatcgacaccatgagggt

SEQ ID NO: 23274 - DNA, 230 bp, Zea mays
  Clone ID: LIB3152-036-P1-K1-E5
tgagcattcagaaacacaccaagcgaagcacattagctttaacctaacaacaatggctaccaagaggttatccttccttgcgcttcttgcgctttttgcgagcgcaacataagcgttcattattccacaatgctcacttgctccaagttccattattacacagttccttccaccagttactttaatggtctttgaacacccagctgtgcaagcctatatgctacaacaag

SEQ ID NO: 23275 - DNA, 176 bp, Zea mays
  Clone ID: LIB3152-036-P1-K1-E6
attcactgccaagagagtgagcgagcgagcataggcttctcagcaatggcggcggcaatagtactgtgccggccaggtgcggccgcttccctcgtcgctgcccctgtccctgctgctgctcctcctcctgtgctgctccggcacctcgtggggatggagcacgtcccggtgaggag

SEQ ID NO: 23276 - DNA, 320 bp, Zea mays
  Clone ID: LIB3152-036-P1-K1-E7
attttgagcattcagaaacacaccaagctttatttctattatcatcatcctaacatcaatgggtgccaagatattatccctccttgcgcttcttgcgctttttgtgagcgcaacatatgcgttcattattttcacattgctcactttgctccaagtttcattattacacagacttcttctaccagttacttcaatgggcttcgaacacccagctttgcttgcctatatgcttcaacaagcaattgtggcgtgctgtttacaacaaccaatttcccatttgcaactaacattccttggcacatcttacatatcaaaccatc

SEQ ID NO: 23277 - DNA, 411 bp, Zea mays
  Clone ID: LIB3152-036-P1-K1-E8
gcaacatagaaagcacaatagtgtaccaacaatttcagccaaaatattttgcctccttatgctccttggtctttctgcaagtgctgctacggcgaccattttcccgaaatgctcgcaagctcctatagcttcccttcttcccccgtacctctcaccagcggtgtcttcggtatgtgaaaacccaattcttcaaccctacaggatccaacaggcaatcacagctggcatcttacctttatcacccttgttcctccaacaatcatcagccctattacatcagttacctttggtgcatttattggcacaaaacatcagggcacaacaactacaacaacttgtgctagcaaaccttgctgcctactcttagcaacagcagttttttccattcaaccaactagctgcattgaactc

SEQ ID NO: 23278 - DNA, 401 bp, Zea mays
  Clone ID: LIB3152-036-P1-K1-E9
gcacaatagtgtaccaacaatggcagccaaaatattttgcttccttatgctccttggtctttctgcaagtgctgctaccgcaaccattttcccacaatgctcacaagctcctatagcttcctttcttcccccatacctctcaccagcggtgtcttcagtatgtgaaaacccaattcttcaaccctacaggatccaacaggcaatcgcagcaggcatcttacctttatcacccttgttcctccaacaaccgtcagccctattacagcagttacctttggtgcatttgttggcacaaaacatcaaggtacaacaactacaacaacttgtgctaggaaaccttgctgcctactcttaacacagcagtttctttcattcaaccaactggctgcattgaactctgc

SEQ ID NO: 23279 - DNA, 316 bp, Zea mays
  Clone ID: LIB3152-036-P1-K1-F1
cgcaggacttcaagacagacctccgattccagagccactccgtgctggcgctccaggaggccgccgaggcctacctcgtcggtctcttcgaggacaccaacctctgcgccatccacgctaagcgcgtcaccatcatgcccaaggacatccagctcgcccgccgcatccgtggcgagcgcgcgtagccatcatctccggggatctgatgaatgtctagttaccaaacaaataggctgtattagcgtcgttgttctgtattcgttattttggattcggttgcagtgaaaaacagctttactaatcttatttgtgatca

SEQ ID NO: 23280 - DNA, 132 bp, Zea mays
  Clone ID: LIB3152-036-P1-K1-F10
caacaattgctgccatttagccaacttgctttgacgaatcctaccaccttattacagcagcccaccattggtggtgccatcttctagatttttttatgctttatactgtaataataaagttctcatactgat

SEQ ID NO: 23281 - DNA, 418 bp, Zea mays
  Clone ID: LIB3152-036-P1-K1-F11
aaagtggaatccagtagcaacaatagagcaacattggcgaccaagatattttccctccttatgctccttgctctttctgcatgtgttgctaacgcgacaattttccctcaatgctcacaagctcctatagcttcccttcttcccccataccttccatcaatgatagcttcagtatgtgaaaacccagctcttcaaccctataggctccaacaagcaatcgcagcaagcaacatacctttatcacccttgtttcaacaatcgccagccctatctttggtgcagtcattggtacaaaccatcagggcacagcagctgcagcaactcgtgctacctgtgatcaaccaagtagctctggcaaacctttctccctactctcagcaacaacaatttcttccattcaaccaactgtctacattga

SEQ ID NO: 23282 - DNA, 426 bp, Zea mays
  Clone ID: LIB3152-036-P1-K1-F12
attgagaccaactagcaacatagaaagcacaatagtgtaccaacaatggcagccaaaatattttgcttccttatgctccttggtctttctgcaagtgttgctaccgcaaccattttcccacaatgctcacaagctcctatagcttcccttcttcccccatacctctcaccagcggtgtcttcaatgtgtgaaaacccaattgttcaaccctacaggatccaacaggcaatcgcaacaggcatcttaccattatcacccttgttcctccaacaaccgtcagccctattacagcagttacctttggtccatttggtggcacaaaacatcagggcacaacaactacaacaacttgtgctagcaaaccttgctgcatactctcagcaacatcagtttctttcattcaaccaactggctgcattgaactct

SEQ ID NO: 23283 - DNA, 341 bp, Zea mays
  Clone ID: LIB3152-036-P1-K1-F2
ggcaagtgcgatttcgatctcgcagccacctttttttttgttctgttgtgtatctagtagttggaggagatatgcagtttgcacttgcattggacacgaactcaggtcctcaccagataagatcttgtgagggtgatgggattgacaggttggaaaaattaagtattgggggcagaaagcaggagaaagctttgagaaataggtgctttggtggtagagttgctgcaactacacaatgtattcttacctcaaatgcttgttctgaaactctttattctcaaacacagttcttttaggaaaattatgctgttgctaaccgtgtatttgatatcattttgggc

SEQ ID NO: 23284 - DNA, 428 bp, Zea mays
  unsure at all n locations
  Clone ID: LIB3152-036-P1-K1-F3
ggtcttcagaccattagctttatctactccagagcgcataagaacccgatcgacaccatgagggtgttgctcgttgccctcgctctcctggctctcgctgcgagcgccacctccacgcatacaagcggcggctgcggctgccagccaccgccgccggttcatctaccgccgccggtgcatctgccacctccggttcacctgccacctccggtgcatctcccaccgccggtccacctgccgccgccggtccacctgccaccgncggtccatgtgccgccgccggttcatctgccgccgccaccatgccactaccctactcaaccgccccggcctcagcctcatccccagccacacccatgcccgggccaacaggcgcattcaagcccgggccagctgcagggaaacctgcggcgttggcagcacccccg

SEQ ID NO: 23285 - DNA, 412 bp, Zea mays
  Clone ID: LIB3152-036-P1-K1-F4
actggacgtcagcctagcaattagctcatcgactccagattggagaactcgacaccatgaaggtgctgatcgttgcccttgctctcctggcgctcgctgcgagcgccgcctccagtacaagcggcggctgtggctgccagacaccaccgtttcatctaccgcctccgttctatatgccgcctccgttctatctgccgccgcagcagcagccgcagccatggcaataccccactcaaccaccgcagctaagcccgtgccagcagttcggatcctgcggcgtcggcagcgtcggcagcccgttcctgggccagtgcgtcgagttcctgaggcaccagtgcagcccggcggcgacgccctacggctcgccacagtgccaggcgctgcagcagcagtgctgccaccagatcaggca

SEQ ID NO: 23286 - DNA, 407 bp, Zea mays
  Clone ID: LIB3152-036-P1-K1-F5
agcggcagtgcgtagagaggatcgtcgaacagaacagtttgaagatggtcatcgttctcgtcgtgtgcctggctctgtcagctgccagcgcctctgcaatgcagatgccctgcccctgcgcggggctgcagggcttgtacggcgctggcgccggcctgacgacgatgatgggcgccggcgggctgtacccctacgcggagtacctgaggcagccgcagtgcagcccgctggcggcggcgccctactacgccgggtgtgggcagacgagcgccatgtaccagccgctccggcaacagtgctgccagcagcagatgaggatgatggacgtgcagtccgtcgcgcagcagctgcagatgatgatgccatcttgagcgtgccgctgccgccagcagcagtctgtacgagcc

SEQ ID NO: 23287 - DNA, 430 bp, Zea mays
  Clone ID: LIB3152-036-P1-K1-F6
aactagcaacatagaaagcacaatagtgtaccatcattgtcagccaaaatattttgcctccttatgctccttggtctttctgcaagtgctgctacggcgaccattttcccgaaatgctcgcaagctcctatagcttcccttcttcccccgtacctctcaccagcggtgtcttcggtatgtgaaaacccaattcttcaaccctacaggatccaacaggcaatcacagctggcatcttacctttatcacccttgttccttcaacaatcatcagccctattacatcagttacctttggtgcatttattggcacaaaacattagggcacaacaactacaacaacttgtgctagcaaaccttgctggctactttcagcaacagcattttcttccattcaaccaactagctgcatttgactcttgttcttattttg

SEQ ID NO: 23288 - DNA, 433 bp, Zea mays
  Clone ID: LIB3152-036-P1-K1-F7
attttcagcattcagaaacacaccaagctaagttcactagcaacaacctaacaacaatggctaccaagatattagccctccttgcgcttcttgcccttttagtgagcgcaacaaatgcgttcattattccacagtgctcacttgctcctagtgccattattccacagttcctcccaccagttacttcaatgggcttcgaacatccagccgtgcaagcctacaggctacaactagcgcttgcggcgagcgtcttacaacaaccaattgcccaattgcaacaacaatccttggcacatctaaacctacaaaccatcgcaacgcaacagcaacaacagtttctgccatcactgagccacctagccgtggtgaaccctgtcgcctacttgcaacagcagcttcttgcattcaacccacttgctctggcgaacgtagc

SEQ ID NO: 23289 - DNA, 415 bp, Zea mays
  Clone ID: LIB3152-036-P1-K1-F8
gttgccctcgctctcctggctctcgctgcgagttccacctccacgcatacaagcggcggctgcggctgccagccaccgccgccggttcatctaccgccgccggtgcatctgccacctccggttcacctgccacctccggtgcatctcccaccgccggtccacctgccgccgccggtccacctgccaccgccggtccatgtgccgccgccggttcatctgccgccgccaccatgccactaccctactcaaccgccccggcctcagcctcatccccagccacacccatgcccgtgccaacagccgcatccaagcccgtgccagctgcagggaacctgcggcgttggcagcaccccgatcctgggccagtgcgtcgagtttctgaggcatcagtgcagcccgacggcgacgccctact

SEQ ID NO: 23290 - DNA, 132 bp, Zea mays; identical to SEQ ID NO: 23280
  Clone ID: LIB3152-036-P1-K1-F9

SEQ ID NO: 23291 - DNA, 443 bp, Zea mays
  Clone ID: LIB3152-036-P1-K1-G1
accaagcgaagcgcactagcaacaacctaacaacaatggctaccaagatattagccctccttgcgcttcttgcccttttagtgagcgcaacaaatgcgttcattattccacagtgctcacttgctcctagtgccattattccacagttcctcccaccagttacttcaatgggcttcgaacatccagccgtgcaagcctacaggctacaactagcgcttgcggcgagcgtcttacaacaaccaattgcccaattgcaacaacaatccttggcacatctaaacctacaaaccatcgcaacgcaacagcaacaacaagttctgccatcactgagccacctagccgtggtgaaccctgtcgcctacttgcaacagcagctacttgcatccaacccacttgctctggcgaacgtagctgcataccagcaacaacaacgtctgcaacag

SEQ ID NO: 23292 - DNA, 429 bp, Zea mays
  Clone ID: LIB3152-036-P1-K1-G10
agcaacatagaaagcacaatagtgtaccaacaatggcagccaaaatattttgcctccttatgctccttggtctttctgcaagtgctgctacggcgaccattttcccgcaatgctcgcaagctcctatagcttcccttcttcccccgtacctctcaccagcggtgtcttcggtatgtgaaaacccaattcttcaaccctacaggatccaacaggcaatcgcagctggcatcttacctttatcacccttgttcctccaacaatcatcagccctattacaacagttacctttggtgcatttattggcacaaaacatcagggcacaacaactacaacaacttgtgctagcaaaccttgctgcctactctcagcaacagcagtttcttccattcaaccaactaggttcattgaactctgcttcttatttgcaac

SEQ ID NO: 23293 - DNA, 433 bp, Zea mays
  Clone ID: LIB3152-036-P1-K1-G11
ctgcataccagcaacaacaacgtctgcaacagtttatgccagcgctcagtcaactagccatggtgaaccctgtcgcctacctacaacagcaacaattgctttcatctagcccgctcgctgtgggcaatgcacctacgtacctacaacaacagttgctgcaacagattgtaccagctctgactcagctagctgtggcaaaccctactgcctacttgcaacagttgcttccattcaagcaactggctgtgtcgaactctgctgtgtacctacaacagcgacaacagttacttaatccactagcagtggctaacccattggtcgctaactttctgcagcagcaacaattgctgccatacaaccagttctttttgatgaaccctgccttgcagcaacccaaatgttgaggtgccatcttttagattacatatgagat

SEQ ID NO: 23294 - DNA, 403 bp, Zea mays
  Clone ID: LIB3152-036-P1-K1-G12
gtggggcagtacgagtcccacatcgcgttcactcttcctgggctctaccgtgtcgtccatggcatcgatgttttcgatcccaagttcaacattgtctctcctggagcagacatgagtgtttactacccgtatacggaaaccgacaagagactcactgccttccatcctgaaatcgaggagctcatctacagcgacgtcgagaactccgagcacaagttcgtgctgaaggacaagaagaagccgatcatcttctcgatggcgcgtctcgaccgcgtgaagaacatgacaggcctggtggagatgtacggcaagaacgcgccgcctgagggagctggcgaacctcgtgatcgtcgccggtgaccacggcaaggagttcaaggacagggaggagcaggcggagttc

SEQ ID NO: 23295 - DNA, 432 bp, Zea mays
  Clone ID: LIB3152-036-P1-K1-G2
caggcaatcgcagctggcatcttacctttatcacccttgttcctccaacaatcatcagccctattacagcagttacctttggtgcatttattggcacaaaacatcagggcacaacaactacaacaacttgtgctagcaaaccttgctgcctactctcagcaacagcagtttcttccattcaaccaactagctgcattgaactctcctgcttatttacagcagcaacaactactaccattcagccagctagctggtgtgagccctgctaccttcttgacacaaccacagttgttgccgttctaccagcacgctgcgcctaacgctggcaccctcttacaactgcaacaattgctgccattcaaccaacttgctttgacaaacctagcagtgttctaccaacaacccataattggtggtgcccctttttagatt

SEQ ID NO: 23296 - DNA, 425 bp, Zea mays
  Clone ID: LIB3152-036-P1-K1-G3
tgggcttcgaacacccagctgtgcaagcctatatgctacaacaagcaattgcggcgagcgtgttacaacaaccaatttcccagttgcaacaacaatccttggcacatctaacaatacaaaccatcgcaacgcaacagcaacaacaattcctaccagcactgagccacctagccatggtgaaccctgccgcctacttgcaacagcagttgcttgcatcaaacccacttgctctggcaaacgtagttgcaaaccagccacaacaacagctgcaacagtttctgccagcgctcagtcaactagccatggtgaaccctgccgcctacctacaacagcaacaactgctttcatctagcccgctcgctgtggccaatgcacctacatacctgcaacaacaatttgtgcaacagattgtaccagctctgact

SEQ ID NO: 23297 - DNA, 434 bp, Zea mays
  Clone ID: LIB3152-036-P1-K1-G4
agcattcagaaacacaccaagcgaagcgcactatcatcaacctaacaacaatggctaccaagatattatccctccttgcgcttcttgcgctttttgcgagcgcaacaaatgcgtccattattccacaatgctcacttgctcctagttccattattccacagttcctcccaccagttacttcaatggccttcgaacacccagctgtgcaagcctataggctacaacaagcgattgcggcgagcgtcttacaacaaccaattgcccaattgcaacaacaatccttggcacatctaacaatacaaaccatcgcaacgcaacagcaacaacagtttctaccagcacttgagccacctagccatggtgaaccctgtcgcctacttgcaacagcagctgcttgcatccaacccacttgctctagcaaacgtagttgcaaa

SEQ ID NO: 23298 - DNA, 328 bp, Zea mays
  Clone ID: LIB3152-036-P1-K1-G5
gcggttggagaagggagaagttttggaagtaactgcattgagatcagtgttccggttggtgcacaagttgtctactcgaaatatgcaggcacagaattgaaattcaatgacgccgaccatctcattttgaaagaagatgacataattggtattcttgacagtgatgatgtgaaggatatgaaaccactgaatgatcgcattctgattaaggttgctgaagctgaagaacgaactgctggtggtttgctattgacgcaagcaactaaggagaaacctttttgttggatcagtggtagccgttggcccagggccgttgggcgaggactgt

SEQ ID NO: 23299 - DNA, 436 bp, Zea mays
  Clone ID: LIB3152-036-P1-K1-G6
agcattcagaaacacaccaagcgaagcgcactatcatcaacctaacaacaatggctaccaaggtattatccctccttgcgcttcttgcgctttttgcgagcgcaacaaatgcgtccattattccacaatgctcacttgctcctagttccattattccacagttcctcccaccagttacttcaatggccttcgaacacccagctgtgcaagcctataggctacaacaagcgattgcggcgagcgtcttacaacaaccaattgcccaattgcaacaacaatccttggcacatctaacaatacaaaccatcgcaacgcaacagcaacaacagtttctaccagcactgagccacctagccatggtgaaccctgtcgcctacttgcaacaagtatttgtttgcatccaacccacttgctttagcaaacgtagttgcaaacc

SEQ ID NO: 23300 - DNA, 296 bp, Zea mays
  Clone ID: LIB3152-036-P1-K1-G8
gcagctcaggcaggtggagccgcagcaccggtaccaggcgatcttcggcttggtcctgcagtccatcctgcagcagcagccgcaaagcggccaggtcgcggggctgttggcggcgcagatagcgcagcaactgacggcgatgtgcggcctgcagcagccgactccatgcccctacgctgctgccggcggtgtcccccactgaagaaactatgtgctgtagtatagccgctggctagctagctagctgagtcatttaacggcgatgattgaggtaaaatgtgttacgcatcaccatt

SEQ ID NO: 23301 - DNA, 430 bp, Zea mays
  unsure at all n locations
  Clone ID: LIB3152-036-P1-K1-G9
gcaacaactactaccattcagccagctagctggtgtgagccctgctaccttcttgatacaaccacagttgttgccgttctaccagcacgctgcgcctaacgctggcaccctcttacaactgcaacaattgctgccattcaaccaacttgctttgacaaacccagcagcgttctaccaacaacccatcattggtggtgccctcttttagatttcttatgagttatagttcaataataaagttttttgtctgatgtttgtggcttcccagaaataagaaagtacatttctaaaaatatataattataattttaattatatttttctttttttttttttttttatatatttttaaaatttcattagtttatctttgtccnttttttcctaaaataattttatttattttggggtttattatttttatatattt

SEQ ID NO: 23302 - DNA, 442 bp, Zea mays
  unsure at all n locations
  Clone ID: LIB3152-036-P1-K1-H1
cacaatgctcacttgctcctagtgccattattccacagttcctcccaccagttacttcaatgggcttcgaacacctagctgtgcaagccaacatgcaacaacaagcgcttgcggcgagcgtcttacaacaaccaattgcccaattgcaacaacaatccttgccacatctaacaatacaagccatcacaacgcaacagcaacaacagttcctaccagcactgagccacctagccatggtgaaccctgccgcctacttgcaagagcagctgcttgcatccaacccacttgctctggcgaacgtagttgcaaaccagcaacaacaacagctacaacagtttctgccaacgctcagtcaactagccatggtgaaccctgccgcctacgtacaacaacaacaactgctntcatctagcccgctcgctgtgggcaatgcacctacata

SEQ ID NO: 23303 - DNA, 427 bp, Zea mays
  Clone ID: LIB3152-036-P1-K1-H10
cattattggaccagcaattgttggaaaggaccccactgagcaggttgagattgacaacttcatggtccaacagcttgatggaacctccaatgagtggggctggtgcaaacagaagcttggagcaaatgccatccttgcggtttcacttgctgtgtgcaaagctggagctatggtgaagaagattcctctttaccagcacatcgcaaatcttgctgggaacaaaactctggtgctccctgtacctgcctttaatgtgattaatggagggtcacatgctggaaacaagcttgccatgcaggagttcatgatccttccaaactggtgcctcctcgttcaaggaggccatgaagatgggagttgaggtgtaccacaacctgaagagcataatcaaagaagaagtacggtcaggatgcgacaaatggtgggg

SEQ ID NO: 23304 - DNA, 425 bp, Zea mays
  Clone ID: LIB3152-036-P1-K1-H2
cattcagaaacacaccaagcgaagcgcactagcaacaatctaacaacaatggctaccaagatattaggcctccttgcgcttcttgcccttttagtgagcgcaacaaatgcgttcattattccacagtgctcacttgctcctagtgccattattccacagttcctcccaccagttacttcaatgggcttcgaacatccagccgtgcaagcctacaggctacaactagcgcttgcggcgagcgtcttacaacaaccaattgcccaattgcaacaacaatccttggcacatctaaacctacaaaccatcgcaacgcaacagcaacaacagttttctgccatcactgagccacctagccggggtgaaccctggcgcctacttgcaacagcagctacttgcatccaacccacttgctctggcgaacgtag

SEQ ID NO: 23305 - DNA, 128 bp, Zea mays
  Clone ID: LIB3152-036-P1-K1-H3
gcaagtgcgatttcgatctcgcagccacctttttttttttctgttgtgtatctagtagttggaggagatatgcattttgcacttgcattgtacacgaactcacgtcctcaccagataagatcttgtga

SEQ ID NO: 23306 - DNA, 361 bp, Zea mays
  unsure at all n locations
  Clone ID: LIB3152-036-P1-K1-H4
tgggtcttcagaccattagctttatctactccatagcgcagaagaacccgatcgacaccatgagggtgttgctcgttgccctcgctctcctggctctcgctgcgagcgccacctccacgcatacaagcggcggctgcggctgccagccaccgccgccggttcatctaccgccgccggtgcatctgccacctccggttcacctgccacctccggtgcatctcccaccgccggtccacctgccgncgccggtccacctgccaccgccggtccatgtgccgtcgccggttcatctgccgccgccaccaatccactaccctactcaaccgtcccctccttgatcaaggaggccatgaagatggga

SEQ ID NO: 23307 - DNA, 169 bp, Zea mays
  Clone ID: LIB3152-036-P1-K1-H5
tgggtcttcagaccattagctttatctactccagagcgtagaagaacccgatcgacaccatgagggtgttgctcgttgccctcgctctcctggctctcgctgcgagcgccaccttcacgcatacaagcggcggctgtggctgtcagccaccgccgtcggttcatctacc

SEQ ID NO: 23308 - DNA, 397 bp, Zea mays
  Clone ID: LIB3152-036-P1-K1-H6
aagcaacatagaaagtggaatccagtagcaacattagatcaacaatggcgaccaagatattttccctccttatgctccttgctctttctgcatgtgttgctaacgcgacaattttccctcaatgctcacaagctcctatagcttcccttcttcccccataccttccatcaatgatagcttcagtatgtgaaaacccagctcttcaaccctataggctccaacaagcaatcgcagcaagcaacatacctttatcacccttgtttcaacaatcgccagccctatctttggtgcagtcattggtacaaaccatcagggcacagcagctgcagcaactcgtgctacctgtgatcaaccaagtagctcttgcaaacctttctcctacctttagaacaacaat

SEQ ID NO: 23309 - DNA, 427 bp, Zea mays
  Clone ID: LIB3152-036-P1-K1-H7
aagcaacatagaaagtggaatccagtagcaacattagagcaacaatggcgaccaagatattggccctccttatgctccttgctctttctgcatgtgttgctaacgcgacaattttccctcaatgctcacaagctcctatagcttcccttcttcccccataccttccatcaatgatagcttcagtatgtgaaaacccagctcttcaaccctataggctccaacaagcaatcgcagcaagcaacatacctttatcacccttgtttcaacaatcgccagccctatctttggtgcagtcattggtacaaaccatcagggcacaggagctgcagcaactcgtgctacctgtgatcaaccaagtagctctggcaaacctttctccctactctcagcaacaacaatttcttccattcaaccaactgtctacatt

SEQ ID NO: 23310 - DNA, 419 bp, Zea mays
  Clone ID: LIB3152-036-P1-K1-H8
caaaaacacacaaagggaagtgcactagcaactttctaacaacaatggctaccaagatattagccctccttgcgctcctttccctttcagtgagcgcaacaactgcattcattattccacaatgctcacttgctcctaatgccattattccacagttcctcccatcagttacatcaatgggcatcgaacaccctattgtgcaagcctataggctacaacaagcgcttgcggcgagcgtcttacaacaaccgtttgcccaattacaacaacaatccttggcacatctaaccatacaaaccatcgcaacacaactagagcaacagtttgtgcccgcattgagccaactagccgcagtgaaccctgtcttctacttgcaacagcaactgcttgcattcaacccacttgctttggcgaacaca

SEQ ID NO: 23311 - DNA, 298 bp, Zea mays
  Clone ID: LIB3152-036-P1-K1-H9
agcattcagaaacacaccaagcgaagcgcactatcaacaacctaacaacaatggctaccaagatattatccctccttgcgcttcttgcgctttttgcgagcgcaacaaatgcgtccattattccacaatgctcacttgctcctagttccattattccacagttcctcccaccagttactttaatggccttcgaacacccagctgtgcatgcctataggcttcaacaagcgattgtggtgagctgtttaaaacaaccaattgctcaattgcatcaacaattccttggctcatttaacaa

SEQ ID NO: 23312 - DNA, 311 bp, Zea mays
  Clone ID: LIB3152-039-P1-K1-A1
accacgcgtccgatcaatcatcattcatcttagtgttatattcaccaaatcaaatctgcaacatcaattatctaactccaaaaaccatgaagctggtgcttgtggttcttgctttcattgctttagtatcaagtgtttgttgtacacagacaggcggttgcagttgtggtcaacaacaaagccatgagcagcaacattatgcacaacaacattattcacaaaaacaacagcatcaaccaccatcacaacatgacctgttgccgctacaccaacagcaactcgtacacatgcaaccactattacatcagtta

SEQ ID NO: 23313 - DNA, 374 bp, Zea mays
  Clone ID: LIB3152-039-P1-K1-A10
cagaaacacaccaagcgaagctcactagcaacaacctaacaacaatggctaccaagatattatccctccttgcgcttcttgcgctttttgcgagcgcaacaaatgcgtccattattccacaatgctcacttgctcctagttccattattccacagttcctcccaccagttacttcaatggccttcgaacacccagctgtgcaagcctataggctacaacaagcgattgcggcgagcgtcttacaacaaccaattgcccaattgcaacaacaatccttggcacatctaacaatacaaaccatcgcaacgcaacagcaacaacagttcctaccagcactgagccacctagccatggtgaaccctgtcgcctacttg

SEQ ID NO: 23314 - DNA, 374 bp, Zea mays; identical to SEQ ID NO: 21934
  Clone ID: LIB3152-039-P1-K1-A11

SEQ ID NO: 23315 - DNA, 356 bp, Zea mays
  Clone ID: LIB3152-039-P1-K1-A12
attgagaccaacaagcaacatagaaagtggaatccagtagcaacaatagagcaacaatggagaccaagatattttccctccttatgctccttgctctttctacatgtgttgctaacgcgacaattttccctcaatgctcacaagctcctatagcttccctttttcccccataccttccatcaattatagcttcagtatgtgaaaacccagctcttcaaccatataggcttcaacaagcaatcgcagcaagcaacatacctttatcgcccttgttgtgtcaacaatcgccagccctatctttggtgcagtcattggtacaaaccatcagggcacaacagctgcagcaactcgtgcta

SEQ ID NO: 23316 - DNA, 416 bp, Zea mays
  unsure at all n locations
  Clone ID: LIB3152-039-P1-K1-A2
ccggnaacggaacgggccgggctccgacccacgcggtctcattgtctccacagggcatcactatgcatgctcaagccagtaccacacagggcctcccaccagttacttcaatgggcttcgaacatccagccgtgcaagcctacaggctacaactagcgcttgcggcgagcgtcttacaacaaccaattgcccaattgcaacaacaatccttggcacatctaaacctacaaaccatcgcaacgcaacagcaacaacagtttctgccatcactgagccacctagccgtggtgaaccctgtcgcctacttgcaacagcagctacttgcatccaacccacttgctctggcgaacgtagctgcataccagcaacaacaacgtctgcaacagtttatgccagcgctcagtcaactagccatg

SEQ ID NO: 23317 - DNA, 401 bp, Zea mays
  Clone ID: LIB3152-039-P1-K1-A3
accggaaggacggccggccgaccacgcgatcataccgaagtacactagcaacatcttagcaccaatgggagccaagatttttgccctccttgccctccttgctctttcagcaagcgctgctacctcgacttttattccacaatgctcacaacaatacctctctccggcgacagccgtgggatttcaatacccaactatacaatcctacatggtacaagaggccatccaagcaagcatcttacggtcattagcattaaccctccaacaaccatatgctctattgcaacagccatccttagtgcatctgtatctccaaagaatcgcggcacaacaactacaacaacagttgctaccaacaatcaatcaagtagttgcagcgaaccttgctgcttaccttcagc

SEQ ID NO: 23318 - DNA, 374 bp, Zea mays
  unsure at all n locations
  Clone ID: LIB3152-039-P1-K1-A4
cccacgcgtccggaaacacaccaagcgaagcgcactagcaacaacctaacaacaatggctaccaagatattagccctccttgcgcttcttgcccttttagtgagcgcaacanatgcgttcattattccacagtgctcacttgctcctagtgccattattccacagttcctcccaccagttacttcaatgggcttcgaacatccagccgtgcaagcctacaggctacaactagcgcttgcggcgagcgtcttacaacaaccaattgcccaattgcaacaacaatccttggcacatctaaacctacaaaccatcgcaacgcaacagcaacaacagtttctgccatcactgagccacctagccgtggtgaaccctgt

SEQ ID NO: 23319 - DNA, 376 bp, Zea mays
  unsure at all n locations
  Clone ID: LIB3152-039-P1-K1-A5
cacttcgccgccgtcgctttcgagatctccgggtggagcaagcgagcaaaggcagcagccatgtcgctccgcgtgctgaaccctaacgccgaggtgctcaacaagtcggcagcgctgcacatgaacatcaacgccgccaagggcctncaggacgtgctcaagaccaacctcggccccaagggcaccatcaagatgcttgtgggtggagctggtgacctgaagctgacgaaggatgggaacaccctcttgaaggaaatgcaaattcagaacccaactgcaatcatgattgcgaggacggctgtggcacaggatgacacaagtggtgatggcacaacctccactgtgctatttatcggggagctaatgaagcagtctg

SEQ ID NO: 23320 - DNA, 374 bp, Zea mays
  Clone ID: LIB3152-039-P1-K1-A6
gagcattcagaaacacaccaagcgatgcacattagcaacaacctaacaacaatggctaccaagatattatccctccttgcgcttcttgcgctttttgcgagcgcaacaaatgcgttcattattccacaatgctcacttgctccaagttccattattacacagttcctcccaccagttacttcaatgggcttcgaacacccagctgtgcaagcctataggctacaacaagcaattgcggcgagcgtcttacaacaaccaatttcccagttgcaacaacaatccttggcacatctaacaatacaaaccatcgcaacgcaacagcaacaacaattcctaccagcactgagccacctagccatggtgaaccctgccgc

SEQ ID NO: 23321 - DNA, 377 bp, Zea mays
  Clone ID: LIB3152-039-P1-K1-A7
tcgtggacgcgtggggcaacatataatgcacaatagtgtaccaacaatggcagctaaaatattttgcctccttatgctccttggtctttctgcaagtgctgctacggcgaccattttcccacaatgctcacaagctcctatagcttcccttcttcccccgtacctctcaccaacggtgtcttcggtatgtgaaaacccaattcttcaaccctacaggatccaacaggcaatcgcagctggcatcttacctttatcacccttgttcctccaacaatcatcagccctattacagcagttacctttggtgcatttattggcacaaaacatcagggcacaacaactacaacaacttgtgctagcaaaccttgctgcctact

SEQ ID NO: 23322 - DNA, 409 bp, Zea mays
  Clone ID: LIB3152-039-P1-K1-A8
ccggaacggaacggccgggccgacccacgcgtacatacacgcgtccgcaacaagctatcattgaaagtggaatccagtagcaacaatagagcaacaatggcgaccaagatattttccctccttatgctccttgctctttctgcatgtgttgctaacgcgacaattttccctcaatgctcacaagctcctatagcttcccttcttcccccataccttccatcaatgatagcttcagtatgtgaaaacccagctcttcaaccctataggctccaacaagcaatcgcagcaagcaacatacctttatcacccttgtttcaacaatcgccagccctatctttggtgcagtcattggtacaaaccatcagggcacagcagctgcagcaactcgtgctacctgtgatcaaccaag

SEQ ID NO: 23323 - DNA, 370 bp, Zea mays
  Clone ID: LIB3152-039-P1-K1-A9
caacaagcaacatagaaagtggaatacagtagcaacaatagagcaacaatggcggccaagatattttccatccttatgctccttgctctttctgcatgtgttgctaacgcgaccatttttcctcaatactcacaagctcctatagctgcccttcttcccccataccttccatcaatgaccgcttcagtatgtgaaaacccagcccttcaaccctacaggctccaacaagcaatcgcaacaagcaacttacctttatcacccctgttctttcaacaatcgccagccctatctttggtgcagtcattggtacaaaccatcagggcacaacagctgcagcaactcgtgctaccagtgatcagccaagtagctc

SEQ ID NO: 23324 - DNA, 376 bp, Zea mays
  Clone ID: LIB3152-039-P1-K1-B1
gcaacatagaaagcacaatattgtaccaataatggcagccaaaatattttgcctcattatgctccttggtctttctgcaagtgctgctacggcgagcattttcccgcaatgctcacaagctcctatagcttcccttcttcccccatacctctcaccagcgatgtcttcagtatgtgaaaatccaattcttctaccctacaggatccaacaggcaatcgcagcaggcatcttacctttatcacccttgttcctccaacaatcatcagccctattacagcagttacctttggtgcatttattggcacaaaacatcagggcacaacaactacaacaactcgtgctagcaaaccttgctgcctactctcagcaacagcag

SEQ ID NO: 23325 - DNA, 368 bp, Zea mays; identical to SEQ ID NO: 17476
  Clone ID: LIB3152-039-P1-K1-B10

SEQ ID NO: 23326 - DNA, 372 bp, Zea mays
  Clone ID: LIB3152-039-P1-K1-B11
aatattttgagcattcagaaacacaccaagcgaagcgcactagcaacgacctaacaacaatggctaccaagatattagccctccttgcgcttcttgccctttttgtgagcgcaacaaatgcgttcattattccacaatgctcacttgctcctagtgccattattccacagttcctcccaccagttacttcaatgggcttcgaacacctagctgtgcaagccaacatgcaacaacaagcgcttgcggcgagcgtcttacaacaaccaattgcccaattgcaacaacaatccttgccacatctaacaatacaagccatcacaacgcaacagcaacaacagttcctaccagcactgagccacctagccatggtga

SEQ ID NO: 23327 - DNA, 374 bp, Zea mays
  unsure at all n locations
  Clone ID: LIB3152-039-P1-K1-B2
gcgagatatgaggctgtgattgatgcttacctcgatgggctagaggcttctggcttgagtgacttatcccgagttactagcgttgcatccttctttgtcagccgagtggacacccttattgacaaaatgcttgacaagattggaacacctgaggcccttgccttgagaggaaaggctgcagtagcgcaggccaaactagcaaatcggctctaccagaagaaattctctggcccaaggtgggaggcgttggccaagaaaggtgccaagaaacaaaggttgttgtgggcattcaccggtgtcaagaacccagcttatcctgacactctntatgtggacagtctcatcggacctgacacggtcaacacgatgcccga

SEQ ID NO: 23328 - DNA, 377 bp, Zea mays
  unsure at all n locations
  Clone ID: LIB3152-039-P1-K1-B3
cgcacacaccgnccggtccccgatctcctatcccctcgtcgatccaaagatgcagatcttcgtcaagaccctcactggaaagactatcaccctcgaggtggagtcttctgacaccattgacaacgtcaaggccaagatccaggacaaggagggcatccccccggaccagcagcggctcatctttgctggcaagcagctcgaggacgggcgcacacttgccgactacaacatccagaaggagagcaccctccaccttgttctccgcctcaagggaggcatgcagatcttcgtcaagaccctcactggaaagactatcaccctcgaggtggagtcttatgacaccatcgacaacgtcaaggccaagatccaggacaagg

SEQ ID NO: 23329 - DNA, 375 bp, Zea mays
  Clone ID: LIB3152-039-P1-K1-B4
attgagaccaacaagcaacatagaaagtggaatccagtagcaacaatagagcaacaatggcgaccaagatattttccctccttatgctccttgctctttctgcatgtgttgctaacgcgacaattttccctcaatgctcacaagctcctatagcttcccttcttcccccataccttccatcaatgatagcttcagtatgtgaaaacccagctcttcaaccctataggctccaacaagcaatcgcagcaagcaacatacctttatcacccttgtttcaacaatcgccagccctatctttggtgcagtcattggtacaaaccatcagggcacagcagctgcagcaactcgtgctacctgtgatcaaccaagtagctc

SEQ ID NO: 23330 - DNA, 364 bp, Zea mays
  Clone ID: LIB3152-039-P1-K1-B5
cgcaaattgcaccaagaaatccatcgagaggccgtcgacaggggaattaatggcgtcgtcgtctagcagcagccaccgccgcctcatcctcgcagccgccgtcctgctctccgtgctcgcggctgccagcgccagcgccgggacctcctgcgtgccggggtgggccatcccgcacaacccgctcccgagctgccgctggtacgtgaccagccggacctgcggcatcgggccgcgcctcccgtggccggagctgaagaggagatgctgccgggagctggcggacatcccggcgtactgccggtgcacggcgctgagcatcctcatggacggcgcgatcccgccgggcccggacgcgcagctggag

SEQ ID NO: 23331 - DNA, 376 bp, Zea mays
  Clone ID: LIB3152-039-P1-K1-B6
aatattttgagcattcagaaacacaccatgcgaagcacattagcaacaacctaacaacaatggctaccaagatattatccctccttgcgcttcttgcgctttttgcgagcgcaacaaatgcgttcattattccacaatgctcacttgctccaagttccattattacacagttcctcccaccagttacttcaatgggcttcgaacacccagctgtgcaagcctataggctacaacaagcaattgcggcgagcgtcttacaacaaccaatttcccagttgcaacaacaatccttggcacatctaacaatacaaaccatcgcaacgcaacagcaacaacaattcctaccagcactgagccacctagccatggtgaaccc

SEQ ID NO: 23332 - DNA, 367 bp, Zea mays
  Clone ID: LIB3152-039-P1-K1-B7
gcattcagaaacacaccaagcgaatcgcactagcaacgacctaacaacaatggctaccaagatattagccctccttgcgcttcttgccctttttgtgagcgcaacaaatgcgttcattattccacaatgctcacttgctcctagtgccattattccacagttcctcccaccagttacttcaatgggcttcgaacacctagctgtgcaagccaacatgcaacaacaagcgcttgcggcgagcgtcttacaacaaccaattgcccaattgcaacaacaatccttgccacatctaacaatacaagccatcacaacgcaacagcaacaacagttcctaccagcactgagccacctagccatggtgaaccct

SEQ ID NO: 23333 - DNA, 367 bp, Zea mays
  Clone ID: LIB3152-039-P1-K1-B8
gaaagcacaatagtgtaccaacaatggcagccaaaatattttgcctccttatgctccttggtatttctgcaagtgctgctacggcgaccattttcccgcaatgctcacaagctcctatagcttcccttcttcccccgtacctctcaccagcggtgtcttcggtatgtgaaaacccaattcttcaaccctacaggatccaacaggcaatcgcagctggcatcttacctttatcacccttgttcctccaacaatcatcagccctattacagcagttacctttggtgcatttattggcacaaaacatcagggcacaacaactacaacaacttgtgctagcaaaccttgctgcctactctcagcaacagca

SEQ ID NO: 23334 - DNA, 373 bp, Zea mays
  unsure at all n locations
  Clone ID: LIB3152-039-P1-K1-B9
cgggaggccttctctctctctctctctctctctctctggcgacggccatggtgcagcaacagcaacacagaatctacatcttgcagttcaggaagggcgagacggagcaggaggtggcatgcaaagtgtcgcagcccaagggcgtcgggcggcgggtcatgtactactaccaggactacggcagcggcggcggtggcaagagcggcaagacggtgcaacccagggcgctcggcgtgcggcgcttcttggccatgctcctgctctccttcctctgcgtggggacgctgttcgtggcgcccgtgtccttcctctccttcgtgcatagcgacnaaggcggcgcggcggcggcggccactgccgcgcgcggcggggt

SEQ ID NO: 23335 - DNA, 359 bp, Zea mays
  Clone ID: LIB3152-039-P1-K1-C1
attttcagcattcagaaacacaccaagctaagcgcactagcaacaacctaacaacaatggctaccaagatattagccctccttgcgcttcttgcccttttagtgagcgcaacaaatgcgttcattattccacagtgctcacttgctcctagtgccattattccacagttcctcccaccagttacttcaatgggcttcgaacatccagccgtgcaagcctacaggctacaactagcgcttgcggcgagcgtcttacaacaaccaattgcccaattgcaacaacaatccttggcacatctaaacctacaaaccatcgcaacgcaacagcaacaacagtttctgccatcactgagccaccta

SEQ ID NO: 23336 - DNA, 373 bp, Zea mays
  Clone ID: LIB3152-039-P1-K1-C10
tgagcattcagaaacacaccaagctaagcgcactagcaacaacctaacaacaatggctaccaagatattatccctccttgcgcttcttgcgctttttgcgagcgcaacaaatgcgtccattattccacaatgctcacttgctcctagttccattattccacagttcctcccaccagttacttcaatggccttcgaacacccagctgtgcaagcctataggctacaacaagcgattgcggcgagcgtcttacaacaaccaattgcccaattgcaacaacaatccttggcacatctaacaatacaaaccatcgcaacgcaacagcaacaacagttcctaccagcactgagccacctagccatggtgaaccctgtc

SEQ ID NO: 23337 - DNA, 374 bp, Zea mays
  Clone ID: LIB3152-039-P1-K1-C12
caactagcaacatagaaagcacaatagtgtaccaacaatggcagccaaaatattttgcttccttatgctccttggtctttctgcaagtgttgctaccgcaaccattttcccacaatgctcacaagctcctatagcttcccttcttcccccatacctctcaccagcggtgtcttcaatgtgtgaaaacccaattgttcaaccctacaggatccaacaggcaatcgcaacaggcatcttaccattatcacccttgttcctccaacaaccgtcagccctattacagcagttacctttggtccatttggtggcacaaaacatcagggcacaacaactacaacaacttgtgctagcaaaccttgctgcatactctcagc

SEQ ID NO: 23338 - DNA, 373 bp, Zea mays
  Clone ID: LIB3152-039-P1-K1-C2
cacccatgcccgtgccaacagccgcattcaagcccgtgccagctgcagggaacctgcggcgttggcagcaccccgatcctgggccagtgcgtcgagttcctgaggcatcagtgcagcccgacggcgacgccctactgctcgcctcagtgccagtcgttgcggcagcagtgttgccagcagctcaggcaggtggagccgcagcaccggtaccaggcgatcttcggcttggtcctccagtccatcctgcagcagcagccgcaaagcggccaggtcgcggggctgttggcggcgcagatagcgcagcaactgacggcgatgtgcggcctgcagcagccgactccatgcccctacgctgctgccggcggtgtccccc

SEQ ID NO: 23339 - DNA, 368 bp, Zea mays
  Clone ID: LIB3152-039-P1-K1-C3
agcattcagaaacacaccaagcgaatctcactagcaacgacctaacaacaatggctaccaagatattagccctccttgcgcttcttgccctttttgtgagcgcaacaaatgcgttcattattccacaatgctcacttgctcctagtgccattattccacagttcctcccaccagttacttcaatgggcttcgaacacctagctgtgcaagccaacatgcaacaacaagcgcttgcggcgagcgtcttacaacaaccaattgcccaattgcaacaacaatccttgccacatgtaacaatacaagccatcacaacgcaacagcaacaacagtttctaccagcactgagccacctagccatggtgaaccct

SEQ ID NO: 23340 - DNA, 365 bp, Zea mays
  Clone ID: LIB3152-039-P1-K1-C4
gacagggagagaaaagggatgcatcggtggtggatcgctttgggtgcatggtggcggcgatggagccagagcagtcggggacagggccgtgacgtgcccggccgcgatccaccggtggcaggaccggccgcccgcgctgctctgctgcatgcatggctcaacgggaaacgcatacgaggcgactgcacgtcggccattagccggccctgccagtcccagtcccgttaaccacgccggcactgggaccgctgggcgggcgaccagacatgaagatgatgttttggttagggacgacgcttgcatgcgctaagatgaggtgaacctgcccttgatccggcatccttttcttggcaggttggtgactc

SEQ ID NO: 23341 - DNA, 374 bp, Zea mays
  Clone ID: LIB3152-039-P1-K1-C5
cccgctgcttccggaggcgttcaagggggtcaagcagatcggagttattggatggggctcgcagggtcctgcccaagcccagaacctgagagattcactggctgaagccaagtcagatattgttgtgaagattggtctccggaaaggatccaaatcttttgaggaagcacgtgccgctggattcaccgaagagagcggaaccttgggcgatatttgggaaaccgtctccggcagcgatcttgtgttgctgctgatatcggatgctgcacaggctgacaactatgagaagatcttctctcacatgaaaccaaacagtatccttggtttatctcatggatttcttctaggacatttgcaatcactcggactcgatt

SEQ ID NO: 23342 - DNA, 376 bp, Zea mays
  Clone ID: LIB3152-039-P1-K1-C6
attttgagcattcagaaacacaccaagcgaagcgcactagcaacaacctaacaacaatggctaccaagatattatccctccttgcgcttcttgcgctttttgcgagcgcaacaaatgcgtccattattccacaatgctcacttgctcctagttccattattccacagttcctcccaccagttacttcaatggccttcgaacacccagctgtgcaagcctataggctacaacaagcgattgcggcgagcgtcttacaacaaccaattgcccaattgcaacaacaatccttggcacatctaacaatacaaaccatcgcaacgcaacagcaacaacagttcctaccagcactgagccacctagccatggtgaaccctgt

SEQ ID NO: 23343 - DNA, 372 bp, Zea mays
  Clone ID: LIB3152-039-P1-K1-C8
gcaacatagaatgtggaatccaattgcaacaatagaacaacaatgacgaccaagatattttccctccttatgctccatgctctttctgcatgtgttgctaatgcgaccattttccctcaacgctcacaagctcctatagctgcccttcttcacccatacctcccatcaatgatagattcagtatgtgaaaacccagctcttcaaccctataggctccaacaagcaaatgcagcaagcaacttacctttatcaccctcgttgtttcaacaatcgccatccctatctttggtgcagtcattggtacaaaccatcggggcacaacagctgcagcaactcttgctacttgtgatcaaccaagtagctctggcaaac

SEQ ID NO: 23344 - DNA, 370 bp, Zea mays
  Clone ID: LIB3152-039-P1-K1-C9
cttcctttcttcccccatacctcttaccagcggtgtcttcagtatgtgaaaacccaattcttcaaccctacaggatccaacaggcaatcgcagcaggcatcttacctttatcacccttgttcctccaacaaccgtcagccctattacagcagttacctttggtgcatttgttggcacaaaacatcaaggcacaacaactacaacaacttgtgctaggaaaccttgctgcctactctcagcaacagcagtttcttccattcaaccaactggctgcattgaactctgctgcttatttgcaacaacaactaccattcagtcagctagctgctgcctacccccagcaatttcttccattcaaccaactggcagc

SEQ ID NO: 23345 - DNA, 357 bp, Zea mays
  Clone ID: LIB3152-039-P1-K1-D1
gttttgtgccaacaactaccattcattcagctagctgttgcctacccccagcaatttcttccattcaaccaactggcagcattgaactctgctgcttatttacaacagcaacagctaccaccattcagccagctagctgatgtgagccctgttgccttcttgacacaacaacagttgttgccgttctacctgcacgctgcgcctaacgctggcaccctcttacaactgcaacaattgctgccattcaaccaacttgctttgacaaacccaacagggttctaccaacaacccatcattggtggtgccctcttttagattgcttatgagtcataggtcaataatgaagttttttggatg

SEQ ID NO: 23346 - DNA, 374 bp, Zea mays
  Clone ID: LIB3152-039-P1-K1-D10
aagcaacatagaaagtggaattcattagcaacaatagagcaacaatggagaccaagatattttccctccttatgctccttgctctttctacatgtgttgctaacgcgacaattttccctcaatgctcacaagctcctatagcttcccttttttcccccataccttccatcaattatagcttcagtatgtgaaaacccagctcttcaaccatataggcttcaacaagcaatcgcagcaagcaacatacctttatcgcccttgttgtgtcaacaatcgccagccctatctttggtgcagtcattggtacaaaccatcagggcacaacagctgcagcaactcgtgctacctgtgatcaaccaagtagctctggcaaa

SEQ ID NO: 23347 - DNA, 370 bp, Zea mays
  Clone ID: LIB3152-039-P1-K1-D11
gacacacacacaccacaccacggctccgctagtgagaagcagagcgggaggacacgcggcgcggactgcgatggctcgtgcgctcggcgcttgcgtgctgctcgccgtcctgctcggtgccctggcgccggcgccggcgccggcggcggccgcgcgcgcccacgacgaccagggcagcggggccggcatacggcagccgagcggcgagtaccgcgggaggaaggtgggggccaggaccgaggtgcgggacgtggagggcgacggcgaggtgcaggagctcggccggttctccgtcgccgagtacaaccggcagctccgagaaggtggcggcggcggcggcaggctcgagttcggcagggtggtggcggcg

SEQ ID NO: 23348 - DNA, 373 bp, Zea mays
  Clone ID: LIB3152-039-P1-K1-D12
ttgataccaactagcaacatacatagtgaagtacactagcaacatcttagcaccaatgggagccaagatttttgccctccttgccctccttgctctttcagcaagcgctgctacctcgacttttattccacaatgctcacaacaatacctctctccggcgacagccgtgggatttcaatacccaactatacaatcctacatggtacaagaggccatccaagcaagcatcttacggtcattagcattaaccctccaacaaccatatgctctattgcaacagccatccttagtgcatctgtatctccaaagaatcgcggcacaacaactacaacaacagttgctaccaacaatcaatcaagtagttgcagcgaac

SEQ ID NO: 23349 - DNA, 376 bp, Zea mays
  Clone ID: LIB3152-039-P1-K1-D2
agcaacatagaaagcacaatagtgttccaacaatggcagctaaaatattttgcctccttatgctccttggtctttctgcaagtgctgctacggcgaccattttcccacaatgctcacaagctcctatagcttcccttcttcccccgtacctctcaccaacggtgtcttcggtatgtgaaaacccaattcttcaaccctacaggatccaacaggcaatcgcagctggcatcttacctttatcacccttgttcctccaacaatcatcagccctattacagcagttacctttggtgcatttattggcacaaaacatcagggcacaacaactacaacaacttgtgctagcaaaccttgctgcctactctcagcaacagca

SEQ ID NO: 23350 - DNA, 273 bp, Zea mays
  unsure at all n locations
  Clone ID: LIB3152-039-P1-K1-D3
cattgctgctttcttgagacaacaacatttgttgccattttacccacaggttgtgggaaacattaatgccttcttgcaacagcaacaattgctaccattctacccacagaatgtggcaaacattgttgccttcttacaacaacaacaattgttgccatttagccaacatgctttgacgaatcctaccaccttattgcaaccgcccaccattggtggtgccatcttctagattttttatgatttatactgtaataataaagttctcatgctgna

SEQ ID NO: 23351 - DNA, 308 bp, Zea mays
  Clone ID: LIB3152-039-P1-K1-D4
tgccgttctacctgcacgctatgcttatcgctggcaccctcttacaactgcaacaattgctgccattcaaccaacttgctttgacaaactcaacagtgttctaccaacaacccatcattggtggtgccctcttttagattgcttatgagttatagttcaataatgaagttttttggatgatgtttgtggcgtcccagaaataagaaagtacatttctagattcttaaaaaaaaaatttgaagaaaaaaaaaataaaaaaattttaatgcttaacaaatgacaaaccgtatcttgggtgcattcattgg

SEQ ID NO: 23352 - DNA, 328 bp, Zea mays
  Clone ID: LIB3152-039-P1-K1-D5
cagaaataagaagttacatttccagatactaatgtgaaaaaaaaacaacagagggggggctttcaataaaccaacgagctaaaaacaaaaacaacaaagttctaccaacaaacccatcatagaaggagccctcctttacatggcccatgtgttgtcgctccctccctccattttttgaataaataaattataggggcccccccccttagagagtacatcttttcctcccccgtgtgggccgttaaatttttttttttaggccccctaaataaacctgtctcgcgcccttttaccactcctctgtgttggaaaaacccgggttttcccc

SEQ ID NO: 23353 - DNA, 377 bp, Zea mays
  Clone ID: LIB3152-039-P1-K1-D6
caacaagcaacatagaaagtggaatccagtagcaacaatagagcaacaatggcgaccaagatattttccctccttatgctccttgctctttctgcatgtgttgctaacgcgacaattttccctcaatgctcacaagctcctatagcttcccttcttcccccataccttccatcaatgatagcttcagtatgtgaaaacccagctcttcaaccctataggctccaacaagcaatcgcagcaagcaacatacctttatcacccttgtttcaacaatcgccagccctatctttggtgcagtcattggtacaaaccatcagggcacagcagctgcagcaactcgtgctacctgtgatcaaccaagtagctctggcaaacct

SEQ ID NO: 23354 - DNA, 373 bp, Zea mays
  Clone ID: LIB3152-039-P1-K1-D7
cgtcagcctagcaattagcttatctactccagattggagaactcgacaccatgaaggtgctgatcgttgcccttgctctcctggcgctcgctgcgagcgccgcctacagtacaagcggcggctgtggctgccagacaccaccgtttcatctaccgcctccgttctatatgccgcctccggtctatctgccgccgcagcagcagccgcagccatggcaataccccactcaaccaccgcagctaagcccgtgccagcagttcggatcctgcggcgtcggcagcgtcagcagcccgttcctgggccagtgcgtccagttcctgaggcaccagtgcagcccggcggcgacgccctaccgctcgacacagtgccaggc

SEQ ID NO: 23355 - DNA, 374 bp, Zea mays
  Clone ID: LIB3152-039-P1-K1-D8
cccacgcgtccgcaactagcatcatagaaagcacaatagtgtaccaacaatggcagccaaaatattttgcctccttatgctccttggtctttctgcaagtgctgctacggcgaccattttcccacaatgctcacaagctcctatagcttcccttcttcccccgtacctctcaccagcggtgtcttcggtatgtgaaaacccaattcttcaaccctataggatccaacaggcaatcgcagctggcatcttacctttatcacccttgttcctccaacaatcatcagccctattacagcagttacctttggtgcatttattggcacaaaacatcagggcacaacaactacaacaacttgtgctagcaaaccttgctg

SEQ ID NO: 23356 - DNA, 374 bp, Zea mays
  Clone ID: LIB3152-039-P1-K1-D9
tggaggcactgtcatcagagaagattttggattatccttagacaaggcagacaatgcggtcctaggaactgctgctaaggttgtagttaccaaggattcaacaacaatagtgggagatggcactacacaggaggaagtgaacaaaagggtgacacaaatcaagaaccagattgaggctactgaacaagaatatgagagagaaaaactaaacgagaggatagctaaactctctggtggtgttgctgtcattcaggtaggagcacagacagaaactgagctcaaggaaaagaaattgagggttgaggatgccctgaatgctacaaaggcagcagtcgaggaaggtatcgttgtaggtggtggctgtacccttttga

SEQ ID NO: 23357 - DNA, 376 bp, Zea mays
  Clone ID: LIB3152-039-P1-K1-E1
ggcgttcgaccactcggcgggggacatgttgtgcaccgagtgcggcctcgtcctcgaggcgcactccgtcgacgagacctccgagtggcgcaccttcgcgaacgagtccaacgacaacgaccccgtccgtgtcggtggccccaccaacccgctcctcaccgatggcggcctctccaccgtcatcgccaagcccaacggtgcgcagggcgacttcctatcctcctccctcggcaggtggcagaaccgcggctccaaccccgaccgatccctcatcctcgccttccgcaccatcgccaacatggctgaccggctaggtcttgtggctactattaaggaccgagcaaatgaaatctacaagaaagttgaagatcttaaa

SEQ ID NO: 23358 - DNA, 374 bp, Zea mays
  Clone ID: LIB3152-039-P1-K1-E10
gatatggatcgatagcggcacaattcttacttgctccaagttccattattacacagttcctcccaccagttacttcaatgggcttcgaacacccagctgtgcaagcctataggctacaacaagcaattgcggcgagcgtcttacaacaaccaatttcccagttgcaacaacaatccttggcacatctaacaatacaaaccatcgcaacgcaacagcaacaacaattcctaccagcactgagccacctagccatggtgaaccctgccgcctacttgcaacagcagttgcttgcatcaaacccacttgctctggcaaacgtagttgcaaaccagccacaacaacagctgcaacagtttctgccagcgctcagtcaa

SEQ ID NO: 23359 - DNA, 369 bp, Zea mays
  Clone ID: LIB3152-039-P1-K1-E11
gagcattcagaaacacaccaagcgaagcacattagcaacaacctaacaacaatggctaccaagatattatccctccttgcgcttcttgcgctttttgcgagcgcaacaaatgcgttcattattccacaatgctcacttgctccaagttccattattacacagttcctcccaccagttacttcaatgggcttcgaacacccagctgtgcaagcctataggctacaacaagcaattgcggcgagcgtcttacaacaaccaatttcccagttgcaacaacaatccttggcacatctaacaatacaaaccatcgcaacgcaacagcaacaacaattcctaccagcactgagccacctagccatggtgaaccct

SEQ ID NO: 23360 - DNA, 370 bp, Zea mays
  Clone ID: LIB3152-039-P1-K1-E2
catcgactccagattggagaactcgacaccatgaaggtgctgatcgttgcccttgctctcctggcgctcgctgcgagcgccgcctccagtacaagcggcggctgtggctgccagacaccaccgtttcatctaccgcctccgttctatatgccgcctccgttctatctgccgccgcagcagcagccgcagccatggcaataccccactcaaccaccgcagctaagcccgtgccagcagttcggatcctgcggcgtcggcagcgtcggcagcccgttcctgggccagtgcgtcgagttcctgaggcaccagtgcagcccggcggcgacgccctacggctcgccacagtgccaggcgctgcagcagcagtgct

SEQ ID NO: 23361 - DNA, 307 bp, Zea mays
  unsure at all n locations
  Clone ID: LIB3152-039-P1-K1-E3
aaaaaaataaaaataattaaaaatttattttataaaggnggtgaaaaaaaaaaaagggggataaataaaataaataaaagagaaataataaaagaaaaataaaaaaataaaaatgacaaacaaaaaaataaaaaggggggggccccctaaaagattcaaaacttctttctttttgtttgcgaagcattatttttatttttggggcccctaaatataaattatcggggcttagttttaaaacaggtgttatgggaaaaactctttggtttcaaaattaaattgnnttgtcaaaacttttttttttttt

SEQ ID NO: 23362 - DNA, 367 bp, Zea mays
  Clone ID: LIB3152-039-P1-K1-E4
gagcattcagaaacacaccaagcgaagctcattagcaacaacctaacaacaatggctaccaagatattatccctccttgcgcttcttgcgctttttgcgagcgcaacaaatgcgttcattattccacaatgctcacttgctccaagttccattattacacagttcctcccaccagttacttcaatgggcttcgaacacccagctgtgcaagcctataggctacaacaagcaattgcggcgagcgtcttacaacaaccaatttcccagttgcaacaacaatccttggcacatctaacaatacaaaccatcgcaacgcaacagcaacaacaattcctaccagcactgagccacctagccatggtgaacc

SEQ ID NO: 23363 - DNA, 242 bp, Zea mays
  Clone ID: LIB3152-039-P1-K1-E5
caatttcttccattcaaccaactggtttaatggtaatagttgttgctgcaaataagcagcagggttcagtgtagacagttggttgaatggaagaaattgttgctgcggagagtagggtgaaaggtttgccagagctacttggttgatcacaggtagcacgagttgctgcagctgttgtgccctggtggtttgtaccaatgactgcaccaaagattgggctggcgcttgttgacgcagcaagg

SEQ ID NO: 23364 - DNA, 374 bp, Zea mays
  Clone ID: LIB3152-039-P1-K1-E6
ctagcaattagctcatcgactccagattggagaactcgacaccatgaaggtgctgatcgttgcccttgctctcctggcgctcgctgcgagcgccgcctccagtacaagcggcggctgtggctgccagacaccaccgtttcatctaccgcctccgttctatatgccgcctccgttctatctgccgccgcagcagcagccgcagccatggcaataccccactcaaccaccgcagctaagcccgtgccagcagttcggatcctgcggcgtcggcagcgtcggcagcccgttcctgggccagtgcgtcgagttcctgaggcaccagtgcagcccggcggcgacgccctacggctcgccacagtgccaggcgctgcagc

SEQ ID NO: 23365 - DNA, 360 bp, Zea mays
  Clone ID: LIB3152-039-P1-K1-E7
ggtgcatctcccaccgccggtccacctgccgccgccggtccacctgccaccgccggtccatgtgccgccgccggttcatctgccgccgccaccatgccactaccctactcaaccgccccggcctcagcctcatccccagccacacccatgcccgtgccaacagccgcatccaagcccgtgccagcagctcaggcaggtggagccgcagcaccggtaccaggcgatcttcggcttggtcctccagtccatcctgcagcagcagccgcaaagcggccaggtcgcggggctgttggcggcgcagatagcgcagcaactgacggcgatgtgcggcctgcagcagccgactccatgcccctacgc

SEQ ID NO: 23366 - DNA, 367 bp, Zea mays
  Clone ID: LIB3152-039-P1-K1-E9
gccagcgctcagtcaactagccatgttgaaccctgccgcctacctacaacagcaacaactgctttcatctagccctctcgttgtgggtaatgcacctacatacctgcaacaacaattgctgcaacagattgtaccagctctgactcagctagctgtggcaaaccctgctgcctacttgcaacagctgcttccattcaaccaactgactgtgtcgaactctgctgcgtacctacaacagcgacaacagttacttaatccactagcagtgcctaacccattggtcactgccttcctacagcagcaacaattgctaccatacagccagttctctttgatgaaccctgccttgtcgtggcagcaacccatc

SEQ ID NO: 23367 - DNA, 376 bp, Zea mays
  Clone ID: LIB3152-039-P1-K1-F1
gtcgctcccaagagcgttgctccgctgtcgcagaaggtccaggaacccgaagcgtccgacgaggatgagtatgacgatgaagatgacgagccgcagaaggtccaggaacccgaagcgtccgatgaggatgaagacgacgaagaggaggatatcgaagaggacgagaaggccaaccacgtggtcccttcttccgccaccaagaacccgcctccgccgccgcagactggcgaggattccgaggcttccgacgaagaagaggatagggaggcggacgacgagatgccgcagacgaagcccgctccaaatcaagaggtggaggctaagggtgcaaagcggccgagcgcgccgttccagcgcacctggtcgattgacgacg

SEQ ID NO: 23368 - DNA, 371 bp, Zea mays
  Clone ID: LIB3152-039-P1-K1-F10
cggacgcgtggcgcagcgcgagtgcggcgacagccagtcacacactcccactccctcgaccgctctcggccctcggccccgtccgcgtcgccgcagggcgaggaggcaatggcggcgggcgggaatggcgccggcggggacaccagggcggccttcgcgcggatctacaagacgctcaaggaggagctgctcaccgacccggccttcgagttcaccgaggagtcacgccagtggatcgaccgcatggttgactacaatgtactcggaggcaagtgtaaccgtgggctctctgtggtcgacagctacaagctgctcaagggcgctgatgctctgggcgaggaggaaacgttccttgcttgcaccctcggctg

SEQ ID NO: 23369 - DNA, 376 bp, Zea mays
  Clone ID: LIB3152-039-P1-K1-F11
tttgagcattcagaaacacaccaattgaagcgcactagcaacaacctaacaacaatggctaccaagatattatccctccttgcgcttcttgcgctttttgcgagcgcaacaaatgcgtccattattccacaatgctcacttgctcctagttccattattccacagttcctcccaccagttacttcaatggccttcgaacacccagctgtgcaagcctataggctacaacaagcgattgcggcgagcgtcttacaacaaccaattgcccaattgcaacaacaatccttggcacatctaacaatacaaaccatcgcaacgcaacagcaacaacagttcctaccagcactgagccacctagccatggtgaaccctgtcg

SEQ ID NO: 23370 - DNA, 375 bp, Zea mays
  Clone ID: LIB3152-039-P1-K1-F12
tagcaacatacatagtgaagtacactagcaacatcttagcaccaatgggagccaagatttttgccctccttgccctccttgctctttcagcaagcgctgctacctcgacttttattccacaatgctcacaacaatacctctctccggcgacagccgtgggatttcaatacccaactatacaatcctacatggtacaagaggccatccaagcaagcatcttacggtcattagcattaaccctccaacaaccatatgctctattgcaacagccatccttagtgcatctgtatctccaaagaatcgcggcacaacaactacaacaacagttgctaccaacaatcaatcaagtagttgcagcgaaccttgctgcttacc

SEQ ID NO: 23371 - DNA, 355 bp, Zea mays
  Clone ID: LIB3152-039-P1-K1-F2
gggaggccggtcgccacgcgtccgatttggcatcaaacacaccagcgaagcgcctacacacctaacaacaatggtccaagatatatcctcttgcgcttttgcgcttttgcgagcgcacaagcgtcattattcacaagctcactgctctagtcatattcacagttcctccaccgtacttcaatggccttgaacacccactgtgcaagcctataggctacaacaagcgattgcggcgagcgtcttacaacaaccaattgccaattgcaacaacaatccttggcacatctaacaatacaaaccatcgaacgcacagcaacaacagtctaccacctgagccacctagccaggtgaacct

SEQ ID NO: 23372 - DNA, 375 bp, Zea mays
  Clone ID: LIB3152-039-P1-K1-F3
agaccaactagcaacatagaaagcacaatagtgtaccaacaatggcagccaaaatattttgcctccttatgctccttggtctttctgcaagtgctgctacggcgaccattttcccacaatgctcacaagctcctatagcttcccttcttcccccgtacctctcaccagcggtgtcttcggtatgtgaaaacccaattcttcaaccctataggatccaacaggcaatcgcagctggcatcttacctttatcacccttgttcctccaacaatcatcagccctattacagcagttacctttggtgcatttattggcacaaaacatcagggcacaacaactacaacaacttgtgctagcaaaccttgctgtctactctc

SEQ ID NO: 23373 - DNA, 373 bp, Zea mays
  unsure at all n locations
  Clone ID: LIB3152-039-P1-K1-F4
ctagttctagatcgcgagcgcttttttttttttttttttttttttttttttttttggagagaaatctcaatcaatatattgattatttctaggaaacacatgccggaatgagggcaccattatcgagtacatctcatatgtaatctaaaagatggcaccttcaacgatgggttgctgcctcgacaagacagggtttatcaaagagaactggttgtatggcagcaattgttgctgctgtaggaaggcagcgaccaatgggttagccactgctagtggattaagtaactgttgtcgctgttgtaggtacccagcanagttcgacatagtcagttggttgaatggaagcagctgttgcaagtaggcagcaaggttt

SEQ ID NO: 23374 - DNA, 378 bp, Zea mays
  Clone ID: LIB3152-039-P1-K1-F5
attagctttatctactccagagcgcagaagaacccgatcgacaccatgagggtgttgctcgttgccctcgctctcctggctctcgctgcgagcgccacctccacgcatacaagcggcggctgcggctgccagccaccgccgccggttcatctaccgccgccggtgcatctgccacctccggttcacctgccacctccggtgcatctcccaccgccggtccacctgccgccgccggtccacctgccaccgccggtccatgtgccgccgccggttcatctgccgacgccaccatgccactaccctactcaaccgccccggcctcagcctcatccccagccacacccatgcccgtgccaacagccgcatccaagcccgtgc

SEQ ID NO: 23375 - DNA, 378 bp, Zea mays
  Clone ID: LIB3152-039-P1-K1-F6
catagaaagcacaatagtgtaccaacaatggcagctaaaatattttgcctccttatgctccttggtctttctgcaagtgctgctacggcgaccattttcccacaatgctcacaagctcctatagcttcccttcttcccccgtacctctcaccaacggtgtcttcggtatgtgaaaacccaattcttcaaccctacaggatccaacaggcaatcgcagctggcatcttacctttatcacccttgttcctccaacaatcatcagccctattacagcagttacctttggtgcatttattggcacaaaacatcagggcacaacaactacaacaacttgtgctagcaaaccttgctgcctactctcagcaacagcagtttctt

SEQ ID NO: 23376 - DNA, 259 bp, Zea mays
  Clone ID: LIB3152-039-P1-K1-F7
tcgatcacaatacatatcagccgtttattcaccaaatcaaatctgcaacatcgggtgtctatcttcaaaaaccatgaagctgctgcttgtggtacctgcttccatcgctttacaatcaagcgtatcttgtacacagacaggctgtacgttttttttttttttttctttttttttagcagctacatctttcacaacaacaatgttccacacatcaacttcattaaccatcacgacaatatcaccttttgcatcaacacca

SEQ ID NO: 23377 - DNA, 373 bp, Zea mays
  Clone ID: LIB3152-039-P1-K1-F8
gatcagcaaagcggcagtgcgtagagaggatcgtcgaacagaacagcatgaagatggtcatcgttctcgtcgtgtgcctggctctgtcagctgccagcgcctctgcaatgcagatgccctgcccctgcgcggggctgcagggcttgtacggcgctggcgccggcctgacgacgatgatgggcgccggcgggctgtacccctacgcggagtacctgaggcagccgcagtgcagcccgctggcggcggcgccctactacgccgggtgtgggcagacgagcgccatgtaccagccgctccggcaacagtgctgccagcagcagatgaggatgatggacgtgcagtccgtcgcgcagcagctgcagatgatgatgca

SEQ ID NO: 23378 - DNA, 374 bp, Zea mays; identical to SEQ ID NO: 17815
  Clone ID: LIB3152-039-P1-K1-F9

SEQ ID NO: 23379 - DNA, 375 bp, Zea mays
  Clone ID: LIB3152-039-P1-K1-G1
cgcaaattgcaccaagaaatccatcgagaggccgtcgacaggggaattaatggcgtcgtcgtctagcagcagccaccgccgcctcatcctcgcagccgccgtcctgctctccgtgctcgcggctgccagcgccagcgccgggacctcctgcgtgccggggtgggccatcccgcacaacccgctcccgagctgccgctggtacgtgaccagccggacctgcggcatcgggccgcgcctcccgtggccggagctgaagaggagatgctgccgggagctggcggacatcccggcgtactgccggtgcacggcgctgagcatcctcatggacggcgcgatcccgccgggcccggacgcgcagctggagggccgcctaga

SEQ ID NO: 23380 - DNA, 177 bp, Zea mays
  Clone ID: LIB3152-039-P1-K1-G10
gttctagatcgcgagcggcgccctttttttttttttttaagaaagactttttattttgggaagccacaaacatagacaaaaaacttatattgaactataactataagaaattaaagagggcaccaccaagagggtgtggtgaagctgtgggttgcaaacagtgttgatgcattattg

SEQ ID NO: 23381 - DNA, 374 bp, Zea mays
  Clone ID: LIB3152-039-P1-K1-G11
tggacgtcagcctagcaattatctcatcgactccagattggagaactcgacaccatgaaggtgctgatcgttgcccttgctctcctggcgctcgctgcgagcgccgcctccagtacaagcggcggctgtggctgccagacaccaccgtttcatctaccgcctccgttctatatgccgcctccgttctatctgccgccgcagcagcagccgcagccatggcaataccccactcaaccaccgcagctaagcccgtgccagcagttcggatcctgcggcgtcggcagcgtcggcagcccgttcctgggccagtgcgtcgagttcctgaggcaccagtgcagcccggcggcgacgccctacggctcgccacagtgcca

SEQ ID NO: 23382 - DNA, 376 bp, Zea mays
  Clone ID: LIB3152-039-P1-K1-G12
gcaacatagaaagcacaatagtgtttcaacaatggcagccaaaatattttgcctccttatgctccttggtctttctgcaagtgctgctacggcgaccattttcccacaatgctcacaagctcctatagcttcccttcttcccccgtacctctcaccagcggtgtcttcggtatgtgaaaacccaattcttcaaccctataggatccaacaggcaatcgcagctggcatcttacctttatcacccttgttcctccaacaatcatcagccctattacagcagttacctttggtgcatttattggcacaaaacatcagggcacaacaactacaacaacttgtgctagcaaaccttgctgcctactctcagcaacaacag

SEQ ID NO: 23383 - DNA, 381 bp, Zea mays
  Clone ID: LIB3152-039-P1-K1-G2
cacgcgcgcgtgagcttaaagaaacacaccaggcgtatcgcactagcaacgacttaacaacaggggctaccaagatattagccctccttgcgcttcttgccctttttgtgagcgcaacaaatgcgttcattattccacaatgctcacttgctcctagtgccattattccacagttcctcccaccagttacttcaatgggcttcgaacacctagctgtgcaagccaacatgcaacaacaagcgcttgcggcgagcgtcttacaacaaccaattgcccaattgcaacaacaatccttgccacatctaacaatacaagccatcacaacgcaacagcaacaacagttcctaccagcactgagccacctagccatggtgaaccctg

SEQ ID NO: 23384 - DNA, 376 bp, Zea mays
  Clone ID: LIB3152-039-P1-K1-G3
caacaacagtttctgccatcactgagccacctagccggggtgaaccctgtcgcctacttgcaacagcagctacttgcatccaacccacttgctctggcgaacgtagctgcataccagcaacaacaacgtctgcaacagtttatgccagcgctcagtcaactagccatggtgaaccctgtcgcctacctacaacagcaacaattgctttcatctagcccgctcgctgtgggcaatgcacctacgtacctacaacaacagttgctgcaacagattgtaccagctctgactcagctagctgtggcaaaccctactgcctacttgcaacagttgcttccattcaaccaactggctgtgtcgaactctgctgtgtacctac

SEQ ID NO: 23385 - DNA, 375 bp, Zea mays
  Clone ID: LIB3152-039-P1-K1-G4
gtcagcctagcaattagctcatcgactccagattggagaactcgacaccatgaaggtgctgatcgttgcccttgctctcctggcgctcgctgcgagcgccgcctccagtacaagcggcggctgtggctgccagacaccaccgtttcatctaccgcctccgttctatatgccgcctccgttctatctgccgccgcagcagcagccgcagccatggcaataccccactcaaccaccgcagctaagcccgtgccagcagttcggatcctgcggcgtcggcagcgtcggcagcccgttcctgggccagtgcgtcgagttcctgaggcaccagtgcagcccggcggcgacgccctacggctcgccacagtgccaggcgct

SEQ ID NO: 23386 - DNA, 374 bp, Zea mays
  Clone ID: LIB3152-039-P1-K1-G5
gtcagcctagcaattagctcatcgtcttttgattggagaactcgacaccatgaaggggctgatcgttgcccttgctctcctggcgctcgctgcgagcgccgcctccagtacaagcggcggctgtggctgccagacaccaccgtttcatctaccgcctccgttctatatgccgactccgttctatctgccgccgcagcagcagccgcagccatggcaataccccactcaaccaccgcagctaagcccgtgccagcagttcggatcctgcggcgtcggcagcgtctgcagcccgttcctgggccagtgcgtcgagttcctgaggcaccagtgcagcccggcggcgacgccctacggctcgccacagtgccaggcgc

SEQ ID NO: 23387 - DNA, 396 bp, Zea mays
  unsure at all n locations
  Clone ID: LIB3152-039-P1-K1-G6
ttggaaaaaggaggaaacttcaaatnncattgttcaagtgcctgatgcctattttctgcgagcccaaagcagattcttttgcaactattcctngnngacgggcaacaggtgcatatnagtcacagtcangggtatcaaagggattgcgtgatgccaattgctgctgggatcanncctcacgttgacggattccctgcaaatgccagatgacatntttcattaccagacggagcaaggtcctggggtccacatgatgatgcaattactgattaggaatgagaaagatggcattctgtgcccaattcctcagtaccccttgtactcggcctccatagctcttcatggtggagctcttgtcccctattaccttgatgaaaaaactgggtggggttttga

SEQ ID NO: 23388 - DNA, 370 bp, Zea mays
  Clone ID: LIB3152-039-P1-K1-G7
gttctatcctcttctctgttctcacccccttgcaagcaacaatcgttcaccgatcgatccagtgcgtcctgcatggaaactgccgccgtcgccgccgccggtgccgggcgccgcatcatggtggccgtggacgagggcgaggagagcctgcacgcgctcaactggtgcctcgccaacgtcgtctccccggcaggaggcgacacgctggtgctcgtccacgcccgccgcccgcgcccggtctacgccggcatggacagcgcagggtacatgatgacctcggacgtgctggcgagcgtcgagaggcacgccaacgcggtctcggcggcggcggtcgacaaggccaagcgcgtttgcgcggaccacccgcacg

SEQ ID NO: 23389 - DNA, 375 bp, Zea mays
  Clone ID: LIB3152-039-P1-K1-G8
ctccaaaaaccattaagctggtgcttgtggttcttgctttcattgctttagtatgaagtgtttcttgtacacagacaggcggctgcagctgtggtcaacaacaaagccatgagcagcaacatcatccacaacaacatcatccacaccaacaacaacaagttcacatgcaaccacaaaaacatcagcaacaacaagaagttcatgttcaacaacaacaacaacaaccgcagcaccaacaacaacaacaacaacagcaccaacaacaacatcaatgtgaaggccaacaacaacatcaccaacaatcacaaggccatgtgcaacaacacgaacagagccatgagcaacaccaaggacagagccatgagcaacaacatc

SEQ ID NO: 23390 - DNA, 369 bp, Zea mays
  Clone ID: LIB3152-039-P1-K1-G9
caactagcaacatagaaagcacaatagtgtaccaacaatggcagccaaaatattttgcttccttatgctccttggtctttctgcaagtgctgctaccgcaaccattttcccacaatgctcacaagctcctatagcttcctttcttcccccatacctctcaccagcggtgtcttcagtatgtgaaaacccaattcttcaaccctacaggatccaacaggcaatcgcagcaggcatcttacctttatcacccttgttcctccaacaaccgtcagccctattacagcagttacctttggtgcatttgttggcacaaaacatcaaggcacaacaactacaacaacttgtgctaggaaaccttgctgcctactc

SEQ ID NO: 23391 - DNA, 375 bp, Zea mays
  Clone ID: LIB3152-039-P1-K1-H1
tccagagcgcagaagaacccgatcgacaccatgagggtgttgctcgttgccctcgctctcctggctctcgctgcgagcgccacctccacgcatacaagcggcggctgcggctgccagccaccgccgccggttcatctaccgccgccggtgcatctgccacctccggttcacctgccacctccggtgcatctcccaccgccggtccacctgccgccgccggtccacctgccaccgccggtccatgtgccgccgccggttcatctgccgccgccaccatgccactaccctactcaaccgccccggcctcagcctcatccccagccacacccatgcccgtgccaacagccgcatccaagcccgtgccagctgcaggga

SEQ ID NO: 23392 - DNA, 355 bp, Zea mays
  Clone ID: LIB3152-039-P1-K1-H10
attgagaccaactagcaacatagatagcacaatagtgtaccaacaatggcagccaaaatattttgcttccttatgctccttggtctttctgcaagtgctgctaccgcaaccattttcccacaatgctcacaagctcctatagcttcctttcttcccccatacctctcaccagcggtgtcttcagtatgtgaaaacccaattcttcaaccctacaggatccaacaggcaatcgcagcaggcatcttacctttatcacccttgttcctccaacaaccgtcagccctattacagcagttacctttggtgcattttgtggcacaaaacatcaaggcacaacaaactacacaacttgtgc

SEQ ID NO: 23393 - DNA, 261 bp, Zea mays
  Clone ID: LIB3152-039-P1-K1-H11
attttgagcattcagaaacacacctagcgaagctacctagcaacgacttaacaacaatggctaccaagatattagccctccttgcgcttcttgccctttttgtgagcgcaacaaatgcgttcattattccacaatgctcacttgctcctagtgccattataccacagttcctccgaccagttacttcaatgggcttcgaacacctagctgtgcaagcctacaggctacaacaagcgcttgcggcgagcgtcttacaacaac

SEQ ID NO: 23394 - DNA, 404 bp, Zea mays
  unsure at all n locations
  Clone ID: LIB3152-039-P1-K1-H12
caccggcccgganggaagggccgacccacccatgcgtactgaacacacagggacgaacaatggcactcatacatggtttgcctccttatgctccttggtctttctgcaagtgctgctacggcgaccattttcccacaatgctcacaagctcctatagcttcccttcttcccccgtacctctcaccagcggtgtcttcggtatgtgaaaacccaattcttcaaccctataggatccaacaggcaatcgcagctggcatcttacctttatcacccttgttcctccaacaatcatcagccctattacagcagttacctttggtgcatttattggcacaaaacatcagggcacaacaactacaacaacttgtgctagcaaaccttgctgcctacttttagcaacaaca

SEQ ID NO: 23395 - DNA, 374 bp, Zea mays
  Clone ID: LIB3152-039-P1-K1-H2
cggacgcgtgggtagcaacatagatagcacaatagtgtaccaacaatggcagccaaaatattttgcctccttatgctccttggtctttctgcaagtgctgctacggcgaccattttcccgaaatgctcgcaagctcctatagcttcccttcttcccccgtacctctcaccagcggtgtcttcggtatgtgaaaacccaattcttcaaccctacaggatccaacaggcaatcacagctggcatcttacctttatcacccttgttcctccaacaatcatcagccctattacatcagttacctttggtgcatttattggcacaaaacatcagggcacaacaactacaacaacttgtgctagcaaaccttgctgccta

SEQ ID NO: 23396 - DNA, 379 bp, Zea mays
  unsure at all n locations
  Clone ID: LIB3152-039-P1-K1-H4
cggaangggcgganccacgcgtccggcggcgatgattgagtaataatgtgtcatgcatcaccatgggtggcagtgtcagtgtgagcaatgacctgaatgaacaattgaaatgaaaagaaaaaagtattgttccaaattaaaaaaaaaaaaaaaaaaaaaaaaaaaaaaaaaaaaaaaaaaaaaaaaaaaaaaataaaaaaaaaaaataaaaaaaataaaaaaaaaaaaaataaaaatacaaataaaaataaaaaaaaaattaaaaataattaaataaaaaagggggccccgtttttaagaaccaaatttttatgccgcggttttggaagataatagcttttttttaggggccccaaaataaaattaatgggcccttttt

SEQ ID NO: 23397 - DNA, 368 bp, Zea mays
  unsure at all n locations
  Clone ID: LIB3152-039-P1-K1-H5
ggtccatgcgcagcgggcggcggctgtctcctcggctcctcccctgcggccgagctcgcccctcgccccgccgcctcaactcgtctcgcccgcgaccgatttcctccctccgctcgccgcgccgcaacccggagataaggccgcgctcgatcgagaaccacctggggtccatcgtcatcgcgaccagctccggcgaggcgtccgccctttgcagcccggtgtctctgcgaccggcacacagctccagagggtgtcttggactgaagaagatatcagcaaagcttgaaaaggactgagagatgtcatngggctatgctgagaaagctgtcctaccggaggatgtggggactgggggaaatgctgagatc

SEQ ID NO: 23398 - DNA, 278 bp, Zea mays
  Clone ID: LIB3152-039-P1-K1-H6
gaagttgatatgaacttatacaggtttcagaaaagagaagcccacctcagtgaactggcaatgttgcagagcaagttccagcaggataagaaaaggatacaggaacttagggcccataggaaattcaagccttactaattctgctcaaatcttaacactcgcgacaaacaattttgatttgctggatattatcttaccatgtatggttcttggctgaaacaatatcaactgtggactgtcttgcatttgcgggtgccaatatatgttattcttttagt

SEQ ID NO: 23399 - DNA, 374 bp, Zea mays
  Clone ID: LIB3152-039-P1-K1-H7
agaccaacaagcaacatagaaagtggaatccagtagcaacaatagagcaacaatggcgaccaagatattttccctccttatgctccttgctctttctgcatgtgttgctaacgcgacaattttccctcaatgctcacaagctcctatagcttcccttcttcccccataccttccatcaatgatagcttcagtatgtgaaaacccagctcttcaaccctataggctccaacaagcaatcgcagcaagcaacatacctttatcacccttgtttcaacaatcgccagccctatctttggtgcagtcattggtacaaaccatcagggcacagcagctgcagcaactcgtgctacctgtgatcaaccaagtagctctgg

SEQ ID NO: 23400 - DNA, 362 bp, Zea mays
  Clone ID: LIB3152-039-P1-K1-H8
attagctcatcgactccagattggttaactcgacaccatgaaggtgctgatcgttgcccttgctctcctggcgctcgctgcgagcgccgcctccagtacaagcggcggctgtggctgccagacaccaccgtttcatctaccgcctccgttctatatgccgcctccgttctatctgccgccgcagcagcagccgcagccatggcaataccccactcaaccaccgcagctaagcccgtgccagcagttcggatcctgcggcgtcggcagcgtcggcagcccgttcctgggccagtgcgtcgagttcctgaggcaccagtgcagcccggcggcgacgccctacggctcgccacagtgccaggcgc

SEQ ID NO: 23401 - DNA, 373 bp, Zea mays
  Clone ID: LIB3152-039-P1-K1-H9
cgccggtccatgtgccgccgccggttcatctgccgccgccaccatgccactaccctactcaaccgccccggcctcagcctcatccccagccacacccatgcccgtgccaacagccgcatccaagcccgtgccagctgcagggaacctgcggcgttggcagcaccccgatcctgggccagtgcgtcgagtttctgaggcatcagtgcagcccgacggcgacgccctactgctcgcctcagtgccagtcgttgcggcagcagtgttgccagcagctcaagcaggtggagccgcagcaccggtaccaggcgatcttcggcttggtcctccagtccatcctgcagcagcagccgcaaagcggccaggtcgcggggct

SEQ ID NO: 23402 - DNA, 352 bp, Zea mays
  Clone ID: LIB3152-040-P1-K1-A1
gtcagcctagcaattagctcatcgactccagattggagaactcgacaccatgaaggtgctgatcgttgcccttgctctcctggcgctcgctgcgagcgccgcctccagtacaagcggcggctgtggctgccagacaccaccgtttcatctaccgcctccgttctatatgccgcctccgttctatctgccgccgcagcagcagccgcagccatggcaataccccactcaaccaccgcagctaagcccgtgccagcagttcggatcctgcggcgtcggcagcgtcggcagcccgttcctgggccagtgcgtcgaggtcctgaggcaccagtgcagcccggcggcgacgccctac

SEQ ID NO: 23403 - DNA, 373 bp, Zea mays
  Clone ID: LIB3152-040-P1-K1-A10
tttgagcattcataaacacactaatcgtagcgcactagcaacgacctaacagcgggggttatccaagatattagccctccttgcgcttcttgccctttttgtgagcgcaacaaatgcgttcattattccacaatgctcacttgctcctagtgccattattccacagttcctcccaccagttacttcaatgggcttcgaacacctagctgtgcaagccaacatgcaacaacaagcgcttgcggcgagcgttttacaacaaccaattgcccaattgcaacaacaatccttgccacatttaacaatacaagccatcacaacgcatcagtaacaacagttcctaccattacccatgtatttagccatggtgaaccct

SEQ ID NO: 23404 - DNA, 375 bp, Zea mays
  Clone ID: LIB3152-040-P1-K1-A11
gtcgctgggcgcggacgcggccgtgtgggtgtcgccccgcgcggaggacctggcggacgaggtggagcgcatccgcgcggccatgggctcggacatcgacgtcagcctggactgcgccgggttcagcaagaccatgtcgacggcgctggaggcgacgcggcccggcgggaaggtgtgcctggtcgggatgggccacaacgagatgacgctgccgctgacggcggcggcggcgcgggaggtggacgtggtgggcgtgttccggtacaaggacacctggccgctgtgcatcgacttcctgcgcagcggcaaggtggacgtcaagccgctcatcacccaccgcttcggcttctcgcagcgggacgtggaggaggcctt

SEQ ID NO: 23405 - DNA, 376 bp, Zea mays
  Clone ID: LIB3152-040-P1-K1-A12
caatcatcagccctattacaacagtttcctttggtgcatttattggcacaaagcgtcagggcacaacaactacaacaacttgtgctagcaaaccttgctgcctactctcagcaacagcagtttcttccattcaaccaactaggttcattgaactctgcttcttatttgcaacaacaacaactaccattcagccagctacctgctgcctacccccagcaatttcttccattcaaccaactagcagcattgaactctcctgcttatttacagcagcaacaactactaccattcagccagctagctggtgtgagccctgctaccttcttgacacaaccacagttgttgccgttctaccagcacgttgcgcctaacgctg

SEQ ID NO: 23406 - DNA, 395 bp, Zea mays
  Clone ID: LIB3152-040-P1-K1-A2
cgggaaggactggccggacccacccgtccgattttgagcattcagaaacacacctttcttagcacattagcaacaacctaacaacaatggctaccaagatattatccctccttgcgcttcttgcgctttttgcgagcgcaacaaatgcgttcattattccacaatgctcacttgctccaagttccattattacacagttcctcccaccagttacttcaatgggcttcgaacacccagctgtgcaagcctataggctacaacaagcaattgcggcgagcgtcttacaacaaccaatttcccagttgcaacaacaatccttggcacatctaacaatacaaaccatcgcaacgcaacagcaacaacaattcctaccagcactgagccacctagccatg

SEQ ID NO: 23407 - DNA, 377 bp, Zea mays
  Clone ID: LIB3152-040-P1-K1-A4
aagcaccatagaaggtggaatccagtttcaccaatagagcaacaatggagaccaagatattttccctccttatgctccttgctctttctacatgtgttgctaacgcgacaattttccctcaatgctcacaagctcctatagcttccctttttcccccataccttccatcaattatagcttcagtatgtgaaaacccagctcttcaaccatataggcttcaacaagcaatcgcagcaagcaacatacctttatcgcccttgttgtgtcaacaatcgccagccctatctttggtgcagtcattggtacaaaccatcagggcacaacagctgcagcaactcgtgctacctgtgatcaaccaagtagctctggcaaacctt

SEQ ID NO: 23408 - DNA, 286 bp, Zea mays
  Clone ID: LIB3152-040-P1-K1-A5
aacaactactaccattcagccagcttgttggtgtgagccctgctaccttcttgatacaaccacagttgttgccgttctaccagcacgctgcgcctaacgctggcaccctcttacaactgcaacaattgctgccattcaaccaacttgctttgacaaacccagcagcgttctaccaacaacccatcattggtggtgccctcttttagatttcttatgagttatagttcaataataaagttttttgtctgatgtttgtggcttcccagaaataagaaagtacatttct

SEQ ID NO: 23409 - DNA, 379 bp, Zea mays
  Clone ID: LIB3152-040-P1-K1-A6
aaatgcgttcattattccacaatgctcatttgctcctagtgccattataccacagttgctccgaccagttacttcaatgggcttcgaacacctagctgtgcaagcctacaggctacaacaagcgcttgcggcgagcgtcttacaacaaccaattaaccaattgcaacaacaatccttggcacatctaaccatacaaaccatcgcaacacaacagcaacaacagttcctaccagcactgagccaactagatgtggtgaaccctgtcgcctacttgcaacagcaggtgcttgcatccaacccacttgctctggcaaacgtagctgcataccaacaacaacaacaattgcaacagtttctgccagcgctcagtcaactagcc

SEQ ID NO: 23410 - DNA, 364 bp, Zea mays
  unsure at all n locations
  Clone ID: LIB3152-040-P1-K1-A7
ttttgagcattcagaaacacattatgcgaagcgcactagcaacaacctaacaacaatggctaccaagatattatccctccttgcgcttcttgcgctttttgcgagcgcaacaaatgcgtccattattccacaatgctcacttgctcctagttccattattccacagttcctcccaccagttacttcaatggccttcgaacacccagctgtgcaagcctataggctacaacaagccattgcggcgagcgtcttacaacaaccaattgcccaattggaacaacaatccttggcacatntaacaatacaaaccatcgcaacgcaacaagaacaacagtttctaccagcactgagccacctagccatg

SEQ ID NO: 23411 - DNA, 339 bp, Zea mays
  Clone ID: LIB3152-040-P1-K1-A9
caggagcatcaaccagatcactggttataggggcaccgccgtgaacgtgcaggggatggtgttcggcaacatggggaacacttctggcaccggcgtgctcttcaccaggaaccccaacaccgtagagaagaagctgcatggcgagttcctggtgaacgctcagggtgaggatgtggttgccggaataagaaccccagaggaccttgacgccatgaagaacctcatgccacaggcctacgacgagcttgttgagaactgcaacatcctggagagccactacaaggaaatgcaggatatcgagttcactgtccaggaaaacaggctttggatgttgcaatg

SEQ ID NO: 23412 - DNA, 377 bp, Zea mays
  Clone ID: LIB3152-040-P1-K1-B1
attgagaccaactagcaacatagatttcacaatagtgtaccaacaatggcagccaaaatattttgcttccttatgctccttggtctttctgcaagtgttgctaccgcaaccattttcccacaatgctcacaagctcctatagcttcccttcttcccccatacctctcaccagcggtgtcttcaatgtgtgaaaacccaattgttcaaccctacaggatccaacaggcaatcgcaacaggcatcttaccattatcacccttgttcctccaacaaccgtcagccctattacagcagttacctttggtccatttggtggcacaaaacatcagggcacaacaactacaacaacttgtgctagcaaacctttcttcctactt

SEQ ID NO: 23413 - DNA, 377 bp, Zea mays
  Clone ID: LIB3152-040-P1-K1-B10
atgaacaattgaaatgaaaagaataatgtattgttccaaaaaaaaaaaatagagaaaaataaaaaaaaaaaaaaaaaaaaaaaaaaaaaataaaaaaaaaaataatttataaaaatattaataaaacaattaaaaattaataaataaatatttaaaaaaaaaaaataatatatataaaaataggtgcccccctttcttgaaatcccacctttccttccccttcctctcctccattaccttttttttcattttctcctaattccatatcatggcctttttttttcctccctttgtctgtttaaacccttgttttaccccattttatactttttgtaacactcctccttttcccttatttcccttattcctttttttcc

SEQ ID NO: 23414 - DNA, 377 bp, Zea mays
  Clone ID: LIB3152-040-P1-K1-B11
attcagaaacacaccaagcgaagcacattagcaacaacctaacaacaatggctaccaagatattatccctccttgcgcttcttgcgctttttgcgagcgcaacaaatgcgttcattattccacaatgctcacttgctccaagttccattattacacagttcctcccaccagttacttcaatgggcttcgaacacccagctgtgcaagcctataggctacaacaagcaattgcggcgagcgtcttacaacaaccaatttcccagttgcaacaacaatccttggcacatctaacaatacaaaccatcgcaacgcaacagcaacaacaattcctaccagcactgagccacctagccatggtgaaccctgccgcctacttg

SEQ ID NO: 23415 - DNA, 375 bp, Zea mays
  Clone ID: LIB3152-040-P1-K1-B12
attttgagcattcagaaacactttaatcgaagcacattagcaacaacctagcaacaatggctaccaagatattatccctccttgcgcttcttgcgctttttgcgagcgcaacaaatgcgttcattattccacaatgctcacttgctccaagttccattattacacagttcctcccaccagttacttcaatgggcttcgaacacccagctgtgcaagcctataggctacaacaagcaattgcggcgagcgtcttacaacaaccaatttcccagttgcaacaacaatccttggcacatctaacaatacaaaccatcgcaacgcaacagcaacaacaattcctaccagcactgagccacctagccatggtgaaccctg

SEQ ID NO: 23416 - DNA, 375 bp, Zea mays
  Clone ID: LIB3152-040-P1-K1-B2
aagcaacatagaaagtggaatacagttttaacaatagagcaacaatggcggccaagatattttccatccttatgctccttgctctttctgcatgtgttgctaacgcgaccatttttcctcaatactcacaagctcctatagctgcccttcttcccccataccttccatcaatgaccgcttcagtatgtgaaaacccagcccttcaaccctacaggctccaacaagcaatcgcaacaagcaacttacctttatcacccctgttctttcaacaatcgccagccctatctttggtgcagtcattggtacaaaccatcagggcacaacagctgcagcaactcgtgctaccagtgatcagccaagtagctctggcaaacc

SEQ ID NO: 23417 - DNA, 374 bp, Zea mays
  Clone ID: LIB3152-040-P1-K1-B3
atcagcaaagcggcagtgcgtagagtggttcgtcgaacagaacagcatgaagatggtcatcgttctcgtcgtgtgcctggctctgtcagctgccagcgcctctgcaatgcagatgccctgcccctgcgcggggctgcagggcttgtacggcgctggcgccggcctgacgacgatgatgggcgccggcgggctgtacccctacgcggagtacctgaggcagccgcagtgcagcccgctggcggcggcgccctactacgccgggtgtgggcagacgagcgccatgtaccagccgctccggcaacagtgctgccagcagcagatgaggatgatggacgtgcagtccgtcgcgcagcagctgcagatgatgatgcagc

SEQ ID NO: 23418 - DNA, 281 bp, Zea mays
  Clone ID: LIB3152-040-P1-K1-B4
cgacccacccgtccgaaaaaaaaaaaaatttataaaaaataataatataacaacaaaaaaaaaaaaaaaaagggagagttttttaaaaaaaaaaaataaaaaaaaaaattgggcttctattaaaaaaataacaaacttacttatcctttactaccacctatttttcctctctatatttagaacctggtgctctttttactggctcctgttttattccccctttttttgggatccccctcttttatttaacctacactttttttttccccccttcccctctt

SEQ ID NO: 23419 - DNA, 378 bp, Zea mays
  Clone ID: LIB3152-040-P1-K1-B5
ccgacggcgacgccctactgctcgttttattgccagtcgttgcggcagcagtgttgccagcagctcaggcaggtggagccgcagcaccggtaccaggcgatcttcggcttggtcctccagtccatcctgcagcagcagccgcaaagcggccaggtcgcggggctgttggcggcgcagatagcgcagcaactgacggcgatgtgcggcctgcagcagccgactccatgcccctacgctgctgccggcggtgtcccccactgaagaaactatgtgctgtagtatagccgctggctagctagctagttgagtcatttagcggcgatgattgagtaataatgtgtcacgcatcaccatgggtggcagtgtcagtgtgagcaa

SEQ ID NO: 23420 - DNA, 341 bp, Zea mays
  Clone ID: LIB3152-040-P1-K1-B7
gtggagggctgatgtccatgcatgattttgtggcaacctgggaagcaatcctgatggttcgaaagcctgaaataccaaggatgagacgtataagcacataatttaggttattttgcatgcctctgttatgattcttgcaatggaacatatacatgaatcttcaaatggccatagtgtaactatagtgcttgccaattggccattgtagtatttgctatgtacaagagtggttttggcttctagtcaatgttgtgcatagagctgtaaactgcatagtttcttgggttcagaaattatgctgtagctttgtaagttgtttcactcctaattttttgaaaacc

SEQ ID NO: 23421 - DNA, 344 bp, Zea mays
  unsure at all n locations
  Clone ID: LIB3152-040-P1-K1-B8
ccgatttaggcccgccgctactgttatttcgagagaatttttgggctagcggggtgtgaacagaaacttggtgccccgctgctctgccttttgtcgtccactgtttcgcgtcaattctcgcgcgaaaagggatgggcactggagaggggtcgccgccggcgaggcggggcatcagcggtaggcgccgtcgatggccggacggagaggacgacgacgagtatgtgctggatgaggaagaaggagagggataccaaacgcagatgtattcaccgngtcgttccggcaccaccgggccaaggatcggccgcgtgaggcttacgaaggccccggagtacgccgcgggg

SEQ ID NO: 23422 - DNA, 371 bp, Zea mays
  Clone ID: LIB3152-040-P1-K1-B9
agtgaagtacactagcaacattttatcaccaatgggagccaagatttttgccctccttgccctccttgctctttcagcaagcgctgctacctcgacttttattccacaatgctcacaacaatacctctctccggcgacagccgtgggatttcaatacccaactatacaatcctacatggtacaagaggccatccaagcaagcatcttacggtcattagcattaaccctccaacaaccatatgctctattgcaacagccatccttagtgcatctgtatctccaaagaatcgcggcacaacaactacaacaacagttgctaccaacaatcaatcaagtagttgcagcgaaccttgctgcttacctccagcaac

SEQ ID NO: 23423 - DNA, 376 bp, Zea mays
  Clone ID: LIB3152-040-P1-K1-C1
caacaagcaacatataaagtggaattcattagcaacaatagagcaacaatggcggccgagatattttccatccttatgctccttgctctttctgcatgtgttgctaacgcgaccatttttcctcaatactcacaagctcctatagctgcccttcttcccccataccttccatcaatgaccgcttcagtatgtgaaaacccagcccttcaaccctacaggctccaacaagcaatcgcaacaagcaacttacctttatcacccctgttctttcaacaatcgccagccctatctttggtgcagtcattggtacaaaccatcagggcacaacagctgcagcaactcgtgctaccagtgatcagccaagtagctctggcaa

SEQ ID NO: 23424 - DNA, 145 bp, Zea mays
  unsure at all n locations
  Clone ID: LIB3152-040-P1-K1-C10
aataacccgnnggaccacccacgcgtccggacaaacccatcagcattctactaatatacccatcattggtggtgccctctgttagatttcttatgagttatagttcaataataaagttttttgtctgatgtttgtggcttcccag

SEQ ID NO: 23425 - DNA, 373 bp, Zea mays
  Clone ID: LIB3152-040-P1-K1-C11
cccacgcgtccgcccacgcgtttttctacgcgtccgtgaggaaagaggtgctgcagtagaggtaaatgttgtggataagatagcagaggatgtcgagtcgcctgtggctgaagaggagaaactggtaccggaagttgagaagggcgaggaggtaggttctgggagtgcagttggtggcgagttgagtgatgaggaggaggttgaggtctctccctctcctctgggcgaggaggtggcagaggtggcagaaccacaggataaggtagcccatgtttctgaagctaatggtgaattgggtgatgggaaagaagcgagtgatgatgtggttgctctgggaggtggagaagccacttacaaggatgctgttggtgat

SEQ ID NO: 23426 - DNA, 376 bp, Zea mays
  unsure at all n locations
  Clone ID: LIB3152-040-P1-K1-C2
ctgggtcttcagaccattagctttatctactccagagcgcagaagaacccgatcgacgccatgagggtgttgctcgttgccctcgctctcctggctctcgctgcgagcgccacctccacgcatacaagcggcggctgcggctgccagccaccgccgccggttcatctaccgccgccggtgcatctgccacctccggttcacctgccacctccggtgcatctcccaccgccggtccacctgccgccgccggtccacctgccaccgccggtccatgtgccgccgccggttcatctgccgncgccaccatgccactaccctactcaaccgccccggcctcagcctcatccccagccacacccatgctcgtgccaacagc

SEQ ID NO: 23427 - DNA, 359 bp, Zea mays
  Clone ID: LIB3152-040-P1-K1-C3
tttctccctcatagaaagaggcatttatagctaccatttagccccaataccggccatcaattatagcttcaggatgtgaaaacccagcttttcaaccatataggcttcaacaagcaatcgcagcaagcaacatacctttatcgcccttgttgtgtcaacaatcgccagccctatctttggtgcagtcattggtacaaaccatcagggcacaacagctgcagcaactcgtgctacctgtgatcaaccaagtagctctggcaaacctttctccctactctccgcaacaacaatttttttcattcaaccaactgtctacactgaaccctgctgcttatttgcagcaacaactattaccattt

SEQ ID NO: 23428 - DNA, 380 bp, Zea mays
  Clone ID: LIB3152-040-P1-K1-C4
ccgaattcccaggcaggcaggtcgtgttaggagggcaggaagaccgaagaccgagccgtgcgggggctcgggacgggaacgggacaggaccccaaaatctcagatccttcctgcccgcccgcccgtgcccgtcgacgcgtcgttcttgccggccgcgccccacctccgccctctcctcctccagggggatcggatacgccacaggctgcgcgatggtgctgtgggtcttcggctacggctccctcatctggaaccccggcttcgacttcgacgacaaaatcctcggcttcatcaagggctacaagcgcacctttaatctcgcttgcattgaccacagaggcacaccggagcatccggcgaggacctgcacgcttgaaacc

SEQ ID NO: 23429 - DNA, 288 bp, Zea mays
  Clone ID: LIB3152-040-P1-K1-C5
cttccgtggggctctggcctgaggtcctcgatgtcctgcggtgggtggaggagtacatgggcgccgccctcggcgacccgcggcgcccgttcctgctctccgtccgttccggcgccgcggtgtccatgcccgggatgatggacacggtgctcaacctggggctcaacgaccaagtggccgccgggctggcggccaagagctgggaccgttttgcctacgactcctttcgtcgtttccttacttgttcggcactgtgtgattgacattccccacgcgctgttcgaagag

SEQ ID NO: 23430 - DNA, 376 bp, Zea mays
  Clone ID: LIB3152-040-P1-K1-C6
gcaacatagaaagcacaatagtgtaccatcaatggcagccaaaatattttgcttccttatgctccttggtctttctgcaagtgttgctaccgcaaccattttcccacaatgctcacaagctcctatagcttcccttcttcccccatacctctcaccagcggtgtcttcaatgtgtgaaaacccaattgttcaaccctacaggatccaacaggcaatcgcaacaggcatcttaccattatcacccttgttcctccaacaaccgtcagccctattacagcagttacctttggtccatttggtggcacaaaacatcagggcacaacaactacaacaacttgtgctagcaaaccttgctgcatactctcagcaacatcag

SEQ ID NO: 23431 - DNA, 374 bp, Zea mays
  Clone ID: LIB3152-040-P1-K1-C7
attttgagcattcataaacacacctttcgaagcgcactagcaacgacctaacaggaatggctaccaagatattagccctccttgcgcttcttgccctttttgtgagcgcaacaaatgcgttcattattccacaatgctcacttgctcctagtgccattattacacagttcctcccaccagttacttcaatgggcttagaacacctagctgtgcaagccaacatgcaacaacaagcgcttgcggcgagcgtcttacaacaaccaattgcccaattgcaacaacaatccttgtcacatgtaacaatacaagccatcacaacgcaacagcaacaacagttcctaccagcactgagccacctagccatggtgaaccct

SEQ ID NO: 23432 - DNA, 370 bp, Zea mays
  Clone ID: LIB3152-040-P1-K1-C8
caacaagcaacatataaagtggaatacagtagcaacaatagagcaacaatggctgccaagatattttccatccttatgctccttgctctttctgcatgtgttgctaacgcgaccatttttcctcaatactcacaagctcctatagctgcccttcttcccccataccttccatcaatgaccgcttcagtatgtgaaaacccagcccttcaaccctacaggctccaacaagcaatcgcaacaagcaacttacctttatcacccctgttctttcaacaatcgccagccctatctttggtgcagtcattggtacaaaccatcagggcacaacagctgcagcaactcgtgctaccagtgatcagccaagtagctc

SEQ ID NO: 23433 - DNA, 376 bp, Zea mays
  Clone ID: LIB3152-040-P1-K1-D1
aacaactacaacaacagttgctaccaacaatcaatcaagtagttgcagcgaaccttgctgcttacctccagcaacaacagtttcttccattcaatcaactagatggggtgaaccctgctatctacttgcaggcacaacagctactaccatttaaccaacttgtcgggagcccttatgccttcttactgcaacaacagcttctaccattccatctgcaagctgtggcaaacattgctgctttcttgagacaacaacatttgttgccattttacccacaggttgtgggaaacattaatgccttcttgcaacagcaacaattgctaccattctacccacagaatgtggcaaacattgttgccttcttacaacaacaaca

SEQ ID NO: 23434 - DNA, 156 bp, Zea mays
  Clone ID: LIB3152-040-P1-K1-D11
atgcgctcgatgaaacccttcatgtattctgcaacaactgacccatctcagtggtggacttcacttctgtatgctaatactaggccatgtatatccatcaaagaaaagattgcgatgtacattatcttcattgtctcattggtatatttttgtcag

SEQ ID NO: 23435 - DNA, 377 bp, Zea mays
  Clone ID: LIB3152-040-P1-K1-D12
attgagaccatctagcaactattttatcacaatagtgtaccaacaatggcggccaaaatattttgcctccttatgctccttggtctttctgcaagtgctgctacggcgaccattttcccacaatgctcacaagctcctatagcttcccttcttcccccgtacctctcaccagcggtgtcttcggtatgtgaaaacccaattcttcaaccctataggatccaacaggcaatcgcagctggcatcttacctttatcacccttgttcctccaacaatcatcagccctattacagcagttacctttggtgcatttattggcacaaaacatcagggcacaacaactacaacaacttgtgctagcaaaccttgctgcctactt

SEQ ID NO: 23436 - DNA, 377 bp, Zea mays
  Clone ID: LIB3152-040-P1-K1-D2
attttgagcattcagaaacacacctttctaagcacattagcaacaacctaacaacaatggctaccaagatattatccctccttgcgcttcttgcgctttttgcgagcgcaacaaatgcgttcattattccacaatgctcacttgctccaagttccattattacacagttcctcccaccagttacttcaatgggcttcgaacacccagctgtgcaagcctataggctacaacaagcaattgcggcgagcgtcttacaacaaccaatttcccagttgcaacaacaatccttggcacatctaacaatacaaaccatcgcaacgcaacagcaacaacaattcctaccagcactgagccacctagccatggtgaaccctgcc

SEQ ID NO: 23437 - DNA, 396 bp, Zea mays
  Clone ID: LIB3152-040-P1-K1-D3
ggggcggacccacgcgtccggcacaatagtgtaccaacaatggcagccaaaatattttgcctccttatgctccttggtctttctgcaagtgctgctacggcgaccattttcccacaatgctcacaagctcctatagcttcccttcttcccccgtacctctcaccagcggtgtcttcggtatgtgaaaacccaattcttcaaccctataggatccaacaggcaatcgcagctggcatcttacctttatcacccttgttcctccaacaatcatcagccctattacagcagttacctttggtgcatttattggcacaaaacatcagggcacaacaactacaacaacttgtgctagcaaaccttgctgcctactctcagcaacaacagtttcttccattc

SEQ ID NO: 23438 - DNA, 376 bp, Zea mays
  Clone ID: LIB3152-040-P1-K1-D4
aatattttgagcattcagaaacacattatgcgaagcgcactagcaacgacctaacaacaatggctaccaagatattagccctccttgcgcttcttgccctttttgtgagcgcaacaaatgcgttcattattccacaatgctcacttgctcctagtgccattattccacagttcctcccaccagttacttcaatgggcttcgaacacctagctgtgcaagccaacatgcaacaacaagcgcttgcggcgagcgtcttacaacaaccaattgcccaattgcaacaacaatccttgccacatctaacaatacaagccatcacaacgcaacagcaacaacagttcctaccagcactgagccacctagccatggtgaaccc

SEQ ID NO: 23439 - DNA, 379 bp, Zea mays
  Clone ID: LIB3152-040-P1-K1-D5
attttgagcattcagaaacacaccatgctaagcacattagcaacaacctaacaacaatggctaccaagatattatccctccttgcgcttcttgcgctttttgcgagcgcaacaaatgcgttcattattccacaatgctcacttgctccaagttccattattacacagttcctcccaccagttacttcaatgggcttcgaacacccagctgtgcaagcctataggctacaacaagcaattgcggcgagcgtcttacaacaaccaatttcccagttgcaacaacaatccttggcacatctaacaatacaaaccatcgcaacgcaacagcaacaacagctgcaacagtttctgccagcgctcagtcaactagccatggtgaa

SEQ ID NO: 23440 - DNA, 372 bp, Zea mays
  Clone ID: LIB3152-040-P1-K1-D7
gggtcttcagaccattagctttatttactccagagcgcagaagaacccgatcgacaccatgagggtgttgctcgttgccctcgctctcctggctctcgctgcgagcgccacctccacgcatacaagcggcggctgcggctgccagccaccgccgccggttcatctaccgccgccggtgcatctgccacctccggttcacctgccacctccggtgcatctcccaccgccggtccacctgccgccgccggtccacctgccaccgtcggtccatgtgccgccgccggttcatctgccgccgccaccatgccactaccctactcaaccgccccggccttagcctcattcccagccacacccatgcccgtgccaaca

SEQ ID NO: 23441 - DNA, 304 bp, Zea mays
  Clone ID: LIB3152-040-P1-K1-D8
attcagaaacacaccaagcgtagttacctatcaacgactcaacaacaatggctgccaatatattagcccttcttgcgcttcttgccctttttgtgagcgcaacaaatgcgttcattattccacattgctcacttgctactagtgccattataccacagttcctccgaccagttactacaatgggctttgaacacctagctgtgcaagcctacatgctacaacaagcgcttgcggtgagcgtttgacgcatccaataaccaattgcaacatcaaacacatggttcttttaaccattcaatactat

SEQ ID NO: 23442 - DNA, 377 bp, Zea mays
  Clone ID: LIB3152-040-P1-K1-E1
cggacgcgtgggcaaagcggcagtgcgtagagaggatcgtcgaacagaacagcatgaagatggtcatcgttctcgtcgtgtgcctggctctgtcagctgccagcgcctctgcaatgcagatgccctgcccctgcgcggggctgcagggcttgtacggcgctggcgccggcctgacgacgatgatgggcgccggcgggctgtacccctacgcggagtacctgaggcagccgcagtgcagcccgctggcggcggcgccctactacgccgggtgtgggcagacgagcgccatgtaccagccgctccggcaacagtgctgccagcagcagatgaggatgatggacgtgcagtccgtcgcgcagcagctgcagatgatgatg

SEQ ID NO: 23443 - DNA, 378 bp, Zea mays
  Clone ID: LIB3152-040-P1-K1-E10
atttagaccaactagcaacatagtaagcacaatagtgtaccaacaatggcaggcaaaatattttgcctccttatgctccttggtatttctgcaagtgctgctacggcgaccattttcccgcaatgctcacaagctcctatagcttcccttcttcccccgtacctctcaccagcggtgtcttcggtatgtgaaaacccaattcttcaaccctacaggatccaacaggcaatcgcagctggcatcttacctttatcacccttgttcctccaacaatcatcagccctattacagcagttacctttggtgcatttattggcacaaaacatcatggcacaacaactacaacaacttgtgctagcaaaccttgctgcctactct

SEQ ID NO: 23444 - DNA, 375 bp, Zea mays
  Clone ID: LIB3152-040-P1-K1-E11
ttttgagcattcataaacacacttatctaagctacctagcaacgacttaacaacggtggctaccaagatattagccctccttgcgcttcttgccctttttgtgagcgcaacaaatgcgttcattattccacaatgctcacttgctcctagtgccattataccacagttcctccgaccagttacttcaatgggcttcgaacacctagctgtgcaagcctacaggctacaacaagcgcttgcggcgagcgtcttacaacaaccaattaaccaattgcaacaacaatccttggcacatctaaccatacaaaccattgcaacacaacagcaacaacagttcctaccagcactgagccaactagatgtggtgaaccctgt

SEQ ID NO: 23445 - DNA, 396 bp, Zea mays
  Clone ID: LIB3152-040-P1-K1-E4
cggaccaagccttccgtggccccgtgggtttaaaacacactttttgaaccacattaccaacaacctaacagcaatggctaccaagatattatccctccttgcgcttcttgcgctttttgcgagcgcaacaaatgcgttcattattccacaatgctcacttgctccaagttccattattacacagttcctcccaccagttacttcaatgggcttcgaacacccagctgtgcaagcctataggctacaacaagcaattgcggcgagcgtcttacaacaaccaatttcccagttgcaacaacaatccttggcacatctaacaatacaaaccatcgcaacgcaacagcaacaacaattcctaccagcactgagccacctagccatggtgaaccctgccgc

SEQ ID NO: 23446 - DNA, 300 bp, Zea mays
  Clone ID: LIB3152-040-P1-K1-E5
cgaggaatccttggacgaggatgatttgtcttaaaacgatctcccgagccaaaaggtgaacgtcatagtttgccatcggtgggggaacagctgtaaaaagaggttatgcgagttacatactaaaaacttgtgggcagcattcccagatctataaacatgaaatttgtagggcccaattatgttgtatccgtactggtggtttggtgttacctaaactctagtggtatgtttatggtgccctgtgctacatgattcttgcaaatccagcatggtgtatatttgttggccaaacacaaataa

SEQ ID NO: 23447 - DNA, 379 bp, Zea mays
  Clone ID: LIB3152-040-P1-K1-E6
gtggaatccagtagcaacaatagatcttttttggcgaccaagatattttccctccttatgctccttgctctttctgcatgtgttgctaacgcgacaattttccctcaatgctcacaagctcctatagcttcccttcttcccccataccttccatcaatgatagcttcagtatgtgaaaacccagctcttcaaccctataggctccaacaagcaatcgcagcaagcaacatacctttatcacccttgtttcaacaatcgccagccctatctttggtgcagtcattggtacaaaccatcagggcacagcagctgcagcaactcgtgctacctgtgatcaaccaagtagctctggcaaacctttctccctactctcagcaac

SEQ ID NO: 23448 - DNA, 375 bp, Zea mays
  Clone ID: LIB3152-040-P1-K1-E7
atgcgttcattattccacaatgtttacttgctcctagtgccattattccacagttcctcccaccagttacttcaatgggcttcgaacacctagctgtgcaagccaacatgcaacaacaagcgcttgcggcgagcgtcttacaacaaccaattgcccaattgcaacaacaatccttgccacatctaacaatacaagccatcacaacgcaacagcaacaacagttcctaccagcactgagccacctagccatggtgaaccctgccgcctacttgcaagagcagctgcttgcatccaacccacttgctctggcgaacgtagttgcaaaccagcaacaacaacagctacaacagtttctgccaacgctcagtcaactag

SEQ ID NO: 23449 - DNA, 374 bp, Zea mays
  Clone ID: LIB3152-040-P1-K1-E8
cttcggtatgtgaaaacccatttcttcataccctacaggatccaacaggcagtcgcagctggcatcttacctttatcacccttgttcctccaacaatcatcagccctattacagcagttacctttggtgcatttattggcacaaaacatcagggcacaacaactacaacaacttgtgctagcaaaccttgctgcctactctcagcaacagcagtttcttccattcaaccaactagctgcattgaactctgcttcttatttgcaacaacaacaactaccattcagccagctacctgttgcctacccccagcaatttcttccattcaaccaactggcagcattgaactctcctgcttatttacagcagcaacaact

SEQ ID NO: 23450 - DNA, 332 bp, Zea mays
  unsure at all n locations
  Clone ID: LIB3152-040-P1-K1-E9
acccacgcgnnccgaccgaattctcctgtctattacttttcctcattgcctcccctatncgacagcatacgggggcggcattttacgccgtcatggagccggttgttgctggcagcaacacggtagtagctgttgcccaagtcgagttgcaaacaatgaacgtgcagcagcccgttgatgttgccggacccagcgagggggtggcggcgatctccaaaggggggaaggtagggccgaaccggtgcatctcctgcaggaagagggttgtgctcacgggattcaactgccggtgtgggaacttgtactgcgcgctccaccgcttcttcgacaag

SEQ ID NO: 23451 - DNA, 375 bp, Zea mays
  Clone ID: LIB3152-040-P1-K1-F1
ttgagaccaacaagcaacatagaatgttttatccagtagcaacaatagagcaacaatggcgaccaagatattttccctccttatgctccttgctctttctgcatgtgttgctaacgcgacaattttccctcaatgctcacaagctcctatagcttcccttcttcccccataccttccatcaatgatagcttcagtatgtgaaaacccagctcttcaaccctataggctccaacaagcaatcgcagcaagcaacatacctttatcacccttgtttcaacaatcgccagccctatctttggtgcagtcattggtacaaaccatcagggcacagcagctgcagcaactcgtgctacctgtgatcaaccaagtagctct

SEQ ID NO: 23452 - DNA, 380 bp, Zea mays
  Clone ID: LIB3152-040-P1-K1-F10
gcagcaacgaacacgaaccttgtttgtaacgaagctgaagtagttcgttgtgaacccagtatggcaaacgcgccgaggatcctggccctcggcctgctagcgctcctgtgcgctgccgccggcccggccgccgcgcagaactgcggctgccagcctaacttctgctgcagcaagttcggctactgcggcacgaccgacgcctactgcggcgacgggtgccagtcgggcccgtgccgctcgggcggcggcggcggcggaggcggaggcggaggcggaggcagtggcggtgcgaacgtggctaacgtggtcagcgacgcgttcttcaacggcatcaagaaccaggccgggagcgggtgcgagggcaagaacttctacacccg

SEQ ID NO: 23453 - DNA, 345 bp, Zea mays
  unsure at all n locations
  Clone ID: LIB3152-040-P1-K1-F11
cgggncgaccacgcgttcttttaacacaccaagcgaagtgctagatctcaaccnacaacaatggcgggaggatattagtccttcttgcgcttcttgcccatttagtgagcgctacaaatgcgttcattattccacagtgctcacttgctcttagtgccattattccacaatatctcccaccagttacttcaatggtgcttgaacattcattcgtgcaagcctacaggcttcaactagcgcttgatttgagcgttttacaacaaccaattgcccaattgcaacaacaattcctggctcatctaaacctacaaaccatcttatcgcaacagcaacaacagttttctt

SEQ ID NO: 23454 - DNA, 379 bp, Zea mays
  Clone ID: LIB3152-040-P1-K1-F12
gtattttgcaaagccgcaagaatggtgacaaattgctccgtttcgccggaggggcgttaggaagcaggcggcggcgagaatccagtagaacgcgagcagacggcggtgatggcatggcgggcgagcctgtctcggagtgtaaaggagatacgcgtcctcttctgccagtcctcccccgctagcgcccccgcccgggagtttcgtgaagaagaactatggtgacatcaaggcccgcaacccctccctccccttccttgtccgcgagtgctccggtgtccagccccagctctgggcgcgctacgatatgggtgtggagagatgcgtgaacttggatgggctgacggaagcacagattgataagaagcctggaggaacttgc

SEQ ID NO: 23455 - DNA, 377 bp, Zea mays
  Clone ID: LIB3152-040-P1-K1-F2
caactagcaacatagaaagcacaattttttaccaacaatggcagccaaaatattttgcttccttatgctccttggtctttctgcaagtgttgctaccgcaaccattttcccacaatgctcacaagctcctatagcttcccttcttcccccatacctctcaccagcggtgtcttcaatgtgtgaaaacccaattgttcaaccctacaggatccaacaggcaatcgcaacaggcatcttaccattatcacccttgttcctccaacaaccgtcagccctattacagcagttacctttggtccatttggtggcacaaaacatcagggcacaacaactacaacaacttgtgctagcaaaccttgctgcatactctcagcaac

SEQ ID NO: 23456 - DNA, 373 bp, Zea mays
  Clone ID: LIB3152-040-P1-K1-F3
ctatactatactctaggaagcaaggtcaccaccgccatggcagccaagatgctggcattgttcgctctcctagctctttgtgcaagcgccactagtgcgacccatattccagggcacttgccaccagtcatgccattgggtaccatgaacccatgcatgcagtactgcatgatgcaacaggggcttgccagcttgatggcgtgtccgtccctgatgctgcagcaactgttggccttaccgcttcagacgatgccagtgatgatgccacagatgatgacgcctaacatgatgtcaccattgatgatgccgagcatgatgtcaccaatggtcttgccgagcatgatgtcgcaaatgatgatgccacaatgtcact

SEQ ID NO: 23457 - DNA, 363 bp, Zea mays
  Clone ID: LIB3152-040-P1-K1-F4
gcggcgcagatagcgcagcaactgtcggtgatgtgcggcctgcagcagccgactccatgcccctacgctgctgccggcggtgtcccccactgaagaaactatgtgctgtagtatagccgctggctagctagctagttgagtcatttagcggcgatgattgagtaataatgtgtcacgcatcaccatgggtggcagtgtcagtgtgagcaatgacctgaatgaacaattgaaatgaaaagaaaaaagtattgttccaaaaaaaaaaaaaaaaaaaaaaataaaaaaaaaaaaaaataaaatataaaatattttaaaaaattaatattaaaattaaaaaataattataatatttttttttttttt

SEQ ID NO: 23458 - DNA, 380 bp, Zea mays
  Clone ID: LIB3152-040-P1-K1-F5
attgagaccaactagcaacatagattgttcaatattgtaccaataatggcagccgaaatattttgcctcattatgctccttggtctttctgcaagtgctgctacggcgagcattttcccgcaatgctcacaagctcctatagcttcccttcttcccccatacctctcaccagcgatgtcttcagtatgtgaaaatccaattcttctaccctacaggatccaacaggcaatcgcagcaggcatcttacctttatcacccttgttcctccaacaatcatcagccctattacagcagttacctttggtgcatttattggcacaaaacatcagggcacaacaactacaacaactcgtgctagcaaaccttgctgcctactctca

SEQ ID NO: 23459 - DNA, 376 bp, Zea mays
  Clone ID: LIB3152-040-P1-K1-F6
agaaagtggaatccagtagcaacattttttcaacaatggcgaccaagatattttccctccttatgctccttgctctttctgcatgtgttgctaacgcgacaattttccctcaatgctcacaagctcctatagcttcccttcttcccccataccttccatcaatgatagcttcagtatgtgaaaacccagctcttcaaccctataggctccaacaagcaatcgcagcaagcaacatacctttatcacccttgtttcaacaatcgccagccctatctttggtgcagtcattggtacaaaccatcagggcacagcagctgcagcaactcgtgctacctgtgatcaaccaagtagctctggcaaacctttctccctactc

SEQ ID NO: 23460 - DNA, 375 bp, Zea mays
  Clone ID: LIB3152-040-P1-K1-F7
gaccaactagcaacatagaaagttctatagtgtaccaacaatggcagccaaaatattttgcctccttatgctccttggtctttctgcaagtgctgctacggcgaccattttcccgcaatgctcgcaagctcctatagcttcccttcttcccccgtacctctcaccagcggtgtcttcggtatgtgaaaacccaattcttcaaccctacaggatccaacaggcaatcgcagctggcatcttacctttatcacccttgttcctccaacaatcatcagccctattacaacagttacctttggtgcatttattggcacaaaacatcagggcacaacaactacaacaacttgtgctagcaaaccttgctgcctactctca

SEQ ID NO: 23461 - DNA, 380 bp, Zea mays
  Clone ID: LIB3152-040-P1-K1-F8
tctttagtatcaattgtttcttgtttatagacaggcggctgcagctgtggtcaggaacaaagccatgagcagcaacatcatccacaacaacatcatccacaaaaacaacaacatcaaccaccaccacaacatcaccagcagcagcaacaccaacaacaacaagttcacatgcaaccacaaaaacatcagcaacaacaagaagttcatgttcaacaacaacaacaacaaccgcagcaccaacaacaacaacaacaacagcaccaacaacaacatcaatgtgaaggccaacaacaacatcaccaacaatcacaaggccatgtgcaacaacacgaacagagccatgagcaacaccaaggacagagccatgagcaacaacatca

SEQ ID NO: 23462 - DNA, 372 bp, Zea mays
  Clone ID: LIB3152-040-P1-K1-G1
tcacaagctcctatagcttcccttttttccccgtacctctcaccaacggtgtcttcggtatgtgaaaacccaattcttcaaccctacaggatccaacaggcaatcgcagctggcatcttacctttatcacccttgttcctccaacaatcatcagccctattacagcagttacctttggtgcatttattggcacaaaacatcagggcacaacaactacaacaacttgtgctagcaaaccttgctgcctactctcagcaacagcagtttcttccattcaaccaactagctgcattgaactctgcttcttatttgcaacaacaacaactaccattcagccagctatctgctgcctacccccagcaatttcttcca

SEQ ID NO: 23463 - DNA, 372 bp, Zea mays
  Clone ID: LIB3152-040-P1-K1-G11
tcgatttcctgttcgcgctgctgttttatcacggcgacggggaacaacgcgacgctcttcaactcgggagtgatggtcatcgagccttcgaactgcacgttccggctactgatggagcacatcgacgagataacgtcgtacaacggcggggaccaggggtacctgaacgagatattcacgtggtggcaccggatcccgaagcacatgaacttcctgaagcatttctgggagggcgacgaggaggaggtgaaggcgaagaagacccggctgttcggcgcgaacccgccggtcctttacgtgctccactacctggggcggaagcccgggcttgtgcttcgggactacgactgcaactggaacgtggagatcctg

SEQ ID NO: 23464 - DNA, 311 bp, Zea mays
  Clone ID: LIB3152-040-P1-K1-G12
ccaactagcaacatataaagctcattgtgtaccaacaatggcagccaaaggggggtgccttcttatgctccttggtctttctgcaagtgctgctactgcgaccatttttcccgaaatgctcgcaagctcctatagcttcccttctttccccgtacctctcaccagcggtgtcttcggtatgtgaaaacccaattcttcaaccctacaggatccaactggcaatcacagctggcatcttacctttatcacccttgttcctccaacaatcatcagccctattacatcagttacctttggagcatttattggtt

SEQ ID NO: 23465 - DNA, 187 bp, Zea mays
  Clone ID: LIB3152-040-P1-K1-G2
caacaacctagtaacaggggcgatgtttacattaaagccctacttgcgtaggatcgcgcaggttttcgcagatgggatgcgtcccttattccacaggtgcctccaacaatcaacagccctattacagcagttaccctaggtgcatttattggcacaaaacattaaggggcagcaactaccaaaactt

SEQ ID NO: 23466 - DNA, 195 bp, Zea mays
  Clone ID: LIB3152-040-P1-K1-G3
caccaagtaaaaaacaaggggtatttttatagcaacaatagaggaactttgggccctattattgagcgcatcaaaagcctccatgatttcacaacatgtggtggtaacgcgacaattttccctaaatgctcacaagctcttatagcttccctttttcccccataccttccatcaattatagcttcagtatgtgaa

SEQ ID NO: 23467 - DNA, 395 bp, Zea mays
  Clone ID: LIB3152-040-P1-K1-G4
ggcggcccaacccgtccgttcagaaacacaccaagcgaagcgttttatcaacaacctaacaacaatggctacgaagatattatccctccttgcgcttcttgcgctttttgcgagcgcaacaaatgcgtccattattccacaatgctcacttgctcctagttccattattccacagttcctcccaccagttacttcaatggccttcgaacacccagctgtgcaagcctataggctacaacaagcgattgcggcgagcgtcttacaacaaccaattgcccaattgcaacaacaatccttggcacatctaacaatacaaaccatcgcaacgcaacagcaacaacagttcctaccagcactgagccacctagccatggtgaaccctgtcgcctacttgc

SEQ ID NO: 23468 - DNA, 379 bp, Zea mays
  Clone ID: LIB3152-040-P1-K1-G5
caactagcaacatacatagtgaagttctctagcaacatcttagcaccaatgggagccaagatttttgccctccttgccctccttgctctttcagcaagcgctgctacctcgacttttattccacaatgctcacaacaatacctctctccggcgacagccgtgggatttcaatacccaactatacaatcctacatggtacaagaggccatccaagcaagcatcttacggttattagcattaaccctccaacaaccatatgctctattgcaacagccatccttagtgcatctgtatctccaaagaatcgcggcacaacaactacaacaacagttgctaccaacaatcaatcaagtagttgcagcgaaccttgctgcttacc

SEQ ID NO: 23469 - DNA, 378 bp, Zea mays
  Clone ID: LIB3152-040-P1-K1-G6
cgtcagcctagcaattagctcatcgtctccagattggagaactcgacaccatgaaggtgctgatcgttgcccttgctctcctggcgctcgctgcgagcgccgcctccagtacaagcggcggctgtggctgccagacaccaccgtttcatctaccgcctccgttctatatgccgcctccgttctatctgccgccgcagcagcagccgcagccatggcaataccccactcaaccaccgcagctaagcccgtgccagcagttcggatcctgcggcgtcggcagcgtcggcagcccgttcctgggccagtgcgtcgagttcctgaggcaccagtgcagcccggcggcgacgccctacggctcgccacagtgccaggcgctgc

SEQ ID NO: 23470 - DNA, 328 bp, Zea mays
  Clone ID: LIB3152-040-P1-K1-G7
caccagcggtgtcttcggtatgtgattacccaattcttcaaccctataggatccaacaggctatcgcagctggcatcttacctttatcacccttgttcctccaacaatcatcagccctattacagcagttacctttggtgcatttattggcacaaaacatcagggcacaacaactacaacaacttgtgctagcaaaccttgctgcctactctcagcaacaacagtttcttccattcaaccaactagctgcattgaactttgctttttatttgcaacaacaaacactaccattcaggcagctatctgctggctacccccagcaattttt

SEQ ID NO: 23471 - DNA, 374 bp, Zea mays
  Clone ID: LIB3152-040-P1-K1-G8
caacaacctaacaacaatggctaccatgatattagccctccttgcgcttcttgcccttttagtgagcgcaacaaatgcgttcattattccacagtgctcacttgctcctagtgccattattccacagttcctcccaccagttacttcaatgggcttcgaacatccagccgtgcaagcctacaggctacaactagcgcttgcggcgagcgtcttacaacaaccaattgcccaattgcaacaacaatccttggcacatctaaacctacaaaccatcgcaacgcaacagcaacaacagtttctgccatcactgagccacctagccgtggtgaaccctgtcgcctacttgcaacagcagctacttgcatccaacccac

SEQ ID NO: 23472 - DNA, 284 bp, Zea mays
  Clone ID: LIB3152-040-P1-K1-G9
gaccaactagcaacatagaatgcattatagtgtaccaacaatggcagccaaaatattttgcttccttatgctccttggtctttctgcaagtgctgctaccgcaaccattttcccacaatgctcacaagctcctatagcttcctttcttcccccatacctctcaccagcggtgtcttcagtatgtgaaaacccaattcttcaaccctacaggatccaacaagcaattgcagcaggcattttacctttatcaccctttgttccttcaacaaccggcaggcctatta

SEQ ID NO: 23473 - DNA, 379 bp, Zea mays
  Clone ID: LIB3152-040-P1-K1-H1
gagcattcagaaacacaccaagcgtttcgcactagcaacaacctaacaacaatggctaccaagatattatccctccttgcgcttcttgcgctttttgcgagcgcaacaaatgcgtccattattccacaatgctcacttgctcctagttccattattccacagttcctcccaccagttacttcaatggccttcgaacacccagctgtgcaagcctataggctacaacaagcgattgcggcgagcgtcttacaacaaccaattgcccaattgcaacaacaatccttggcacatctaacaatacaaaccatcgcaacgcaacagcaacaacagttcctaccagcactgagccacctagccatggtgaaccctgtcgcctact

SEQ ID NO: 23474 - DNA, 365 bp, Zea mays
  Clone ID: LIB3152-040-P1-K1-H10
gataccaactagcaacatacattgttaagtacactagcaacatcttagcagcaatgggagccaagatttttgccctccttgccctccttgctctttcagcaagcgctgctacctcgacttttattccacaatgctcacaacaatacctctctccggcgacagccgtgggatttcaatacccaactatacaatcctacatggtacaagaggccatccaagcaagcatcttacggtcattagcattaaccctccaacaaccatatgctctattgcaacagccatccttagtgcatctgtatctccaaagaatcgcggcacaacaactacaacaacagttgctaccaacaatcaatcaagtagttgca

SEQ ID NO: 23475 - DNA, 381 bp, Zea mays
  Clone ID: LIB3152-040-P1-K1-H11
attttcagttttcataaactctcttttcgaagcgcactagcaacaacctagcagagaatggctaccaagatattagccctccttgcgcttcttgcccttttagtgagcgcaacaaatgcgttcattattccacagtgctcacttgctcctagtgccattattccacagttcctcccaccagttacttcaatgggcttcgaacatccagccgtgcaagcctacaggctacaactagcgcttgcggcgagcgtcttacaacaaccaattgcccaattgcaacaacaattcttggcacatttaaacctacaaaccatcgcaacgcaacagcaacaacagtttctgccatcactgagccacctagccgtggtgaaccctgtcgcc

SEQ ID NO: 23476 - DNA, 138 bp, Zea mays
  Clone ID: LIB3152-040-P1-K1-H2
attcagaaacacaccaaagcacaagtgcgtaccaacacctaacaacaatgggtgggaagatattagccctccttgcgcttcttgccctttttgggagcgcaacaaatgcgttcattatttcacaaagctcacttgctt

SEQ ID NO: 23477 - DNA, 378 bp, Zea mays
  Clone ID: LIB3152-040-P1-K1-H3
tagaaacacaccattcgaagcgcattattaacgacctaacaccaatggctaccaggatattagccctccttgcgcttcttgccctttttgtgagcgcaacaaatgcgttcattattccacaatgctcacttgctcctagtgccattattccacagttcctcccaccagttacttcaatgggcttcgaacacctagctgtgcaagccaacatgcaacaacaagcgcttgcggcgagcgtcttacaacaaccaattgcccaattgcaacaacaatccttgccacatctaacaatacaagccatcacaacgcaacagcaacaacagttcctaccagcactgagccacctagccatggtgaaccctgccgcctacttgcaag

SEQ ID NO: 23478 - DNA, 380 bp, Zea mays
  Clone ID: LIB3152-040-P1-K1-H4
ctctcggccaggtctccctctccctttctctccgccttcctcttccagtccccgcgcgcgagatcgccgccccgtgtgggccctagatcccgatggcctcgcgccgccgcaccctgctcaaggtcatcatcctcggcgatagtggggttgggaagacttccttgatgaaccaatatgtgaacaagaagttcagcaatcagtacaaggctacgatcggcgcggatttcctcaccaaggaggtgcagttcgaggacaggctcttcactctgcaaatatgggacactgctggccaggaaaggtttcagagtctcggcgttgcattctaccggggagcagaattgtgtgtcctagtctatgatgttaattctatgaaatcattt

SEQ ID NO: 23479 - DNA, 380 bp, Zea mays
  Clone ID: LIB3152-040-P1-K1-H5
ttcgtgctacctgttatcaaccaagttgttctggcaaacctttctccctactctgcgcaacaacaatttcttccattcaaccaactgtctacactgaaccctgctgcttatttgcagcaacaactattaccatttagccagctagctactgcctactctcaacaacaacaacttcttccatttaaccaattggccgcactgaaccccgctgcttatttgcagcagcaaatactactaccatttagccagctagctacagcaagccgtgcttccttcttgacacaacaacagttgctgccgttctaccagcagtttgcggctaaccccgcaaccctcttacaactacaacaattgttgccctttgtccaacttgctttgac

SEQ ID NO: 23480 - DNA, 358 bp, Zea mays
  unsure at all n locations
  Clone ID: LIB3152-040-P1-K1-H6
cgcacacaccgnccggtccccgatcttcgatcccctcgtcgatccaaagatgcagatcttcgtcaagaccctcactggaaagactatcaccctcgaggtggagtcttctgacaccattgacaacgtcaaggccaagatccaggacaaggagggcatccccccggaccagcagcggctcatctttgctggcaagcagctcgaggacgggcgcacacttgccgactacaacatccagaaggagagcaccctccaccttgttctccgcctcaggggaggcatgcagatcttcgtcaagacccttactggaaagactatcaccctcgaggtggagtcttctgacaccatcgacaacgtcaag

SEQ ID NO: 23481 - DNA, 375 bp, Zea mays
  Clone ID: LIB3152-040-P1-K1-H7
attcagaaacacaccaagcgatgcgtattagcaacgacctaacaacaatggctaccaagatattagccctccttgcgcttcttgccctttttgtgagcgcaacaaatgcgttcattattccacaatgctcacttgctcctagtgccattattccacagttcctcccaccagttacttcaatgggcttcgaacacctagctgtgcaagccaacatgcaacaacaagcgcttgcggcgagcgtcttacaacaaccaattgcccaattgcaacaacaatccttgccacatctaacaatacaagccatcacaacgcaacagcaacaacagttcctaccagcactgagccacctagccatggtgaaccctgccgcctact

SEQ ID NO: 23482 - DNA, 374 bp, Zea mays
  Clone ID: LIB3152-040-P1-K1-H8
caactagcaacatagaaagcacaattgtgtaccaacaatggcagctaaaatattttgcctccttatgctccttggtctttctgcaagtgctgctacggcgaccattttcccacaatgctcacaagctcctatagcttcccttcttcccccgtacctctcaccaacggtgtcttcggtatgtgaaaacccaattcttcaaccctacaggatccaacaggcaatcgcagctggcatcttacctttatcacccttgttcctccaacaatcatcagccctattacagcagttacctttggtgcatttattggcacaaaacatcagggcacaacaactacaacaacttgtgctagcaaaccttgctgcctactctcagc

SEQ ID NO: 23483 - DNA, 377 bp, Zea mays
  Clone ID: LIB3152-040-P1-K1-H9
gcaacatagatagcacaatagttgttctaacaatggcagccaaaatattttgcgtccttatgctccttgggctttctgcaaatgctgctacggcgaccattttcccgaaatgctcgcaagctcctatagcttcccttcttcccccgtacctctcaccagcggtgtcttcggtatgtgaaaacccaattcttcaaccctacaggatccaacaggcaatcacagctggcatcttacctttatcacccttgttcctccaacaatcatcagccctattacatcagttacctttggtgcatttattggcacaaaacatcagggcacaacaactacaacaacttgtgctagcaaaccttgctgcctactctcagcaacagcag

SEQ ID NO: 23484 - DNA, 348 bp, Zea mays
  Clone ID: LIB3152-041-P1-K1-A1
cgccgtcaggggtgcggaaggtcaagaccaaattcgccactgcagctactgtgcaagaagataaaactatggcaactgccaaaggcgatgtcgaccatctccccatatacgacctggaccccaagctggagatattcaaggaccatttcaggtaccggatgaaaagattcctagagcagaaaggatcaattgaagaaaatgagggaagtcttgaatctttttctaaaggctatttgaaatttgggattaatacaaatgaggatggaactgtatatcgtgaatgggcacctgctgcgcaagaggcagagcttattggtgacttcaatgactgggatggtgcaaaccata

SEQ ID NO: 23485 - DNA, 373 bp, Zea mays
  Clone ID: LIB3152-041-P1-K1-A10
attcagaaacacaccaagcgaagcgtactagcaacaacctaacaacaatggctaccaagatattagccctccttgcgcttcttgcccttttagtgagcgcaacaaatgcgttcattattccacagtgctcacttgctcctagtgccattattccacagttcctcccaccagttacttcaatgggcttcgaacatccagccgtgcaagcctacaggctacaactagcgcttgcggcgagcgtcttacaacaaccaattgcccaattgcaacaacaatccttggcacatctaaacctacaaaccatcgcaacgcaacagcaacaacagtttctgccatcactgagccacctagccgtggtgaaccctgtcgccta

SEQ ID NO: 23486 - DNA, 312 bp, Zea mays
  Clone ID: LIB3152-041-P1-K1-A11
cagcaattgttgctgctgtaggaaggcggcgaccaatgggttagccactaccaatggattaagtaactgttgtcgctgttgtaggtacgcagcagagttcgacagagtcagttggttgaatggaagcagctgttgcaagtaggcaacagggtttgccacagctagttgagtcagagctggtacaatctgttgcaacaattgttgttgcaggtatgtaggtgcattgcccacagcgagcgggctagatgaaagcagttgttgttgttgaacgtaggcggtagggttcaccatggctagttcactgaacgttgg

SEQ ID NO: 23487 - DNA, 369 bp, Zea mays
  Clone ID: LIB3152-041-P1-K1-A12
attgagaccaactagcaacatagaatgcacaatagtgtaccaacaatggcagccaaaatattttgcttccttatgctccttggtctttctgcaagtgttgctaccgcaaccattttcccacaatgctcacaagctcctatagcttcccttcttcccccatacctctcaccagcggtgtcttcaatgtgtgaaaacccaattgttcaaccctacaggatccaacaggcaatcgcaacaggcatcttaccattatcacccttgttcctccaacaaccgtcagccctattacagcagttacctttggtccatttggtggcacaaaacatcagggcacaacaactacaacaacttgtgctagcaaaccttgct

SEQ ID NO: 23488 - DNA, 395 bp, Zea mays
  Clone ID: LIB3152-041-P1-K1-A2
gacgccacgactacgcgtcttaaaaccattagctttatctactccagagcgcagaagaacccgatcgacaccatgagggtgttgctcgttgccctcgctctcctggctctcgctgcgagcgccacctccacgcatacaagcggcggctgcggctgccagccaccgccgccggttcatctaccgccgccggtgcatctgccacctccggttcacctgccacctccggtgcatctcccaccgccggtccacctgccgccgccggtccacctgccaccgccggtccatgtgccgccgcagatagcgcagcaactgacggcgatgtgcggcctgcagcagccgactccatgcccctacgctgctgccggcggtgtcccccactgaagaaactatgtgct

SEQ ID NO: 23489 - DNA, 381 bp, Zea mays
  Clone ID: LIB3152-041-P1-K1-A3
ggtgcatttattggcacaaaacatcatggcacaacaactacaacaacttgtgctagcaaaccttgctgcctactctcagcaacagcagtttcttccattcaaccaactaggttcattgaactctgcttcttatttgcaacaacaacaactaccattcagccagctacctgctgcctacccccagcaatttcttccattcaaccaactagcagcattgaactctcctgcttatttacagcagcaacaactactaccattcagccagctagctggtgtgagccctgctaccttcttgacacaaccacagttgttgccgttctaccagcacgttgcgcctaacgctggcaccctcttacaactgcaacaattgctgccattcaa

SEQ ID NO: 23490 - DNA, 376 bp, Zea mays
  Clone ID: LIB3152-041-P1-K1-A4
aactagcaacataaaaagcacaatattgttccaacaatggcagccaaaatattttgcctgcttatgctccttggtctttctgcaagtgctgctacggcgaccattttcccgcaatgctcgcaagctcctatagcttcccttcttcccccgtacctctcaccagcggtgtcttcggtatgtgaaaacccaattcttcaaccctacaggatccaacaggcaatcgcagctggcatcttacctttatcacccttgttcctccaacaatcatcagccctattacaacagttacctttggtgcatttattggcacaaaacatcagggcacaacaactacaacaacttgtgctagcaaaccttgctgcctactctcagcaac

SEQ ID NO: 23491 - DNA, 372 bp, Zea mays
  Clone ID: LIB3152-041-P1-K1-A5
gggaagctggtcgggcctgaaggttaagagcacgagtttgatgctccagacgacgcctacatccttgacgcagccgagactgccggtgtggagttgccatactcgtgccgtgctggggcttgctccacctgtgccggcaaaatcgagtctggttcggttgaccagtcggatgggtccttccttgatgacgggcagcaggaggaaggttatgtgctgacatgcgtctcctacccaaagtccgactgcgtcatccacacccacaaggaaggcgacctgtactagggctagggattttcaatttggcgagggaccaaaaatgctctcgagtggtgctttgtcaagcaaagctccatctgcgcgccctaccccgtt

SEQ ID NO: 23492 - DNA, 376 bp, Zea mays
  Clone ID: LIB3152-041-P1-K1-A6
cccacgcgtccgcccacgcgtccgcatctagcaacatagaaagcacaatattgtaccaataatggcagccaaaatattttgcctcattatgctccttggtctttctgcaagtgctgctacggcgagcattttcccgcaatgctcacaagctcctatagcttcccttcttcccccatacctctcaccagcgatgtcttcagtatgtgaaaatccaattcttctaccctacaggatccaacaggcaatcgcagcaggcatcttacctttatcacccttgttcctccaacaatcatcagccctattacagcagttacctttggtgcatttattggcacaaaacatcagggcacaacaactacaacaactcgtgctagca

SEQ ID NO: 23493 - DNA, 250 bp, Zea mays
  Clone ID: LIB3152-041-P1-K1-A7
tacgtcgaatcggtgccagccacctcataagggatccatttccttgacacaagcaccaagatatttcctcttatgctcgcttttgatggtgtaccacatttctaagctacgcttatgttcttttccatccttccataagatgtcagatggaaaacccactttaaccctatagctcaacagaatccacagacataccttataccctgttaacaatcgcgctatttgggcagcattgtcaaccatagccaca

SEQ ID NO: 23494 - DNA, 196 bp, Zea mays
  Clone ID: LIB3152-041-P1-K1-A8
tacatgtgttgttaacactacaatttatcctcaatgctcacaagcatctatagcttacctattacccccataccttccatcaatgatagcttcagaatgtataaaacccatctcttcaaccctataagctccaacattcaatctcagcacgcaacatacctttatcacccatatttcaacaatcaccagccctatc

SEQ ID NO: 23495 - DNA, 374 bp, Zea mays
  Clone ID: LIB3152-041-P1-K1-A9
cagaaacacaccaagcgaagcgcactagcaacaacctaacaacaatggctaccgagatattatccttcctggcgcttttggcccttttggcagccccacaaatgccttcattattccacaatgctcacttgcttctaagtccattattccacagttcctcccaccagttacttcaatggccttcgaacacccagctgtgcaagcctataggctacaacaagcgattgcggcgagcgtcttacaacaaccaattgcccaattgcaacaacaatccttggcacatctaacaatacaaaccatcgcaacgcaacagcaacaacagttcctaccagcactgagccacctagccatggtgaaccctgtcgcctacttgc

SEQ ID NO: 23496 - DNA, 370 bp, Zea mays
  Clone ID: LIB3152-041-P1-K1-B10
catcaatcatcattcatcttagtagtataggcaccaaatcaaatctgcaacatcaattatctaactccaaaaaccatgaagctggtgcttgtggttcttgctttcattgctttagtatcaagtgtttcttgtacacagacaggcggctgcagctgtggtcaacaacaaagccatgagcagcaacatcatccacaacaacatcatccacaaaaacaacaacatcaaccaccaccacaacatcaccagcagcagcaacaccaacaacaacaagttcacatgcaaccacaaaaacatcagcaacaacaagaagttcatgttcaacaacaacaacaacaaccgcagcaccaacaacaacaacaacaacagcacc

SEQ ID NO: 23497 - DNA, 371 bp, Zea mays
  Clone ID: LIB3152-041-P1-K1-B11
cagaaacacaccaagcgaagcacattagcaacaacctaacaacaatggctaccaagatattatccctccttgcgcttcttgcgctttttgcgagcgcaacaaatgcgttcattattccacaatgctcacttgctccaagttccattattacacagttcctcccaccagttacttcaatgggcttcgaacacccagctgtgcaagcctataggctacaacaagcaattgcggcgagcgtcttacaacaaccaatttcccagttgcaacaacaatccttggcacatctaacaatacaaaccatcgcaacgcaacagcaacaacaattcctaccagcactgagccacctagccatggtgaaccctgccgcctac

SEQ ID NO: 23498 - DNA, 338 bp, Zea mays
  Clone ID: LIB3152-041-P1-K1-B12
caaaaacataccaagcgattttttgtattttcaaccaaacaacaatggggaccgggatattatccttccttgcgcttctaacccttactgcgagctcaacaaatgcattcataataccacaatgcccacttgctccaagtatcattattacacatttcctcccatcaataacttcaatgggcttctaacacctagctgcgcaagcctataggctacaacaagcaattgcggctagcgttttacaacaaccaatttctcaattacaacaacaatccttggcacatttaacaatacaaaccatcgcatcgcaacagcatcaacattttctaccatcactg

SEQ ID NO: 23499 - DNA, 378 bp, Zea mays
  Clone ID: LIB3152-041-P1-K1-B2
atgttcttggtaacattcttagtggtttcttcttgcaattttctaagccattctcagtgaacgactacataaaggcgggatcaatagaaggcaaggtggttgaaataggactcacttctacttcattgatcaatccagaaaagctccctgtcatagtacccaactctttgttctccagtcagatgatagttaacagatcacgagctaattggcgagctagtgtgacaaagattcctatacgaattgaggatattgagaaggttccttctgcatcagaggatataaagactatgttaaggtctaatcaaaatgtgtccttggatagtgatgttccttactgctatctctcgagattggaaagttcatatggagagctca

SEQ ID NO: 23500 - DNA, 379 bp, Zea mays
  Clone ID: LIB3152-041-P1-K1-B3
gcaacatagaaagtggaatccagtttcaactttagagcaacaatggcgaccaagatattttccctccttatgctccttgctctttctgcatgtgttgctaacgcgacaattttccctcaatgctcacaagctcctatagcttcccttcttcccccataccttccatcaatgatagcttcagtatgtgaaaacccagctcttcaaccctataggctccaacaagcaatcgcagcaagcaacatacctttatcacccttgtttcaacaatcgccagccctatctttggtgcagtcattggtacaaaccatcagggcacagcagctgcagcaactcgtgctacctgtgatcaaccaagtagctctggcaaacctttctccct

SEQ ID NO: 23501 - DNA, 379 bp, Zea mays
  Clone ID: LIB3152-041-P1-K1-B4
cttctatcagtaccatcaatcatcattcatcttagtagtataggcaccaaatcaaatctgcaacatcaattatctaactccaaaaaccatgaagctggtgcttgtggttcttgctttcattgctttagtatcaagtgtttcttgtacacagacaggcggctgcagctgtggtcaacaacaaagccatgagcagcaacatcatccacaacaacatcatccacaaaaacaacaacatcaaccaccaccacaacatcaccagcagcagcaacaccaacaacaacaagttcacatgcaaccacaaaaacatcagcaacaacaagaagttcatgttcaacaacaacaacaacaaccgcagcaccaacaacaacaacaacaacag

SEQ ID NO: 23502 - DNA, 373 bp, Zea mays
  Clone ID: LIB3152-041-P1-K1-B6
ggaaaacctgctgatgtgctgttatggaggaacaaaaagatatcatcgagtgttctggctcttgcaacagctatttgggttttctttgagtggctcgactaccacttactgacaattgtttcatttgcccttgttcttggaatggttgtccagtttgtttggtccaacttctcaaacatgctaagcagcggatcccgttctcaggtgccccgagttgaattgcctgatgagttatttgtgaacattgccgttgcaatcggtgcccaaataaacaagttcctgtgcttccttcaggatgtttcttgtgaaagaaacttgaagcattttgtagtggcgatcgcaggactgtgggctgctgcggtgattggaagtt

SEQ ID NO: 23503 - DNA, 375 bp, Zea mays
  Clone ID: LIB3152-041-P1-K1-B7
caaaaacacacaaagggaagtgcactagcaacttcctaacaacaatggctaccaagatattagccctccttgcgctcctttccctttcagtgagcgcaacaactgcattcattattccacaatgctcacttgctcctaatgccattattccacagttcctcccatcagttacatcaatgggcatcgaacaccctattgtgcaagcctataggctacaacaagcgcttgcggcgagcgtcttacaacaaccgtttgcccaattacaacaacaatccttggcacatctaaccatacaaaccatcgcaacacaactagagcaacagtttgtgcccgcattgagccaactagccgcagtgaaccctgtctcctacttgc

SEQ ID NO: 23504 - DNA, 371 bp, Zea mays
  unsure at all n locations
  Clone ID: LIB3152-041-P1-K1-B8
ggagaaccaaggtaatcgaacccgtgtagcgaccttcttgagcccgaagcaaaaggcactgctcatcgatccgccaccacgccacaaaatcctctcctactccggcagttctgctcgccgccgcctccacgatgacggaagacgtgcagatgaacgactcggagccccagcctgcggcctcagctcccgccgtcggggcgccggcgctctccacactacaccatctgaaggagatcgcgtccgtgatcgaggccggttctctgtccaaggaggtccgccggatctcccgcgccttccgcctcaccgtcgcgctccgtcgccgnctcgccgcgcgggacgtctccgccttcctcgccttcgcgctacccgcg

SEQ ID NO: 23505 - DNA, 377 bp, Zea mays
  Clone ID: LIB3152-041-P1-K1-B9
cgacctttccccctcccccgcattttacctcgcggagatccagtccagccctagggtttcgccagcggcgagccaaactccacgagcgggggaagaggggaaagcagggacgacgagggggcagccatggggcagcagtcgctgatctacgcgttcgtggcccgtggcacggtcatactggccgagtacacggagttcaccggcaacttcaccaccatcgcctcccagtgcctcatgaagctccccgcaagcaacaacaagttcacctacaactgcgacggtcacactttcaattacctcgtggaagacggattcacatactgtgttgttgctgttgaatcggtggggcaacaaattcctattgctttcatggatag

SEQ ID NO: 23506 - DNA, 375 bp, Zea mays
  Clone ID: LIB3152-041-P1-K1-C1
attttgagcattcagaaacacaccttgcgattcgcactagcaacgacctaacaacaatggctaccaagatattagccctccttgcgcttcttgccctttttgtgagcgcaacaaatgcgttcattattccacaatgctcacttgctcctagtgccattattccacagttcctcccaccagttacttcaatgggcttcgaacacctagctgtgcaagccaacatgcaacaacaagcgcttgcggcgagcgtcttacaacaaccaattgcccaattgcaacaacaatccttgccacatctaacaatacaagccatcacaacgcaacagcaacaacaagtcctaccagcactgagccacctagccatggtgaaccctg

SEQ ID NO: 23507 - DNA, 367 bp, Zea mays
  Clone ID: LIB3152-041-P1-K1-C10
caactagcaacatagaaagcacaattgtgtaccaacaatggccgccaaaatctggagcttccttatgctcctgggtctttctgcaagtgttgctaccgcaaccattttcccacattgctcacaagctactatagctaaccttcttcccccatacctctcaccagcggtgtcttcaatgtgtgaaaacccaattgttcaaccctacaggatccaacaggcaatcgcaacaggcatgtgaccattatcacccttgttcctacaacaaccgtcagccctattacagcagttaccttcggtccatttggcggcacaaaacatcacggcacaacaactacatcaacttgtgctagcaaacctcgctgcatac

SEQ ID NO: 23508 - DNA, 371 bp, Zea mays
  Clone ID: LIB3152-041-P1-K1-C11
aaacacaccaagcgaagcgcactattaacaacctaacaacaatggctaccaagatattagccctccttgcgcttcttgcccttttagtgagcgcaacaaatgcgttcattattccacagtgctcacttgctcctagtgccattattccacagttcctcccaccagttacttcaatgggcttcgaacatccagccgtgcaagcctacaggctacaactagcgcttgcggcgagcgtcttacaacaaccaattgcccaattgcaacaacaatccttggcacatctaaacctacaaaccatcgcaacgcaacagcaacaacagtttctgccatcactgagccacctagccgtggtgaaccctgtcgcctacttg

SEQ ID NO: 23509 - DNA, 369 bp, Zea mays
  Clone ID: LIB3152-041-P1-K1-C12
ctagttgctgcctacccccagcaatttcttccattcaaccaactagcagcattgaactctgctgcttatttacagcagcaacaactactaccattcagccagctagctgatgtgagccctgctgccttcttgacacaacaacagttgttgccgttctacctgcacgctatgcctaacgctggcaccctcttacaactgcaacaattgctgccattcaaccaacttgctttgacaaactcaacagtgttctaccaacaacccatcattggtggtgccctcttttagattgcttatgagttatagttcaataatgaagttttttggatgatgtttgtggcgtcccagaaataagaaagtacatttctaaaa

SEQ ID NO: 23510 - DNA, 380 bp, Zea mays
  Clone ID: LIB3152-041-P1-K1-C2
cagaaacacaccaagcgaagcgcacttgcaacaacctaacaacaatggctaccaagatattagccctccttgcgcttcttgcccttttagtgagcgcaacaaatgcgttcattattccacagtgctcacttgctcctagtgccattattccacagttcctcccaccagttacttcaatgggcttcgaacatccagccgtgcaagcctacaggctacaactagcgcttgcggcgagcgtcttacaacaaccaattgcccaattgcaacaacaatccttggcacatctaaacctacaaaccatcgcaacgcaacagcaacaacagtttctgccatcactgagccacctagccgtggtgaaccctgtcgcctacttgcaacag

SEQ ID NO: 23511 - DNA, 377 bp, Zea mays
  Clone ID: LIB3152-041-P1-K1-C3
caactagcaacatagaaagcacaattttgtaccaacaatggcagccaaaatattttgccgccttatgctccttggtctttctgcaagtgctgctacggcgaccattttcccgaaatgctcgcaagctcctatagtttcccttcttcccccgtacctctcaccagcggtgtcttcggtatgtgaaaacccaattcttcaaccctacaggatccaacaggcaatcacagctggcatcttacctttatcacccttgttcctccaacaatcatcagccctattacatcagttacctttggtgcatttattggcacaaaacatcagggcacaacaactacaacaacttgtgctagcaaaccttgctgcctactctcagcaac

SEQ ID NO: 23512 - DNA, 377 bp, Zea mays
  Clone ID: LIB3152-041-P1-K1-C4
ccaagttccattattacacagttcttcccatcagttacttcaatgggcttcgaacacccagctgtgcaagcctataggctacaacaagcaattgcggcgagcgtcttacaacaaccaatttcccagttgcaacaacaatccttggcacatctaacaatacaaaccatcgcaacgcaacagcaacaacaattcctaccagcactgagccacctagccatggtgaaccctgccgcctacttgcaacagcagttgcttgcatcaaacccacttgctctggcaaacgtagttgcaaaccagccacaacaacagctgcaacagtttctgccagcgctcagtcaactagccatggtgaaccctgccgcctacctacaacagca

SEQ ID NO: 23513 - DNA, 392 bp, Zea mays
  Clone ID: LIB3152-041-P1-K1-C5
gggagcccacgcttccggaaacataaaagggggaatacagtttcctctttagaccaccaatggcggccaagatagggtccatccttacgctcctggctctttctgcatgtgtggctaacgcgaccatttttcctcaatactaacaagctcctatagctgcccttcttcccccataccttccatcaatgaccgcttcagtatgtgaaaacccagcccttcaaccctacaggctccaacaagcaatcgcaacaagcaacttacctttatcacccctgttctttcaacaatcgccagccctatctttggtgcagtcattggtacaaaccatcagggcacaacagctgcagcaactcgtgctaccagtgatcagccaagtagctctggcaaacctt

SEQ ID NO: 23514 - DNA, 376 bp, Zea mays
  Clone ID: LIB3152-041-P1-K1-C6
atcacagcaggcattttacggtcgttagcattgactgtccaacaaccatatgccctatggcaacaaccatccttagtgaatctatatctccaaagaatcgcagcacaacaactacaacagcagttgcttccaacaatcaatcaagtagttgcagcgaaccttgctgcttacctccagcaacaacaatttcttccattcaatcaactagctggggtgaaccttgctgcttacttgcaggcacaacagctactaccattcaaccaacttgtcaggagccctgctgccttcttactgcagcaacagttgctgccattccatctacaagttgtggcaaacattgctgctttcttgcaacaacaacaattgctgccatttt

SEQ ID NO: 23515 - DNA, 374 bp, Zea mays
  Clone ID: LIB3152-041-P1-K1-C7
caacaagcaacatagaaagtttaattcagtagcaacaatagagcaacaatggcgaccaagatattttccctccttatgctccttgctctttctgcatgtgttgctaacgcgacaattttccctcaatgctcacaagctcctatagcttcccttcttcccccataccttccattaatgatagcttcagtatgtgaaaacccagctcttcaaccctataggctccaacaagcaatcgcagcacgcaacatacctttatcacccttgtttcaacaatcgccagccctatctttggtgcagtcattggtacaaaccatcagggcacagcagctgcagcaactcgtgctacctgtgatcaaccaagtagctctggcata

SEQ ID NO: 23516 - DNA, 377 bp, Zea mays
  Clone ID: LIB3152-041-P1-K1-C8
attctaaaacacaagaagcttaccttatctatcaacaacctaacaacaatggctgcgaagatattagccctccttgcgcttcttgccctttgagagagcgcaacaaatgcgtgcattattccacagagctcacttgctcctagtgccattattccacagttcctcccaccagttacttcaatgggctttgaacatacagccgtgcaagcctacaggctacaactagcgcttgcggcgagcgtcttacaacaaccaattgcccaattgcaacaacaatccttggcacatctaaacctacaaaccatcgcaacgcaacagcaacaacagtttctgccatcactgagccacctagccgtggtgaaccctgtcgcctactt

SEQ ID NO: 23517 - DNA, 375 bp, Zea mays
  Clone ID: LIB3152-041-P1-K1-C9
aagcaacatagaaagtggaatccagtagcaacaatagagcaacaatggagaccaagatattttccctccttatgctccttgctctttctacatgtgttgctaacgcgacaattttccctcaatgctcacaagctcctatagcttccctttttcccccataccttccatcaattatagcttcagtatgtgaaaacccagctcttcaaccatataggcttcaacaagcaatcgcagcaagcaacatacctttatcgcccttgttgtgtcaacaatcgccagccctatctttggtgcagtcattggtacaaaccatcagggcacaacagctgcagcaactcgtgctacctgtgatcaaccaagtagctctggcaaacc

SEQ ID NO: 23518 - DNA, 379 bp, Zea mays
  Clone ID: LIB3152-041-P1-K1-D1
gaccaactagcaacatagaaagcacattattgtaccaacaatggcagccaaaatatttggcttccttatgctccttggtctttctgcaagtgttgctaccgcaaccattttcccacaatgctcacaagctcctatagcttcccttcttcccccatacctctcaccagcggtgtcttcaatgtgtgaaaacccaattgttcaaccctacaggatccaacaggcaatcgcaacaggcatcttaccattatcacccttgttcctccaacaaccgtcagccctattacagcagttacctttggtccatttggtggcacaaaacatcagggcacaacaactacaacaacttgtgctagcaaaccttgctgcatactctcagcaa

SEQ ID NO: 23519 - DNA, 368 bp, Zea mays
  Clone ID: LIB3152-041-P1-K1-D10
gaccaacaagcaacatagaaagtggaatccagtagcaacaatagagcaacaatggcgaccaagatattttccctccttatgctccttgctctttctgcatgtgttgctaacgcgacaattttccctcaatgctcacaagctcctatagcttcccttcttcccccataccttccatcaatgatagcttcagtatgtgaaaacccagctcttcaaccctataggctccaacaagcaatcgcagcaagcaacatacctttatcacccttgtttcaacaatcgccagccctatctttggtgcagtcattggtacaaaccatcagggcacagcagctgcagcaactcgtgctacctgtgatcaaccaagtagc

SEQ ID NO: 23520 - DNA, 372 bp, Zea mays
  Clone ID: LIB3152-041-P1-K1-D11
cagaaacacaccaagcgaagcgcactagcaacaacctaacaacaatggctaccaagatattagccctccttgcgcttcttgcccttttagtgagcgcaacaaatgcgttcattattccacagtgctcacttgctcctagtgccattattccacagttcctcccaccagttacttcaatgggcttcgaacatccagccgtgcaagcctacaggctacaactagcgcttgcggcgagcgtcttacaacaaccaattgcccaattgcaacaacaatccttggcacatctaaacctacaaaccatcgcaacgcaacagcaacaacagtttctgccatcactgagccacctagccgtggtgaaccctgtcgcctact

SEQ ID NO: 23521 - DNA, 449 bp, Zea mays
  unsure at all n locations
  Clone ID: LIB3152-041-P1-K1-D12
tccatcgccgtctcgcggaaaggagaggcnnnatggcgattgcactattgtatcatnncctaggaaacccgtcgccggagcccaagagtatgaagctnnngcagtcctccaaggggaacgtctcaggagaggcgatcgaagagcacatatcgcagtagggggaccgagatatgggtaccgcgaggaaaaagtgcaaagccgagggctgagacgaccatccacgaccagaagctcgagatagtagaggacaaggagaaaaggggaaggtgaccnngtacccgaaaaaacctcgtcacttatgnncaccatttgccctaaccccgaagggcccaggaagcatctatttgaagcttgggctactacgcccactncagcatctccaatcggtaaaacatatattctcgcactcaaggcaggttacccctggtctggctccaatgcttcgtctg

SEQ ID NO: 23522 - DNA, 369 bp, Zea mays
  Clone ID: LIB3152-041-P1-K1-D2
tgctcacttgctcctagagccattattacatagatcctcccaccagttacttcaatgggctttgaacacctatctgtgcacgccaacatgcaacaacaagcgcttgcggcgagcgtcttacaacaaccaattgcccaattgcaacaacaattcttgccacatttaacaatacatgccatcacaacgcaacagcaacaacagttgctaccagcactgagccacctagtcatggtgaaccctgtcgtctacttgcaagagcagctgcttgcatacaacccacttgctctggcgaacgtagttgcaaaccagcaacaacaacagctacaacagcttctgccaacgctcatgcaaatagtcatggagaaccct

SEQ ID NO: 23523 - DNA, 404 bp, Zea mays
  Clone ID: LIB3152-041-P1-K1-D3
ggaaatcccgggggcgccccacccgtccgtaaaaggcacaatagtgtcccaccattggttgccaaaatatttggcctccttatgctcctgggtctttctgcaagtgctgctacggcgaccattttcccgcaatgctcgcaagctcctatagcttcccttcttcccccgtacctctcaccagcggtgtcttcggtatgtgaaaacccaattcttcaaccctacaggatccaacaggcaatcgcagctggcatcttacctttatcacccttgttcctccaacaatcatcagccctattacaacagttacctttggtgcatttattggcacaaaacatcagggcacaacaactacaacaacttgtgctagcaaaccttgctgcctactctcagcaacagcagtttct

SEQ ID NO: 23524 - DNA, 377 bp, Zea mays
  Clone ID: LIB3152-041-P1-K1-D4
cagaccattagctttatctactccatagcgcagaagaacccgatcgacaccatgagggtgttgctcgttgccctcgctctcctggctctcgctgcgagcgccacctccacgcatacaagcggcggctgcggctgccagccaccgccgccggttcatctaccgccgccggtgcatctgccacctccggttcacctgccacctccggtgcatctcccaccgccggtccacctgccgccgccggtccacctgccaccgccggtccatgtgccgccgccggttcatctgccgccgccaccatgccactaccctactcaaccgccccggcctcagcctcatccccagccacacccatgcccgtgccaacagccgcatccaag

SEQ ID NO: 23525 - DNA, 375 bp, Zea mays
  Clone ID: LIB3152-041-P1-K1-D5
cacctggcaccatagaaggcccatttttgttccaataatggcagccaaaatatttggcctcattatgctccttggtctttctgcaagtgctgctacggcgagcattttcccgcaatgctcacaagctcctatagcttcccttcttcccccatacctctcaccagcgatgtcttcagtatgtgaaaatccaattcttctaccctacaggatccaacaggcaatcgcagcaggcatcttacctttatcacccttgttcctccaacaatcatcagccctattacagcagttacctttggtgcatttattggcacaaaacatcagggcacaacaactacaacaactcgtgctagcaaaccttgctgcctactctcagca

SEQ ID NO: 23526 - DNA, 375 bp, Zea mays
  Clone ID: LIB3152-041-P1-K1-D6
gcctagcaattagctcatcgactccagattggagaactcgacaccatgaaggtgctgatcgttgcccttgctctcctggcgctcgctgcgagcgccgcctccagtacaagcggcggctgtggctgccagacaccaccgtttcatctaccgcctccgttctatatgccgcctccgttctatctgccgccgcagcagcagccgcagccatggcaataccccactcaaccaccgcagctaagcccgtgccagcagttcggatcctgcggcgtcggcagcgtcggcagcccgttcctgggccagtgcgtcgagttcctgaggcaccagtgcagcccggcggcgacgccctacggctcgccacagtgccaggcgctgcag

SEQ ID NO: 23527 - DNA, 372 bp, Zea mays
  Clone ID: LIB3152-041-P1-K1-D7
ctctggaactgaaggccatggctgataggatcattaacatgaggcaacaactatgtaatgcgctgaaatccagaggaacccctggtgattggagccatatcattaagcaaattgggatgtttactttcactgggctgaatagcgaacaagtcgcattcatgaggcaggaataccacatttatatgacatctgatgggaggatcagcatggccggtttgagcatgaggactgtgccccatcttgcagatgccatacacgctgcagttactcaactgaaatgaggatagtatcgcagctttcgtgaataaaacctgaatcacccacaacaatgttctaagtactcagccagtggtatttactggttgacctact

SEQ ID NO: 23528 - DNA, 374 bp, Zea mays
  Clone ID: LIB3152-041-P1-K1-D8
attggcacaaaacatcagggcacaacaactacaacaacttgtgctagcaaaccttgctgcctactctcagcaacagcagtttcttccattcaaccaactaggttcattgaactctgcttcttatttgcaacaacaacaactaccattcagccagctacctgctgcctacccccagcaatttcttccattcaaccaactagcagcattgaactctcctgcttatttacagcagcaacaactactaccattcagccagctagctggtgtgagccctgctaccttcttgacacaaccacagttgttgccgttctaccagcacgttgcgcctaacgctggcaccctcttacaactgcaacaattgctgccattcaacc

SEQ ID NO: 23529 - DNA, 374 bp, Zea mays
  Clone ID: LIB3152-041-P1-K1-D9
gccaccgcaggagactgagatggggggttttgtcaagacccacaagagcaatgcgtacttcaagcgtttccaggtgaagttcaagagaaggcgcgctggcaagacagactacagggccaggataaggctgattaaccaagacaaaaacaagtacaatacacccaaatacagatttgttgtgcgatttaccaacaaggacatcacagcacaaatcatctctgctagtatagcaggtgatatggttcttgcttctgcttactcgcatgagttgccacgatatggtcttgaagttggtctgaccaactatgcagctgcctactgcactggccttctgttggctcgccgtgtgctcaagacccgtggtttagataagg

SEQ ID NO: 23530 - DNA, 407 bp, Zea mays
  Clone ID: LIB3152-041-P1-K1-E1
taccggaatgcccgggcggaccaacccgtccgttcctttcctctaggaagcagggactccaccgccatggcagccaagatgctggcatggtgcgctctcctagctctttgtgcaagcgccactagtgcgacccatattccagggcacttgccaccagtcatgccattgggtaccatgaacccatgcatgcagtactgcatgatgcaacaggggcttgccagcttgatggcgtgtccgtccctgatgctgcagcaactgttggccttaccgcttcagacgatgccagtgatgatgccacagatgatgacgcctaacatgatgtcaccattgatgatgccgagcatgatgtcaccaatggtcttgccgagcatgatgtcgcaaatgatgatgccacaatgtcactgcga

SEQ ID NO: 23531 - DNA, 372 bp, Zea mays
  Clone ID: LIB3152-041-P1-K1-E11
aaaaatcacaacagcaacaatgtcattgccaggagcagcaacagactacaaggtgcagctataactactatagcagtagctcaaatctaaaaaaattgtcatgaattcctaaggcagcagtgcagccctttggtaatgccttttctccaatcacgtttgatacaaccaagtagctgccaggtattgcagcaacaatgttgtcatgatcttaggcagattgagccacaatacattcaccaagcaatctacaacatggttcaatccataatccaggaggagcaacaacaacaaccatgtgagttatgtggatctcaacaagctactcaaagtgcggtggcaatcttgacagcagcacaatacctaccatcaatg

SEQ ID NO: 23532 - DNA, 370 bp, Zea mays
  Clone ID: LIB3152-041-P1-K1-E12
atagaggacaacactaactatgtcttattctggagcatcaacacactacagagggcaggctataactactatagcagcaacccaaatctaaaaaaattggcaggactccctaaagcagcagtgcagtccttagaaaatgccttgtctccaatcacgcatgatacaaccaagtaactaccaggtattgcatcaacaatgttgtcatgaacttaggtctaatgagccacaatacattcaccaagcaatctacaacatggatcaatccataatccatgaggagcaacaacaacaaccatgtgagttatgtgcatctcaacaagctacttaaagtgcggcggccatcttgacagcagctcaatacctaccatca

SEQ ID NO: 23533 - DNA, 405 bp, Zea mays
  unsure at all n locations
  Clone ID: LIB3152-041-P1-K1-E2
cggaatncccgggcggcccaacccgtccgaacctggcaccatagaaggcacatttttgttccaccaatggcagccaaaatatttggcctccttatgctcctgggtctttctgcaagtgctgctacggcgaccattttcccgaaatgctcgcaagctcctatagcttcccttcttcccccgtacctctcaccagcggtgtcttcggtatgtgaaaacccaattcttcaaccctacaggatccaacaggcaatcacagctggcatcttacctttatcacccttgttcctccaacaatcatcagccctattacatcagttacctttggtgcatttattggcacaaaacatcagggcacaacaactacaacaacttgtgctagcaaaccttgctgcctactctcagcaa

SEQ ID NO: 23534 - DNA, 374 bp, Zea mays
  Clone ID: LIB3152-041-P1-K1-E3
aaaagaagctggaaatcgatgacgatcttttttttgcgtgccttttatgaccgagggatgggccatgaggtcagtggtgatgctctgggtgaggagttcaagggttatgtcttcaagatcatgggtggatgtgacaagcaaggcttcccaatgaagcaaggagttttgacttctggtcgtgttcgtcttctgctccataggggcactccctgctttcgtggttatggcaggcgttatggtgagcgcatgaggaagtctgtccgtggttgcatcgtgagccaagacctatctgttatcaacttggtgattgtgaagaaaggtgagaatgatctgcctggtctgactgacactgagaagccaaggatgaggggtcc

SEQ ID NO: 23535 - DNA, 363 bp, Zea mays
  Clone ID: LIB3152-041-P1-K1-E4
cttccgcccacccgtccggggccggggagttccgcttttgggacctttccaccggcctaaccacccgccgtttcgtcggccacgagaaggacgtcatttccgtcgccttctccgtcgacaaccgccagatcgtctccgcgtcccgcgacaagaccatcaagctctggaacactctcggcgagtgcaagtacaccatcggcggcgacctcggcggcggcgagggccacaacgggtgggtctcctgcgttagggtctccccaaacacctttcagcccaccattgtcttcggatcctgggaccgcaccgtcaggtctggaaccttaccaactgcaagctgcgctgcactctggatgggcacggggg

SEQ ID NO: 23536 - DNA, 336 bp, Zea mays
  Clone ID: LIB3152-041-P1-K1-E5
aagttttgactaaactagttgtggttaaccttgtggcctacttgcaacagctggttccattcaaccaactgactctgtcgaactctgctgcgtacctacaacagcgacaacagttacttaatccattggtagtggctaacccattggtcgccgccttcctacagcagcaacaattgctgccatacaaccagttctctttgatgaatcctgtcttgtcgaggcagcaacccatcgttggaggtgccatcttttagattacatatgagatgtactcgataatggtgccctcataccgacgtgtgtttcctagaaataatcaatatattgattgagatt

SEQ ID NO: 23537 - DNA, 375 bp, Zea mays
  Clone ID: LIB3152-041-P1-K1-E6
cccacgcgtccggcaacatagaaagtggaatccagtagcaacaatagagcaacaatggagaccaagatattttccctccttatgctccttgctctttctacatgtgttgctaacgcgacaattttccctcaatgctcacaagctcctatagcttccctttttcccccataccttccatcaattatagcttcagtatgtgaaaacccagctcttcaaccatataggcttcaacaagcaatcgcagcaagcaacatacctttatcgcccttgttgtgtcaacaatcgccagccctatctttggtgcagtcattggtacaaaccatcagggcacaacagctgcagcaactcgtgctacctgtgatcaaccaagtagct

SEQ ID NO: 23538 - DNA, 372 bp, Zea mays
  Clone ID: LIB3152-041-P1-K1-E7
gaccaactagcaacatagaaagcacaatagtgtaccaacaatggcagccaaaatattttgcttccttatgctccttggtctttctgcaagtgttgctaccgcaaccattttcccacaatgctcacaagctcctatagcttcccttcttcccccatacctctcaccagcggtgtcttcaatgtgtgaaaacccaattgttcaaccctacaggatccaacaggcaatcgcaacaggcatcttaccattatcacccttgttcctccaacaaccgtcagccctattacagcagttacctttggtccatttggtggcacaaaacatcagggcacaacaactacaacaacttgtgctagcaaaccttgctgcatactc

SEQ ID NO: 23539 - DNA, 373 bp, Zea mays
  Clone ID: LIB3152-041-P1-K1-E8
cccgtcgtggcgtctcaccgtttccaggatacgaacatgaggtcggccaccctgcttacgatctgcaccttgtccgcgctgctgctggtggcgcgcggctcggagaagccatcggccgcgccgccgccggtggtggccgtgggcgtggcggcagccagcgacctcatccgctccggcggtcaccgctacctggacgtcagaacagaggaggaattcaggagtgggcatgtggaggattcactcaacgtgccctatcttttcttcacttcacaaggaagggagaagaaccccaagttcatcgcacaggtcgcagcgggtttcgacaaagaggacaacatagttgtgggctgcaaaagcggagtgaggtctgaat

SEQ ID NO: 23540 - DNA, 372 bp, Zea mays
  Clone ID: LIB3152-041-P1-K1-E9
cgcccatggccgcagctagtcgcatatagagagaggcgcaggcgagggcgtgcagatccagatccggtgggcgggaaggacttgatcgcccccaccaccatggccggcgcggtgtcggcgctcttcctgctggacatgaagggccgcgttctcgtctggcgcgactaccgcggcgatgtctccgcgctccaggccgagcgcttcttcaccaagctcctcgacaaggagggcgattcggaagtgcactcgcctgtggtctacgacgacgctggcgtcacttacatgttcatccagcacaacaatgtcttcctcctcaccgccgctcgccagaactgtaacgcggccagcatcctcctcttcctccaccgtgta

SEQ ID NO: 23541 - DNA, 317 bp, Zea mays
  Clone ID: LIB3152-041-P1-K1-F1
acaccatgagggggtggttggtggccttggttttcctggttttggttggaagcgccacctccacgcatacaagcggcggttgcggttgccagccaccgccgccggttaatctaccgccgccggtgcatctgccacctccggttcacctgccacctccggggcatttcccaccgccggtccacctgccgccgccggtccacctgccaccgccggtccatgtgccgccgccggttcatctgccgccgccaccatgccactaccctactcaaccgccccggcctcagcctcatccccagccacacccatgcccgtgccaa

SEQ ID NO: 23542 - DNA, 369 bp, Zea mays
  Clone ID: LIB3152-041-P1-K1-F11
tcagtctacgactaggcggcggcggcggccttcacgcacgagccttcgccgcctatacttgcgcttcgtcgagccggtgaattgtggtctaagcacacgaaggaaggatctttctccagacttcgcaattttggacgacgagatgcacttccttgcatcatttcatgtccctacaggttttgtgttatctggtttgtcgggatggatgccaaaaagttcctgcagctggtcgaagagaagaaaaggaggatcctcgagaagaaagaagccccactaaagtggcagcagaagctagaagcagcagttaacgtcaaagctgatgcagaagcgaaggcgaaaaaactaaaatcaagaaagcataggaggaga

SEQ ID NO: 23543 - DNA, 385 bp, Zea mays
  unsure at all n locations
  Clone ID: LIB3152-041-P1-K1-F12
cgtccccggtgaggctnnttggcgtctcgtgtatttttatatcgggagccctgtagagctgtagctaagcttagagtaaggtttagagcagcactccaaatggctgagcaaggtggntggaccttccggtcagaccacggtcaccaagctcctccgaggccatgcgggccgccatggccgccgccgacgtcgacgacgacgtcctgggcgcggacccgaccgcgcatcgcttcgaggcggagatggccgcggtcatgggcaaggaagccacgctgttcgtgccgtcgggcaccatgggcaacctcatctccgtcctcgtgcactgcgacgtcaggggcagcgaggccattcttggcgacaactcgcacatccacgtctacgagaa

SEQ ID NO: 23544 - DNA, 347 bp, Zea mays
  Clone ID: LIB3152-041-P1-K1-F2
ttccttttttgccttctccacttttttttcaacagactctcccacacgaggagggcagcaggaagggagagatggcggcggtggatcacgagactcctacctgttcaagatggcctatcggaacagcggcgcgcaagtccaatatctttctcgcttacgcgcaaccacttctcctcgctccaagtcaccatcggcgtcgagttcccaccaagtccctgcagatggacggcaaaacaataaaggctcagatctgggacacagctgggcaggaaaggtaccgtgcaattacaagtgcttactaccgtggagccgtgggagcactgcttgtgtacgacatcacaaagagg

SEQ ID NO: 23545 - DNA, 376 bp, Zea mays
  Clone ID: LIB3152-041-P1-K1-F3
gggaaaatgatttcttaaaaaagaggagtgacccggtctaccggagcgtacggtgccgatcccgtcgccgccgttacccctcaatcgcgagcaacttcttccggattcgcaccaagctctccacaattctatcgctatgctgcggaaggccgtcgtcgccttcatcgcctgcaccgccttcttcctcgccttctctgcctactcccgtcgccagggcgttgcagaggttcaattaccagcagttactcacagggtctacctagatgtagaaattgatggccaacacataggtagaattgttattggtctctatggcgaggtcgttccaaaaacagttgaaaactttagggctctttgtacaggtgaaaaaggtgtc

SEQ ID NO: 23546 - DNA, 291 bp, Zea mays
  unsure at all n locations
  Clone ID: LIB3152-041-P1-K1-F4
ttcttnncccccataccccttccatnnncaatagataagcgttcacgtgatgtgaaaaccccacgctnncttcaaccnnctatatggctctcaaccaagcannatcgcagcaaagcaaccatacnnctttatnncacccttgtttcaaccaatcgccacgccctatctnttggtgcccagtcattggtactaaaccatcagnggcactnagcagctgcaagcaaccctcgtgcctacctgtagatacaaccaaagtagcttttctggcaaactctttcttccctacttctc

SEQ ID NO: 23547 - DNA, 375 bp, Zea mays
  Clone ID: LIB3152-041-P1-K1-F5
cggacgcgtgggcggacgcgtgggtttcatcattcagaaacacaccaagcgaagcgcactagcaacaacctaacaacaatggctaccaagatattagccctccttgcgcttcttgcccttttagtgagcgcaacaaatgcgttcattattccacagtgctcacttgctcctagtgccattattccacagttcctcccaccagttacttcaatgggcttcgaacatccagccgtgcaagcctacaggctacaactagcgcttgcggcgagcgtcttacaacaaccaattgcccaattgcaacaacaatccttggcacatctaaacctacaaaccatcgcaacgcaacagcaacaacagtttctgccatcactgagc

SEQ ID NO: 23548 - DNA, 375 bp, Zea mays
  Clone ID: LIB3152-041-P1-K1-F6
caatggcagctaaaatattttgcctccttatgctccttggtctttctgcaagtgctgctacggcgaccattttcccacaatgctcacaagctcctatagcttcccttcttcccccgtacctctcaccaacggtgtcttcggtatgtgaaaacccaattcttcaaccctacaggatccaacaggcaatcgcagctggcatcttacctttatcacccttgttcctccaacaatcatcagccctattacagcagttacctttggtgcatttattggcacaaaacatcagggcacaacaactacaacaacttgtgctagcaaaccttgctgcctactctcagcaacagcagtttcttccattcaaccaactagctgcat

SEQ ID NO: 23549 - DNA, 194 bp, Zea mays
  Clone ID: LIB3152-041-P1-K1-F7
gctccttctccatcttcgttgttttttccgcctgcttcaacaccaccacgccgtttccgcaccccgacgccgcccaagaaacagaaactgaggcggcggccaggacaccggcgtcccctctctcgtcgctgggccgcgcgccggcggcagacgccgacgaggaggatggcgagcccagcgggatgagcatggac

SEQ ID NO: 23550 - DNA, 79 bp, Zea mays
  Clone ID: LIB3152-041-P1-K1-F8
gcatcaccatgggtggcagtgtcagtgtgagcaatgacctgaatgaacaattgaaatgaaaagaaaaaagtattgttcc

SEQ ID NO: 23551 - DNA, 372 bp, Zea mays
  Clone ID: LIB3152-041-P1-K1-F9
gagcattcagaaacacaccaagcgatgcacattagcaacaacctaacaacaatggctaccaagatattatccctccttgcgcttcttgcgctttttgcgagcgcaacaaatgcgttcattattccacaatgctcacttgctccaagttccattattacacagttcctcccaccagttacttcaatgggcttcgaacacccagctgtgcaagcctataggctacaacaagcaattgcggcgagcgtcttacaacaaccaatttcccagttgcaacaacaatccttggcacatctaacaatacaaaccatcgcaacgcaacagcaacaacaattcctaccagcactgagccacctagccatggtgaaccctgcc

SEQ ID NO: 23552 - DNA, 347 bp, Zea mays
  unsure at all n locations
  Clone ID: LIB3152-041-P1-K1-G1
aaaattatttggccttccttatgcttcctgggtattttctgcaagtgcttgctcacggcgaccatttttcccgcaatgctcacaagctcctatagcttcccttcttcccccgtacctctcaccagcggtgtcttcggtatgtgaaaacccaattcttcaaccctacaggatccaacaggcaatcgcagctggcatcttacctttatcacccttgttcctccaacaatcatcagccctattacagcagttacctttggtgcatttattggcacanaacatcanggcacaacaactacaacaacttgtgctagcaaaccttgctgcctactctcagcaacagcagtttc

SEQ ID NO: 23553 - DNA, 184 bp, Zea mays
  unsure at all n locations
  Clone ID: LIB3152-041-P1-K1-G10
ctcaaccaccgcagctaattccgngccagcagtacagaaccagcaccggggggggtatttttttcatcatttttgtccttttttctctattaattacttaatcaaattctacaattttttcatatatctcacattgctctattccttattacattcatatcaccatcagttctataataatttt

SEQ ID NO: 23554 - DNA, 372 bp, Zea mays
  Clone ID: LIB3152-041-P1-K1-G11
gagaccaactagcaacatagaaagcacaatattgtaccaataatggcagccaaaatattttgcctcattatgctccttggtctttctgcaagtgctgctacggcgagcattttcccgcaatgctcacaagctcctatagcttcccttcttcccccatacctctcaccagcgatgtcttcagtatgtgaaaatccaattcttctaccctacaggatccaacaggcaatcgcagcaggcatcttacctttatcacccttgttcctccaacaatcatcagccctattacagcagttacctttggtgcatttattggcacaaaacatcagggcacaacaactacaacaactcgtgctagcaaaccttgctgcctac

SEQ ID NO: 23555 - DNA, 310 bp, Zea mays
  Clone ID: LIB3152-041-P1-K1-G12
caacatgcaacatagaaagtggattttagtagcaacaatagagcaacaatggcgaccaagatattttccctccttatgctccttgctctttctgcatgtgttgctaacgcgacaattttcccttaatgctcacaagctcctatagctttccttctttccccataccttccatcaatgatagcttcagtatgtgaaaacccagctctttaaccctataggctccaacaagcaatcgcagcaagcaacatacctttatcacccttgtttcaacaatcgccagccctattcttggtgcagtcattgcttcaat

SEQ ID NO: 23556 - DNA, 379 bp, Zea mays
  Clone ID: LIB3152-041-P1-K1-G2
gtccgtttaaaaaccataccaagcgaaccgtactatcaccaacctaacaccaatggctaccaagatattatccctccttgcgcttcttgcgctttttgcgagcgcaacaaatgcgtccattattccacaatgctcacttgctcctagttccattattccacagttcctcccaccagttacttcaatggccttcgaacacccagctgtgcaagcctataggctacaacaagcgattgcggcgagcgtcttacaacaaccaattgcccaattgcaacaacaatccttggcacatctaacaatacaaaccatcgcaacgcaacagcaacaacagttcctaccagcactgagccacctagccatggtgaaccctgtcgcctac

SEQ ID NO: 23557 - DNA, 373 bp, Zea mays
  Clone ID: LIB3152-041-P1-K1-G3
aagcctagcaattagctcatcgacttcagattggagaactcgacaccatgaaggtgctgatcgttgcccttgctctcctggcgctcgctgcgagcgccgcctccagtacaagcggcggctgtggctgccagacaccaccgtttcatctaccgcctccgttctatatgccgcctccgttctatctgccgccgcagcagcagccgcagccatggcaataccccactcaaccaccgcagctaagcccgtgccagcagttcggatcctgcggcgtcggcagcgtcggcagcccgttcctgggccagtgcgtcgagttcctgaggcaccagtgcagcccggcggcgacgccctacggctcgccacagtgccaggcgct

SEQ ID NO: 23558 - DNA, 374 bp, Zea mays
  Clone ID: LIB3152-041-P1-K1-G4
attgagaccaactagcaacatagaaagcactatagtgtaccaacaatggcagccaaaatattttgcctccttatgctccttggtctttctgcaagtgctgctacggcgaccattttcccacaatgctcacaagctcctatagcttcccttcttcccccgtacctctcaccagcggtgtcttcggtatgtgaaaacccaattcttcaaccctataggatccaacaggcaatcgcagctggcatcttacctttatcacccttgttcctccaacaatcatcagccctattacagcagttacctttggtgcatttattggcacaaaacatcagggcacaacaactacaacaacttgtgctagcaaaccttgctgccta

SEQ ID NO: 23559 - DNA, 378 bp, Zea mays
  Clone ID: LIB3152-041-P1-K1-G5
tagcaacatagaaagcacaatagtgtaccaacaatggcagccaaaatattttgcctccttatgctccttggtctttctgcaagtgctgctacggcgaccattttcccgaaatgctcgcaagctcctatagcttcccttcttcccccgtacctctcaccagcggtgtcttcggtatgtgaaaacccaattcttcaaccctacaggatccaacaggcaatcacagctggcatcttacctttatcacccttgttcctccaacaatcatcagccctattacatcagttacctttggtgcatttattggcacaaaacattagggcacaacaactacaacaacttgtgctagcaaaccttgctgcctactctcagcaacagcag

SEQ ID NO: 23560 - DNA, 336 bp, Zea mays
  Clone ID: LIB3152-041-P1-K1-G6
gaaacacaccatgcgaagcgcacttttaattatctaacaacaatggctaccaagatattatcccttcttgcgcttcttgcgctttttgcgagcgcaacaaatgcgtccattattccacaatgctcacttgctcctagttccattattccacagttcctcccaccagttacttcaatggccttcgaacacccagctgtgcaagcctattggctacaacatgcgtttgcggctagcgtcttacaacaactcattgcccaatttcaacaacaattccttggcacattttatattatatatcttttgtttcttctttaatctctactattttttattttt

SEQ ID NO: 23561 - DNA, 372 bp, Zea mays
  Clone ID: LIB3152-041-P1-K1-G7
ggtcttcagaccattagctttatctactccagagcgcagaagaacccgatcgacaccatgagggtgttgctcgttgccctcgctctcctggctctcgctgcgagcgccacctccacgcatacaagcggcggctgcggctgccagccaccgccgccggttcatctaccgccgccggtgcatctgccacctccggttcacctgccacctccggtgcatctcccaccgccggtccacctgccgccgccggtccacctgccaccgccggtccatgtgccgccgccggttcatctgccgccgccaccatgccactaccctactcaaccgccccggcctcagcctcatccccagccacacccatgcccgtgccaacag

SEQ ID NO: 23562 - DNA, 373 bp, Zea mays
  Clone ID: LIB3152-041-P1-K1-G8
attttgagcattcagaaacacaccaagcgaagcacattagcaacaacctaacaacaatggctaccaagatattatccctccttgcgcttcttgcgctttttgcgagcgcaacaaatgcgttcattattccacaatgctcacttgctccaagttccattattacacagttcctcccaccagttacttcaatgggcttcgaacacccagctgtgcaagcctataggctacaacaagcaattgcggcgagcgtcttacaacaaccaatttcccagttgcaacaacaatccttggcacatctaacaatacaaaccatcgcaacgcaacagcaacaacaattcctaccagcactgagccacctagccatggtgaaccc

SEQ ID NO: 23563 - DNA, 372 bp, Zea mays
  Clone ID: LIB3152-041-P1-K1-G9
attcagaaacacaccaagcgtatacgcactagcaacaacctaacaacaatggctaccaagatattagccctccttgcgcttcttgcccttttagtgagcgcaacaaatgcgttcattattccacagtgctcacttgctcctagtgccattattccacagttcctcccaccagttacttcaatgggcttcgaacatccagccgtgcaagcctacaggctacaactagcgcttgcggcgagcgtcttacaacaaccaattgcccaattgcaacaacaatccttggcacatctaaacctacaaaccatcgcaacgcaacagcaacaacagtttctgccatcactgagccacctagccgtggtgaaccctgtcgcc

SEQ ID NO: 23564 - DNA, 371 bp, Zea mays
  Clone ID: LIB3152-041-P1-K1-H1
aacttggcaccataaaaggcacatttttgttccaccaatggcagccaaaatatttggcgtccttatgctcctgggcctttctgcaagtgctgttacggcgaccattttcccgaaatgctcgcaggctcctatagcttcccttcttcccccgtacctttaaccagcggtgtcttcggtatgtgaaaacccaattcttcaaccctacaggatccaacaggcaatcacagctggcatcttacctttatcacccttgttcctccaacaatcatcagccctattacatcagttacctttggtgcatttattggcacaaaacatcagggcacaacaactacaacaacttgtgctagcaaaccttgctgcctactctc

SEQ ID NO: 23565 - DNA, 371 bp, Zea mays
  Clone ID: LIB3152-041-P1-K1-H10
gtcgaggccgccgcccagaccgccttcccttccccgcctccggtgcccaaggccaggccaacagttttgaggtggtaatggcggaccaggctaaccaacccactgtccttcataagctaggtggccagttccacctgagctccagcttctctgaaggtgtacgggcccgtaacatctgcctttctttctcatcttatgaaaggagatttgccacgaggaactacatgacccagagcctttggggcccttcaatgtctgttagcggtggcatcaatgttccagtgatgccgactccgctttttgccaatgctccagccgagaaaggtggcaaaaacttcatgattgatttcatgatgggcggtgtttcagct

SEQ ID NO: 23566 - DNA, 378 bp, Zea mays
  Clone ID: LIB3152-041-P1-K1-H11
cgacccacgcgtgcgtttaaagcatctataaacacaccattcgaagcgcactagcaacaaccgaacaggagtggctaccaagatattatccctccttgcgcttcttgcgctttttgcgagcgcaacaaatgcgtccattattccacaatgctcacttgctcctagttccattattccacagttcctcccaccagttacttcaatggccttcgaacacccagctgtgcaagcctataggctacaacaagcgattgcggcgagcgtcttacaacaaccaattgcccaattgcaacaacaatccttggcacatctaacaatacaaaccatcgcaacgcaacagcaacaacagttcctaccagcactgagccacctagccat

SEQ ID NO: 23567 - DNA, 375 bp, Zea mays
  Clone ID: LIB3152-041-P1-K1-H2
attttgagcattcaaaaccacaccttgcgatgcacattagcaacaacctaacaccaatggctaccaagatattatccctccttgcgcttcttgcgctttttgcgagcgcaacaaatgcgttcattattccacaatgctcacttgctccaagttccattattacacagttcctcccaccagttacttcaatgggcttcgaacacccagctgtgcaagcctataggctacaacaagcaattgcggcgagcgtcttacaacaaccaatttcccagttgcaacaacaatccttggcacatctaacaatacaaaccatcgcaacgcaacagcaacaacaattcctaccagcactgagccacctagccatggtgaaccctg

SEQ ID NO: 23568 - DNA, 340 bp, Zea mays
  unsure at all n locations
  Clone ID: LIB3152-041-P1-K1-H3
ccatgaaggggctgatcgtggccgtggttttcttggcgctcgttgcaagcgccgcctccagtacaagcggcggttgtggctgccagacaccaccgtttcatctaccgcctccgttctatatgccgcctccgttctatctgccgccgcagcagcagccgcagccatggcaataccccactcaaccaccgcagctaagcccgtgccagcagttcggatcctgcggcgtcggcagcgtcggcagcccgttcctgggccagtgcgtcgagttcctgaggcaccagtgcagnccggcggcgacgccctacggctcgccacagtgccaggcgctgcagcagcagtg

SEQ ID NO: 23569 - DNA, 196 bp, Zea mays
  unsure at all n locations
  Clone ID: LIB3152-041-P1-K1-H4
tanccaccaaatcaaaactgcaacattaatgttataacgccaaaaaccatgaagcggcgtcgtgtttttattgctttgagtgctccacaaccaaangacaagctgcacacagacactcgcgctacaccaccaggtcaacaacaaactcatgagcataaacctcatccacaacaacatcctccacaaaaacaacaac

SEQ ID NO: 23570 - DNA, 332 bp, Zea mays
  unsure at all n locations
  Clone ID: LIB3152-041-P1-K1-H5
gtcacgcagcgttaaaatactatggtatatggtggcacaaatttggcgactactggggggccattcattcaactagctcgactatgatgcaccaatgagaatatggcttggagatttcaaagggcacatctgaggacttacaaattataaattggtggcacaccctgcttatgaatacaacgtttttctctgggtctaacaagagctgatatttcagtgacagtctggagctgtgttcattcctggaaatattgattcagccaatgacaaagtgcactttccgaacaggcaatatgatcttnctgcttggtcagttagtattctttctgact

SEQ ID NO: 23571 - DNA, 215 bp, Zea mays
  Clone ID: LIB3152-041-P1-K1-H6
ggctaacccattggtcgccgcctttctacagcagcaacaattgctgccatacaaccagggctctttgatgaatcctgtcttgtcgaggcagcaacccatcgttggaggtgccatcttttagattacatatgagatgtactcgataatggtgccctcataccgacgtgtgtttcctagaaataatcaatatattgattgagatttatctcgatatt

SEQ ID NO: 23572 - DNA, 373 bp, Zea mays
  Clone ID: LIB3152-041-P1-K1-H7
gatcatcgactccagattgttcaacttgacaccatgaaagtgctgatcgcagaccttgctctcttggcgctggatgacagcgccgtctcacagaacaagcggcggatgaggctgtcatacaccacacgtgcatctacacgccttaccactatatgccgcctgctgcctatctgtcgcaacaacaacagccgcagccatggaaatacccgactgaaccacagcaggtaagtcagtgccagcagctcagactctgacgagtcagccgggtaggtagaccaagcctggctcagtgcgtgacgcaacagcggcaccagtgcagctaccaggagacggcgtataactcggcacagtgccaacaactacaacaacagtg

SEQ ID NO: 23573 - DNA, 372 bp, Zea mays
  Clone ID: LIB3152-041-P1-K1-H8
attcagaaacacaccaagcgaagcgtactagcaacaacctaacaacaatggctaccaagatattatccctccttgcgcttcttgcgctttttgcgagcgcaacaaatgcgtccattattccacaatgctcacttgctcctagttccattattccacagttcctcccaccagttacttcaatggccttcgaacacccagctgtgcaagcctataggctacaacaagcgattgcggcgagcgtcttacaacaaccaattgcccaattgcaacaacaatccttggcacatctaacaatacaaaccatcgcaacgcaacagcaacaacagttcctaccagcactgagccacctagccatggtgaaccctgtcgcct

SEQ ID NO: 23574 - DNA, 369 bp, Zea mays
  Clone ID: LIB3152-041-P1-K1-H9
gccgggttcatcagcctcgtgtcactctacctcagtggggaggcggagcagatcgagtggagcaagatccagaccccgaccgatgaggtagtggtgccgtacgataccctcacgtcgcctcctgaagatctcgaggagacgaagaagctgctggacaagctcgttgtgctcaagctcaacggagggctcgggacgaccatgggctgcaccggacccaagtctgtcattgaagtccgcaatgggttcacattccttgaccttattgtgattcaaatcgagtccctgaacaagaagtatggatgtaatgtccctttacttctgatgaactctttcaatacccatgatgacacacagaagatcgttgagaag

SEQ ID NO: 23575 - DNA, 393 bp, Zea mays
  unsure at all n locations
  Clone ID: LIB3152-042-P1-K1-A1
agccttccgaatgggccttggaccacctagctttgcaagcctacaggctacaacaagcgcttgcggcgagcgttttacaacaaccaattaaccaattgcaacaacaatccttggcacatctaaccatacaaaccatcgcaacacaacagcaacaacagttcctaccagcactgagccaactagatgtggtgnaccctgtcgcctacttgcaacagcaggtgcttgcattcaacccacttgctctggcaaacgtagctgcataccaacaacaacaacaattgcaacagtttttgccagcgctcagtcaactagccatggtgaaccctgccgcctacctacaacagcaacaactgcttttatttagccctntngttgtgggtaatgcacctacat

SEQ ID NO: 23576 - DNA, 210 bp, Zea mays
  Clone ID: LIB3152-042-P1-K1-A10
attcagaaacacaccaagcgaagtgttctagcaacaacctaacaaccatgggtaccaagattttattccttcttgcgcttcttggcgctttttgcgagcgcaccaaatgcgtccattattccacaatgctcacttgctcctagttccattattccacagttcctcccaccagttacttcaatggccttcgaacacccagctgtgcaagcc

SEQ ID NO: 23577 - DNA, 383 bp, Zea mays
  Clone ID: LIB3152-042-P1-K1-A11
aagcacaatagtgtaccaacaatgtctagctaaaatattttgcctccttatgctccttggtctttctgcaagtgctgctacggcgaccattttcccacaatgctcacaagctcctatagcttcccttcttcccccgtacctctcaccaacggtgtcttcggtatgtgaaaacccaattcttcaaccctacaggatccaacaggcaatcgcagctggcatcttacctttatcacccttgttcctccaacaatcatcagccctattacagcagttacctttggtgcatttattggcacaaaacatcagggcacaacaactacaacaacttgtgctagcaaaccttgctgcctactctcagcaacagcagtttcttccattcaacc

SEQ ID NO: 23578 - DNA, 376 bp, Zea mays
  Clone ID: LIB3152-042-P1-K1-A12
gcaacatagaaagcacaatagtgtatcaacaatggcagccaaaatattttgcctccttatgctccttggtctttctgcaagtgctgctacggcgaccattttcccgaaatgctcgcaagctcctatagcttcccttcttcccccgtacctctcaccagcggtgtcttcggtatgtgaaaacccaattcttcaaccctacaggatccaacaggcaatcacagctggcatcttacctttatcacccttgttcctccaacaatcatcagccctattacatcagttacctttggtgcatttattggcacaaaacatcagggcacaacaactacaacaacttgtgctagcaaaccttgctgcctactctcagcaacagcag

SEQ ID NO: 23579 - DNA, 375 bp, Zea mays
  Clone ID: LIB3152-042-P1-K1-A2
ctaacaacaatggctacctttatattatccctccttgcgcttcttgcgctgtttgcgagcgcaacaaatgcgtccattattccacaatgctcacttgctcctagttccattattccacagttcctcccaccagttacttcaatggccttcgaacacccagctgtgcaagcctataggctacaacaagcgattgcggcgagcgtcttacaacaaccaattgcccaattgcaacaacaatccttggcacatctaacaatacaaaccatcgcaacgcaacagcaacaacagttcctaccagcactgagccacctagccatggtgaaccctgtcgcctacttgcaacagcagctgcttgcatacaacccacttgctcta

SEQ ID NO: 23580 - DNA, 414 bp, Zea mays
  Clone ID: LIB3152-042-P1-K1-A3
gcggaaataccggggcggcccaacccgtccgaggcctcctagcaacatagaaagcttttttttgtcccaataatggcagccaaaagattttgcctcattatgctccttggtctttctgcaagtgctgctacggcgagcattttcccgcaatgctcacaagctcctatagcttcccttcttcccccatacctctcaccagcgatgtcttcagtatgtgaaaatccaattcttctaccctacaggatccaacaggcaatcgcagcaggcatcttacctttatcacccttgttcctccaacaatcatcagccctattacagcagttacctttggtgcatttattggcacaaaacatcagggcacaacaactacaacaactcgtgctagcaaaccttgctgcctactctcagcaacag

SEQ ID NO: 23581 - DNA, 308 bp, Zea mays
  Clone ID: LIB3152-042-P1-K1-A4
ctcagacaagcgccaaagtggtgactgccctcagaggaaggggttctctggcaatggcggtggtcccagcctcagcagtggaagcagtgtatggtccagttcaaggagtgtgagtgatgctgaggaggatacaggcggccctgaggatgagagtgaagtcttcgatgattgggaaatggctgctgatgcgctttatgtcgatgacagttcttgtaaccagagttcaggtcccacaccgacactcccacaagctccgaccactgcagaaccttctcatgcagcgaaaccagaaccgattcaaagcaaga

SEQ ID NO: 23582 - DNA, 383 bp, Zea mays
  Clone ID: LIB3152-042-P1-K1-A5
ctcccaccgccggtccacctgccgtcgtcggtccacctgccaccgccggtccatgtgccgccgccggttcatctgccgccgccaccatgccactaccctactcaaccgccccggcctcagcctcatccccagccacacccatgcccgtgccaacagccgcatccaagcccgtgccagctgcagggaacctgcggcgttggcagcaccccgatcctgggccagtgcgtcgagttcctgaggcatcagtgcagcccgacggcgacgccctactgctcgcctcagtgccagtcgttgcggcagcagtgttgccagcagctcaggcaggtggagccgcagcaccggtaccaggcgatcttcggcttggtcctccagtccatcctgca

SEQ ID NO: 23583 - DNA, 389 bp, Zea mays
  unsure at all n locations
  Clone ID: LIB3152-042-P1-K1-A6
cttccgttggaacccacctggcaccataaattgttcattagtgtaccaacaatggcagccaaaatattttgcttccttatgctccttggtctttctgcaagtgttgctaccgcaaccattttcccacaatgctcacaagctcctatagcttcccttcttcccccatacctctcaccagcggtgtcttcaatgtgtgaaaacccaattgttcaaccctacaggatccaacaggcaatcgcaacaggcatcttaccattatcacccttgttcctccaacaaccgtcagccctattacagcagntacctttggtccatttggtggcacaaaacatcagggcacaacaactacaacaacttgtgctagcaaaccttgctgcatactctcagca

SEQ ID NO: 23584 - DNA, 380 bp, Zea mays
  Clone ID: LIB3152-042-P1-K1-A7
gaaacacaccaagcgaagcttcttttctaacgacttaacaacaatggctaccaagatattagccctccttgcgcttcttgccctttttgtgagcgcaacaaatgcgttcattattccacaatgctcacttgctcctagtgccattataccacagttcctccgaccagttacttcaatgggcttcgaacacctagctgtgcaagcctacaggctacaacaagcgcttgcggcgagcgtcttacaacaaccaattaaccaattgcaacaacaatccttggcacatctaaccatacaaaccatcgcaacacaacagcaacaacagttcctaccagcactgagccaactagatgtggtgaaccctgtcgcctacttgcaacagc

SEQ ID NO: 23585 - DNA, 380 bp, Zea mays
  Clone ID: LIB3152-042-P1-K1-A8
gaccattagctttatctactcttgagcgcagaagaacccgatcgacaccatgagggtgttgctcgttgccctcgctctcctggctctcgctgcgagcgccacctccacgcatacaagcggcggctgcggctgccagccaccgccgccggttcatctaccgccgccggtgcatctgccacctccggtaccaggcgatcttcggcttggtcctccagtccatcctgcagcagcagccgcaaagcggccaggtcgcggggctgttggcggcgcagatagcgcagcaactgacggcgatgtgcggcctgcagcagccgactccatgcccctacgctgctgccggcggtgtcccccactgaagaaactatgtgctgtagtatagc

SEQ ID NO: 23586 - DNA, 376 bp, Zea mays
  Clone ID: LIB3152-042-P1-K1-A9
catagaaagcacaatagtgtacttacaatggcagccaaaatattttgcctgcttatgctccttggtctttctgcaagtgctgctacggcgaccattttcccgcaatgctcgcaagctcctatagcttcccttcttcccccgtacctctcaccagcggtgtcttcggtatgtgaaaacccaattcttcaaccctacaggatccaacaggcaatcgcagctggcatcttacctttatcacccttgttcctccaacaatcatcagccctattacaacagttacctttggtgcatttattggcacaaaacatcagggcacaacaactacaacaacttgtgctagcaaaccttgctgcctactctcagcaacagcagtttc

SEQ ID NO: 23587 - DNA, 331 bp, Zea mays
  unsure at all n locations
  Clone ID: LIB3152-042-P1-K1-B1
accatgaaggggctgagcgttgcccttgctctcctggcggctcgctgcgagcgccgnctccagtacaagcggcggctgtggctgccagacaccaccgtttcatctaccgcctccgttctatatgccgcctccgttctatctgccgccgcagcagcagccgcagccatggcaataccccactcaaccaccgcagctaagcccgtgccagcagttcggatcctgcggcgtcggcagcgtcggcagcccgttcctgggccagtgcgtatagttcctgaggcaccagtgcagtccggcggntacgccctacggnttggcacagtgccatgcgctt

SEQ ID NO: 23588 - DNA, 379 bp, Zea mays
  Clone ID: LIB3152-042-P1-K1-B10
gcaaagcggcagtgcgtagagagtgttcgtcgaacagaacagcatgaagatggtcatcgttctcgtcgtgtgcctggctctgtcagctgccagcgcctctgcaatgcagatgccctgcccctgcgcggggctgcagggcttgtacggcgctggcgccggcctgacgacgatgatgggcgccggcgggctgtacccctacgcggagtacctgaggcagccgcagtgcagcccgctggcggcggcgccctactacgccgggtgtgggcagacgagcgccatgtaccagccgctccggcaacagtgctgccagcagcagatgaggatgatggacgtgcagtccgtcgcgcagcaactgcagatgatgatgcagcttgagcgt

SEQ ID NO: 23589 - DNA, 372 bp, Zea mays
  Clone ID: LIB3152-042-P1-K1-B12
gcttagttcatggtcgcgacgtcgttgcgagacctgcgccagaccctgagcgctgtataaatggctgatggagaggacatgcagcctattgtctgccacaatggcactgcaatggccaaggctgggtcagctgtcgactatgcaccaagggctcgcctacctatgattgttgtacgatctcgccacactggtgtcacagtagggatgggacagaaggatgcctatgtggtccacaaggcacagaccaagagaggtatactaacgctcaagtatcccatcaagcatggaattgtcagcaactgggatgacatggagaaaacatggcataacactttctacaacctgcttacagctggcccagaggagcaccct

SEQ ID NO: 23590 - DNA, 381 bp, Zea mays
  Clone ID: LIB3152-042-P1-K1-B2
gtcgacaagcagggagttcaccttgctctgtgtgcagtgagcgactagattgtggactgcataacaaaacccatcgtcgtcggatcggagatgatgagttccgtcgtcgtggatgctgctgctaccagcagcagcgagaagaagacgtcgtggccggaggtggtgggcatgtccatcaaggaggcgacggagaccattctcaaggacatgcccaacgcgtacatccaggtgctgcctgttgggtcgcccgtgacgctggaccttcgccccgaccgagtccgtatcttcgttgacaccgtcaccatgacttcgacagttgggtgttacacaccaaatggcaataactcaccctactttttttatttatgtttccagttaata

SEQ ID NO: 23591 - DNA, 360 bp, Zea mays
  unsure at all n locations
  Clone ID: LIB3152-042-P1-K1-B3
cgtcggaccttcgggaccttggtaggcggttttgtcccaccaggagaaggcatggcttgacgcatgacaccttccaagaggccttttcagagaagatcttcagactacgatggccggggcaagtggcnnaagacgaagcacccttctccacataaatctcagttcaaaatcgagcctggtgttcccattttccgtattctctgcccggcttcaaaatctggtaatgtgattggcaaaggaggtgccattattgcaaagatacatcaagaaaccaagatgtgaatcagggttgataggtcagcccccggctgtgacgagagagtcattttcataactggtgtcaacaagggtgaagaagct

SEQ ID NO: 23592 - DNA, 380 bp, Zea mays
  Clone ID: LIB3152-042-P1-K1-B4
aacaataaaaggcacattagggtactttcattggcagccaaaatattttgcctccttatgctccttggtctttctgcaagtgctgctacggcgaccattttcccgcaatgctcgcaagctcctatagcttcccttcttcccccgtacctctcaccagcggtgtcttcggtatgtgaaaacccaattcttcaaccctacaggatccaacaggcaatcgcagctggcatcttacctttatcacccttgttcctccaacaatcatcagccctattacaacagttacctttggtgcatttattggcacaaaacatcagggcacaacaactacaacaacttgtgctagcaaaccttgctgcctactctcagcaacagcagtttct

SEQ ID NO: 23593 - DNA, 347 bp, Zea mays
  Clone ID: LIB3152-042-P1-K1-B5
ctttatattatgttttttctccatcctacattttcccccaaaaaacatttcctgcggaggctttttaaacttatggcaccccaaaaacaaccaccattttccctcaatgctctcaagcaccaatatctaccctcctctcccccaaacctatcaccatctgtatcttctctatgtgaaaacccaattcttcaaccctacacgatccaacaggcaatctcaactttcatcttacctctatcaccctagaaccttcaacaatcatcaatccctattacaacagatacctttgttgcattcatagacacaaaaaattaatgcacaacatccacaacaacattgttctattc

SEQ ID NO: 23594 - DNA, 353 bp, Zea mays
  Clone ID: LIB3152-042-P1-K1-B6
ccaacaatggcagccaaaatattttgcctccttatgctccttggtatttctgcaagtgctgctacggcgaccattttcccgcaatgctcacaagctcctatagcttcccttcttcccccgtacctctcaccagcggtgtcttcggtatgtgaaaacccaattcttcaaccctacaggatccaacaggcaatcgcagctggcatcttacctttatcacccttgttcctccaacaatcatcagccctattacagcagttacctttggtgcatttattggcacaaaacatcagggcacaacaactacaacaacttgtgctagcaaaccttgctgcctactctcagcaacagcagtt

SEQ ID NO: 23595 - DNA, 197 bp, Zea mays
  Clone ID: LIB3152-042-P1-K1-B7
ggcgtgaaagaaaaactccggtatgtcgaatggcggcggcggagaagcccgcggcggtgcggcgagcggaggagctggtggagagggagatgggcgggcgccacacctcccacgactcctcacacgctcttatagttcgagaccttgcgctttacctctcacccgatgagtgtctcttctgtccataccgacttctt

SEQ ID NO: 23596 - DNA, 383 bp, Zea mays
  Clone ID: LIB3152-042-P1-K1-B8
cagcctagcaattagctcatctactccagattggagaactcgacaccatgaaggtgctgatcgttgcccttgctctcctggcgctcgctgcgagcgccgcctccagtacaagcggcggctgtggctgccagacaccaccgtttcatctaccgcctccgttctatatgccgcctccgttctatctgccgccgcagcagcagccgcagccatggcaataccccactcaaccaccgcagctaagcccgtgccagcagttcggatcctgcggcgtcggcagcgtcggcagcccgttcctgggccagtgcgtcgagttcctgaggcaccagtgcagcccggcggcgacgccctacggctcgccacagtgccaggcgctgcagcagcag

SEQ ID NO: 23597 - DNA, 383 bp, Zea mays
  Clone ID: LIB3152-042-P1-K1-C1
attagctcatcgactccagattggtgatctcgacaccatgaaggtgctgatcggtggccttgctctcctggcgctcgctgcgagcgccgcctccagtacaagcggcggctgtggctgccagacaccaccgtttcatctaccgcctccgttctatatgccgcctccgttctatctgccgccgcagcagcagccgcagccatggcaataccccactcaaccaccgcagctaagcccgtgccagcagttcggatcctgcggcgtctgcagcgtcggcagcccgttcctgggccagtgcgtcgagttcctgaggcaccagtgcagcccggcggcgacgccctacggctcgccacagggccaggcgctgcagcagcattgctgtcacc

SEQ ID NO: 23598 - DNA, 382 bp, Zea mays
  Clone ID: LIB3152-042-P1-K1-C10
gaaagcacaatagtgtaccaacattttgcatgccaaaatattttgcctccttatgctccttggtctttctgcaagtgctgctacggcgaccattttcccgaaatgctcgcaagctcctatagcttcccttcttcccccgtacctctcaccagcggtgtcttcggtatgtgaaaacccaattcttcaaccctacaggatccaacaggcaatcacagctggcatcttacctttatcacccttgttcctccaacaatcatcagccctattacatcagttacctttggtgcatttattggcacaaaacatcagggcacaacaactacaacaacttgtgctagcaaaccttgctgcctactctcagcaacagcagtttctatcattc

SEQ ID NO: 23599 - DNA, 379 bp, Zea mays
  Clone ID: LIB3152-042-P1-K1-C11
attaagaccaactagcaacatagaaagcacaatagtgtaccaacaatggcaaccaaaatattttgcttccttatgctccttggtctttctgcaagtgctgctaccgcgaccattttcccgcaatgctcacaagctcctatagcttcccttcttcccccatacctctcaccagcggtgtcttcagtatgtgaaaacccaattcttcaaccctacaggatccaacaggcaatcgcagcaggcatcttacctttatcacccttgttcctccaacaaccgtcagccctattacagcagttacctttggtgcatttgttggcacaaaacatcagggcacaacaactacaacaacttgtgctagcaaaccttgctgcctactctc

SEQ ID NO: 23600 - DNA, 381 bp, Zea mays
  Clone ID: LIB3152-042-P1-K1-C12
gcgaggcaaaagcattgcgaccacttacagcgcgcgcttcaaggccttttttttttgagataacaaggaggagaggaggagatggcggtcacgatcacgtgggtgaaggcgaggcagatcttcgacagccgcggcaaccccaccgtcgaggtggacgtgggccttagcgacggcagctacgcgaggggggccgtacccagcggcgcatccactggaatatatgaggccttggagttgagggatggaggatctgattatcttggcaagggtgttcttaaggctgtcagcaatgtaaataacattattggaccagcaattgttggaaaggaccccactgagcaggttgagattgacaacttcatggtccaacagcttgatgga

SEQ ID NO: 23601 - DNA, 414 bp, Zea mays
  unsure at all n locations
  Clone ID: LIB3152-042-P1-K1-C2
ggaagaaccggggcgacccacgccgtccgccaacccgtccgagtccactagcatctctttagcaccaatgggagccaagatttttgccctccttgccctccttgctctttcagcaagcgctgctacctcgacttttattccacaatgctcacaacaatacctctctccggcgacagccgtgggatttcaatacccaactatacaatcctacatggtacaagaggccatccaagcaagcatcttacggtcattagcattaaccctncaacaaccatatgctctattgcaacagccatccttagtgcatctgtatctccaaagaatcgcggcacaacaactacaacaacagttgctaccaacaatcaatcaagtagttgcagcgaaccttgctgcttacctccagcaacaacagtt

SEQ ID NO: 23602 - DNA, 387 bp, Zea mays
  unsure at all n locations
  Clone ID: LIB3152-042-P1-K1-C3
tcggccacgcgttcccaaattcccccccccttttcccggggtccgcgggggctccgggctgcggttcacgtgcgagaaggtggtggggatcgacctgggcaccaccaactccgcggtcgccgccatggagggcggcaagccgaccgtcgtcaccaacgccgagggtgcgcgcacgactccctccgtagtggcgtacaccaagacaggggagcgcctggtggggcagatcgctnnnnnccaggcggtcgtgaaccccgagaacaccttcttctctgtcaagcgcttcatcggccgcaagatgtctgaggtcgacgacgaggccaagcaggtctcgtacggcgttgtcaaagacgagaacggcaacgtcaaactcgactgccccgctat

SEQ ID NO: 23603 - DNA, 326 bp, Zea mays
  Clone ID: LIB3152-042-P1-K1-C5
gtgagcactgcggaataatcccactgtatctcccaccagttacttcaatgggctgggaacatccagtcgtgcaagcctacacgctacaactagcgcttgcggcgagcgtgttacaacaaccaattgcccaattgcaacaacaatccttggcacatctaaacctacaaaccatcgcaacgcaacagcaacaacagtttctgccatcactgagccacctagccgtggtgaaccctgtcgtctacttgcaacagcagctacttgcattcaacccacttgctctggcgaacgtagctgcataccagcaacaacaacgtctgcaacagttt

SEQ ID NO: 23604 - DNA, 380 bp, Zea mays
  Clone ID: LIB3152-042-P1-K1-C7
cgactccagattggagaactcgactctcatgaaggtgctgatcgttgcccttgctctcctggcgctcgctgcgagcgccgcctccagtacaagcggcggctgtggctgccagacaccaccgtttcatctaccgcctccgttctatatgccgcctccgttctatctgccgccgcagcagcagccgcagccatggcaataccccactcaaccaccgcagctaagcccgtgccagcagttcggatcctgcggcgtcggcagcgtcggcagcccgttcctgggccagtgcgtcgagttcctgaggcaccagtgcagcccggcggcgacgccctacggctcgccacagtgccaggcgctgcagcagcagtgctgccaccagatca

SEQ ID NO: 23605 - DNA, 381 bp, Zea mays
  Clone ID: LIB3152-042-P1-K1-C8
agcaaagcggcagtgcgtagagaggatcgtcgaacagaacagcatgaagatggtcatcgttctcgtcgtgtgcctggctctgtcagctgccagcgcctctgcaatgcagatgccctgcccctgcgcggggctgcagggcttgtacggcgctggcgccggcctgacgacgatgatgggcgccggcgggctgtacccctacgcggagtacctgaggcagccgcagtgcagcccgctggcggcggcgccctactacgccgggtgtgggcagacgagcgccatgtaccagccgctccggcaacagtgctgccagcagcagatgaggatgatggacgtgcagtccgtcgcgcagcagctgcagatgatgatgcagcttgagcgtgc

SEQ ID NO: 23606 - DNA, 371 bp, Zea mays
  Clone ID: LIB3152-042-P1-K1-C9
gagaagctggacgcgttcgcggctgatctggtgaaggagcagcagcggcgggcgcgcagcccgggcctgcccaccgtggtgatcaggcaggcgcgccccacggccacggccacgccgcgactgtcgtccgccaccaccgtctcctccgccaccgtccggaccgcctacaccgtgccgtccccggcgtcgcagggctcctaccagcattagccgccgacggcggccgtcgtccgtcctgagttttgtacatgccgtcgtggacagaggagtgcatatgcgacctccaccccttccttctatacctctctctttttttacccacacgtctatggcgatgagccactgttatgtggtttcagcctgtcaagaca

SEQ ID NO: 23607 - DNA, 385 bp, Zea mays
  unsure at all n locations
  Clone ID: LIB3152-042-P1-K1-D1
cgcaaccttaaaaggcccaatagggttttatacaatggcagccaaaatattttgcctgcttatgctccttggtctttctgcaagtgctgctacggcgaccattttcccgaaatgctcgcaagctcctatagcttcccttcttcccccgtacctctcaccagcggtgtcttcggtatgtgaaaacccaattcttcaaccctacaggatccaacaggcaatcacagctggcatcttacctttatcacccttgttcctccaacantnatcagccctattacatcagttacctttggtgcatttattggcacaaaacatcagggcacaacaactacaacaacttgtgctagcaaaccttgctgcctactctcagcaacagcagtttctt

SEQ ID NO: 23608 - DNA, 379 bp, Zea mays
  Clone ID: LIB3152-042-P1-K1-D10
gtggaatccagtagcaacaatagttcaacaatggagaccaagatattttccctccttatgctccttgctctttctacatgtgttgctaacgcgacaattttccctcaatgctcacaagctcctatagcttccctttttcccccataccttccatcaattatagcttcagtatgtgaaaacccagctcttcaaccatataggcttcaacaagcaatcgcagcaagcaacatacctttatcgcccttgttgtgtcaacaatcgccagccctatctttggtgcagtcattggtacaaaccatcagggcacaacagctgcagcaactcgtgctacctgtgatcaaccaagtagctctggcaaacctttctccctactctccgc

SEQ ID NO: 23609 - DNA, 259 bp, Zea mays
  unsure at all n locations
  Clone ID: LIB3152-042-P1-K1-D11
gaccattagctttatctactccatttcgcagaagaacccgatcgacaccatgagggtgttgctcgttgccctcgctctcctggctctcgctgcgagcgccacctccacgcatacaagcggcggctgcggctgccagccaccgccgccggttcatctaccgccgccggtgcatctgccacctccggttcacctgccaaccagaaataagaagttacatttccagattctaatgtgatattggtctccaagggtgttcgnt

SEQ ID NO: 23610 - DNA, 373 bp, Zea mays
  Clone ID: LIB3152-042-P1-K1-D12
cagatcagcaaagcggcagtgcgttgagaggatcgtcgaacagaacagcatgaagatggtcatcgttctcgtcgtgtgcctggctctgtcagctgccagcgcctctgcaatgcagatgccctgcccctgcgcggggctgcagggcttgtacggcgctggcgccggcctgacgacgatgatgggcgccggcgggctgtacccctacgcggagtacctgaggcagccgcagtgcagcccgctggcggcggcgccctactacgccgggtgtgggcagacgagcgccatgtaccagccgctccggcaacagtgctgccagcagcagatgaggatgatggacgtgcagtccgtcgcgcagcagctgcagatgatgatg

SEQ ID NO: 23611 - DNA, 292 bp, Zea mays
  unsure at all n locations
  Clone ID: LIB3152-042-P1-K1-D2
cacctcgtcaaccccctccttgganatggttagagttcccccggcacgagcgcgagccatggcctccttnacctgctcccaggtcggcgctgcggcagcgggcggagcctcgcccttcctcggctaccggcggcggagcggccctgggggcgccattccgtcgagctccctcttcgtgggccggcggttggcggcggtgcaaatgcgcgcgccctctcgcggggtccnnggaggctccgcgctgcgggtcacgtgcgagaaggtggtggggatcgacctgtgcaccaccaac

SEQ ID NO: 23612 - DNA, 377 bp, Zea mays
  Clone ID: LIB3152-042-P1-K1-D3
agccttccgagaaagcacactagagagccaactttgttacccaaaatatctggcctacttatgcgccttggtatgcctgcaagtgctgctacagggaccattaccccgaacagctcgcaagctcgtatagatgcccttattgctccgtacctttcaccagacgtgtcaccagtatgggaaaacccaagtgtaaaaccctacatgaaacaacacgcgatcgaacatggcatcttacctggattacccccgttactacaacagtcattagaactattacaacagctacctcagcagcatccattggcacaaaacatgagggcacaacaactgcaacaacttgtgctagcacaccttgctgcctactctgaggaacagca

SEQ ID NO: 23613 - DNA, 381 bp, Zea mays
  Clone ID: LIB3152-042-P1-K1-D4
aaggttgtccgccagaacctaaggtgttttgcttggtgatgtggtttctgtccaccagtgccaggatgtgaaatatgggaagcgtgtccacattcttccaattgatgatacagttgaaggcattacagggaacctgtttgatgccttcttgaaaccatatttcctagaagcatacaggccgttgaggaaaggagaccttttccttgtcagaggaggaatgagaagtgtggaattcaaagtgatagagactgatcctgctgaatattgtatcgttgcgccagatactgaaatattttgtgatggggagcctattaagagggaggatgaggagcgtcttgatgaagttggttatgatgatgttggtggagttagaaagcaaat

SEQ ID NO: 23614 - DNA, 380 bp, Zea mays
  Clone ID: LIB3152-042-P1-K1-D5
ctggacgtcagcctagcaattagcttattgactccagattggagaactcgacaccatgaaggtgctgatcgttgcccttgctctcctggcgctcgctgcgagcgccgcctccagtacaagcggcggctgtggctgccagacaccaccgtttcatctaccgcctccgttctatatgccgcctccgttctatctgccgccgcagcagcagccgcagccatggcaataccccactcaaccaccgcagctaagcccgtgccagcagttcggatcctgcggcgtcggcagcgtctgcagcccgttcctgggccagtgcgtcgagttcctgaggcaccagtgcagcccggcggcgacgccctacggctcgccacagtgccaggcgc

SEQ ID NO: 23615 - DNA, 331 bp, Zea mays
  Clone ID: LIB3152-042-P1-K1-D6
ttccattatttccacaagtttcctcccaaccagttacccttcaatggccccttcgaacaaacccagctgtgcaaggcctatatggctacaacaaggcgattggcggcgagcgtcttacaacaacccaattgcccaattgcaacaacaatccttggcacatctaacaatacaaaccatcgcaacgcaacagcaacaacagttcctaccagcactgagccacctagccatggtgaaccctgtcgcctacttgcaacagcagctgcttgcatccaacccacttgctctagcaaacgtagttgcaaaccagcaacaacaacaactgcaacagttt

SEQ ID NO: 23616 - DNA, 381 bp, Zea mays
  Clone ID: LIB3152-042-P1-K1-D7
gtggaatccagtagcaacaattttttaacaatggcgaccaagatattttccctccttatgctccttgctctttctgcatgtgttgctaacgcgacaattttccctcaatgctcacaagctcctatagcttcccttcttcccccataccttccatcaatgatagcttcagtatgtgaaaacccagctcttcaaccctataggctccaacaagcaatcgcagcaagcaacatacctttatcacccttgtttcaacaatcgccagccctatctttggtgcagtcattggtacaaaccatcagggcacagcagctgcagcaactcgtgctacctgtgatcaaccaagtagctctggcaaacctttctccctactctcagcaacaa

SEQ ID NO: 23617 - DNA, 381 bp, Zea mays
  Clone ID: LIB3152-042-P1-K1-D8
attttgagcattcagaaacacattattcgaagctacctagcaacgacttaacaacaatggctaccaagatattagccctccttgcgcttcttgccctttttgtgagcgcaacaaatgcgttcattattccacaatgctcacttgctcctagtgccattataccacagttcctccgaccagttacttcaatgggcttcgaacacctagctgtgcaagcctacaggctacaacaagcgcttgcggcgagcgtcttacaacaaccaattaaccaattgcaacaacaatccttggcacatctaaccatacaaaccatcgcaacacaacagcaacaacagttcctaccagcactgagccaactagatgtggtgaaccctgtcgcct

SEQ ID NO: 23618 - DNA, 382 bp, Zea mays
  Clone ID: LIB3152-042-P1-K1-D9
aactagcaacatagaaagcacatttgtgtaccaacaatggcagccaaaatattttgcctccttatgctccttggtatttctgcaagtgctgctacggcgaccattttcccgcaatgctcacaagctcctatagcttcccttcttcccccgtacctctcaccagcggtgtcttcggtatgtgaaaacccaattcttcaaccctacaggatccaacaggcaatcgcagctggcatcttacctttatcacccttgttcctgcaacaatcatcagccctattacagcagttacctttggtgcatttattggcacaaaacatcagggcacaacaactacaacaacttgtgctagcaaaccttgctgcctactctcagcaacagcagt

SEQ ID NO: 23619 - DNA, 381 bp, Zea mays
  unsure at all n locations
  Clone ID: LIB3152-042-P1-K1-E1
gttgcaaaccagccacaacaacagctgtaacagtttctgccagcgctcagtcaactagccatggtgaaccctgccgcctacctacaacagcaacaactgctttcatctagcccgctcgctgtggccaatgcacctacatacctgcaacaacaattgttgcaacagattgtaccagctctgactcagctagttgtggcaaaccctgctgnctacttgcaacagctgcttccattcaaccaactgactatgtcgaactctgctgcgtacctacaacagcgacaacagttacttaatccactagcagtggctaacccattggtcgctgccttcctacagcagcaacaattgctgccatacaaccagttctctttgataaaccct

SEQ ID NO: 23620 - DNA, 381 bp, Zea mays
  Clone ID: LIB3152-042-P1-K1-E10
gaaggagaggagcgtctcggtgattctcttgtccggagggcagggaaagagaatgggggcgaatatgccaaagcagtatctacctctactaggactaccaattgcattgtacagtttaaaaacattctgtcaactgaaggaagtcaaagaagttgtggtagtgtgtgatccagactacagtgatgtatttgaaggttctattgacaacttgcaaataccccttaaatttgcacgcccgggaaaagagagacaagactctgtttttaatggacttcaggaaattgatggggattcagaactagtttgtgtccatgattctgcaaggcccttagtttcttctgaagatgtaaaaaaggtcttagaagatgctgcagtacatgg

SEQ ID NO: 23621 - DNA, 381 bp, Zea mays
  Clone ID: LIB3152-042-P1-K1-E11
attagctcatcgactccagattgtagaactcgacaccatgaaggtgctgatcgttgcccttgctctcctggcgctcgctgcgagcgccgcctccagtacaagcggcggctgtggctgccagacaccaccgtttcatctaccgcctccgttctatatgccgcctccgttctatctgccgccgcagcagcagccgcagccatggcaataccccactcaaccaccgcagctaagcccgtgccagcagttcggatcctgcggcgtcggcagcgtcggcagcccgttcctgggccagtgcgtcgagttcctgaggcaccagtgcagcccggcggcgacgccctacggctcgccacagtgccaggcgctgcagcagcagtgctgcca

SEQ ID NO: 23622 - DNA, 382 bp, Zea mays
  Clone ID: LIB3152-042-P1-K1-E12
attgagaccaactagcaacatatttagcacaatagtgtaccaacaatggcagcgcaaaatattttgcctccttatgctccttggtctttctgcaagtgctgctacggcgaccattttcccgaaatgctcgcaagctcctatagcttcccttcttcccccgtacctctcaccagcggtgtcttcggtatgtgaaaacccaattcttcaaccctacaggatccaacaggcaatcacagctggcatcttacctttatcacccttgttcctccaacaatcatcagccctattacatcagttacctttggtgcatttattggcacaaaacatcagggcacaacaactacaacaacttgtgctagcaaaccttgctgcctactctcag

SEQ ID NO: 23623 - DNA, 248 bp, Zea mays
  Clone ID: LIB3152-042-P1-K1-E2
agcagaaccagcagcaccgtcgaggcttccagcagcgacgcgcaggcgcccatgcaggccatgccgctcccgccgtcgctcgagctggacctgttccaccgcgcggcggccgcggccacgggcacgggcgctgccgccgtacgcttccctttcggcagcatccccgttacgcacccgtactactttttcgggcaggccgcaaccgcagccgcggaagcagggtgccgtgtgctcaagctggcgccggc

SEQ ID NO: 23624 - DNA, 390 bp, Zea mays
  Clone ID: LIB3152-042-P1-K1-E3
cttccgaggctttcaaaaacacaccaagcgtttttacctagcaacgacttaacaacaatggctaccaagatattagccctccttgcgcttcttgccctttttgtgagcgcaacaaatgcgttcattattccacaatgctcacttgctcctagtgccattataccacagttcctccgaccagttacttcaatgggcttcgaacacctagctgtgcaagcctacaggctacaacaagcgcttgcggcgagcgtcttacaacaaccaattaaccaattgcaacaacaatccttggcacatctaaccatacaaaccatcgcaacacaacagcaacaacagttcctaccagcactgagccaactagatgtggtgaaccctgtcgcctacttgcaa

SEQ ID NO: 23625 - DNA, 328 bp, Zea mays
  Clone ID: LIB3152-042-P1-K1-E5
cgataatccgccggcgttgagatgttggtttatcaggatctcctatctggcgacgagctcctgtcggattcattcacctacaaggagctcgagaacggcgtactgtgggaggtcgagggaaagcgggccacccaagggcctgttgatgtggacattggtgccaatccatacgtcgagggtggtgaggcccaaagcggtgctgacacatctgctacagcgggcgatattggtgagacatttacaacaccggagcaacctgcttttgccacgaaactagttgcgtcttacattacaaactacatcaacacatcaactgctgcgttggata

SEQ ID NO: 23626 - DNA, 374 bp, Zea mays
  Clone ID: LIB3152-042-P1-K1-E6
attttgagcattcagaaacacacctttttaagcgcactagcaacgacctaacaacaatggctaccaagatattagccctccttgcgcttcttgccctttttgtgagcgcaacaaatgcgttcattattccacaatgctcacttgctcctagtgccattattccacagttcctcccaccagttacttcaatgggcttcgaacacctagctgtgcaagccaacatgcaacaacaagcgcttgcggcgagcgtcttacaacaaccaattgcccaattgcaacaacaatccttgccacatctaacaatacaagccatcacaacgcaacagcaacaacagttcctaccagcactgagccacctagccatggtgaaccct

SEQ ID NO: 23627 - DNA, 380 bp, Zea mays
  Clone ID: LIB3152-042-P1-K1-E7
gcccaccgaattccctgcgattcctttcccctcgcctcctcgtctccccctaggggatcgtcggagaggaatcgcaaagagggccgtctcatccgagttaaggaagccatggagcacaaggaggctgggtgccaggcccccgagggaaccatcctctgcatcaataactgtggcttcttcggcagcgcggcgaccatgaacatgtgctctaagtgccacaaggagatgataacgaagcaggatcaggccaagctggctgcctcctctatcgacagcatcgtgaacggcagcgacgccgtcatggagccggttgttgctggcagcaacacggtagtagctgttgcccaagtcgagttgcaaacaatgaacgtgcagcagcc

SEQ ID NO: 23628 - DNA, 299 bp, Zea mays
  Clone ID: LIB3152-042-P1-K1-E8
gcagaagaacccgatcgacaccattagggtgttgctcgttgccctcgctctcctggctctcgctgcgagcgccacctccacgcatacaagcggcggctgcggctgccagccaccgccgccggttcatctaccgccgccggtgcatctgccacctccggttcacctgccacctccggtgcatctcccaccgccggtccacctgccgccgccggtccacctgccaccgtcggtccatgtgccgtcgtcggttcatctgccgccgtcaccatgccactaccctacttaaccgtcccggccct

SEQ ID NO: 23629 - DNA, 372 bp, Zea mays
  Clone ID: LIB3152-042-P1-K1-E9
gagaccaactagcaacatagaatgtacaatagtgtaccaacaatggcagccaaaatattttgcctccttatgctccttggtctttctgcaagtgctgctacggcgaccattttcccgaaatgctcgcaagctcctatagcttcccttcttcccccgtacctctcaccagcggtgtcttcggtatgtgaaaacccaattcttcaaccctacaggatccaacaggcaatcacagctggcatcttacctttatcacccttgttcctccaacaatcatcagccctattacatcagttacctttggtgcatttattggcacaaaacatcagggcacaacaactacaacaacttgtgctagcaaaccttgctgcctac

SEQ ID NO: 23630 - DNA, 380 bp, Zea mays
  Clone ID: LIB3152-042-P1-K1-F1
ctggacgtcagcctagcaattagctcatcgactccagattggagaactcgacaccatgaaggtgctgatcgttgcccttgctctcctggcgctcgctgcgagcgccgcctccagtacaagcggcggctgtggctgccagacaccaccgtttcatctaccgcctccgttctatatgccgcctccgttctatctgccgccgcagcagcagccgcagccatggcaataccccactcaaccaccgcagctaagcccgtgccagcagttcggatcctgcggcgtcggcagcgtcggcagcccgttcctgggccagtgcgtcgagttcctgaggcaccagtgcagcccggcggcgacgccctacggttcgccacagtgccaggcgc

SEQ ID NO: 23631 - DNA, 377 bp, Zea mays
  Clone ID: LIB3152-042-P1-K1-F10
aagcaagggaatcacatcgccatgtgttgccaagatgtttgcattgtttgcgctcctagctctttgtgcaaccgccactagtgctacccatatcccagggcacttgtcaccactactgatgccattggctaccatgaacccatggatgcagtactgcatgaagcaacagggggttgccaacttgctagcgtggccgaccctgatgctgcagcaactgttggccttaccgcttcagccgtgccagatgccaatgatgatgccaggtatgatgccaccgatgacaatgatgccgatgccgaatatgatgccatcgatgatggtgccgactatgatgtcaccaataacgatagctagtatgatgccaccgatgatgatgc

SEQ ID NO: 23632 - DNA, 295 bp, Zea mays
  Clone ID: LIB3152-042-P1-K1-F11
tccatctgcaagctgtggcaaacattgctgctttcttgagacaacaacatttgttgccattttacccacaggttgtgggaaacattaatgccttcttgcaacagcaacaattgctaccattctacccacagaatgtggcaaacattgttgccttcttacaacaacaacaattgttgccatttagccaacatgctttgacgaatcctaccaccttattgcaaccgcccaccattggtggtgccatcttctagattttttatgatttatactgtaataataaagttctcatgctgat

SEQ ID NO: 23633 - DNA, 384 bp, Zea mays
  Clone ID: LIB3152-042-P1-K1-F12
caaatgcgttcattattccacatttttcacttgctccaagttccattattacacagttccttccaccagttacttcaatgggcttcgaacacccagctgtgcaagcctataggctacaacaagcaattgcggcgagcgtcttacaacaaccaatttcccagttgcaacaacaatccttggcacatctaacaatacaaaccatcgcaacgcaacagcaacaacaattcctaccagcactgagccacctagccatggtgaaccctgccgcctacttgcaacagcagttgcttgcatcaaacccacttgctctggcaaacgtagttgcaaaccagccacaacaacagctgcaacagtttctgccagcgctcagtcaactagccatgg

SEQ ID NO: 23634 - DNA, 364 bp, Zea mays
  unsure at all n locations
  Clone ID: LIB3152-042-P1-K1-F2
caggcgaagcgcactagcaacaacctatcaacaatggctaccaagatattagccctccttgcgcttcttgccctttttagtgagcgcaacatatgcgttcattattccacagtgctcacttgctcctagtgccattattccacagttccttccaccagttacttcaatgggcttcgaacattcagccgtgcaagcctacaggctacaactagcgcttgcggcgagcgtcttacaacaaccaattgcccaattgcaacaacaatncttggcacatctaaacctacaaaccatcgcaacgcaacatctacaacagtttctgccatcactnnnccaccctaccgtggtgaacccctgtcgcctactt

SEQ ID NO: 23635 - DNA, 383 bp, Zea mays
  Clone ID: LIB3152-042-P1-K1-F3
aataacaagccatcacaacgcaacatctacaacagttcctaccagcactgagccacctagccatggtgaaccctgccgcctacttgcaagagcagctgcttgcatccaacccacttgctctggcgaacgtagttgcaaaccagcaacaacaacagctacaacagtttctgccaacgctcagtcaactagccatggtgaaccctgccgcctacgtacaacaacaacaactgctttcatctagcccgctcgctgtgggcaatgcacctacatacctgcaacaacaattgttgcaacagattgtaccagctctgactcaactagctgtggcaaaccctgttgcctacttgcaacagctgcttccattcaaccaactgactctgtcg

SEQ ID NO: 23636 - DNA, 383 bp, Zea mays
  Clone ID: LIB3152-042-P1-K1-F4
atggagaccacctggcaccatagattgttcattagtgtaccaacaatggcagccaaaatattttgcttccttatgctccttggtctttctgcaagtgctgctaccgcaaccattttcccacaatgctcacaagctcctatagcttcctttcttcccccatacctctcaccagcggtgtcttcagtatgtgaaaacccaattcttcaaccctacaggatccaacaggcaatcgcagcaggcatcttacctttatcacccttgttcctccaacaaccgtcagccctattacagcagttacctttggtgcatttgttggcacaaaacatcaaggcacaacaactacaacaacttgtgctaggaaaccttgctgcctactctcagca

SEQ ID NO: 23637 - DNA, 364 bp, Zea mays
  Clone ID: LIB3152-042-P1-K1-F5
aattagctcatcgactccagattgtttgttctcgacaccatgaaggtgctgatcgttgcccttgctctcctggcgctcgctgcgagcgccgcctccagtacaagcggcggctgtggctgccagacaccaccgtttcatctaccgcctccgttctatatgccgcctccgttctatctgccgccgcagcagcagccgcagccatggcaataccccactcaaccaccgcagctaagcccgtgccagcagttcggatcctgcggcgtctgcagcgtcggcagcccgttcctgggccagtgcgtcgagttcctgaggcaccagtgcagcccggcggcgacgccctacggctcgccacagtgccaggcgc

SEQ ID NO: 23638 - DNA, 381 bp, Zea mays
  Clone ID: LIB3152-042-P1-K1-F6
gcaaagcggcagtgcgtagagaggatcttcgaacagaacagcatgaagatggtcatcgttctcgtcgtgtgcctggctctgtcagctgccagcgcctctgcaatgcagatgccctgcccctgcgcggggctgcagggcttgtacggcgctggcgccggcctgacgacgatgatgggcgccggcgggctgtacccctacgcggtgtacctgaggctgtcgcagagtagcccgttggcggcagctccctactactccgcttgtggatataaaatcgtttagtactattctgtttatggttcataaatttctttattcgatcacttttttgggctcacactatctattttatcaagatttttgtttctatgctatttttttttt

SEQ ID NO: 23639 - DNA, 374 bp, Zea mays
  Clone ID: LIB3152-042-P1-K1-F7
attgataccaactagcaacatacattttgaagtacactagcaacatcttagcaccaatgggagccaagatttttgccctccttgccctccttgctctttcagcaagcgctgctacctcgacttttattccacaatgctcacaacaatacctctctccggcgacagccgtgggatttcaatacccaactatacaatcctacatggtacaagaggccatccaagcaagcatcttacggtcattagcattaaccctccaacaaccatatgctctattgcaacagccatccttagtgcatctgtatctccaaagaatcgcggcacaacaactacaacaacagttgctaccaacaatcaatcaagtaggtgcagcgaac

SEQ ID NO: 23640 - DNA, 380 bp, Zea mays
  Clone ID: LIB3152-042-P1-K1-G10
atcgactccatattggagaacttgtcaccatgaaggtgctgatcgttgcccttgctctcctggcgctcgctgcgagcgccgcctccagtacaagcggcggctgtggctgccagacaccaccgtttcatctaccgcctccgttctatatgccgcctccgttctatctgccgccgcagcagcagccgcagccatggcaataccccactcaaccaccgcagctaagcccgtgccagcagttcggatcctgcggcgtcggcagcgtcggcagcccgttcctgggccagtgcgtcgagttcctgaggcaccagtgcagcccggcggcgacgccctacggctcggcacagtgccaggcgctgcagcagcagtgctgccaccagatc

SEQ ID NO: 23641 - DNA, 381 bp, Zea mays
  Clone ID: LIB3152-042-P1-K1-G11
cggacgcgtggtcaactagcatctttaaagcacaatagtgtaccaacaatggcagccaaaatattttgcctccttatgctccttggtctttctgcaagtgctgctacggcgaccattttcccgcaatgctcgcaagctcctatagcttcccttcttcccccgtacctctcaccagcggtgtcttcggtatgtgaaaacccaattcttcaaccctacaggatccaacaggcaatcgcagctggcatcttacctttatcacccttgttcctccaacaatcatcagccctattacaacagttacctttggtgcatttattggcacaaaacatcatggcacaacaactacaacaacttgtgctagcaaaccttgctgcctactct

SEQ ID NO: 23642 - DNA, 373 bp, Zea mays
  Clone ID: LIB3152-042-P1-K1-G12
attttgagcattcagaaacacactttgcgaagctacctagcaacgacttaacaacaatggctaccaagatattagccctccttgcgcttcttgccctttttgtgagcgcaacaaatgcgttcattattccacaatgctcacttgctcctagtgccattataccacagttcctccgaccagttacttcaatgggcttcgaacacctagctgtgcaagcctacaggctacaacaagcgcttgcggcgagcgtcttacaacaaccaattaaccaattgcaacaacaatccttggcacatctaaccatacaaaccatcgcaacacaacagcaacaacagttcctaccagcactgagccaactagatgtggtgaaccc

SEQ ID NO: 23643 - DNA, 383 bp, Zea mays
  Clone ID: LIB3152-042-P1-K1-G2
ggaggccccaaccttggcccgctcgtctgcgaaggaggttcgccgaggcctgggtggccctgaaccgtctccctctggtgccctcggtcaccagggccgtcctccccactgccgcacagctctctgccaggtacaattcggcggtgcgtgatggtgccaagcgcgggaacgccgtggccacctatctcccgctggtgcccactgagcggctcgcccgcgtgttcaggtaccccgtggctgacgttgctgcagcaccagagatgcagcccattccttcccagtagaagatgaaatggaatgtgaactgcataaaccaatatcaagaagtattactgtgttttgtctttgcgtaccttatggtgaactcatgcgtggttcagtat

SEQ ID NO: 23644 - DNA, 403 bp, Zea mays
  Clone ID: LIB3152-042-P1-K1-G3
ccggggcggcccaagccgtccggcaacatagaaagcacaatagtgtttttacaatggcagccaaaatattttgcctccttatgctccttggtctttctgcaagtgctgctacggcgaccattttcccacaatgctcacaagctcctatagcttcccttcttcccccgtacctctcaccagcggtgtcttcggtatgtgaaaacccaattcttcaaccctataggatccaacaggcaatcgcagctggcatcttacctttatcacccttgttcctccaacaatcatcagccctattacagcagttacctttggtgcatttattggcacaaaacatcagggcacaacaactacaacaacttgtgctagcaaaccttgctgcctactctcagcaacaacagtttct

SEQ ID NO: 23645 - DNA, 383 bp, Zea mays
  Clone ID: LIB3152-042-P1-K1-G4
gtggaatccagtagcaacaatagatcttcaatggcgaccaagatattttccctccttatgctccttgctctttctgcatgtgttgctaacgcgacaattttccctcaatgctcacaagctcctatagcttcccttcttcccccataccttccatcaatgatagcttcagtatgtgaaaacccagctcttcaaccctataggctccaacaagcaatcgcagcaagcaacatacctttatcacccttgtttcaacaatcgccagccctatctttggtgcagtcattggtacaaaccatcagggcacagcagctgcagcaactcgtgctacctgtgatcaaccaagtagctctggcaaacctttctccctactctcagcaacaaca

SEQ ID NO: 23646 - DNA, 383 bp, Zea mays
  Clone ID: LIB3152-042-P1-K1-G5
tcaactagcaacatttaaagcacatttgtgtaccaacaatggcagctaaaatatgttgcctccttatgctccttggtctttctgcaagtgctgctacggcgaccattttcccacaatgctcacaagctcctatagcttcccttcttcccccgtacctctcaccaacggtgtcttcggtatgtgaaaacccaattcttcaaccctacaggatccaacaggcaatcgcagctggcatcttacctttatcacccttgttcctccaacaatcatcagccctattacagcagttacctttggtgcatttattggcacaaaacatcagggcacaacaactacaacaacttgtgctagcaaaccttgctgcctactctcagcaacagcag

SEQ ID NO: 23647 - DNA, 391 bp, Zea mays
  Clone ID: LIB3152-042-P1-K1-G6
cttccggaccaactagcaacttagaaagcactttagtgtaccaacaatggcagccaaaatattttgcctccttatgctccttggtctttctgcaagtgctgctacggcgaccattttcccgaaatgctcgcaagctcctatagcttcccttcttcccccgtacctctcaccagcggtgtcttcggtatgtgaaaacccaattcttcaaccctacaggatccaacaggcaatcacagctggcatcttacctttatcacccttgttcctccaacaatcatcagccctattacatcagttacctttggtgcatttattggcacaaaacatcagggcacaacaactacaacaacttgtgctagcaaaccttgctgcctactctcagcaacagcag

SEQ ID NO: 23648 - DNA, 382 bp, Zea mays
  Clone ID: LIB3152-042-P1-K1-G7
agaccaactagcaacatagaaagctcaatagtgtaccaacaatggcagccaaaagattttgcctccttatgctccttggtctttctgcaagtgctgctacggcgaccattttcccgcaatgctcgcaagctcctatagcttcccttcttcccccgtacctctcaccagcggtgtcttcggtatgtgaaaacccaattcttcaaccctacaggatccaacaggcaatcgcagctggcatcttacctttatcacccttgttcctccaacaatcatcagccctattacaacagttacctttggtgcatttattggcacaaaacatcagggcacaacaactacaacaacttgtgctagcaaaccttgctgcctactctcagcaaca

SEQ ID NO: 23649 - DNA, 380 bp, Zea mays
  Clone ID: LIB3152-042-P1-K1-G8
attgagaccaactagcaacatagtattgcacaatagtgtaccaacaatggcagccaaaatattttgcttccttatgctccttggtctttctgcaagtgctgctaccgcaaccattttcccacaatgctcacaagctcctatagcttcctttcttcccccatacctctcaccagcggtgtcttcagtatgtgaaaacccaattcttcaaccctacaggatccaacaggcaatcgcagcaggcatcttacctttatcacccttgttcctccaacaaccgtcagccctattacagcagttacctttggtgcatttgttggcacaaaacatcaaggcacaacaactacaacaacttgtgctaggaaaccttgctgcctactctc

SEQ ID NO: 23650 - DNA, 382 bp, Zea mays
  Clone ID: LIB3152-042-P1-K1-G9
gcaacatagaaagtggaatccagtttcaacaatagagcaacaatggagaccaagatattttccctccttatgctccttgctctttctacatgtgttgctaacgcgacaattttccctcaatgctcacaagctcctatagcttccctttttcccccataccttccatcaattatagcttcagtatgtgaaaacccagctcttcaaccatataggcttcaacaagcaatcgcagcaagcaacatacctttatcgcccttgttgtgtcaacaatcgccagccctatctttggtgcagtcattggtacaaaccatcagggcacaacagctgcagcaactcgtgctacctgtgatcaaccaagtagctctggcaaacctttctccct

SEQ ID NO: 23651 - DNA, 378 bp, Zea mays
  unsure at all n locations
  Clone ID: LIB3152-042-P1-K1-H1
gccttcctggaaggaccattggggtcccacctttggcagccaaaatattttgcttccttatgctccttggtctttctgcaagtgctgctaccgcaaccattttcccacaatgctcacaagctcctatagcttcctttcttcccccatacctctcaccagcggtgtcttnagnatgtgaaaacccaattcttcaaccctacaggatccaacaggcaatcgcagcaggcatcttacctttatcacccttgttcctccaacaaccgtcagccctattacagcagttacctttggtgcatctgttggcacaaaacatcaaggcacaacaactacaacaacttnngctaggaaaccttgctgcctactcttagcaacagcagt

SEQ ID NO: 23652 - DNA, 303 bp, Zea mays
  Clone ID: LIB3152-042-P1-K1-H10
aaaaaaaaaaaaaaaaaaaaaatatataaaaaaaaaaaaaaaaaaaaaaaaaaaagaaaaaaaaaaaaaaaaaaaaaaaaaaaaaaaaaaaaaaaaaaaaaaaaaaaaaaaaaaaaaaaaaaaaaaaaaaaaaaaaagggggggccttatatagagcccaacataaataaccccaaaatgcaaaatgccaaactctttaatggtgaacccaaaaaaaagcaaacggagcgagcttcaaacactttttaccggaaaaacaacaagtgccacccaaaaaaatggtttcaaaaaaaacacccatta

SEQ ID NO: 23653 - DNA, 375 bp, Zea mays
  Clone ID: LIB3152-042-P1-K1-H11
ctactatactatactctaggatgcttggacaccaccgccatggcagccaagatgcttgcattgttcgctctcctagctctttgtgcaagcgccactagtgcgacccatattccagggcacttgccaccagtcatgccattgggtaccatgaacccatgcatgcagtactgcatgatgcaacaggggcttgccagcttgatggcgtgtccgtccctgatgctgcagcaactgttggccttaccgcttcagacgatgccagtgatgatgccacagatgatgacgcctaacatgatgtcaccattgatgatgccgagcatgatgtcaccaatggtcttgccgagcatgatgtcgcaaatgatgatgccacaatgtcac

SEQ ID NO: 23654 - DNA, 258 bp, Zea mays
  Clone ID: LIB3152-042-P1-K1-H12
gctgcaggatggactggaggaccaatccccatatcggctggtaccggtgctgcggctccacctgcctgagctgctgccggcggtgtcccccactgaagaaactatgtgctgtagtatagccgctggctagctagctagttgagtcatttagcggcgatgattgagtaataatgtgtcacgcatcaccatgggtggcagtgtcagtgtgagcaatgacctgaatgaacaattgaaatgaaaagaaaaaagtattgttcc

SEQ ID NO: 23655 - DNA, 379 bp, Zea mays
  Clone ID: LIB3152-042-P1-K1-H2
ggccgtaagcctagcaattagctcttttactccagattggagaactcgacaccatgaaggtgctgatcgttgcccttgctctcctggcgctcgctgcgagcgccgcctccagtacaagcggcggctgtggctgccagacaccaccgtttcatctaccgcctccgttctatatgccgcctccgttctatctgccgccgcagcagcagccgcagccatggcaataccccactcaaccaccgcagctaagcccgtgccagcagttcggatcctgcggcgtcggcagcgtcggcagcccgttcctgggccagtgcgtcgagttcctgaggcaccagtgcagcccggcggcgacgccctacggctcgccacaatgccaggcgct

SEQ ID NO: 23656 - DNA, 325 bp, Zea mays
  Clone ID: LIB3152-042-P1-K1-H3
tcggttgcaaaacctggttgattccttttattaccataagtttcttccattcaaccaactggctgcattgaactctgctgcttatttgcaacaacaattaccattcagccagctagttgctgcctacccccagcaatttcttccattcaaccaactagcagcattgaactctgctgcttatttacagcagcaacaactactaccattcagccagctagctgatgtgagccctgctgcctttttgacacaacaacagttgttgccgttctacctgcacgctatgcctaacgctggcaccctcttacaactgcaacaattgctggca

SEQ ID NO: 23657 - DNA, 369 bp, Zea mays
  unsure at all n locations
  Clone ID: LIB3152-042-P1-K1-H4
atttggctttttagtctacaacaagtccccgcttccttcttgacacaacaacaatnttcttccgttctaccagcagtttgtggctaaccccgcaacccttttacaactgcaacagttgctgccctttgtccaacttgctttgacaaacccagcagccttctaccaacaacacatcattggcggtgccctcttttagattgcttattagttgtcattcaataatgaagttttttggctgatgtatnnnnccnnctnnnaatataacttnttatttttaggatgccacaatccttatccaaaaaactatttttttttaattcacaatttttttccatttcttttttttttctcccccttttttattttttt

SEQ ID NO: 23658 - DNA, 139 bp, Zea mays
  Clone ID: LIB3152-042-P1-K1-H5
aaacccagcagcctcctaccaacatttctttattggtggtgccctcttttagattggtgattagttgtaattcaataataaagttttttggatgatgtatgtggccaaccagaaataagaagttacatttccagattct

SEQ ID NO: 23659 - DNA, 292 bp, Zea mays
  unsure at all n locations
  Clone ID: LIB3152-042-P1-K1-H6
tccgngcantcaaccaccaaagccatcgtttatcgtaccctgccagtgctggcaaagaggggcgcgaccaaacagatccaatccaatggcgatggcaccgcccgcagcatgcgtcgtcttgttccccgcccgcccggcggcgtccacggtcgggccccgcgccgccgcgggcaccggggcggtccacgctgtcgcggtgtcggcggagggagccaagtggtgggcgccgctgctggggtggtcgtggaagggcgacttccttttaggcccctgttccctttcatgattaagt

SEQ ID NO: 23660 - DNA, 358 bp, Zea mays
  Clone ID: LIB3152-042-P1-K1-H7
gcaacatagaaagtggaatccagtttcaacaatagagcaacaatggcgaccaagatattttccctccttatgctccttgctctttctgcatgtgttgctaacgcgacaattttccctcaatgctcacaagctcctatagcttcccttcttcccccataccttccatcaatgatagcttcagtatgtgaaaacccagctcttcaaccctataggctccaacaagcaatcgcagcaagcaacatacctttatcacccttgtttcaacaatcgccagccctatctttggtgcagtcattggtacaaaccatcagggcacagcagctgcagcaactcgtgctacctgtgatcaaccaagtag

SEQ ID NO: 23661 - DNA, 380 bp, Zea mays
  Clone ID: LIB3152-042-P1-K1-H8
gtgctgcttatttgcagcaacaactattaccattcagccagctagctactgcctactctcagcaacaacaacttcttccatttaaccaattggccgcactgaaccccgctgcttatttgcagcagcaaatactactaccatttagccagctagctgcagcaagccgtgcttccttcttgacacagcaacagttgctgcctttctaccagcagtttgcggctaaccccgcaaccctcttacaactacaacaattgttgccctttgtccaacttgctttgacaaacccagcagcctcctaccaacaacacatcattggtggtgccctcttttagattgcttattagttgtaattcaataataaagttttttggatgatgtat

SEQ ID NO: 23662 - DNA, 386 bp, Zea mays
  Clone ID: LIB3152-042-P1-K1-H9
gtggaatccagtttcaacaatagttttttcaatggcgaccaagatattttccctccgtatgctccctgctctttctgcatgtgttgctaacccgccaattttccctcaatgctaacaagctccattagcttccttttttcccccataccttccatcaatgatagcttcagtatgtgaaaacccagctcttcaaccctataggctccaacaagcaatcgcagcaagcaacatacctttattacccttgtttcaacaatcgccagccctatctttggtgcagtcattggtacaaaccatcagggcacagcagctgcagcaactcgtgctacctgtgatcaaccaagtagctctggcaaacctttctccctactctcagcaacaacaat

SEQ ID NO: 23663 - DNA, 375 bp, Zea mays
  Clone ID: LIB3152-043-P1-K1-A1
gttgcaaaccagcaacaacaacaactgcaacagtttctgccagcgcttagtcaactagccatggtgaaccctgccgcctacctacaacagcaacaactgctttcatctagcccgctcgctgtggccaatgcacctacatacctgcaacaagaattgttgcaacagattgtaccagctctaactcagctagctgtggcaaaccctgttgcctacttgcaacagctgcttccattcaaccaactaactatgtcgaactctgttgcgtacctacaacagcgacaacagttacttaatccattggcagtggctaacccattggtcgctgccttcctacagcagcaacaattgctgccatacaaccggttctctttgatg

SEQ ID NO: 23664 - DNA, 373 bp, Zea mays
  Clone ID: LIB3152-043-P1-K1-A10
caatagtgtaccaacaatggcagtctaaatattttgcctccttatgctccttggtatttctgcaagtgctgctacggcgaccattttcccgcaatgctcacaagctcctatagcttcccttcttcccccgtacctctcaccagcggtgtcttcggtatgtgaaaacccaattcttcaaccctacaggatccaacaggcaatcgcagctggcatcttacctttatcacccttgttcctccaacaatcatcagccctattacagcagttacctttggtgcatttattggcacaaaacatcatggcacaacaactacaacaacttgtgctagcaaaccttgctgcctactctcagcaacagcagtttcttccattc

SEQ ID NO: 23665 - DNA, 416 bp, Zea mays
  Clone ID: LIB3152-043-P1-K1-A2
gccggcagggaccggtacgttattggctgggcccacccatgcgtagcaacatagaaagcacaatagtgttccaacaatggcagccaaaatattttgcctccttatgctccttggtctttctgcaagtgctgctacggcgaccattttcccgaaatgctcgcaagctcctatagcttcccttcttcccccgtacctctcaccagcggtgtcttcggtatgtgaaaacccaattcttcaaccctacaggatccaacaggcaatcacagctggcatcttacctttatcacccttgttcctccaacaatcatcagccctattacatcagttacctttggtgcatttattggcacaaaacatcatggcacaacaactacaacaacttgtgctagcaaaccttgctgtctactcttagcaac

SEQ ID NO: 23666 - DNA, 159 bp, Zea mays
  Clone ID: LIB3152-043-P1-K1-A3
ctaccctggatacatggctgccagagcaagttgcatttatccaatcaatgggaaacgaaaaagcaaattgccattgggaagcagagctgcctcccaactatgatagggttgggatagagaatttcatccgtgcaaaatatgaggacaagagatgggtac

SEQ ID NO: 23667 - DNA, 361 bp, Zea mays
  Clone ID: LIB3152-043-P1-K1-A4
acccacctggcaccttaaaaggcacttttttgtcccaacaatggcagccaaaatattttgcttccttatgctccttggtctttctgcaagtgctgctaccgcaaccattttcccacaatgctcacaagctcctatagcttcctttctttccccatacctctcaccagcggtgtcttcagtatgtgaaaacccaattcttcaaccctacaagatccaacaggcaatcgcagcaggcatcttacctttatcacccttgttccttcaacaaccgtcagccctattacagcagttacctttggtgcatttgttggcacaaaacatcaaggcacaacaactacaacaacttgtgctaggaaacctt

SEQ ID NO: 23668 - DNA, 375 bp, Zea mays
  Clone ID: LIB3152-043-P1-K1-A5
cctgagttcaagaaggttgccaatttccttggtcggttcaagtccatccccagcatagttgagcttgacagcttgaaggtttctggtgatgtctggtttggctctggaattacactcaagggcaaggtgacaattatcgccaagcctggagtgaagttggagattccagatggagacgtacttgagaacaaggatgtcaatggccctgaggatctttaagcaatgtttatcatcaccagttttcccaaggacatgtcacaggaactgccaagcctaatcactcctactgagctctatattttgtaatttttcatgtgcattccgattccgctgtgagggtcatgtgagcccgctagagaataattgtaatcttct

SEQ ID NO: 23669 - DNA, 371 bp, Zea mays
  Clone ID: LIB3152-043-P1-K1-A6
attattgagaccaactagcaacatagaaagcacaatattgtaccaataatggcagccaaaatattttgcctcattatgctccttggtctttctgcaagtgctgctacggcgagcattttcccgcaatgctcacaagctcctatagcttcccttcttcccccatacctctcaccagcgatgtcttcagtatgtgaaaatccaattcttctaccctacaggatccaacaggcaatcgcagcaggcatcttacctttatcacccttgttcctccaacaatcatcagccctattacagcatgtacctttggtgcatttattggcacataacatcatggcacatcaactacaacaactcgtgctagcaaaccttgc

SEQ ID NO: 23670 - DNA, 367 bp, Zea mays
  Clone ID: LIB3152-043-P1-K1-A7
attgagaccaactagcaacatataaagcacaatagtgtaccaacaatggcagccaaaatattttgcttccttatgctccttggtctttctgcaagtgttgctaccgcaaccattttcccacaatgctcacaagctcctatagcttcccttcttcccccatacctctcaccagcggtgtcttcaatgtgtgaaaacccaattgttcaaccctacaggatccaacaggcaatcgcaacaggcatcttaccattatcacccttgttcctccaacaaccgtcagccctattacagcagttacctttggtccatttggtggcacaaaacatcatggcacaacaactacaacaacttgtgctagcaaaccttg

SEQ ID NO: 23671 - DNA, 371 bp, Zea mays
  Clone ID: LIB3152-043-P1-K1-A8
attttcagcattcagaaacacaccaagcgaagcgcactagcaacaacctaacaacaatggctaccaagatattagccctccttgcgcttcttgcccttttagtgagcgcaacaaatgcgttcattattccacagtgctcacttgctcctagtgccattattccacagttcctcccaccagttacttcaatgggcttcgaacatccagccgtgcaagcctacaggctacaactagcgcttgcggcgagcgtcttacaacaaccaattgcccaattgcaacaacaatccttggcacatctaaacctacaaaccatcgcaacgcaacagcaacaacagtttctgccatcactgagccacctagccgtggtgaac

SEQ ID NO: 23672 - DNA, 289 bp, Zea mays
  Clone ID: LIB3152-043-P1-K1-B1
agcaaatactactaccatttggccagctagctacaacaagccccgcttccttcttgacacaacaacaattgcttccgttctaccagcagtttgtggctaaccccgcaacccttttacaactgcaacagttgctgccctttgtccaacttgctttgacaaacccagcagccttctaccaacaacacatcattggcggtgccctcttttagattgcttattagttgtcattcaataatgaagttttttggctgatgtatgtggcctcctagaaataagaagttatatttcc

SEQ ID NO: 23673 - DNA, 375 bp, Zea mays
  Clone ID: LIB3152-043-P1-K1-B12
gcgaagcgcactagcaacgacctaacaacaatggctaccaagatattagccctccttgcgcttcttgccctttttgtgagcgcaacaaatgcgttcattattccacaatgctcacttgctcctagtgccattattccacagttcctcccaccagttacttcaatgggcttcgaacacctagctgtgcaagccaacatgcaacaacaagcgcttgcggcgagcgtcttacaacaaccaattgcccaattgcaacaacaatccttgccacatctaacaatacaagccatcacaacgcaacagcaacaacagttcctaccagcactgagccacctagccatggtgaaccctgccgcctacttgcaagagcagctgctt

SEQ ID NO: 23674 - DNA, 387 bp, Zea mays
  Clone ID: LIB3152-043-P1-K1-B2
acccttccggaaacacaccaagcgaagcgcactatcttcgacctaacaccaatggctaccaagattttagccctccttgcgcttcttgccctttttgtgagcgcaacaaatgcgttcattattccacaatgctcacttgctcctagtgccattattccacagttcctcccaccagttacttcaatgggcttcgaacacctagctgtgcaagccaacatgcaacaacaagcgcttgcggcgagcgtcttacaacaaccaattgcccaattgcaacaacaatccttgccacatctaacaatacaagccatcacaacgcaacagcaacaacagttcctaccagcactgagccacctagccatggtgaaccctgccgcctacttgcaagag

SEQ ID NO: 23675 - DNA, 85 bp, Zea mays
  Clone ID: LIB3152-043-P1-K1-B3
tcgtccggcggcggcggcgggttttctttttttggtaagggggtagggaagagggcgaatgggtgaaccccaccaccgttttccc

SEQ ID NO: 23676 - DNA, 385 bp, Zea mays
  Clone ID: LIB3152-043-P1-K1-B5
acccttccgccgggcgagagagaggggaccaaaatggatgggcgaggaggacagggagccgagcgcaagagctgaggcttcgccgcgaaaccccagacctcgcgccgccccttcccctccgcggcgtcgtcctcgcacgctctccgatccaagatgtataagctggggagaggaaaccgcgacaaggtgcagcagttcatgaccattaccggcgccagtgagaaggttgcccttcaggcactgaaagctagtgattggcacttggaaggagcttttgacttcttctatagccaacctcaggtttctgtggtcaatactcggcatcttgaagatattttcaacagatataaagaacctgatgctgatatgataatggtggaaggaa

SEQ ID NO: 23677 - DNA, 76 bp, Zea mays
  Clone ID: LIB3152-043-P1-K1-B6
gctgttctctctctgcaacaactgtacatagtttgtgtactcgaccctattcgttggatatagccgcagtgacaat

SEQ ID NO: 23678 - DNA, 372 bp, Zea mays
  Clone ID: LIB3152-043-P1-K1-B7
gcaacatagaaagtggaatccagtatcaacaatagagcaacaatggcgaccaagatattttccctccttatgctccttgctctttctgcatgtgttgctaacgcgacaattttccctcaatgctcacaagctcctatagcttcccttcttcccccataccttccatcaatgatagcttcagtatgtgaaaacccagctcttcaaccctataggctccaacaagcaatcgcagcaagcaacatacctttatcacccttgtttcaacaatcgccagccctatctttggtgcagtcattggtacaaaccatcagggcacagcagctgcagcaactcgtgctacctgtgatcaaccaagtagctctggcaaacctt

SEQ ID NO: 23679 - DNA, 372 bp, Zea mays
  Clone ID: LIB3152-043-P1-K1-B8
gtcagcctagcaattagctcattttctccagattggagaactcgacaccatgaaggtgctgatcgttgcccttgctctcctggcgctcgctgcgagcgccgcctccagtacaagcggcggctgtggctgccagacaccaccgtttcatctaccgcctccgttctatatgccgcctccgttctatctgccgccgcagcagcagccgcagccatggcaataccccactcaaccaccgcagctaagcccgtgccagcagttcggatcctgcggcgtcggcagcgtcggcagcccgttcctgggccagtgcgtcgagttcctgaggcaccagtgcagcccggcggcgacgccctacggctcgccacagtgccaggc

SEQ ID NO: 23680 - DNA, 374 bp, Zea mays
  Clone ID: LIB3152-043-P1-K1-C1
tctagatcgcgagtggccgccctttttttttttttttctaaatagtgaagaattattttttactatactaggcttacacatcgatataaaaaataattcttcactatttagaaaaagaaaataaaagtgagaaaatgagagtgtaacacctgaatttgatggatattagagaaaaaaatttatacccccaaattcagggtattatagatctgacccccttaataggaatctcacccccgagattcaagaagaagctagcaagaaaacgaggttggttcataggttgttcacaactttcttgagttgactttgactctacaagcttaacttggggattggtttgctttgactttcagatgcttgagaccgatcga

SEQ ID NO: 23681 - DNA, 377 bp, Zea mays
  Clone ID: LIB3152-043-P1-K1-C2
aagcaacatagaaagtggaatccagtagcaacaatagagcaacaatggcgaccaagatattttccctccttatgctccttgctctttctgcatgtgttgctaacgcgacaattttccctcaatgctcacaagctcctatagcttcccttcttcccccataccttccatcaatgatagcttcagtatgtgaaaacccagctcttcaaccctataggctccaacaagcaatcgcagcaagcaacatacctttatcacccttgtttcaacaatcgccagccctatctttggtgcagtcattggtacaaaccatcagggcacagcagctgcagcaactcgtgctacctgtgatcaaccaagtagctctggcaaacctttct

SEQ ID NO: 23682 - DNA, 375 bp, Zea mays
  Clone ID: LIB3152-043-P1-K1-C3
cagaaacacaccaagcgaagcacattagctacaacctaacaacaatggctaccaagatattatccctccttgcgcttcttgcgctttttgcgagcgcaacaaatgcgttcattattccacaatgctcacttgctccaagttccattattacacagttcctcccaccagttacttcaatgggcttcgaacacccagctgtgcaagcctataggctacaacaagcaattgcggcgagcgtcttacaacaaccaatttcccagttgcaacaacaatccttggcacatctaacaatacaaaccatcgcaacgcaacagcaacaacaattcctaccagcactgagccacctagccatggtgaaccctgccgcctacttgc

SEQ ID NO: 23683 - DNA, 374 bp, Zea mays
  Clone ID: LIB3152-043-P1-K1-C4
agaccaacaagcaacatagaaagtggaatacagtagcaacaatagagcaacaatggcggccaagatattttccatccttatgctccttgctctttctgcatgtgttgctaacgcgaccatttttcctcaatactcacaagctcctatagctgcccttcttcccccataccttccatcaatgaccgcttcagtatgtgaaaacccagcccttcaaccctacaggctccaacaagcaatcgcaacaagcaacttacctttatcacccctgttctttcaacaatcgccagccctatctttggtgcagtcattggtacaaaccatcagggcacaacagctgcagcaactcgtgctaccagtgatcagccaagtagctc

SEQ ID NO: 23684 - DNA, 276 bp, Zea mays
  Clone ID: LIB3152-043-P1-K1-C5
agaacaagaggatctccaaggaaaagaggggtggtaagaaaaagaccgtcgaccccttctttaagaaggactggtttgacattaaggccccatcggtcttcagtgtgcgcaacattgggaagactctcgtgtccaggacacagggttccaggattgcctctgatggtctgaagcacagagtctttgaggtttgtctagctgatcttcagggtgacgaggatcaggcttacaggaaaatcaggctccgtgctgaagatgtgcatggcaggaatgtgc

SEQ ID NO: 23685 - DNA, 375 bp, Zea mays
  Clone ID: LIB3152-043-P1-K1-C6
agcgaagcacattagcaacaacctaacatcaatggctaccaagatattatccctccttgcgcttcttgcgctttttgcgagcgcaacaaatgcgttcattattccacaatgctcacttgctccaagttccattattacacagttcctcccaccagttacttcaatgggcttcgaacacccagctgtgcaagcctataggctacaacaagcaattgcggcgagcgtcttacaacaaccaatttcccagttgcaacaacaatccttggcacaacaactacaacaacttgtgctagcaaaccttgctgcctactctcagcaacagcagtttcttccattcaaccaactagctgcattgaactctgcttcttatttgca

SEQ ID NO: 23686 - DNA, 128 bp, Zea mays
  Clone ID: LIB3152-043-P1-K1-C7
accaactagcaacatataaagctcttttacaattccaacaatggcagccatagggtgttgccttcttatgctacttggtctaacatctattgctgctactgttaccattttttcacattgcttacatg

SEQ ID NO: 23687 - DNA, 252 bp, Zea mays
  Clone ID: LIB3152-043-P1-K1-C8
cttcgatgaaccaactagcacatttttttttcaatatgcaccaataatggctgccaaatattttgcctattatgccccttttctttctgcaagtgctgcttcggctagcatttttcctaatgttcacaagctcctatagcttccctttatcccccattcctctcaccagcgattttttattatatgtgaaaaaccaattctttctactcctactagatccaactttcaatttgtaattatgcattttacctt

SEQ ID NO: 23688 - DNA, 375 bp, Zea mays
  Clone ID: LIB3152-043-P1-K1-D1
ttcagaaacacaccaagcgaagcgcactatcaacaacctaacaacaatggctaccaagatattagccctccttgcgcttcttgcccttttagtgagcgcaacaaatgcgttcattattccacagtgctcacttgctcctagtgccattattccacagttcctcccaccagttacttcaatgggcttcgaacatccagccgtgcaagcctacaggctacaactagcgcttgcggcgagcgtcttacaacaaccaattgcccaattgcaacaacaatccttggcacatctaaacctacaaaccatcgcaacgcaacagcaacaacagtttctgccatcactgagccacctagccgtggtgaaccctgtcgcctactt

SEQ ID NO: 23689 - DNA, 374 bp, Zea mays
  Clone ID: LIB3152-043-P1-K1-D10
caacatagaaagtggaatccagttttttcaatagagcaacaatggagaccaagatattttccctccttatgctccttgctctttctacatgtgttgctaacgcgacaattttccctcaatgctcacaagctcctatagcttccctttttcccccataccttccatcaattatagcttcagtatgtgaaaacccagctcttcaaccatataggcttcaacaagcaatcgcagcaagcaacatacctttatcgcccttgttgtgtcaacaatcgccagccctatctttggtgctgtcattggtacaaaccaatatggcacatcagctgctgcaactcgtgctacctgtgatcaaccaagttgctctggcaaccctt

SEQ ID NO: 23690 - DNA, 237 bp, Zea mays
  Clone ID: LIB3152-043-P1-K1-D12
cttgcaacagctacaattgcttcttttctacccacagaatgtggcaaacattgttgccttcttacaacaacaacaattgttgccatttagccaacatgctttgacgaatcctaccaccttattgcaaccgcccaccattggtggtgccatcttctagattttttatgatttatactgtaataataaagttctcatgctgatatgtgcgacctctcagtaataaagtattagagatct

SEQ ID NO: 23691 - DNA, 376 bp, Zea mays
  Clone ID: LIB3152-043-P1-K1-D2
aagcaacatagaagggggaatccagtgtcaacaatagagccacaatggagaccaagatattttccctccttatgctccttgctctttctacatgtgttgctaacgcgacaattttccctcaatgctcacaagctcctatagcttccctttttcccccatacctttcatcaattatagcttcagtatgtgaaaacccagctcttcaaccatataggctttaacaagcaatcgcagcaagcaacatacctttattggccttgttgtgtcaacaatcgccagccctatctttggtgcagtcattggtacaaaccatcagggcacaacagctgcagcaactcgtgctacctgtgatcaaccaagtagctctggcaaacct

SEQ ID NO: 23692 - DNA, 327 bp, Zea mays
  Clone ID: LIB3152-043-P1-K1-D3
acctgggtcaattagtagctctggcaaaccttttccctactcttcgaacaacaatttttcattcaacactgtctacactgaaccctgctgttatttgcagacaactattaccatttagccagctagctactgcctctctaacaacaacaactttttcattaaccaattggcgactgaccccgttgttatttgcagcagcaaatactaccaccatttaccagctagctacagcaagccggcttcctcttgacacaacaacagtgctgcgttctaccagcagttgcggctaaccccgcaccctttacaactacaacattgtgccctttg

SEQ ID NO: 23693 - DNA, 219 bp, Zea mays
  Clone ID: LIB3152-043-P1-K1-D4
tgccgttctacctgcacgctatgccttacgctggcaccctcttacaactgcaacaattgctgccattcaaccaacttgatttgtgaaacttaactgtgttgtaccatcaacgcatgattggtggtgccctgtttgagattgcttatgagttatagttcaataatgaagttttttggatgatggttgtggcgtcccagaaataagaaagcacatttctag

SEQ ID NO: 23694 - DNA, 214 bp, Zea mays
  Clone ID: LIB3152-043-P1-K1-D5
ccacatagtacgaccacgccagttttataaacacactatgataggcgctcaagatacaccttcacaacatgggtcccgaatatattaccccccctggccctcttggcccttttagggagcgcaacaattgcgtccattattccacagggctcacttgctctcagggccattattccacagtttccccccaccaagttactttcaatggggcttt

SEQ ID NO: 23695 - DNA, 360 bp, Zea mays
  Clone ID: LIB3152-043-P1-K1-D7
gcacaatagtgtaccaacaatggcagtcaaaatattttgcctccttatgctccttggtctttctgcaagtgctgctacggcgaccattttcccgaaatgctcgcaagctcctatagcttcccttcttcccccgtacctctcaccagcggtgtcttcggtatgtgaaaacccaattcttcaaccctacaggatccaacaggcaatcacagctggcatcttacctttatcacccttgttcctccaacaatcatcagccctattacatcagttacctttggtgcatttattggcacaaaacattatggcacaacatctacaacaacttgtgctagcaaaccttgctgcctactctcagcaaca

SEQ ID NO: 23696 - DNA, 384 bp, Zea mays
  Clone ID: LIB3152-043-P1-K1-E1
gaccaacccttccggattcggtgtatcttcgcccccggcgattgcgctatcctcccgaccacccggcggtgccggtacgccggtaaggcaggttgccagaccccgcgaccccgatcccgatcggtcgctggcgaggcggcgtgacctaccccggcttatcctttcaagccagacggtctggctgctgtgcatccccgttttggcggctaccttacctctggcaaggcaatcccccctcacccctggcaagcacgggagaacatggagagtgcttcagatgtacaaatgcaacatcgtgctgaagattccgagactacaattgagatcaaaatcaagacattggattcccagacatacaatttgcgtgtgaataaatgtgtgcca

SEQ ID NO: 23697 - DNA, 376 bp, Zea mays
  Clone ID: LIB3152-043-P1-K1-E10
cagaaacacaccaagcgaagcacattatcaacaacctaacaacaatggctaccaagatattatccctccttgcgcttcttgcgctttttgcgagcgcaacaaatgcgttcattattccacaatgctcacttgctccaagttccattattacacagttcctcccaccagttacttcaatgggcttcgaacacccagctgtgcaagcctataggctacaacaagcaattgcggcgagcgtcttacaacaaccaatttcccagttgcaacaacaatccttggcacatctaacaatacaaaccatcgcaacgcaacagcaacaacaattcctaccagcactgagccacctagccatggtgaaccctgccgtctacttgca

SEQ ID NO: 23698 - DNA, 373 bp, Zea mays
  Clone ID: LIB3152-043-P1-K1-E11
cagcaacaacaacaactgcaacagtttctgccagcgcttagtcaactagccatggtgaaccctgccgcctacctacaacagcaacaactgctttcatctagcccgctcgctgtggccaatgcacctacatacctgcaacaagaattgttgcaacagattgtaccagctctaactcagctagctgtggcaaaccctgttgcctacttgcaacagctgcttccattcaaccaactaactatgtcgaactctgttgcgtacctacaacagcgacaacagttacttaatccattggcagtggctaacccattggtcgctgccttcctacagcagcaacaattgctgccatacaaccggttctctttgatgaatcctg

SEQ ID NO: 23699 - DNA, 379 bp, Zea mays
  Clone ID: LIB3152-043-P1-K1-E2
tccggatcgtcggacaaaacaacatggaaattggtatcggtctcgtcgggtgcctggctctgtcagctgccaacgcctctgcaatgcaaatgccctgcccctgggcggggctgcagggcttgtaccgggcttgggcccggctgacgacaattatgggcgccggcgggctgtacccctacgcggagtacctgaggcagccgcagtgcaacccgcttgcggcggcgccctactacgccgggtgtgggcagacgagcgccatgtaccagccgctccggcaacagtgctgccagcagcagatgaggatgatggacgtgcagtccgtcgcgcagcagctgcagatgatgatgcagcttgagcgtgccgctgccgccagcagcag

SEQ ID NO: 23700 - DNA, 372 bp, Zea mays
  Clone ID: LIB3152-043-P1-K1-E3
agccttccattgggacccacctggcaccatagaatgctcaatagggtaccaacaatggcagccaaaatattttgcctccttatgctccttggtctttctgcaagtgctgctacggcgaccattttcccgcaatgctcgcaagctcctatagcttcccttcttcccccgtacctctcaccagcggtgtcttcggtatgtgaaaacccaattcttcaaccctacaggatccaacaggcaatcgcagctggcatcttacctttatcacccttgttcctccaacaatcatcagccctattacaacagttacctttggtgcatttattggcacaaaacatcagggcacaacaactacaacaacttgtgctagcaaac

SEQ ID NO: 23701 - DNA, 377 bp, Zea mays
  Clone ID: LIB3152-043-P1-K1-E6
caacaatggcgaccaagatattttcccttcttatgctccttgctctttctgcatgtggtgctaacgcgacaattttccctcaatgctcacaagctcctatagcttcccttcttcccccataccttccatcaatgatagcttcagtatgtgaaaacccagctcttcaaccctataggctccaacaagcaatcgcagcaagcaacatacctttatcacccttgtttcaacaatcgccagccctatctttggtgcagtcattggtacaaaccatcatggcacagcagctgcagcaactcgtgctacctgtgatcaaccaagtagctctggcaaacctttctccctactcttagcaacaacaatttcttccattcaaccaa

SEQ ID NO: 23702 - DNA, 372 bp, Zea mays
  Clone ID: LIB3152-043-P1-K1-E7
ctagcaacatacatagtgaagtacactagcaacatcttagcaccaatgggagccaagatttttgccctccttgccctccttgctctttcagcaagcgctgctacctcgacttttattccacaatgctcacaacaatacctctctccggcgacagccgtgggatttcaatacccaactatacaatcctacatggtacaagaggccatccaagcaagcatcttacggtcattagcattaaccctccaacaaccatatgctctattgcaacagccatccttagtgcatctgtatctccaaagaatcgcggcacaacaactacaacaacagttgctaccaacaatcaatcaagtagttgcagcgaaccttgctgct

SEQ ID NO: 23703 - DNA, 372 bp, Zea mays
  Clone ID: LIB3152-043-P1-K1-E8
gcattcagaaacacaccaagcgttgttcactagcaacaacctaacaacaatggctaccaagatattagccctccttgcgcttcttgcccttttagtgagcgcaacaaatgcgttcattattccacagtgctcacttgctcctagtgccattattccacagttcctcccaccagttacttcaatgggcttcgaacatccagccgtgcaagcctacaggctacaactagcgcttgcggcgagcgtcttacaacaaccaattgcccaattgcaacaacaatccttggcacatctaaacctacaaaccatcgcaacgcaacagcaacaacagtttctgccatcactgagccacctagccgtggtgaaccctgtcgc

SEQ ID NO: 23704 - DNA, 229 bp, Zea mays
  Clone ID: LIB3152-043-P1-K1-E9
ggcgatgtgcggcctgcagcagccttctccatgcccctacgctgctgccggcggtgtcccccactgaagaaactatgtgctgtagtatagccgctggctagctagctagttgagtcatttagcggcgatgattgagtaataatgtgtcacgcatcaccatgggtggcagtgtcagtgtgagcaatgacctgtatgaacaattgaaatgaaaagaaaaaagtattgttcc

SEQ ID NO: 23705 - DNA, 374 bp, Zea mays
  Clone ID: LIB3152-043-P1-K1-F10
ccaactagcaacatagaaagcactttagtgtaccaacaatggcagccaaaatattttgcctccttatgctccttggtctttctgcaagtgctgctacggcgaccattttcccgcaatgctcgcaagctcctatagcttcccttcttcccccgtacctctcaccagcagtgtcttcggtatgtgaaaacccaattcttcaaccctacaggatccaacaggcaatcgcagctggcatcttacctttatcacccttgttcctccaacaatcatcagccctattacaacagttacctttggtgcatttattggcacaaaacatcagggcacaacaactacaacaacttgtgctagcaaaccttgctgcctactctcag

SEQ ID NO: 23706 - DNA, 373 bp, Zea mays
  Clone ID: LIB3152-043-P1-K1-F11
tggactgcttgctccctgttgaccattgggtattctgaaccatcgagccatggctgccaagctgactcgcctccacagtcttcgcgaacgccttggtgccaccttctcctcccatcccaatgaactgatagcactcttttccaggtatgttcaccagggcaagggaatgcttcagcgccatcagctgcttgcggagtttgatgccctgtttgatagtgacaaggagaagtatgcaccctttgaagacattcttcgtgctgctcaggaagcaattgtgctccccccatgggttgcacttgctatcaggccaaggcctggtgtctgggattacattcgggtgaatgtaagtgagctggctgtggaggagctgagt

SEQ ID NO: 23707 - DNA, 370 bp, Zea mays
  Clone ID: LIB3152-043-P1-K1-F12
tcggtgacggcgcctctcgtgcgcattttgcgcacgagcaccttctactacgtggcgctgtcgggcatctcggtgggcgggcagccgctggccatcccggcatccgccttcgccatggacgccacgtcgggctcgggcggcgtcatcgtggactccggcaccgccgtgacgcggctccagtccgccgcctacgcggcgctccgcgacgccttcgtccagggcgcgccgtcgctgccccggacctccggggtgtcgctgttcgacacgtgctacgacctgtctgaccggacgagcgtggaggtgcccgcggtgtcgctgcggttcgagggcggtggcgcgctgcggctgccggcgaagaactacctgatcc

SEQ ID NO: 23708 - DNA, 375 bp, Zea mays
  Clone ID: LIB3152-043-P1-K1-F2
acccttccggactgctgtgaggacggaggtggtgactacgacggatttggcaggcaagcacgagggccgcgttatccgatccatgcccatgccgcgtaagaccttgttcggttaatcctattagccatgaattagataggattggaaaaaattaagaaagagtttgacttaaaaaaaaaaaaaaagggcggccgccctttttttttttttttctttaaaaccaaaactttattatgatgcatatattattggtcataccacacatgataatgtgtgtcgtcttactgcattattacatatatagatagagagggatggatagaggagatttcccaaatatcatgaatcagtagtagggcggaatggcagcggaga

SEQ ID NO: 23709 - DNA, 386 bp, Zea mays
  Clone ID: LIB3152-043-P1-K1-F4
agccttcggtcaagatttaaaaaacacaccaagcgaatcgcactagcaacaacctaacaacaatggctaccaagatattagccctccttgcgcttcttgcccttttagtgagcgcaacaaatgcgttcattattccacagtgctcacttgctcctagtgccattattccacagttcctcccaccagttacttcaatgggcttcgaacatccagccgtgcaagcctacaggctacaactagcgcttgcggcgagcgtcttacaacaaccaattgcccaattgcaacaacaatccttggcacatctaaacctacaaaccatcgcaacgcaacagcaacaacagtttctgccatcactgagccacctagccgtggtgaaccctgtcgcc

SEQ ID NO: 23710 - DNA, 328 bp, Zea mays
  Clone ID: LIB3152-043-P1-K1-F7
gcagtgttctaccaacaaccacagttgttgccgttctaccagcacgttgcgcctaacgctggcaccctcttacaactgcaacaattgctgccattcaaccaacttgctttgacaaacccagcagtgttctaccaacaacccatcattggtggtgccctcttttagatttcttatgagttatagttcaataataaagttttttatctgatgtttgtggcttcccagaaataagaaagtacatttctagaacaaatatttataaaaaaaaaaaaagaaaaaagtaaactgtaatttaatatataaagttttgtataaaaaaacaataaaa

SEQ ID NO: 23711 - DNA, 146 bp, Zea mays
  Clone ID: LIB3152-043-P1-K1-F9
gtccgtgcgaccattttcgaaagttttttgctcctatagctttccaattttccggggaccttttaccagcggtggctcccgtatgtgaaaacccaattctttaaccctacaggatccaacaggcattcacagctggcatcttacct

SEQ ID NO: 23712 - DNA, 374 bp, Zea mays
  Clone ID: LIB3152-043-P1-K1-G10
agcattcagaaacacaccaagcgattcgcactagcaacaacctaacaacaatggctaccaagatattagccctccttgcgcttcttgcccttttagtgagcgcaacaaatgcgttcattattccacagtgctcacttgctcctagtgccattattccacagttcctcccaccagttacttcaatgggcttcgaacatccagccgtgcaagcctacaggctacaactagcgcttgcggcgagcgtcttacaacaaccaattgcccaattgcaacaacaatccttggcacatctaaacctacaaaccatcgcaacgcaacagcaacaacagtttctgccatcactgagccacctagccgtggtgaaccctgtcgcc

SEQ ID NO: 23713 - DNA, 255 bp, Zea mays
  unsure at all n locations
  Clone ID: LIB3152-043-P1-K1-G12
gggagacccactcttcctaatcaactacaactactnagagcttttatataccttgcagactactcttagcaacgggggatttttttattcaaccaacctgcttgcattgaactttgctgcttatttgcaacaacaactaccattcattcagctagctgttgactacctccaactatttctttcattcaaccaattggaagtcatatacctattcatattattcacatcagctacagcttccaccattcagtcaga

SEQ ID NO: 23714 - DNA, 363 bp, Zea mays
  Clone ID: LIB3152-043-P1-K1-G2
caacaatggcgaccaagatattttccctccttatgctccttgctctttctgcatgtgttgctaacgcgacaattttccctcaatgctcacaagctcctatagcttcccttctttccccataccttccatcaatgatagcttcagtatgtgaaaacccagctcttcaaccctataggctccaacaagcaatcgcagcaagcaacatacctttatcacccttgttttaacaatcgccagccctatctttggtgcagtcattggtacaaaccatcagggcacagcagctgcagcaactcgtgctacctgtgatcaaccaagtagctctggcaaacctttctccctactctcagcaacaacaatttc

SEQ ID NO: 23715 - DNA, 363 bp, Zea mays
  Clone ID: LIB3152-043-P1-K1-G3
gaccattagctttatctactccagagcgcagaagaacccgatcgacaccatgagggtgttgctcgttgccctcgctctcctggctctcgctgcgagcgccaccttcacgcatacaagcggcggatgcggctgtcagccaccgtcgccggttcatctaccgccggcggtgcatctgccacctccggttcacctgccacctccggtgcatagtccaccgccggttcacctgccgccgccggtccacctgtcaccggcggtccatgtgccgccgccggttcatctgccgtcgtcaccatgccactaccctactcaaccgccccggcctcaggctcattctcagccacacccatgcccgtgccaaca

SEQ ID NO: 23716 - DNA, 386 bp, Zea mays
  Clone ID: LIB3152-043-P1-K1-G4
agccttccgaaccataaaaagcacaatagtgtacctacaatggcagccaaaatattttgcctccttatgctccttggtctttctgcaagtgctgctacggcgaccattttcccgaaatgctcgcaagctcctatagcttcccttcttcccccgtacctctcaccagcggtgtcttcggtatgtgaaaacccaattcttcaaccctacaggatccaacaggcaatcacagctggcatcttacctttatcacccttgttcctccaacaatcatcagccctattacatcagttacctttggtgcatttattggcacaaaacatcagggcacaacaactacaacaacttgtgctagcaaaccttgctgcctactctcagcaacagcagtt

SEQ ID NO: 23717 - DNA, 378 bp, Zea mays
  Clone ID: LIB3152-043-P1-K1-G5
gtcgcacatatctactatactatactctaggaagcaaggacaccaccgccatggcagccaagatgcttgcattgttcgctctcctagctctttgtgcaagcgccactagtgcgacccatattccagggcacttgccaccagtcatgccattgggtaccatgaacccatgcatgcagtactgcatgatgcaacaggggcttgccagcttgatggcgtgtccgtccctgatgctgcagcaactgttggccttaccgcttcagacgatgccagtgatgatgccacagatgatgacgcctaacatgatgtcaccattgatgatgccgagcatgatgtcaccaatggtcttgccgagcatgatgtcgcaaatgatgatgccac

SEQ ID NO: 23718 - DNA, 371 bp, Zea mays
  unsure at all n locations
  Clone ID: LIB3152-043-P1-K1-G6
cttcagaccattagctttatctactccagagcgcagaagaacccgatcgacaccatgagggtgttgctcgttgccctcgctctcctggctctcgctgcgagcgccacctccacgcatacaagcggcggctgcggctgccagccaccgccgccggttcatctaccgtcgccggtgcatctgccacctccggttcacctgccaccttcggtgcatcttccaccgtcggtccacctgccgccgccggtccacctgccaccgccggtccatgtgccgncgtcggttcatctgccgccggcaccatgccactaccctacttaaccgccccggccttagccttatccccagccacacccatgcccgtgccaacagcc

SEQ ID NO: 23719 - DNA, 337 bp, Zea mays
  Clone ID: LIB3152-043-P1-K1-G7
cagcattcataaacacaccaagcttttcgcactagcaacaacctaacaacaatggcttccatgatattatcctttcttgcgcttcttgcccttttagtgagcgcaacaaatgctttcattattccacagtgcttacttgctcctagtgccattatttcacattttcttccacctgttactttattgggcctttgtacatctcagccttgcaagcctacaggcttcaactagcgcttgctgctagttttttacatcatctaattgcccaattgcatcattctatccttggctcatttaaacctactatccatcgtatctcaacatctatatcattttt

SEQ ID NO: 23720 - DNA, 374 bp, Zea mays
  Clone ID: LIB3152-043-P1-K1-G8
caacaactacaacaacttgtgctaggaaaccttgctgcctactctcagcaacagcagtttcttccattcaaccaactggctgcattgaactctgctgcttatttgcaacaacaactaccattcagtcagctagctgctgcctacccccagcaatttcttccattcaaccaactggcagcattgaactctgctgcttatttacaacagcaacagctaccaccattcagccagctagctgatgtgagccctgttgccttcttgacacaacaacagttgttgccgttctacctgcacgctgcgcctaacgctggcaccctcttacaactgcaacaattgctgccattcaaccaacttgctttgacaaacccaacagc

SEQ ID NO: 23721 - DNA, 372 bp, Zea mays
  Clone ID: LIB3152-043-P1-K1-G9
ccaactagcaacatagaaagcacaatagtgtaccaacaatggcagccaaaatattttgcttccttatgctccttggtctttctgcaagtgctgctaccgcaaccattttcccacaatgctcacaagctcctatagcttcctttcttcccccatacctctcaccagcggtgtcttcagtatgtgaaaacccaattcttcaaccctacaggatccaacaggcaatcgcagcaggcatcttacctttatcacccttgttcctccaacaaccgtcagccctattacagcagttacctttggtgcatttgttggcacaaaacatcaaggcacaacaactacaacaacttgtgctaggaaaccttgctgcctactctc

SEQ ID NO: 23722 - DNA, 302 bp, Zea mays
  Clone ID: LIB3152-043-P1-K1-H1
acccttccggccgtttgctccgggctgctgttctgcgcctccacaggctttggccttgtgtttaagtttaagcttacctcagccatggtaagagagtcccataacattgggtattggcatgtgcttggaagtaaccccatggcactgtctcaagctggagcatgcagcgtgtgatgagagtcagaggagccgtgaagaacaacgtcttagtccctgggctgacagctaagctgacggagagagatcaccatgatttgtctgggagttggaccaccagtctactgactgcatgagccctgaca

SEQ ID NO: 23723 - DNA, 219 bp, Zea mays
  Clone ID: LIB3152-043-P1-K1-H10
agcattcataaacacaccaagttttttctcactatcaacaacctaacaacaaggggtgccaatatattagccctccttgcgcttcttgcccttttagtgagcgcaacaaatgcgttcattattccacagagctcacttgctcctagtgccattatttcacagtttctcccaccagttacttcaatgggcttcatacattcagccgtgcaagcctacatg

SEQ ID NO: 23724 - DNA, 154 bp, Zea mays
  Clone ID: LIB3152-043-P1-K1-H2
tcgttgcaacatagaaaggacaattgtgtttctaccatggccggccaaatattttggttgcctattcttcctgggctttctggaagggcttggtccggaaccatttttccacaatggtcacaagctcctatagcttcctttttttccccatacc

SEQ ID NO: 23725 - DNA, 379 bp, Zea mays
  Clone ID: LIB3152-043-P1-K1-H5
gtttcaggggattatggaatgcttatcatcaagttttccaagaaatgttggaaaagagtacatctgttcaagcaagttggtgtccggaaaccaatggatccccaaaaggatttgctgctacgtctcttgttcgacaaactccagtcgatgccacaagttcactgatgtggcatgccccatgagcccagttattcgaaaaaggttacgctggagatgctttgctgcaagtttgaacttagaagatggccctgcaccctctgactcgacgtcatcttcatcagagcagactactgatgctgatggaactactaatggtgatgtatctgaaaatctgctttctcgaaagccgagctctgatgagttaatggctcttttggct

SEQ ID NO: 23726 - DNA, 115 bp, Zea mays
  Clone ID: LIB3152-043-P1-K1-H6
caacatctactatacttcaccctggtagcaagggcaccacccgccttggagccaagaagcttgcattggtcgctctcctaactctttgtgcaagcgccactagtgcgacccatat

SEQ ID NO: 23727 - DNA, 367 bp, Zea mays
  Clone ID: LIB3152-043-P1-K1-H7
gtgcatttgttggcacaaaacatttttgcacaacaactacaacaacttgtgctaggaaaccttgctgcctactctcagcaacagcagtttcttccattcaaccaactggctgcattgaactctgctgcttatttgcaacaacaactaccattcagtcagctagctgctgcctacccccagcaatttcttccattcaaccaactggcagcattgaactctgctgcttatttacaacagcaacagctaccaccattcagccagctagctgatgtgagccctgttgccttcttgacacaacaacagttgttgccgttctacctgcacgctgtgcctaacgctggcaccctcttacaactgcaacaattgc

SEQ ID NO: 23728 - DNA, 371 bp, Zea mays
  Clone ID: LIB3152-043-P1-K1-H8
cagcggtgtcttcggtatgtgaaatctccaattcttcaaccctacaggatccaacaggcaatcgcagctggcatcttacctttatcacccttgttcctccaacaatcatcagccctattacagcagttacctttggtgcatttattggcacaaaacatcagggcacaacaactacaacaacttgtgctagcaaaccttgctgcctactctcagcaacagcagtttcttccattcaaccaactagctgcattgaactctgcttcttatttgcaacaacaacaactaccattcagccagctacctgttgcctacccccagcaatttcttccattcaaccaactggcagcattgaactcttctgcttatttaca

SEQ ID NO: 23729 - DNA, 358 bp, Zea mays
  unsure at all n locations
  Clone ID: LIB3152-043-P1-K1-H9
gcgacgactccgttcaccgccgttcttctacgcgagacgcccaggtcttcgccaggggacgatcatacgggttagagaggaagaaattgcaaccgaaacaatggcggcagattccggcgctcgcagacaaccaagcttcaccaaggncgaccagctgcgccctggaacccactgccacaacctcattctcaaggttgttgactccaagatggtcgtccagagaggccgcgagggagggccccatggtagacagatgatgattgctgagtgcttggttggggatgaaaccggcttcattgtcttcactgcaagaaaccgtctaatggattgaatttaggccttgaacaactgtttaact

SEQ ID NO: 23730 - DNA, 388 bp, Zea mays
  Clone ID: LIB3152-044-P1-K1-A1
cccacgcgtccgaaagcggcagtgtttatagaggatcgtcgaacagaacagcatgaagatggtcatcgttctcgtcgtgtgcctggctctgtcagctgccagcgcctctgcaatgcagatgccctgcccctgcgcggggctgcagggcttgtacggcgctggcgccggcctgacgacgatgatgggcgccggcgggctgtacccctacgcggagtacctgaggcagccgcagtgcagcccgctggcggcggcgccctactacgccgggtgtgggcagacgagcgccatgtaccagccgctccggcaacagtgctgccagcagcagatgaggatgatggacgtgcagtccgtcgcgcaacagcttgagatgatgatgcaacttgagcgt

SEQ ID NO: 23731 - DNA, 381 bp, Zea mays
  Clone ID: LIB3152-044-P1-K1-A10
cccagttcccctccgatcctcgttttcgacgcatccacccgaaccctcctgcgcgacctcgccgtcgccgcagccttggccatgtcgatcttcgagtataatgggtccgccgtggtggcgatggtggggaagaactgtttcgcgatcgccagcgaccggcggctgggcgtgcagcttcagaccatcgcgacggacttccagcgggtgttcaaggtccacgacaagctttacatcggcctctctgggctcgccactgacgcccagacgctgtaccagcggttggtgttcaggcacaagctgtatcagctgcgggaggagagggacatgaagcccgagacctttgccagccttgtctctgcgctcctctacgagaagagattc

SEQ ID NO: 23732 - DNA, 391 bp, Zea mays
  Clone ID: LIB3152-044-P1-K1-A11
agaccaactagcaacatagaatgtacaatagtgtaccaacaatggcagccaaaatattttgcttccttatgctccttggtctttctgcaagtgctgctaccgcaaccattttcccacaatgctcacaagctcctatagcttcctttcttcccccatacctctcaccagcggtgtcttcagtatgtgaaaacccaattcttcaaccctacaggatccaacaggcaatcgcagcaggcatcttacctttatcacccttgttcctccaacaaccgtcagccctattacagcaggtacctttggtgcatttgttggcacaaaacatcaaggcacaacaactacaacaacttgtgctaggaaaccttgctgcctactctcagcaacagcagttttc

SEQ ID NO: 23733 - DNA, 379 bp, Zea mays
  Clone ID: LIB3152-044-P1-K1-A12
gttggttgaatggaagaaattgtctacattgaaccgtgctgcttatttgcagcaacaactattaccattcagccagctagctactgcctactctcagcaacaacaacttcttccatttaaccaattggccgcactgaaccccgctgcttatttgcagcagcaaatactactaccatttagccagctagctgcagcaagccgtgcttccttcttgacacagcaacagttgctgcctttctaccagcagtttgcggctaaccccgcaaccctcttacaactacaacaattgttgccctttgtccaacttgctttgacaaacccagcagcctcctaccaacaacacatcattgggggtgccctcttttagattgcttattag

SEQ ID NO: 23734 - DNA, 388 bp, Zea mays
  Clone ID: LIB3152-044-P1-K1-A2
aactagcaacatagaaagcacaatatttgtccaacaatggcagccaaaatatttggcctccttatgctccttggtctttctgcaagtgctgctacggcgaccattttcccacaatgctcacaagctcctatagcttcccttcttcccccgtacctctcaccagcggtgtcttcggtatgtgaaaacccaattcttcaaccctataggatccaacaggcaatcgcagctggcatcttacctttatcacccttgttcctccaacaatcatcagccctattacagcagttacctttggtgcatttattggcacaaaacatcagggcacaacaactacaacaacttgtgctagcaaaccttgctgcctactctcagcaacaacagtttcttt

SEQ ID NO: 23735 - DNA, 417 bp, Zea mays
  unsure at all n locations
  Clone ID: LIB3152-044-P1-K1-A3
accgggcgggacccacgcagtccggcactagcaancttcctaacaacaatgtgttatccaagatattagccctccttgcgctcctttccctttcagtgagcgcaacaactgcattcattattccacaatgctcacttgctcctaatgccattattccacagttcctcccatcagttacatcaatgggcatcgaacaccctattgtgcaagcctataggctacaacaagcgcttgcggcgagcgtcttacaacaaccgtttgcccaattacaacaacaatccttggcacatctaaccatacaaaccatcgcaacacaactagagcaacagtttgtgcccgcattgagccaactagccgcagtgaaccctgtctcctacttgcaacagcaactgcttgcatccaacccacttgctctgg

SEQ ID NO: 23736 - DNA, 393 bp, Zea mays
  Clone ID: LIB3152-044-P1-K1-A4
cagaaacacaccaagcgaagcgcactagcaacaacctaacaacaatggctaccaagatattatccctccttgcgcttcttgcgctttttgcgagcgcaacaaatgcgtccattattccacaatgctcacttgctcctagttccattattccacagttcctcccaccagttacttcaatggccttcgaacacccagctgtgcaagcctataggctacaacaagcgattgcggcgagcgtcttacaacaaccaattgcccaattgcaacaacaatccttggcacatctaacaatacaaaccatcgcaacgcaacagcaacaacagttcctaccagcactgagccacctagccatggtgaaccctgtcgcctacttgcaacagcagctgcttgcat

SEQ ID NO: 23737 - DNA, 375 bp, Zea mays
  Clone ID: LIB3152-044-P1-K1-A5
cacacatccttattaacacaccattctaagcgcacatgttacaacctaacaacaatggctaccaggagattattccttcttgcgcttcttgcgcttattgcgagcgcaacaaatgcgttcattattccacaatgctcacttgctcctagttccattattccacagttcctcgtaccatgtactttcaatggcctacgaacacccagctgttcaagcctataggctacaacaagcgattgcagttagcgttttacaacaaccaattgcccaattgcaactacaattcttggcacatctaacattacaaaccattgtaacgcaacatcaacaacaagttctaccagcactgatccatcttatccatggtgaaccctg

SEQ ID NO: 23738 - DNA, 311 bp, Zea mays
  Clone ID: LIB3152-044-P1-K1-A6
gaccattagctttatctactccagatcgcagaagaacccgatcgacaccatgagggtgttgctcgttgccctcgctctcctggctcccgctgcgagcgccacctccacgcatacaagcggcggctgcggctgccagccaccgccgccggttcatctaccgccgccggtgcatctgccaccttcggttcacctgccacctccggtgcatctcccaccgccgtgccacctgccgccggttcatatgtcgtcgccaccatgccactaccctacttaacttgcccgatcttagtctcatacccagcctcacccat

SEQ ID NO: 23739 - DNA, 386 bp, Zea mays
  Clone ID: LIB3152-044-P1-K1-A7
cagcattcagaaacacaccaattttttcgcactagcaacaacctaacaacaatggctaccaagatattagccctccttgcgcttcttgcccttttagtgagcgcaacaaatgcgttcattattccacagtgctcacttgctcctagtgccattattccacagttcctcccaccagttacttcaatgggcttcgaacatccagccgtgcaagcctacaggctacaactagcgcttgcggcgagcgtcttacaacaaccaattgcccaattgcaacaacaatccttggcacatctaaacctacaaaccatcgcaacgcaacagcaacaacagtttctgccatcactgagccacctagccgtggtgaaccctgtcgcctacttgcaaca

SEQ ID NO: 23740 - DNA, 371 bp, Zea mays
  Clone ID: LIB3152-044-P1-K1-A8
caactagcaacatagaaagcacatatgtgtaccaacaatggcagctaaaatattttgcctccttatgctccttggtctttctgcaagtgctgctacggcgaccattttcccacaatgctcacaagctcctatagcttcccttcttcccccgtacctctcaccaacggtgtcttcggtatgtgaaaacccaattcttcaaccctacaggatccaacaggcaatcgcagctggcatcttacctttatcacccttgttcctccaacaatcatcagccctattacagcagttacctttggtgcatttattggcacaaaacatcagggcacaacaactacaacaacttgtgctagcaaaccttgctgcctactttc

SEQ ID NO: 23741 - DNA, 388 bp, Zea mays
  Clone ID: LIB3152-044-P1-K1-B1
ttcgacccgtctccggccaaatcgacgttcagagctgcaaattgacccatctccgcgctgacctccgcttgtgcctgccgaggagcgccgaagttacgcccttctcgtgaagacatccttgataaacctgatggctatcgcggagagctgtgttgatgcggtggtcatggagatggtggctgtctactgcggtggcctctatgccgccaagccagagcttgctgcccgccgcattgaggccatcggctttcaggttgggcaccagctctctgagagatataccatggagcgtccacgatttagtgatcatcttgaagcaatcaaatttatctgcaaagacttctggtcagagctgttcaagaaacagattgacaatctgaaaacaaat

SEQ ID NO: 23742 - DNA, 392 bp, Zea mays
  Clone ID: LIB3152-044-P1-K1-B10
attttgagcattcagaaacacaccttgcgaagcgcactagcaacaacctaacaacaatggctaccaagatattatccctccttgcgcttcttgcgctttttgcgagcgcaacaaatgcgtccattattccacaatgctcacttgctcctagttccattattccacagttcctcccaccagttacttcaatggccttcgaacacccagctgtgcaagcctataggctacaacaagcgattgcggcgagcgtcttacaacaaccaattgcccaattgcaacaacaatccttggcacatctaacaatacaaaccatcgcaacgcaacagcaacaacagttcctaccagcactgagccacctagccatggtgaaccctgtcgcctacttgcaacag

SEQ ID NO: 23743 - DNA, 385 bp, Zea mays
  unsure at all n locations
  Clone ID: LIB3152-044-P1-K1-B12
ccaactagcaacatagaaagcttattagtgtaccaacaatggcagccaaaatattttgcctccttatgctccttggtctttctgcaagtgctgctacggcgaccattttcccgcaatgctcgcaagctcctatagcttcccttcttcccccgtacctctcaccagcggtgtcttcggtatgtgaaaacccaattcttcaaccctacaggatccaacaggcaatcgcagctggcatcttacctttatcacccttgttccttcaacaatnatnagccctattacaacagttacctttggtgcatttattggcacaaaacatcagggcacaacaactacaacaacttgtgctagcaaaccttgctgcctactctcagcaacagcaagt

SEQ ID NO: 23744 - DNA, 389 bp, Zea mays
  Clone ID: LIB3152-044-P1-K1-B2
gtccgtcgcgcagcagctgcagatgatgatgcagcttgagcgtgccgctgccgccagcagcagcctgtacgagccagctctgatgcagcagcagcagcagctgctggcagcccagggtctcaaccccatggccatgatgatggcgcagaacatgccggccatgggtggactctaccagtaccagtaccagctgcccagctaccgcaccaacccctgtggcgtctccgctgccattccgccctactactgattcatgatatttgggaaatctcctctatccatccctctctatctatatatgtaataatgcagtaagacgacacacattatcatgtgtggtatgaccaataatatatgcatcataataaagttttggttttaaagaatta

SEQ ID NO: 23745 - DNA, 389 bp, Zea mays
  Clone ID: LIB3152-044-P1-K1-B3
agcattcagaaacacaccaagcgaatcacattagcaacaacctaacaacaatggctaccaagatattatccctccttgcgcttcttgcgctttttgcgagcgcaacaaatgcgttcattattccacaatgctcacttgctccaagttccattattacacagttcctcccaccagttacttcaatgggcttcgaacacccagctgtgcaagcctataggctacaacaagcaattgcggcgagcgtcttacaacaaccaatttcccagttgcaacaacaatccttggcacatctaacaatacaaaccatcgcaacgcaacagcaacaacaattcctaccagcactgagccacctagccatggtgaaccctgccgcctacttgcaacagcag

SEQ ID NO: 23746 - DNA, 387 bp, Zea mays
  Clone ID: LIB3152-044-P1-K1-B4
agaccattagctttatctactccagagcgcagaagaacccgatcgacaccatgagggtgttgctcgttgccctcgctctcctggctctcgctgcgagcgccacctccacgcatacaagcggcggctgcggctgccagccaccgccgccggttcatctaccgccgccggtgcatctgccacctccggttcacctgccacctccggtgcatctcccaccgccggtccacctgccgccgccggtccacctgccaccgccggtccatgtgccgccgccggttcatctgccgccgccaccatgccactaccctactcaaccgccccggcctcagcctcatccccagccacacccatgcccgtgccaacagccgcatccaagcccgtgccagc

SEQ ID NO: 23747 - DNA, 236 bp, Zea mays
  Clone ID: LIB3152-044-P1-K1-B5
atttacacctttatattaacaacccgatcgacaccatgggagcgttgttcgtagccctcggggtcctaactatcactgtgagcgccacctgcacgcatacaagcggaggctgaggttgcaatgctcagtcgccggtacatctaccgttgccggagcatatgccacctatggctcacttgccaactacggagcatatcccaccggcagatcacctgccttcgccggtccacccgcca

SEQ ID NO: 23748 - DNA, 394 bp, Zea mays
  Clone ID: LIB3152-044-P1-K1-B6
tagaaacacaccattcgaagcgcatttttaacaacctaacaacaatggctaccaagatattatccctccttgcgcttcttgcgctttttgcgagcgcaacaaatgcgtccattattccacaatgctcacttgctcctagttccattattccacagttcctcccaccagttacttcaatggccttcgaacacccagctgtgcaagcctataggctacaacaagcgattgcggcgagcgtcttacaacaaccaattgcccaattgcaacaacaatccttggcacatctaacaatacaaaccatcgcaacgcaacagcaacaacagttcctaccagcactgagccacctagccatggtgaaccctgtcgcctacttgcaacagcagctgcttgcatc

SEQ ID NO: 23749 - DNA, 365 bp, Zea mays
  Clone ID: LIB3152-044-P1-K1-B7
cttttagattacatatgagatgtactcaacaatggtgccctcataccggcatgtgtttcctagaaataatcaatatattgattgagatttatcttgataaaaaaaaaaaaaaaaaaaaaaaaaaaaaaaaaaaaaaaaaaaaaaaaaaaaaaaaaaaaaaataaaaaaaaaaaaaaaaaaaaaaaaaccaaaaaaaaaaaaaaaaaaaaaaaaaaaaaaaaaaaaaaaaaaaaaaaaataaaggggaaaaaaaaaaaaaaaaaataaaaaaaaaaaaataaaataaaaggggggcctctttaaaaagaaaaaattttttttcccggtattattccaatataattttttttattggggtcccaaaa

SEQ ID NO: 23750 - DNA, 386 bp, Zea mays
  Clone ID: LIB3152-044-P1-K1-B8
attttcagcattcagaaacacattttgcgaagcgcactagcaacaacctaacaacaatggctaccaagatattagccctccttgcgcttcttgcccttttagtgagcgcaacaaatgcgttcattattccacagtgctcacttgctcctagtgccattattccacagttcctcccaccagttacttcaatgggcttcgaacatccagccgtgcaagcctacaggctacaactagcgcttgcggcgagcgtcttacaacaaccaattgcccaattgcaacaacaatccttggcacatctaaacctacaaaccatcgcaacgcaacagcaacaacagtttctgccatcactgagccacctagccgtggtgaaccctgtcgcctacttg

SEQ ID NO: 23751 - DNA, 386 bp, Zea mays
  Clone ID: LIB3152-044-P1-K1-B9
gcacaatagtgtaccaacaatgtcttccaaaatattttgcctccttatgctccttggtctttctgcaagtgctgctacggcgaccattttcccgcaatgctcgcaagctcctatagcttcccttcttcccccgtacctctcaccagcggtgtcttcggtatgtgaaaacccaattcttcaaccctacaggatccaacaggcaatcgcagctggcatcttacctttatcacccttgttcctccaacaatcatcagccctattacaacagttacctttggtgcatttattggcacaaaacatcagggcacaacaactacaacaacttgtgctagcaaaccttgctgcctactcttagcaacagcagtttcttccattcaaccaactag

SEQ ID NO: 23752 - DNA, 388 bp, Zea mays
  Clone ID: LIB3152-044-P1-K1-C1
actagcaacatagaaagcacaatattgtaccaacaatggcagccaaaatattttgcctccttatgctccttggtctttctgcaagtgctgctacggcgaccattttcccacaatgctcacaagctcctatagcttcccttcttcccccgtacctctcaccagcggtgtcttcggtatgtgaaaacccaattcttcaaccctataggatccaacaggcaatcgcagctggcatcttacctttatcacccttgttcctccaacaatcatcagccctattacagcagttacctttggtgcatttattggcacaaaacatcagggcacaacaactacaacaacttgtgctagcaaaccttgctgcctactctcagcaacaacagtttcttcc

SEQ ID NO: 23753 - DNA, 342 bp, Zea mays
  Clone ID: LIB3152-044-P1-K1-C10
caactagcaacatagaaagcatttttttgtaccaacaatggcagccaaaatattttgcctccttatgctccttggtctttctgcaagtgctgctacggcgaccattttcccgcaatgctcgcaagctcctatagcttcccttcttcccccgtacctctcaccagcggtgtcttcggtatgtgaaaacccaattcttcaaccctacaggatccaacaggcaatcgcagctggcatcttacctttatcacccttgttcctccaacaatcatcagccctattacaacagttacctttggtgcatttattggcacaaaacatcatggcacaacaacttcaacaact

SEQ ID NO: 23754 - DNA, 284 bp, Zea mays
  Clone ID: LIB3152-044-P1-K1-C11
cccacgcgtccgcccacgcgtttgtctactcgttcgattgagaccaactagcaacatataaagcacaatagtgtaccaacaatggcagccaaaatattctgcttccttatgctccttggtctttctgcaagtgatgctaccgtaaccatttttccacaatgctcacaagctcctatagtttcccttcatctctcatacttctcatcagcggtgtctttaatgtgtgaaaactccaattgtcaaccctacaggatccaacaggcaattcgctccaggcattttac

SEQ ID NO: 23755 - DNA, 387 bp, Zea mays
  Clone ID: LIB3152-044-P1-K1-C12
gaatccagtagcaacaatagagcatcaatggagaccaagatattttccctccttatgctccttgctctttctacatgtgttgctaacgcgacaattttccctcaatgctcacaagctcctatagcttccctttttcccccataccttccatcaattatagcttcagtatgtgaaaacccagctcttcaaccatataggcttcaacaagcaatcgcagcaagcaacatacctttatcgcccttgttgtgtcaacaatcgccagccctatctttggtgcagtcattggtacaaaccatcagggcacaacagctgcagcaactcgtgctacctgtgatcaaccaagtggctacactgaaccctgctgcttattttcagcaacaactatta

SEQ ID NO: 23756 - DNA, 386 bp, Zea mays
  Clone ID: LIB3152-044-P1-K1-C2
cgaagggaaccgaaagtacataaagtgcgtctacgtatataacaagatcgatgttgttggtatcgatgacgttgataatcttgctcggcaaccaaattcactagtgatcagctgcaatttgaagctgaacttggacagactacttgcgagaatgtgggaggagatgggcctagtgagggtgtatacaaagccacagggccagcagcctgatttcacagaccccgttgttctttccaccgacagaggtggctgcacggtggaggacttctgcaatcatatccatagaagtttgctcaaggacgtgaagtatgtgctcgtatggggaaccagcgcaaggcactatccacagcattgcggcctcggccatggccttaacgacgaggatg

SEQ ID NO: 23757 - DNA, 389 bp, Zea mays
  Clone ID: LIB3152-044-P1-K1-C3
cccacgcgtccggagcgtcttacaacaaccaattgcccaattgcaacaacaatccttgccacatctaacaatacaagccatcacaacgcaacagcaacaacagttcctaccagcactgagccacctagccatggtgaaccctgccgcctacttgcaagagcagctgcttgcatccaacccacttgctctggcgaacgtagttgcaaaccagcaacaacaacagctacaacagtttctgccaacgctcagtcaactagccatggtgaaccctgccgcctacgtacaacaacaacaactgctttcatctagcccgctcgctgtgggcaatgcacctacatacctgcaacaacaattgttgcaacagattgtaccagctctgactcaactag

SEQ ID NO: 23758 - DNA, 391 bp, Zea mays
  Clone ID: LIB3152-044-P1-K1-C4
gagcattcagaaacacaccaagcgatgctcactagcaacaacctaacaacaatggctaccaagatattatccctccttgcgcttcttgcgctttttgcgagcgcaacaaatgcgtccattattccacaatgctcacttgctcctagttccattattccacagttcctcccaccagttacttcaatggccttcgaacacccagctgtgcaagcctataggctacaacaagcgattgcggcgagcgtcttacaacaaccaattgcccaattgcaacaacaatccttggcacatctaacaatacaaaccatcgcaacgcaacagcaacaacagttcctaccagcactgagccacctagccatggtgaaccctgtcgcctacttgcaacagcagc

SEQ ID NO: 23759 - DNA, 391 bp, Zea mays
  Clone ID: LIB3152-044-P1-K1-C5
gcaaggatctgggaaatcagctcattctatagggaaataatgtggggaagaatacaaagaagacggggcggatatactatactcaagtggccactacaccagaaggtgaaccggtgatgatgggtacgttcctcgtggccagtcaccctgtaattattctttttgattctggtgcttcacatacatttattagcaagacatttgtggagcaacatcacatttcatgtcatgaattcaaagaagggtttaaaattcattcacttgggggacacatttttactagagaagtggcctatcaagtgccagtaacaatggccgaacggaactttcctgctaacatgattgttctgaaaggccagggtatagatgtaattttgggtatgaattggtt

SEQ ID NO: 23760 - DNA, 290 bp, Zea mays
  Clone ID: LIB3152-044-P1-K1-C6
ggcacaacagctactaccattttatttttaggttgtgggaaacattaatgccttcttgcaacagcaacaattgctaccattctacccacagaatgtggcaaacattgttgccttcttacaacaacaacaattgttgccatttagccaacatgctttgacgaatcctaccaccttattgcaaccgcccaccattggtggtgccatcttctagattttttatgatttatactgtaataataaagttttcatgctgatatgtgcgacctctcaaattattatatattaatttt

SEQ ID NO: 23761 - DNA, 209 bp, Zea mays
  Clone ID: LIB3152-044-P1-K1-C7
cccacgcttacgaaaggcctaaatcgttgagtatgcgaaccgcggggagactgggatgcattctcaactatcgtgactacagaagtgcaacaaggctcgcaatttagtactatactattgtatatatcatcttgtgtcattttcccaaagaatcattgatatacctaatcacaataatatacacttaaattagcatctgcaaccacaac

SEQ ID NO: 23762 - DNA, 387 bp, Zea mays
  Clone ID: LIB3152-044-P1-K1-C8
gtactgcgagaagtcctacctttgttgcgaacagaagcaagtggtgctggacagcatgaaagattacgctgtcagggccctggtcaacgctgtcgaccatcttggcacagtggcctacaagctgacggacctatacgaagagcaggcttcagaaataacaaccctcgagttgaaagtagcatgcttgaaccagcaagtccgtacctgccagacatacacggacaaagaaggcctcaggcaacagcagatgatgggggctgccagaagacaccataaccattacatcgtaccatatgcgggaaacaaaagaatgcaggccttctctgttacgcaagccgatgctgatttggacccaacgccaaggcctttctcttcagcaaggaccct

SEQ ID NO: 23763 - DNA, 322 bp, Zea mays
  Clone ID: LIB3152-044-P1-K1-C9
gcaattagctcatcgactccatattggagaactcgacaccatgaaggtgctgatcgttgcccttgctctcctggcgctcgctgcgagcgccgcctccagtacaagcggcggctgtggctgccagacaccaccgtttcatctaccgccttcgttctatatgccgcctccgttctatctgccgccgcagcagcagccgcagccatggcaataccccactcaaccaccgcagctaagcccgtgccagcagttcggatcctgcggcgtctgcagcgtctgcagcccgttcctgggccagtgcgtagagatcctgaggcaccagtgc

SEQ ID NO: 23764 - DNA, 389 bp, Zea mays
  Clone ID: LIB3152-044-P1-K1-D1
cggacgcgtgggctagcaacatagttagcacaatagtgtaccaacaatggcagccaaaatattttgcttccttatgctccttggtctttctgcaagtgttgctaccgcaaccattttcccacaatgctcacaagctcctatagcttcccttcttcccccatacctctcaccagcggtgtcttcaatgtgtgaaaacccaattgttcaaccctacaggatccaacaggcaatcgcaacaggcatcttaccattatcacccttgttcctccaacaaccgtcagccctattacagcagttacctttggtccatttggtggcacaaaacatcagggcacaacaactacaacaacttgtgctagcaaaccttgctgcatactctcagcaacatc

SEQ ID NO: 23765 - DNA, 386 bp, Zea mays
  Clone ID: LIB3152-044-P1-K1-D11
cacaccaagcgaagcgcactatctttaacctaacaacaatggctaccaagatattatccctccttgcgcttcttgcgctttttgcgagcgcaacaaatgcgtccattattccacaatgctcacttgctcctagttccattattccacagttcctcccaccagttacttcaatggccttcgaacacccagctgtgcaagcctataggctacaacaagcgattgcggcgagcgtcttacaacaaccaattgcccaattgcaacaacaatccttggcacatctaacaatacaaaccatcgcaacgcaacagcaacaacagttcctaccagcactgagccacctagccatggtgaaccctgtcgcctacttgcaacagcagctgcttgca

SEQ ID NO: 23766 - DNA, 363 bp, Zea mays
  Clone ID: LIB3152-044-P1-K1-D12
cggacgcgtgggtgcgagcgccacttccacgcatacaagcggcggctgcggctgccagccaccgccgccggttcatctaccgccgccggtgcatctgccacctccggttcacctgccacctccggtgcatctcccaccgccggtccacctgccgccgccggtccacctgccaccgccggtccatgtgccgtcgccggttcatctgccgccgccaccatgccactaccctactcaaccgccccggcctcagccttatccccagccacacccatgcccgtgccaacagccgcatccaagcccgtgccagctgcagggaacctgcggcgttggcagcaccccgatcctgggccagtgcgtctagtt

SEQ ID NO: 23767 - DNA, 365 bp, Zea mays
  Clone ID: LIB3152-044-P1-K1-D2
cggacgcgtgggcttgcatcctattttgttagtctaatggaccgacaatggcgggcaagaatattttgcttccttatgctccttaggctccctgcaagctgggctaccgcacccattgtcccacattgctcacaagcttctacattctcatttcgttgcgcatacttatactcagcggtgtacttaatgcactatagcccaagctcataactttacaagtttcatcaagccctaaggtcgtgcagcttacctttggtaatgctgtttctccaatcacgtttgatacaaccaaagtacttgacagttattgcagcagcaatgatgtcatgttcttaggcaaattgagccacaatacattcaccaaa

SEQ ID NO: 23768 - DNA, 301 bp, Zea mays
  Clone ID: LIB3152-044-P1-K1-D3
cggacgcgtgggcggacgcgtgggttctgcttggtcctccagtccatcctgcagcagcagccgcaaagcggccaggtcgcggggctgttggcggcgcagatagcgcagcaactgacggcgatgtgcggcctgcagcagccgactccatgcccctacgctgctgccggcggtgtcccccactgaagaaactatgtgctgtagtatagccgctggctagctagctagttgagtcatttagcggcgatgattgagaaataatgtgttacgcatcaccatgggtggcaatgtcagtgtgagcatt

SEQ ID NO: 23769 - DNA, 340 bp, Zea mays
  Clone ID: LIB3152-044-P1-K1-D4
ccagctctgactcagctagctgtggtaaaccctactgcctacttgcaacagttgcttccattcaaccaactggctgtgtcgaactctgctgtgtacctacaacagcgacaacagttacttaatccactagcagtggctaacccattggtcgctaacttcctgcagcagcaacaattgctgccatacaaccagttctctttgatgaaccctgccttgcagcaacccatcgttggaggtgccatcttttagattacatatgagatgtactcaacaatggtgccctcataccggcatgtgtttcctagaaataatcaatatattgattgagatttatcttgat

SEQ ID NO: 23770 - DNA, 146 bp, Zea mays
  Clone ID: LIB3152-044-P1-K1-D5
ctgctttcccctcgctccagagtccataccccagacgagcggttggagcttcggcgtgcggtttacattcccttgcctgctctgatggccgtcgacgaagaggcgatcgagattcttccgcagcaacagcagcagcagccgccgtc

SEQ ID NO: 23771 - DNA, 394 bp, Zea mays
  Clone ID: LIB3152-044-P1-K1-D6
cattagctttatctactccagagcgcatatagaacccgatcgacaccatgagggtgttgctcgttgccctcgctctcctggctctcgctgcgagcgccacctccacgcatacaagcggcggctgcggctgccagccaccgccgccggttcatctaccgccgccggtgcatctgccacctccggttcacctgccacctccggtgcatctcccaccgccggtccacctgccgccgccggtccacctgccaccgccggtccatgtgccgccgccggttcatctgccgccgccaccatgccactaccctactcaaccgccccggcctcagcctcatccccagccacacccatgcccgtgccaacagccgcattcaagcccgtgccagctgcagggaac

SEQ ID NO: 23772 - DNA, 389 bp, Zea mays
  Clone ID: LIB3152-044-P1-K1-D7
cacgaacagagccatgagcaacacttaggacagagccatgagcaacaacatcaacaacaattccagggtcatgacaagcagcaacaaccacaacagcctcagcaatatcagcagggccaggaaaaatcacaacagcaacaatgtcattgccaggagcagcaacagactacaaggtgcagctataactactatagcagtagctcaaatctaaaaaattgtcatgaattcctaaggcagcagtgcagccctttggtaatgccttttctccaatcacgtttgatacaaccaagtagctgccaggtattgcagcaacaatgttgtcatgatcttaggcagattgagccacaatacattcaccaagcaatctacaacatggttcaatccataat

SEQ ID NO: 23773 - DNA, 362 bp, Zea mays
  Clone ID: LIB3152-044-P1-K1-D8
gcaacatagaaagcacaatagtgttccaacaatggcagctaaaatattttgcctccttatgctccttggtctttctgcaagtgctgctacggcgaccattttcccacaatgctcacaagctcctatagcttcccttcttcccccgtacctctcaccaacggcgtcttcggtatgtgaaaacccaattcttcaaccctacaggatccaacaggcaatcgcagctggcatcttacctttatcacccttgttcctccaacaatcatcagccctattacagcagctacctttggtgcatctattggcacaaaacatttgggcacaacaactacaacaacttgtgctagcaaaccttgctgcctact

SEQ ID NO: 23774 - DNA, 136 bp, Zea mays
  Clone ID: LIB3152-044-P1-K1-D9
gaccaacttgcagcataggatgctcattagtgtaccaacaaaggcagtcaaaatatttagcctccttatgctggtcggtcttactgcaagtgctgataccgtgaccattttccggcaccgctagctagctcctata

SEQ ID NO: 23775 - DNA, 379 bp, Zea mays; identical to SEQ ID NO: 22333
  Clone ID: LIB3152-044-P1-K1-E1

SEQ ID NO: 23776 - DNA, 386 bp, Zea mays
  Clone ID: LIB3152-044-P1-K1-E10
caactagcaacatagaaagcacaatattgtaccaacaatggcagccaaaatattttgcctccttatgctccttggtatttctgcaagtgctgctacggcgaccattttcccgcaatgctcacaagctcctatagcttcccttcttcccccgtacctctcaccagcggtgtcttcggtatgtgaaaacccaattcttcaaccctacaggatccaacaggcaatcgcagctggcatcttacctttatcacccttgttcctccaacaatcatcagccctattacagcagttacctttggtgcatttattggcacaaaacatcagggcacaacaactacaacaacttgtgctagcaaaccttgctgcctactctcagcaacagcagtttc

SEQ ID NO: 23777 - DNA, 390 bp, Zea mays
  Clone ID: LIB3152-044-P1-K1-E11
ccattagctttatctactccagagcgcagaagaacccgatcgacaccatgagggtgttgctcgttgccctcgctctcctggctctcgctgcgagcgccacctccacgcatacaagcggcggctgcggctgccagccaccgccgccggtccatgtgccgccgccggttcatctgccgccgccaccatgccactaccctactcaaccgccccggcctcagcctcatccccagccacacccatgcccgtgccaacagccgcatccaagcccgtgccagctgcagggaacctgcggcgttggcagcaccccgatcctgggccagtgcgtcgagttcctgaggcatcagtgcagcccgacggcgacgccctactgctcgccttagtgccagtcgt

SEQ ID NO: 23778 - DNA, 393 bp, Zea mays
  Clone ID: LIB3152-044-P1-K1-E12
gagcattcagaaacacaccaagcgaagcgcactagcaacgacctaacaacaatggctaccaagatattagccctccttgcgcttcttgccctttttgtgagcgcaacaaatgcgttcattattccacaatgctcacttgctcctagtgccattattccacagttcctcccaccagttacttcaatgggcttcgaacacctagctgtgcaagccaacatgcaacaacaagcgcttgcggcgagcgtcttacaacaaccaattgcccaattgcaacaacaatccttgccacatctaacaatacaagccatcacaacgcaacagcaacaacagttcctaccagcactgagccacctagccatggtgaaccctgccgcctacttgcaagagcagctg

SEQ ID NO: 23779 - DNA, 390 bp, Zea mays
  Clone ID: LIB3152-044-P1-K1-E2
gcgtgacaaagccgctgcaaatgattctatatacctcaatcctcaagctcatgagagagtacttggaatcattctgggaggcggggtttggactcgagcgctcctacctacacagaaatgccacaatgctcacaacaacatcctgtgtccaccgtcagccgatggatatcaatgcccaactatgcaatcctacatggcacatgaggccatacaagcaagcatcttacagtcattagcattaaccctccaacaaccatatgctctattgcaacagccatccttagtgcatctgtatcttcaaagaatcgcggcacaacaactacaacaacagttgctaccaacaatcaatcaaggtgttgcagcgaaccttgctggttaccttcagcaaca

SEQ ID NO: 23780 - DNA, 391 bp, Zea mays
  Clone ID: LIB3152-044-P1-K1-E3
agaccaactagcaacatagaaagcttaatagtgtaccaacaatggcagccaaaatattttgcctccttatgctccttggtctttctgcaagtgctgctacggcgaccattttcccgcaatgctcgcaagctcctatagcttcccttcttcccccgtacctctcaccagcggtgtcttcggtatgtgaaaacccaattcttcaaccctacaggatccaacaggcaatcgcagctggcatcttacctttatcacccttgttcctccaacaatcatcagccctattacaacagttacctttggtgcatttattggcacaaaacatcagggcacaacaactacaacaacttgtgctagcaaaccttgctgcctactctcagcaacagcagtttct

SEQ ID NO: 23781 - DNA, 393 bp, Zea mays
  Clone ID: LIB3152-044-P1-K1-E4
tagcaacatagaaagcacaatagtgtaccaacaatggcagctaaaatattttgcctccttatgctccttggtctttctgcaagtgctgctacggcgaccattttcccacaatgctcacaagctcctatagcttcccttcttcccccgtacctctcaccaacggtgtcttcggtatgtgaaaacccaattcttcaaccctacaggatccaacaggcaatcgcagctggcatcttacctttatcacccttgttcctccaacaatcatcagccctattacagcagttacctttggtgcatttattggcacaaaacatcagggcacaacaactacaacaacttgtgctagcaaaccttgctgcctactctcagcaacagcagtttcttccattcaac

SEQ ID NO: 23782 - DNA, 382 bp, Zea mays
  Clone ID: LIB3152-044-P1-K1-E5
gacgctcagtggtcagtccctaaacgactccatggatttcatgtgaggagtacaatatcagggccagtattaccatcgtataccgactgcagttcagcactgtaaagatagctaaatgtacaatgtatgcatgtgcctcattggtagtgtgtagttagctcttctttgtatcattattctgaaaatggcctcgtgtatgtcaaaatgatgtctcttttcttctttgctggtttctggagtaatgtgttagactgactagctacctttaacaatttatgtaaatctttagcttttttttaatggtggaaggttcttatacatacatacatacctgttaacttatttacagagtggagtttataagattttaccattttttaac

SEQ ID NO: 23783 - DNA, 391 bp, Zea mays
  Clone ID: LIB3152-044-P1-K1-E6
tttcagcattcagaaacacaccaagttttgcgcactagcaacaacctaacaacaatggctaccaagatattagccctccttgcgcttcttgcccttttagtgagcgcaacaaatgcgttcattattccacagtgctcacttgctcctagtgccattattccacagttccttccaccagttacttcaatgggcttcgaacatccagccgtgcaagcctacaggctacaactagcgcttgcggcgagcgtcttacaacaaccaattgcccaattgcaacaacaattcttggcacatctaaacctacaaaccatcgcaacgcaacagcaacaacagtttttgccatcactgagccacctagccgtggtgaaccctggcgcctacttgcaacagc

SEQ ID NO: 23784 - DNA, 386 bp, Zea mays
  Clone ID: LIB3152-044-P1-K1-E7
gcaacatagaaagcacaatagttttccaacaatggcagccaaaatattttgcctgcttatgctccttggtatttctgcaagtgctgctacggcgaccattttcccgcaatgctcacaagctcctatagcttcccttcttcccccgtacctctcaccagcggtgtcttcggtatgtgaaaacccaattcttcaaccctacaggatccaacaggcaatcgcagctggcatcttacctttatcacccttgttcctccaacaatcatcagccctattacagcagttacccttggtgcatttattggcacaaaacattagggcacaacaaactacaacaacttgtgctagcaaaccttgctgcctactttcagcaccagctatttctttca

SEQ ID NO: 23785 - DNA, 313 bp, Zea mays
  Clone ID: LIB3152-044-P1-K1-E8
caaagcggcagtgcgtagagaggatcgtcgaacagaacagcatgaagatggtcatcgttctcgtcgtgtgcctggctctgtcagctgccagcgcctctgcaatgcagatgccctgcccctgcgcggggctgcagggcttgtacggcgctggcgccggcctgacgacgatgatgggcgccggcgggctgtacccctacgcggagtacctgaggcagccgcagtgcagcccgctggcggcggcgccctactacgccgggtgtgggcagacgagcgccatgtaccagccgttccggcaacagtgcttccagcagca

SEQ ID NO: 23786 - DNA, 384 bp, Zea mays
  Clone ID: LIB3152-044-P1-K1-F1
cagaaacacaccaagcgaagcgcactatcaacaacctaacaacaatggctaccaagatattatccctccttgcgcttcttgcgctttttgcgagcgcaacaaatgcgtccattattccacaatgctcacttgctcctagttccattattccacagttcctcccaccagttacttcaatggccttcgaacacccagctgtgcaagcctataggctacaacaagcgattgcggcgagcgtcttacaacaaccaattgcccaattgcaacaacaatccttggcacatctaacaatacaaaccatcgcaacgcaacagcaacaacagttcctaccagcactgagccacctagccatggtgaaccctgtcgcctacttgcaacagcagc

SEQ ID NO: 23787 - DNA, 343 bp, Zea mays
  unsure at all n locations
  Clone ID: LIB3152-044-P1-K1-F11
aagcgcgggtgctggtgcgggtaagtcntgccagacctagcgctgccgactgccgagctgggtgcgggcgcgaggagtcgacgggaagacaagggtgaggaattatgagtgaaacagggcacactgtacaagtcactaacctctcgagcagagtatctgaaagtgatcttcatgagttcttttcgttctctggtcctattgagcatatagaacttatcagatcagaaggatacggtgccactgcttatgtgacattcaaggaacgctttgccttggaaactgcagtattgctcagtggggctactattgtggatcagtcagtttgcataaccttattgttgac

SEQ ID NO: 23788 - DNA, 392 bp, Zea mays
  Clone ID: LIB3152-044-P1-K1-F12
ggacgtcagcctagcaattagctcatcgactccagattggagaactcgacaccatgaaggtgctgatcgttgcccttgctctcctggcgctcgctgcgagcgccgcctccagtacaagcggcggctgtggctgccagacaccaccgtttcatctaccgcctccgttctatatgccgcctccgttctatctgccgccgcagcagcagccgcagccatggcaataccccactcaaccaccgcagctaagcccgtgccagcagttcggatcctgcggcgtcggcagcgtcggcagcccgttcctgggccagtgcgtcgagttcctgaggcaccagtgcagcccggcggcgacgccctacggctcggcacagtgccaggcgcttcaacagcagtgc

SEQ ID NO: 23789 - DNA, 385 bp, Zea mays
  Clone ID: LIB3152-044-P1-K1-F2
cggacgcgtgggttttgagcattcataaacacaccaagcgaagctacctagcaacgacttaacaacaatggctaccaagatattagccctccttgcgcttcttgccctttttgtgagcgcaacaaatgcgttcattattccacaatgctcacttgctcctagtgccattataccacagttcctccgaccagttacttcaatgggcttcgaacacctagctgtgcaagcctacaggctacaacaagcgcttgcggcgagcgtcttacaacaaccaattaaccaattgcaacaacaatccttggcacatctaaccatacaaaccatcgcaacacaacagcaacaacagttcctaccagcactgagccaactagatgtggtgaaccct

SEQ ID NO: 23790 - DNA, 336 bp, Zea mays
  Clone ID: LIB3152-044-P1-K1-F3
attgagaccaacaagcaacatagaaagtggaatccagtagcaacaatagagcaacaatggagaccaagatattttccctccttatgctccttgctctttctacatgtgttgctaacgcgacaattttccctcaatgctcacaagctcctatagcttccctttttcccccataccttccatcaattatagcttcagtatgtgaaaacccagctcttcaaccatataggcttcaacaagcaatcgcagcaagcaacatacctttatcgcccttgttgtgtcaacaatcgccagccctatctttggtgcagtcattggtacaaaccattagggcacaac

SEQ ID NO: 23791 - DNA, 383 bp, Zea mays
  Clone ID: LIB3152-044-P1-K1-F4
cagcaaagcggcagtgcgtagagaggatcgtcgaacagaacagcatgaagatggtcatcgttctcgtcgtgtgcctggctctgtcagctgccagcgcctctgcaatgcagatgccctgcccctgcgcggggctgcagggcttgtacggcgctggcgccggcctgacgacgatgatgggcgccggcgggctgtacccctacgcggagtacctgaagcagccgcagtgcagcccgctggcggcggcgccctactacgccgggtgtgggcagacgagcgccatgtaccagccgctccggcaacagtgctgccagcagcagatgaggatgatggacgtgcagtccgtcgcgcaacagctgcagatgatgatgcagcttgagcgtgcc

SEQ ID NO: 23792 - DNA, 393 bp, Zea mays
  Clone ID: LIB3152-044-P1-K1-F5
attcaaaaacacacaaagggaagtgtactagcaacttcctaacaacaatggctaccaagatattagccctccttgcgctcctttccctttcagtgagcgcaacaactgcattcattattccacaatgctcacttgctcctaatgccattattccacagttcctcccatcagttacatcaatgggcatcgaacaccctattgtgcaagcctataggctacaacaagcgcttgcggcgagcgtcttacaacaaccgtttgcccaattacaacaacaatccttggcacatctaaccatacaaaccatcgcaacacaactagagcaacagtttgtgcccgcattgagccaactagccgcagtgaaccctgtctcctacttgcaacagcaactgcttg

SEQ ID NO: 23793 - DNA, 394 bp, Zea mays
  Clone ID: LIB3152-044-P1-K1-F6
ctgacattggttcatcttctactgtgtactgttcataatattacctgggctaggttttgaccggcccattcttgttgggccgacaaggattgtggaaggaatgggcggcccaggtttgcagctctgagtctctgaccgatcgctggcgtgcgtgcttgtgcttgtgcagggagtgacgaagcagatcggtggctcagtgcacgagctggcggcgaaggtggacgagtacgcccgcggcatgatcagcgggcccggctcctcgctcttcgaggagctcggtctctactacatcggccccgtcgacggccacaacatcgacgacctcatcaccatcctcaacgacgtcaagagcaccaagaccaccggccccgtcctcatccacgtcgtcaccgag

SEQ ID NO: 23794 - DNA, 247 bp, Zea mays
  Clone ID: LIB3152-044-P1-K1-F7
gtcctcccatccacaagttcttagtttttgcgagattgagatccggctggggacagaccgacagaggaaggtgaattgtgggaaagaggacagaaaaatggggattggagatggatcttcaaatgggaaccagcaaccggtgcataaggaaatacgagatgagaccacaccactttttccagtcaaggtggaggaggacgaggggtttcatgagttcaatggagctttattctgtggtgcagttatt

SEQ ID NO: 23795 - DNA, 390 bp, Zea mays
  Clone ID: LIB3152-044-P1-K1-F8
aaagcacaatagtgtaccaacaatttcagccaaaatattttgcctccttatgctccttggtctttctgcaagtgctgctacggcgaccattttcccacaatgctcacaagctcctatagcttcccttcttcccccgtacctctcaccagcggtgtcttcggtatgtgaaaacccaattcttcaaccctataggatccaacaggcaatcgcagctggcatcttacctttatcacccttgttcctccaacaatcatcagccctattacagcagttacctttggtgcatttattggcacaaaacatcagggcacaacaactacaacaacttgtgctagcaaaccttgctgcctactctcagcaacaacagtttcttccattcaaccaactagg

SEQ ID NO: 23796 - DNA, 388 bp, Zea mays
  Clone ID: LIB3152-044-P1-K1-F9
acaagcaacatagaaagtggaatctattagcaacaatagagcaacaatggagaccaagatattttccctccttatgctccttgctctttctacatgtgttgctaacgcgacaattttccctcaatgctcacaagctcctatagcttccctttttcccccataccttccatcaattatagcttcagtatgtgaaaacccagctcttcaaccatataggcttcaacaagcaatcgcagcaagcaacatacctttatcgcccttgttgtgtcaacaatcgccagccctatctttggtgcagtcattggtacaaaccatcagggcacaacagctgcagcaactcgtgctacctgtgatcaaccaagtagctctggcaaacctttcttcctac

SEQ ID NO: 23797 - DNA, 388 bp, Zea mays
  Clone ID: LIB3152-044-P1-K1-G10
aacatagaaagcacaatagtgtactaacaatggcagccaaaatattttgcctccttatgctccttggtctttctgcaagtgctgctacggcgaccattttcccgcaatgctcgcaagctcctatagcttcccttcttcccccgtacctctcaccagcggtgtcttcggtatgtgaaaacccaattcttcaaccctacaggatccaacaggcaatcgcagctggcatcttacctttatcacccttgttcctccaacaatcatcagccctattacaacagttacctttggtgcatttattggcacaaaacatcagggcacaacaactacaacaacttgtgctagcaaaccttgctgcctactctcagcaacagcagtttcttccattcaa

SEQ ID NO: 23798 - DNA, 314 bp, Zea mays
  unsure at all n locations
  Clone ID: LIB3152-044-P1-K1-G11
aagcaacatagaaagtggaancctgnttcatcaatagagcaacaatggagaccaggatattttccctccttatgctccttgctctttctacatgtgttgctaacgcgacaattttccctcaatgctcacaagctcctatagcttccctttttcccccataccttccatcaatttatagcttcagtatgtgaaaacccagctcttcaaccatataggctttaacatgcaatctcattaagcaacatacctttatcgcccttgttgtgtcaacaatcgccagtcctatttttggtgcagttctttggttcaaacca

SEQ ID NO: 23799 - DNA, 395 bp, Zea mays
  Clone ID: LIB3152-044-P1-K1-G12
attttgagcattcagaaacactcttatcgaagcgcactagcaacgacctaacaacaatggctaccaagatattagccctccttgcgcttcttgccctttttgtgagcgcaacaaatgcgttcattattccacaatgctcacttgctcctagtgccattattccacagttcctcccaccagttacttcaatgggcttcgaacacctagctgtgcaagccaacatgcaacaacaagcgcttgcggcgagcgtcttacaacaaccaattgcccaattgcaacaacaatccttgccacatctaacaatacaagccatcacaacgcaacagcaacaacagttcctaccagcactgaaccacctagccatggtgaaccctgccgcctacttgcaagagcag

SEQ ID NO: 23800 - DNA, 391 bp, Zea mays
  Clone ID: LIB3152-044-P1-K1-G2
cagaaacacaccaagcgaagcgcactatcaacaacctaacaacaatggctaccaagatattatccctccttgcgcttcttgcgctttttgcgagcgcaacaaatgcgtccattattccacaatgctcacttgctcctagttccattattccacagttcctcccaccagttacttcaatggccttcgaacacccagctgcgcaagcctataggctacaacaagcgattgcggcgagcgtcttacaacaaccaattgcccaattgcaacaacaatccttggcacatctaacaatacaaaccatcgcaacgcaacagcaacaacagttcctaccagcactgagccacctagccatggtgaaccctgtcgcctacttgcaacagcagctgcttgc

SEQ ID NO: 23801 - DNA, 389 bp, Zea mays
  unsure at all n locations
  Clone ID: LIB3152-044-P1-K1-G3
attagctttatctactccagagcgcatatagaacccgatcgacaccatgagggtgttgctcgttgccctcgctctcctggctctcgctgcgagcgccacctccacgcatacaagcggcggctgcggctgccagccaccgccgccggttcatctaccgccgccggtgcatctgccacctccggttcacctgccacctccggtgcatctcccaccgccggtccacctgccgccgccggtccacctgccaccgccggtccatgtgccgccgccggttcatctgccgncgncaccatgccactaccctactcaaccgccccggccttagcctcatcctcagccacacccatgcccgtgccaacagccgcattcaagcccgtgccagctgcagg

SEQ ID NO: 23802 - DNA, 390 bp, Zea mays
  Clone ID: LIB3152-044-P1-K1-G4
ctcacaagctcctatagctgcccttttttccccataccttccatcaatgaccgcttcagtatgtgaaaacccagcccttcaaccctacaggctccaacaagcaatcgcaacaagcaacttacctttatcacccctgttctttcaacaatcgccagccctatctttggtgcagtcattggtacaaaccatcagggcacaacagctgcagcaactcgtgctaccagtgatcagccaagtagctctggcaaacctttctccctactctcagcaacaacaatttcttccattcaaccaactgtctacactgaaccctgctgcttatttgcagcaacaacaactactaccattcagccagctagctactgcctactctcagcagcaacaatttct

SEQ ID NO: 23803 - DNA, 388 bp, Zea mays
  Clone ID: LIB3152-044-P1-K1-G5
attagctcatcgactccagattggataactcgacaccatgaaggtgctgatcgttgcccttgctctcctggcgctcgctgcgagcgccgcctccagtacaagcggcggctgtggctgccagacaccaccgtttcatctaccgcctccgttctatatgccgcctccgttctatctgccgccgcagcagcagccgcagccatggcaataccccactcaaccaccgcagctaagcccgtgccagcagttcggatcctgcggcgtcggcagcgtcggcagcccgttcctgggccagtgcgtcgagttcctgaggcaccagtgcagcccggcggcgacgccctacggctcgccacagtgccaggcgctgcagcagcagtgctgccaccagatc

SEQ ID NO: 23804 - DNA, 394 bp, Zea mays
  Clone ID: LIB3152-044-P1-K1-G6
cggacgcgtgggcaacaagcaacatataaagtggaatccagtagcaacaatagagcaacaatggagaccaagatattttccctccttatgctccttgctctttctacatgtgttgctaacgcgacaattttccctcaatgctcacaagctcctatagcttccctttttcccccataccttccatcaattatagcttcagtatgtgaaaacccagctcttcaaccatataggcttcaacaagcaatcgcagcaagcaacatacctttatcgcccttgttgtgtcaacaatcgccagccctatctttggtgcagtcattggtacaaaccatcagggcacaacagctgcagcaactcgtgctacctgtgatcaaccaagtagctctggcaaaccttt

SEQ ID NO: 23805 - DNA, 389 bp, Zea mays
  Clone ID: LIB3152-044-P1-K1-G7
aagcgaagcacattagcaacaacctaacaacaatggctaccaagatattatccctccttgcgcttcttgcgctttttgcgagcgcaacaaatgcgttcattattccacaatgctcacttgctccaagttccattattacacagttcctcccaccagttacttcaatgggcttcgaacacccagctgtgcaagcctataggctacaacaagcaattgcggcgagcgtcttacaacaaccaatttcccagttgcaacaacaatccttggcacatctaacaatacaaaccatcgcaacgcaacagcaacaacaattcctaccagcactgagccacctagccatggtgaaccctgccgcctacttgcaacagcagttgcttgcatcaaaccca

SEQ ID NO: 23806 - DNA, 387 bp, Zea mays
  Clone ID: LIB3152-044-P1-K1-G8
attttcagcattcagaaacacattttgcgaagcgcactagcaacaacctaacaacaatggctaccaagatattagccctccttgcgcttcttgcccttttagtgagcgcaacaaatgcgttcattattccacagtgctcacttgctcctagtgccattattccacagttcctcccaccagttacttcaatgggcttcgaacatccagccgtgcaagcctacaggctacaactagcgcttgcggcgagcgtcttacaacaaccaattgcccaattgcaacaacaatccttggcacatctaaacctacaaaccattcgaacgcaacagcaacaacagtttctgccatcactgagccacctagccgtggtgaaccctgtcgcctacttgc

SEQ ID NO: 23807 - DNA, 160 bp, Zea mays
  Clone ID: LIB3152-044-P1-K1-G9
gcggctttgtcacgcttaggattatattgttcggactagataagacccctgggcgattaatcgtgccaagcctgcagcgccatcggtagccaactatagactgattgatattcctgtcagcaatagtctcaacagcaacatatccaagatctatgtgcta

SEQ ID NO: 23808 - DNA, 358 bp, Zea mays
  Clone ID: LIB3152-044-P1-K1-H10
gagctctcgaaaccctaggtgcgtgccgaccggcggcggcggcgaggtgatggcgatggacccggacgcggtggcgaaagccttcgtggagcactactaccggacgttcgacaccaaccgcgcggcgctggtggggctgtatcaggagacctccatgctcaccttcgagggccagaagttccagggcccatccgccattgccggcaagctcggatctcttcccttccaggcctgcgagcaccagatcgtcaccgtcgactgccagccgtcggggccccagggaggcatgctcgtcttcgtctccggttccatccgcaccggccccgaggagcaccccatcaagttcttttaggcattc

SEQ ID NO: 23809 - DNA, 380 bp, Zea mays
  Clone ID: LIB3152-044-P1-K1-H11
gaaacacaccaagcgaagcgcactatcttctacctaacaacaatggctaccaagagattagccctccttgcgcttcttgccctttttgtgagcgcaacaaatgcgttcattattccacaatgctcacttgctcctagtgccattattccacagttcctcccaccagttacttcaatgggcttcgaacacctagctgtgcaagccaacatgcaacaacaagcgcttgcggcgagcgtcttacaacaaccaattgcccaattgcaacaacaatccttgccacatctaacaatacaagccatcacaacgcaacagcaacaacagtttctaccagcactgagccacctagccatggtgaaccctgccgtctacttgcaagagca

SEQ ID NO: 23810 - DNA, 396 bp, Zea mays
  Clone ID: LIB3152-044-P1-K1-H12
attttgagcattcagaaacacactatgcgaagcacattagcaacaacctaacaacaatggctaccaagatattatccctccttgcgcttcttgcgctttttgcgagcgcaacaaatgcgttcattattccacaatgctcacttgctccaagttccattattacacagttcctcccaccagttacttcaatgggcttcgaacacccagctgtgcaagcctataggctacaacaagcaattgcggcgagcgtcttacaacaaccaatttcccagttgcaacaacaatccttggcacatctaacaatacaaaccatcgcaacgcaacagcaacaacaattcctaccagcactgagccacctagccatggtgaaccctgccgcctacttgcaacagcagt

SEQ ID NO: 23811 - DNA, 381 bp, Zea mays
  Clone ID: LIB3152-044-P1-K1-H2
catacctgcaacaacaattgttgcatcagattgtaccagctctgactcaactagctgtggcaaaccctgttgcctacttgcaacagctgcttccattcaaccaactgactctgtcgaactctgctgcgtacctacaacagcgacaacagttacttaatccattggtagtggctaacccattggtcgccgccttcctacagcagcaacaattgctgccatacaaccagttctctttgatgaatcctgtcttgtcgaggcagcaacccatcgttggaggtgccatcttttagattacatatgagatgtactcgataatggtgccctcataccgacgtgtgtttcctagaaataatcaatatattgattgagatttatctcgat

SEQ ID NO: 23812 - DNA, 380 bp, Zea mays
  Clone ID: LIB3152-044-P1-K1-H3
agaccatcgacgggcgcggccagcgtgtagtgctcaccggcaaggggctccagctcaagtcatgccatcacgtcatcatctgcaacctggtgttcgaaggaggccgcgggcacgacgtggatggcatccaggtcaagcccgactccaccaacatctggatcgaccgctgcaccctcgccgactacgatgacggcctcatcgacatcacgcgccagagcacagacatcaccgtctcaagatgccattttatgcggcacgacaagacgatgctcatcggtgctgaccccacgcacgtcggcgaccgctgcatcagggtcacaatccaccactgcttctttgacggcacgcggcagaggcacccccgcctccgcttcggaaag

SEQ ID NO: 23813 - DNA, 396 bp, Zea mays
  Clone ID: LIB3152-044-P1-K1-H5
gaaacacaccaagcgaagcgcactttcaacgacctaacaacaatggctaccaagatattagccctccttgcgcttcttgccctttttgtgagcgcaacaaatgcgttcattattccacaatgctcacttgctcctagtgccattattccacagttcctcccaccagttacttcaatgggcttcgaacacctagctgtgcaagccaacatgcaacaacaagcgcttgcggcgagcgtcttacaacaaccaattgcccaattgcaacaacaatccttgccacatctaacaatacaagccatcacaacgcaacagcaacaacagttcctaccagcactgagccacctagccatggtgaaccctgccgcctacttgcaagagcagctgcttgcatccaac

SEQ ID NO: 23814 - DNA, 399 bp, Zea mays
  Clone ID: LIB3152-044-P1-K1-H6
gaaacacaccaagcgaagcgcactttcttctacctaacaacaatggctaccaagatattagccctccttgcgcttcttgccctttttgtgagcgcaacaaatgcgttcattattccacaatgctcacttgctcctagtgccattattccacagttcctcccaccagttacttcaatgggcttcgaacacctagctgtgcaagccaacatgcaacaacaagcgcttgcggcgagcgtcttacaacaaccaattgcccaattgcaacaacaatccttgccacatctaacaatacaagccatcacaacgcaacagcaacaacagttcctaccagcactgagccacctagccatggtgaaccctgccgcctacttgcaagagcagctgcttgcattcaaccca

SEQ ID NO: 23815 - DNA, 391 bp, Zea mays
  Clone ID: LIB3152-044-P1-K1-H7
atacaaaccatcgcaacgcaacattatacaacaattcctaccagcactgagccacctagccatggtgaaccctgccgcctacttgcaacagcagttgcttgcatcaaacccacttgctctggcaaacgtagttgcaaaccagccacaacaacagctgcaacagtttctgccagcgctcagtcaactagccatggtgaaccctgccgcctacctacaacagcaacaactgctttcatctagcccgctcgctgtggccaatgcacctacatacctgcaacaacaattgttgcaacagattgtaccagctctgactcagctagttgtggcaaaccctgctgcctacttgcaacagctgctttcattcaaccaactgactatgtcgaactctgct

SEQ ID NO: 23816 - DNA, 227 bp, Zea mays
  Clone ID: LIB3152-044-P1-K1-H8
cgcaaattgcaccaagaaatccatcgagaggccgtcgacaggggaattaatggcgtcgtcgtctagcagcagccaccgccgcctcatcctcgcagccgccgtcctgctctccgtgctcgcggctgccagcgccagcgccgggacctcctgcgtgccggggtgggccatcctgcacaacccgatcccgagctgccgctggtacgtgaccagcctgacctgcggtattg

SEQ ID NO: 23817 - DNA, 390 bp, Zea mays
  Clone ID: LIB3152-044-P1-K1-H9
caaatgcgttcattattccacagttttcacttgctcctagtgccattattccacagttcctcccaccagttacttcaatgggcttcgaacatccagccgtgcaagcctacaggctacaactagcgcttgcggcgagcgtcttacaacaaccaattgcccaattgcaacaacaatccttggcacatctaaacctacaaaccatcgcaacgcaacagcaacaacagtttctgccatcactgagccacctagccgtggtgaaccctgtcgcctacttgcaacagcagctacttgcatccaacccacttgctctggcgaacgtagctgcataccagcaacaacaacgtctgcaacagtttatgccagcgctcagtcaactagccatggtgaacc

SEQ ID NO: 23818 - DNA, 345 bp, Zea mays
  Clone ID: LIB3152-045-P1-K1-A1
gaccaactagcaacatagaaagcacaatagtgtaccaacaatggcagccaaaatattttgcctccttatgctccttggtctttctgcaagtgctgctacggcgaccattttcccgaaatgctcgcaagctcctatagcttcccttcttcccccgtacctctcaccagcggtgtcttcggtatgtgaaaacccaattcttcaaccctacaggatccaacaggcaatcacaagctggcatcttacctttatcacccttgttcctccaacaatcatcagccctattacaatcagtacctttggtgcatttattggcacaaaacatgaggggacaacaactacaacaac

SEQ ID NO: 23819 - DNA, 383 bp, Zea mays
  Clone ID: LIB3152-045-P1-K1-A10
cccacgcgtccgaagcacaatagtgtaccaacaatggcagccaaaatattttgcttccttatgctccttggtctttctgcaagtgctgctaccgcaaccattttcccacaatgctcacaagctcctatagcttcctttcttcccccatacctctcaccagcggtgtcttcagtatgtgaaaacccaattcttcaaccctacaggatccaacaggcaatcgcagcaggcatcttacctttatcacccttgttcctccaacaaccgtcagccctattacagcagttacctttggtgcatttgttggcacaaaacatcaaggcacaacaactacaacaacttgtgctaggaaaccttgctgcctactctcaacaacagcagtttct

SEQ ID NO: 23820 - DNA, 378 bp, Zea mays
  Clone ID: LIB3152-045-P1-K1-A11
attgagaccaactagcaacatatattgtcacaatagtgtaccaacaatggcagccaaaatattttgcttccttatgctccttggtctttctgcaagagctgctaccgcaaccattttcccacaatgctcacaagctcctatagcttcctttcttcccccatacctctcaccagcggtgtcttcagtatgtgaaaacccaattcttcaaccctacaggatccaacaggcaatcgcagcaggcatattacctttatcacccttgttcctgcaacaaccgccagtcctattacagcagttacctttggtgcatttgttggcacaaaacattaaggtacaactactacaacaacttgtgctaggaaaccttggtgcccactt

SEQ ID NO: 23821 - DNA, 223 bp, Zea mays
  Clone ID: LIB3152-045-P1-K1-A12
tgccgttctatctgcacgctttgtttaacgctggcaccctcttacaactggggcaatttctgacattcaaccaacttgctttgacaaacccaacagcgttctaccaacaacccatcattggtggtgccctcttttagattgcttatgagttatagttcaataatgaagttttttggatgatgtttgcggcttcccagaaataagaaagtacatttctagattc

SEQ ID NO: 23822 - DNA, 387 bp, Zea mays
  Clone ID: LIB3152-045-P1-K1-A2
ccggaccggaatcggaagggtcgacccaagcgacccattcagaaacacaccaagcgaagcgcactatcaacaacctaacaacaatggctaccaagatattagccctccttgcgcttcttgcccttttagtgagcgcaacaaatgcgttcattattccacagtgctcacttgctcctagtgccattattccacagttcctcccaccagttacttcaatgggcttcgaacattcagccgtgcaagcctacaggctacaactagcgcttgcggcgagcgtcttacaacaaccaattgcccaattgcaacaacaatccttggcacatctaaacctacaaaccatcgcaacgcaacagcaacaacagtttctgccatcactgagccacctag

SEQ ID NO: 23823 - DNA, 262 bp, Zea mays
  Clone ID: LIB3152-045-P1-K1-A3
gcatagctagggtttcttctctgcccccttcggcaactcaggagagagcgcggctcctacccggcggcggtgaagccgcgacgatccaacggagtagaggcgccatggctgctcccgaagcgcccgcatgctacgtcgggatcgcgcggcagtccgccgccttccgccttatgaagcaaatgggatgggaagaaggtgaaggccttggcaaagacaagcaaggcataaaaggtcatgttagggtgaaaaacaagcagggcac

SEQ ID NO: 23824 - DNA, 385 bp, Zea mays
  Clone ID: LIB3152-045-P1-K1-A4
gacatagtggactcaacaatggcagtctaatattttgcctcctatgctcctgggtctttctgcaagtgctgctacggcgaccattttcccgcaatgctcgcaagctcctatagcttcccttcttcccccgtacctctcaccagcggtgtcttcggtatgtgaaaacccaattcttcaaccctacaggatccaacaggcaatcgcagctggcatcttacctttatcacccttgttcctccaacaatcatcagccctattacaacagttacctttggtgcatttattggcacaaaacatcagggcacaacaactacaacaacttgtgctagcaaaccttgctgcctactctcagcaacagcagtttcttccattcaaccaactaggg

SEQ ID NO: 23825 - DNA, 389 bp, Zea mays
  Clone ID: LIB3152-045-P1-K1-A5
gcgaagcgcactagcaacaacctaacaacaatggctaccaagatattagccctccttgcgcttcttgcccttttagtgagcgcaacaaatgcgttcattattccacagtgctcacttgctcctagtgccattattccacagttcctcccaccagttacttcaatgggcttcgaacatccagccgtgcaagcctacaggctacaactagcgcttgcggcgagcgtcttacaacaaccaattgcccaattgcaacaacaatccttggcacatctaaacctacaaaccatcgcaacgcaacagcaacaacagtttctgccatcactgagccacctagccgtggtgaaccctgtcgcctacttgcaacagcagctacttgcatccaacccact

SEQ ID NO: 23826 - DNA, 390 bp, Zea mays
  Clone ID: LIB3152-045-P1-K1-A6
aaaaatcacaacagcaacaatgtcattgccaggagcagcaacagactacaaggtgcagctataactactatagcagtagctcaaatctaaaaaattgtcatgaattcctaaggcagcagtgcagccctttggtaatgccttttctccaatcacgtttgatacaaccaagtagctgccaggtattgcagcaacaatgttgtcatgatcttaggcagattgagccacaatacattcaccaagcaatctacaacatggttcaatccataatccaggaggagcaacaacaacaaccatgtgagttatgtggatctcaacaagctactcaaagtgcggtggcaatcttgacagcagcacaatacctaccatcaatgtgcggcttgtaccactcat

SEQ ID NO: 23827 - DNA, 410 bp, Zea mays
  Clone ID: LIB3152-045-P1-K1-A7
gaccggaacggccgggccgacccgaccgacccgttcgtagcaacataaaaagcacaatagtgtaccaacaatggcagccaaaatattttgcctccttatgctccttggtctttctgcaagtgctgctacggcgaccattttcccgaaatgctcgcaagctcctatagcttcccttcttcccccgtacctctcaccagcggtgtcttcggtatgtgaaaacccaattcttcaaccctacaggatccaacaggcaatcacagctggcatcttacctttatcacccttgttcctccaacaatcatcagccctattacatcagttacctttggtgcatttattggcacaaaacatcagggcacaacaactacaacaacttgtgctagcaaaccttgctgcctactctcagcaac

SEQ ID NO: 23828 - DNA, 385 bp, Zea mays
  Clone ID: LIB3152-045-P1-K1-A8
attcagaaacacaccaagcgaagcgcactagcaacaacctaacaacaatggctaccaagatattagccctccttgcgcttcttgcccttttagtgagcgcaacaaatgcgttcattattccacagtgctcacttgctcctagtgccattattccacagttcctcccaccagttacttcaatgggcttcgaacatccagccgtgcaagcctacaggctacaactagcgcttgcggcgagcgtcttacaacaaccaattgcccaattgcaacaacaatccttggcacatctaaacctacaaaccatcgcaacgcaacagcaacaacagtttttgccatcactgagccacctagccgtggtgaaccctgtcgcctacttgcaacagca

SEQ ID NO: 23829 - DNA, 387 bp, Zea mays
  Clone ID: LIB3152-045-P1-K1-A9
attttcagcattcagaaacacaccaagcgaagcgcactagcaacaacctaacaacaatggctaccaagatattagccctccttgcgcttcttgcccttttagtgagcgcaacaaatgcgttcattattccacagtgctcacttgctcctagtgccattattccacagttcctcccaccagttacttcaatgggcttcgaacatccagccgtgcaagcctacaggctacaactagcgcttgcggcgagcgtcttacaacaaccaattgcccaattgcaacaacaatccttggcacatctaaacctacaaaccatcgcaacgcaacagcaacaacagtttctgccatcactgagccacctagccgtggtgaaccctgtcgcctacttgc

SEQ ID NO: 23830 - DNA, 391 bp, Zea mays
  Clone ID: LIB3152-045-P1-K1-B1
aaaaggtcgctcagatctgccactactgccttacccgtgacagtaagtctcgcccatcgatggatgaagttgtcaagcaactcacaccattacaagatctaaacgacatggcatctgcttcgccaaggcctcgctcaactcagcgcggaaaggtgcatcgatgacaacccggttctgttgtaagaagagcagtgtggtcctggttgcttgatgcttgtttggtttaattgtatagcaaaattaggtgttgcctgccgatacctggagatgtgacaccgcctgatgtgtcgctcacgtcagtcacactgctctgctgtttggctggttgccaaagcaagataacgatgtatctggttgcatcatgtaataattattataattaccatttaaa

SEQ ID NO: 23831 - DNA, 387 bp, Zea mays
  Clone ID: LIB3152-045-P1-K1-B10
gcaacatagaaagcacaatagtgtaccaacaatggcagccaaaatattttgcttccttatgctccttggtctttctgcaagtgctgctaccgcaaccattttcccacaatgctcacaagctcctatagcttcctttcttcccccatacctctcaccagcggtgtcttcagtatgtgaaaacccaattcttcaaccctacaggatccaacaggcaatcgcagcaggcatcttacctttatcacccttgttcctccaacaaccgtcagccctattacagcagttacctttggtgcatttgttggcacaaaacatcaaggcacaacaactacaacaacttgtgctaggaaaccttgctgcctactctcagcaacagcagtttcttccatt

SEQ ID NO: 23832 - DNA, 388 bp, Zea mays
  Clone ID: LIB3152-045-P1-K1-B11
cagaaacacaccaagcgaagcgcactagcaacaacctaacaacaatggctaccaagatattagccctccttgcgcttcttgcccttttagtgagcgcaacaaatgcgttcattattccacagtgctcacttgctcctagtgccattattccacagttcctcccaccagttacttcaatgggcttcgaacatccagccgtgcaagcctacaggctacaactagcgcttgcggcgagcgtcttacaacaaccaattgcccaattgcaacaacaatccttggcacatctaaacctacaaaccatcgcaacgcaacagcaacaacagtttctgccatcactgagccacctagccgtggtgaaccctgtcgcctacttgcaacagcagctact

SEQ ID NO: 23833 - DNA, 76 bp, Zea mays
  unsure at all n locations
  Clone ID: LIB3152-045-P1-K1-B12
gaaaaaaaaccgggngaaaaacacaaacgcaaaaacacacaaataaaaatttatttaaaacaacaaaacaacaaaa

SEQ ID NO: 23834 - DNA, 354 bp, Zea mays
  unsure at all n locations
  Clone ID: LIB3152-045-P1-K1-B2
caacaagcaacatagaaaggggaattcagtagcaacaatagagcaacaatggcgaccaagatattttccctccttatgctccttgctctntctgcatgtgttgctaacgcgacaattttccctcaatgctcacaagctcctatagcttcccttcttcccccataccttccatcaatgatagcttcagtatgtgaaaacccagctcttcaaccctataggctccaacaagcaatcgcagcaagcaacatacctttatcacccttgtttcaacaatcgccagccctatctttggtgcagtcattggtacaaaccatcaaggcacagcagctgcagcaactcgtgctacctgtgatc

SEQ ID NO: 23835 - DNA, 380 bp, Zea mays
  Clone ID: LIB3152-045-P1-K1-B3
cccacgcgtccgaatattttgagcattcagaaacacaccaagcgaagcgcactagcaacgacctaacaacaatggctaccaagatattagccctccttgcgcttcttgccctttttgtgagcgcaacaaatgcgttcattattccacaatgctcacttgctcctagtgccattattccacagttcctcccaccagttacttcaatgggcttcgaacacctagctgtgcaagccaacatgcaacaacaagcgcttgcggcgagcgtcttacaacaaccaattgcccaattgcaacaacaatccttgccacatctaacaatacaagccatcacaacgcaacagcaacaacagttcctaccagcactgagccacctagccatg

SEQ ID NO: 23836 - DNA, 383 bp, Zea mays
  unsure at all n locations
  Clone ID: LIB3152-045-P1-K1-B4
atagaaagcacattattgtaccattattggcagccaaaatatttggcctaatggggctccttggtctttctgcaagtgctgctacggcgagcattttcccgcaatgctcacaagctcctatagcttcccttcttcccccatacctctcaccagcgatgtcttcagtatgtgaaaatccaattcttctaccctacaggatccaacaggcaatcgcagcaggcatcttacctttatcacccttgttcctccaacaatcatcagccctattacagcagttacctttggtgcatttattggcacanaacatcatggcacaacaactacaacaactcgtgctagcaaaccttgctgcctactctcagcaacaacagtttctgccattc

SEQ ID NO: 23837 - DNA, 286 bp, Zea mays
  Clone ID: LIB3152-045-P1-K1-B5
cgcgtcgattggcatcaaaccacagcgagacatacacacctacacatggtccaagaatatccctctgcctcttgcctttgcagccacaaatgcgtatattcaaatgctacttgctcaagtcaatacacagtctccaccagtcttaatgggcttgacacactggcagctatggtacacagcaatgcgggcgtttacacaccaattcagtgcaacacaatctggaatctaacatcaaccatgacgacagcacaacattctacacactgccactagcagggacctgcgc

SEQ ID NO: 23838 - DNA, 288 bp, Zea mays
  Clone ID: LIB3152-045-P1-K1-B8
ctagatctacatcacaagctttctttctttttaacaatttaaactcagacggggggtatattcttgaagtgattagaccgactgaatgctgccaagttatattaaaaagcgcaaggttaggcatccacttgcaagttacaacagcccttatattattacacaagtatgggaataaaaattacaacaattgacactcttctaacgaacaaaaccaaatcttacatattcagcatgagcagcagcttcatgcagtttctatcttgagtctattacccaaaacattaagca

SEQ ID NO: 23839 - DNA, 382 bp, Zea mays
  Clone ID: LIB3152-045-P1-K1-C1
gagcattcagaaacacaccaagcgaagcttattagcaacaacctaacaacaatggctaccaagatattatccctccttgcgcttcttgcgctttttgcgagcgcaacaaatgcgttcattattccacaatgctcacttgctccaagttccattattacacagttcctcccaccagttacttcaatgggcttcgaacacccagctgtgcaagcctataggctacaacaagcaattgcggcgagcgtcttacaacaaccaatttcccagttgcaacaacaatccttggcacatctaacaatacaaaccatcgcaacgcaacagcaacaacaattcctaccagcactgagccacctagccatggtgaaccctgccgactacttgc

SEQ ID NO: 23840 - DNA, 385 bp, Zea mays
  Clone ID: LIB3152-045-P1-K1-C10
attgagaccaacaagcaacatttaatgtggaatccagtagcaacaatagagcaacaatggagaccaagatattttccctccttatgctccttgctctttctacatgtgttgctaacgcgacaattttccctcaatgctcacaagctcctatagcttccctttttcccccataccttccatcaattatagcttcagtatgtgaaaacccagctcttcaaccatataggcttcaacaagcaatcgcagcaagcaacatacctttatcgcccttgttgtgtcaacaatcgccagccctatctttggtgcagtcattggtacaaaccatcaaggcacaacagctgcagcaactcgtgctacctgtgatcaaccaagtagctctggcaaa

SEQ ID NO: 23841 - DNA, 383 bp, Zea mays
  Clone ID: LIB3152-045-P1-K1-C11
gagcattcagaaacacaccattcgttgcacattagcaacaacctaacaacaatggctaccaagatattatccctccttgcgcttcttgcgctttttgcgagcgcaacaaatgcgttcattattccacaatgctcacttgctccaagttccattattacacagttcctcccaccagttacttcaatgggcttcgaacacccagctgtgcaagcctataggctacaacaagcaattgcggcgagcgtcttacaacaaccaatttaccagttgcaacaacaatccttggcacatctaacaatacaaaccatcgcaacgcaacagcaacaacaattcctaccagcactgaaccacctagccatggtgaaccctgccgcctacttgca

SEQ ID NO: 23842 - DNA, 336 bp, Zea mays
  Clone ID: LIB3152-045-P1-K1-C12
aatcagctcatcgaccacagtttgtttaactcgacaccatgaaggtgctgatcggtgcccttgctatactggcgctcgctgcgagcgccgcctccagtacaagcggcggctgtggctgccagacaccaccgtttcatctaccgcctccgttctatatgccgcctccgctctatctgccgccgcagcagcagccgcagccatggcaataccccactcaaccaccgcagctaaacccgtgccagcagttcagatcctgcggtgtatgcagctgtagcagaccgttcctgggccagtgcgtcgagttcctgaggcaccaacgcatactggcggcgacac

SEQ ID NO: 23843 - DNA, 371 bp, Zea mays
  Clone ID: LIB3152-045-P1-K1-C2
accaagcgaagcgcactagcaacgacctaacaacaatggctaccaagatattagccctccttgcgcttcttgccctttttgtgagcgcaacaaatgcgttcattattccacaatgctcacttgctcctagtgccattattccacagttcctcccaccagttacttcaatgggcttcgaacacctagctgtgcaagccaacatgcaacaacaagcgcttgcggcgagcgtcttacaacaaccaattgcccaattgcaacaacaatccttgccacatctaacaatacaagccatcacaacgcaacagcaacaacagttcctaccagcactgagccacctagccatggtgaaccctgccgcctacttgcaagag

SEQ ID NO: 23844 - DNA, 389 bp, Zea mays
  Clone ID: LIB3152-045-P1-K1-C4
cagaaacacaccaagcgaagcacattagctacaacctaacaacaatggctaccaagatattatccctccttgcgcttcttgcgctttttgcgagcgcaacaaatgcgttcattattccacaatgctcacttgctccaagttccattattacacagttcctcccaccagttacttcaatgggcttcgaacacccagctgtgcaagcctataggctacaacaagcaattgcggcgagcgtcttacaacaaccaatttcccagttgcaacaacaatccttggcacatctaacaatacaaaccatcgcaacgcaacagcaacaacaattcctaccagcactgagccacctagccatggtgaaccctgccgcctacttgcaacagcagttgctt

SEQ ID NO: 23845 - DNA, 387 bp, Zea mays
  Clone ID: LIB3152-045-P1-K1-C5
gagcattcagaaacacaccaagcgttttatattagcaacaacctaacaacaatggctaccaagatattatccctccttgcgcttcttgcgctttttgcgagcgcaacaaatgcgttcattattccacaatgctcacttgctccaagttccattattacacagttcctcccaccagttacttcaatgggcttcgaacacccagctgtgcaagcctataggctacaacaagcaattgcggcgagcgtcttacaacaaccaatttcccagttgcaacaacaatccttggcacatctaacaatacaaaccatcgcaacgcaacagcaacaacaattcctaccagcactgagccacctagccatggtgaaccctgccgcctacttgcaacag

SEQ ID NO: 23846 - DNA, 384 bp, Zea mays
  Clone ID: LIB3152-045-P1-K1-C7
tgcccgcatcgagatcttagcgggacagcgagaggagaggcgacgccgacgcgggcgccccctgatccctcctcgccgccgccgccgaccgaccgaccgggggaggaggaggggaggggaggacggacacgatggaggcggactccgggaagctcttcgtcggcggcatctcttgggagacggacgaggatcgcctccgcgcgtacttcggtcgctttggcgaggtcaccgaggccgttatcatgcgggaccgcaacaccggccgcgcccgtgggttcgggttcgtcgtcttcgccgattccgggatcgccgaacgcgtcaccctcgataagcacatgatcgacgggcgcatggtggaagcaaagaaagccgttcctagggacg

SEQ ID NO: 23847 - DNA, 371 bp, Zea mays
  Clone ID: LIB3152-045-P1-K1-C8
ccaacaagcaacatagaaagtgtgttacagtagcaacaatagagcaacaatggcggccaagatattttccatccttatgctccttgctctttctgcatgtgttgctaacgcgaccattttcccgcaatgctcgcaagctcctatagcttcccttcttcccccgtacctctcaccagcggtgtcttcggtatgtgaaaacccaattcttcaaccctacaggatccaacaggcaatcgcagctggcatcttacctttatcacccttgttcctccaacaatcatcagccctattacaacagttaccttttgtgcatttattggcacaaaacatcagggcacaacaactacaacaacttgtgctagcaaaccttg

SEQ ID NO: 23848 - DNA, 384 bp, Zea mays
  Clone ID: LIB3152-045-P1-K1-C9
caaaccctaacttctccctgtttttgtccaccgccgccgccattgaatgcagcttcagcactgcaatggcgtttcaggggaagaatcgccaggtcctcgaggtcgatccggcggacgatcctacagctgaggtggccaccgccttcgatcgtctctccgtttcgcccatccccaatccgtctgcatctgccgccgtcgttcaggtctgttctccttacgccctcaacaacagtggtacccagcagcctcagtcgtcgtccactcgtgatgccaccatggttcctttacctcctgcaagtgtgctgtcttaccggtaccaagaggtccttaattgccttcacgacgccattaacgagatgcaacaagtttcaatgaatttgaagt

SEQ ID NO: 23849 - DNA, 371 bp, Zea mays
  Clone ID: LIB3152-045-P1-K1-D1
gcaacatagaaagcacaatagtgtatcatttatggcagccaaaatattttgcctccttatgctccttggtctttctgcaagtgctgctacggcgaccattttcccgcaatgctcgcaagctcctatagcttcccttcttcccccgtacctctcaccagcggtgtcttcggtatgtgaaaacccaattcttcaaccctacaggatccaacaggcaatcgcagctggcatcttacctttatcacccttgttcctccaacaatcatcagccctattacaacagttacctttggtgcatttattggcacaaaacattatggcacaacaacttcaacaacttgtgcttgcaaaccttgctgtctacttttaacaac

SEQ ID NO: 23850 - DNA, 432 bp, Zea mays
  unsure at all n locations
  Clone ID: LIB3152-045-P1-K1-D10
gtcgactcctacgccgtccgtcagctattcaagaaacccacaccaattttttttctgctactagcaacaactctaacaacgaagtggctactcaagatattagcgcctcctgtgcgccttcttggcccttttagttgagcgcaacaanatgctgttcattgattccacagatgcttcacttgctcctaggtgcctattattccacatgttcctcccaccagttacttcaatgggcttcgaacatccagccgggcaagcctacangctacaactagcgcttgcggcgagcgtcttacaacaaccaattgcccaattgcaacaacaatccttggnacatntaaacctacaaaccatcgcaacgcaacagcaacaacagtttctgccatcactgagccacctagccgtggtgaaccctgtcgcctacttgcaaca

SEQ ID NO: 23851 - DNA, 384 bp, Zea mays
  Clone ID: LIB3152-045-P1-K1-D11
ggcaacttcaaccttggaattgttccccaccatggcgtcgcagggatcctccgttttcgccgaactcgagcaggccccggaggaccccatcctcggagtgaccgttgcctacaacaaggatcccagccccgtgaaggtcaacctcggggtcggcgcctaccggaccgaggaagggaagcccctagtgctgaacgtggtcaggcgcgccgagcaaatgttgatcaataatccgtcacgtgtcaaggagtacctaccaatcaccggtctggctgaattcaataagctgagcgctaagcttatctttggcgctgacagccctgctattcaagagaatagggttgctaccgtgcagtgcctatcgggtactggttctttaagagtcgg

SEQ ID NO: 23852 - DNA, 274 bp, Zea mays
  Clone ID: LIB3152-045-P1-K1-D12
aatgccttgcccttgcgcggggctgcagggttggaacggcgctggcgccggcctgacaacaatgatgggcgccggcggcctgaacccttacgcggagtacctgaggcagccgcagtgcagcccgctggcggcggcgccctactacgccgggtgtgggcagacgagcgccatgtaccagccgctccggcaacagtgctgccagcagcagatgatgatgatggacgtgcagtccgtcgcgcagcaactgcagatgatgatgcagcttgagcgtgcc

SEQ ID NO: 23853 - DNA, 112 bp, Zea mays
  Clone ID: LIB3152-045-P1-K1-D3
gttctagatcgcgagcggccgccatcttctagattttttatgatttatactgtaataataaagttctcatgctgatatgtgcgacctctcagtaataaagtattagagatct

SEQ ID NO: 23854 - DNA, 404 bp, Zea mays
  Clone ID: LIB3152-045-P1-K1-D4
cggggcggcccaacccgtccggaaataaacagaataatggtggagggaaaccagaatccaaatacttaaaattgggggactcaaaaagccagaaaggggaagagcataggtcaaacgcagcaactacccttgtgaggaagctccggtggagcacccttggtctgcaatttgattggtcaaagcggaactacgatgtatcacttccacacaacaagattccaggtgctctagctagtcttgccaaaaagatggctattccagctatgccttctggagaagaattcaagccagaagctgctatagtgaactattacggtccaagtgacatgcttggggccatgttgatgacatggaagcagattggacaaaacctattgtaagcataagtttgggctgcaaatgca

SEQ ID NO: 23855 - DNA, 383 bp, Zea mays
  Clone ID: LIB3152-045-P1-K1-D5
ttagaccaactagcaacatagaatgttcaatagtgtaccaacaatggcagccaaaatattttgcctccttatgctccttggtatttctgcaagtgctgctacggcgaccattttcccgcaatgctcacaagctcctatagcttcccttcttcccccgtacctctcaccagcggtgtcttcggtatgtgaaaacccaattcttcaaccctacaggatccaacaggcaatcgcagctggcatcttacctttatcacccttgttcctccaacaatcatcagccctattacagcagttacctttggtgcatttattggcacaaaacatcagggcacaacaactacaacaacttgtgctagcaaaccttgctgcctactctcagcaac

SEQ ID NO: 23856 - DNA, 389 bp, Zea mays
  Clone ID: LIB3152-045-P1-K1-D6
cggacgcgtgggttgcgacttgcgagtggctccaacaaggcaacacaatccaccggcaccaacccagcgcggcgccaccggcgacccgtacccccttccccggagagcgatggcgacggagctgacggcggcgcagctgcgcgcgtacgacggcaccgacccgtccaagcccatctacgtctccgtccggggcaaggtctacgacgtcacctccggccgcggcttctacggccccggcggcgcctacgccgtcttcgcgggccgcgaggccagccgcgccctcggcaagatgtccaaggacgaggccgacgtctccggggacctctccgggctcaccgacaaggagctcggcgtcctcgccgactgggagaccaagttccaggccaagt

SEQ ID NO: 23857 - DNA, 274 bp, Zea mays
  Clone ID: LIB3152-045-P1-K1-D7
attcagccagctagctggtgtgagccctgctaccttcttgacacaaccacagttgttgccgttctaccagcacgttgcgcctaacgctggcaccctcttacaactgcaacaattgctgccattcaaccaacttgctttgacaaacccagcagtgttctaccaacaacccatcattggtggtgccctcttttagatttcttatgagttatagttcaataataaagttttttatctgatgtttgtggcttcccagaaataagaaagtacatttctg

SEQ ID NO: 23858 - DNA, 383 bp, Zea mays
  Clone ID: LIB3152-045-P1-K1-D8
ggccgatccaccaccgcagcgacgagcgggaggagatgaagatcatcattgacacggatcccggcatcgatgacagcgtggccatcctgatggcattccagatgccgggcgtccaggtcctagggctcaccaccatcttcggaaactgcaccacagagcatgccacacgcaacgccttgatcctgtgcgagaaggcaagccatctagaggtcccagtagctgagggcagccatgagcctctcaagggaggaaagccgcacgttgctgacttcgttcatggacctgatggcctcgggaacgtagatcttcctgatcccactatcaagaaagtggaggaaagtgctaccgacttcttggttgataaggtctcgcgatttcctgga

SEQ ID NO: 23859 - DNA, 382 bp, Zea mays
  Clone ID: LIB3152-045-P1-K1-D9
gcagtttcttccattcaaccaactatctgcattgaactctgcttcttatttgcaacaacaacaactaccattcagccagctatctgctgcctacccccagcaatttcttccattcaaccaactgacagcattgaactctcctgcttatttacagcagcaaaccctactgcctacttgcaacagttgcttccattcaaccaactggctgtgtcgaactctgctgtgtacctacaacagcgacaacagttacttaatccactagcagtggctaacccattggtcgctaacttcctgcagcagcaacaattgctgccatacaaccagttctctttgatgaaccctgccttgcagcaacccatcgttggaggtgccatcttttaga

SEQ ID NO: 23860 - DNA, 237 bp, Zea mays
  unsure at all n locations
  Clone ID: LIB3152-045-P1-K1-E1
ctcaccctccctgtatccctctgacctattggcggcgactgggcgacagccgctgtctgactacgcctggtgcccaggtatctctgccggcgacgagcacctgccaggggtatgggaatggaggtcgttggtgctgaagcagnaccagcagaggtcaaagtatctgatgatgtgaacctgttccaagagaaggaaagcaaagcaactgtaaaagaacgtgaggaggcagttgttttt

SEQ ID NO: 23861 - DNA, 386 bp, Zea mays
  Clone ID: LIB3152-045-P1-K1-E10
gtgaaaacccaattcttcaaccctacaggatccaacaggcaatcgcagcaggcatcttacctttatcacccttgttcctccaacaaccgtcagccctattacagcagttacctttggtgcatttgttggcacaaaacatcaaggcacaacaactacaacaacttgtgctaggaaaccttgctgcctactctcagcaacagcagtttcttccattcaaccaactggctgcattgaactctgctgcttatttgcaacaacaactaccattcagtcagctagctgctgcctacccccagcaatttcttccattcaaccaactggcagcattgaactctgctgcttatttacaacagcaacagctaccaccattcagccagctagctgat

SEQ ID NO: 23862 - DNA, 382 bp, Zea mays
  Clone ID: LIB3152-045-P1-K1-E11
cccacgcgtccgcagcattcagaaacacaccaagcgaagcgcactagcaacaacctaacaacaatggctaccaagatattagccctccttgcgcttcttgcccttttagtgagcgcaacaaatgcgttcattattccacagtgctcacttgctcctagtgccattattccacagatcctcccaccagttacttcaatgggcttcgaacatccagccgtgcaagcctacaggctacaactagcgcttgcggcgagcgtcttacaacaaccaattgcccaattgcaacaacaatccttggcacatttaaacctacaaaccatggcaacgcaacagcaacaacagtttctgacatcactgagccacctagcctgggtgaaccctg

SEQ ID NO: 23863 - DNA, 386 bp, Zea mays; identical to SEQ ID NO: 23861
  Clone ID: LIB3152-045-P1-K1-E12

SEQ ID NO: 23864 - DNA, 364 bp, Zea mays
  unsure at all n locations
  Clone ID: LIB3152-045-P1-K1-E2
aagcaacatagaaagtggaatccagtagcaccaatagagcaacaatggagaccaagatattttccctccttatgctccttgctctttctacatgtgttgctaacgcgacaattttncctcaatgctcacaagctcctatagcttccctttttcccccataccttccatcaattatagcttcagtatgtgaaaacccagctcttcaaccatataggcttcaacaagcaatcgcagcaagcaacatacctttatcgcccttgttgtgtcaacaatcgccagccctatctttggtgcagtcattggtacaaaccatcanggcacaacagctgcagcaactcgtgctacctgtgatcaaccaagtagc

SEQ ID NO: 23865 - DNA, 380 bp, Zea mays
  unsure at all n locations
  Clone ID: LIB3152-045-P1-K1-E3
atagaaagcacaatagtgtcccaacattggcagccaaaatatttggcctcctaatgctccttggtctttctgcaagtgctgctacggcaaccattttcccgaaatgctcgcaggctcctatagcttcccttcttcccccgaacctctcaccagcggtgtcttcggtatgtgaaaacccaattcttcaaccctacaggatccaacaggcaatcgcagctggcatcttacctttatcacccttgttcctccaacaatcatcagccctattacaacagttacctttggtgcatttattggcacanaacatcaaggcacaacaactacaacaacttgtgctagcaaaccttgctgcctactctcagcaacagcagtttcttcca

SEQ ID NO: 23866 - DNA, 341 bp, Zea mays
  Clone ID: LIB3152-045-P1-K1-E6
aattagctcatcgactccagattggagaactcgacaccatgaaggtgctgatcgttgccctggctctcctggcgctcgctgcgagcgccgcctccagtacaagcggcggctgtggctgccagacaccaccgtttcatctaccgcctccgttctatatgccgcctccgttctatctgccgccgcagcagcagccgcagccatggcaataccccactcaaccaccgcagctaagcccgtgccagcagttcggatcctgcggcgtcggcagcgtcggcagcccgttcctgggccagtgcgtcgagttcctgaggcaccagtgcaagccggcggcgacgccctac

SEQ ID NO: 23867 - DNA, 386 bp, Zea mays
  Clone ID: LIB3152-045-P1-K1-E7
ccgcgatgtcgctccggccgagcgagcgggagcagatgcggaagggcaactacaagcagacggtggacgccgaggagagccgccgccgccgcgagggccagatggtcgacatccgcaaggccaagcgagaggaaagcctccagaagaagcgccgcgatgggttccccgccgccggcgccgtgccgccgatgggccactccaccgcactccagcagaagctcgatggcttgccggcgatggtacaggccgttcactccaacgaccccactgtgcagcttgaggccaccacgcagttcatgaagctgctctccatagagcgtagtcccccaattgaagaggtgatcagcacaagagtcgtgccccgattcattgagttccttacacgt

SEQ ID NO: 23868 - DNA, 384 bp, Zea mays
  Clone ID: LIB3152-045-P1-K1-E8
gcttcaacaagcaatcgcagcatgttacatacctttatcgcccttgttgtgtcaacaatcgccagccctatctttggtgcagtcattggtacaaaccatcagggcacaacagctgcagcaactcgtgctacctgtgatcaaccaagtagctctggcaaacctttctccctactctccgcaacaacaatttcttccattcaaccaactgtctacactgaaccctgctgcttatttgcagcaacaactattaccatttagccagctagctactgcctactctcaacaacaacaacttcttccatttaaccaattggccgcactgaaccccgctgcttatttgcagcagcaaatactactaccatttagccagctagctacagcaag

SEQ ID NO: 23869 - DNA, 385 bp, Zea mays
  Clone ID: LIB3152-045-P1-K1-E9
tgcacctacatacctgcaacaacaattgctgcaacagattgtaccagctctgactcagctagctgtggcaaaccctgctgcctacttgcaacagctgcttccattcaaccaactgactgtgtcgaactctgctgcgtacctacaacagcgacaacagttacttaatccactagcagtgcctaacccattggtcactgccttcctacagcagcaacaattgctaccatacagccagttctctttgatgaaccctgccttgtcgtggcagcaacccatcgttggaggtgccatcttttagattacatatgagatgtaatcgataatggtgccctcataccggcatgtgtttcctagaaataatcaatatattgattgacatttatct

SEQ ID NO: 23870 - DNA, 239 bp, Zea mays
  Clone ID: LIB3152-045-P1-K1-F10
gggcgacccacgcgttcggctttatctactccagagcgttgtttatcccgagcgacaccatgagggcggtgggggttgttctcgctctgctggctctcgctgcgagcgccaccttcacgcatacaagcggcggatgcggctgccagccaccgccgccggttcatctaccgccgacggtgcatttgccacctccggagtacctgccacctacggtgcatctcccaccgccggaccacctg

SEQ ID NO: 23871 - DNA, 386 bp, Zea mays
  Clone ID: LIB3152-045-P1-K1-F11
aactagcaacatagaaagcacaatagtgtaccaacaatggcagccaaaatattttgcctccttatgctccttggtctttctgcaagtgctgctacggcgaccattttcccgcaatgctcgcaagctcctatagcttcccttcttcccccgtacctctcaccagcggtgtcttcggtatgtgaaaacccaattcttcaaccctacaggatccaacaggcaatcgcagctggcatcttacctttatcacccttgttcctccaacaatcatcagccctattacaacagttacctttggtgcatttattggcacaaaacatcagggcacaacaactacaacaacttgtgctagcaaaccttgctgcctactctcagcaacagcagtttct

SEQ ID NO: 23872 - DNA, 387 bp, Zea mays
  Clone ID: LIB3152-045-P1-K1-F12
aactagcaacatagaaagcactatattgtaccaacaatggcagccaaagtcgtgggcctacttatgctccttggtctttctgcaagtgctgctacggcgaccattttcccgcaatgctcgcaagctcctatagcttaccttcttcccccgtacctctcaccagcggtgtcttcggtatgtgaaaacccaattcttcaaccctacaggatccaacacgcaatcgcagctggcatcttacctttatcacccttgttcctccaacaatcatcagccctattacaacagttacctttggtgcatttattggcacaaaacatcagggcacaacaactacaacaacttgtgctagcaaaccttgctgcctactctcagcaacagcagtttctt

SEQ ID NO: 23873 - DNA, 169 bp, Zea mays
  Clone ID: LIB3152-045-P1-K1-F2
atccagatcagcaaaagcggcagtgcgtatagagggaatcgtcgaacagaacaagcaggaagaatggtcatcgttctcgtcgtgtgcctggctctgtcagctgccagcgcctctgcaatgcagatgccctgcccctgcgccgggctgcaaggcttgtacggcgctggcg

SEQ ID NO: 23874 - DNA, 387 bp, Zea mays
  unsure at all n locations
  Clone ID: LIB3152-045-P1-K1-F3
gcattcagaaacacaccaagcgaagcactttagcaacaacctaacaacaatggctaccaagatattatccctccttgcgcttcttgcgctttttgcgagcgcaacaaatgcgttcattattccacaatgctaacttgctccaagttccattattacacagttcctcccaccagttacttcaatgggcttcgaacacccagctgtgcaagcctataggctacaacaagcaattgcggcgagcgtcttacaacaaccaatttcccagttgcaacaacaatccttggcacatctaacaatacaaaccatcgcaacgcaacagcaacaacaattcctaccagcactgagccacctagccatggtgaaccctgccgnctacttgcaacagca

SEQ ID NO: 23875 - DNA, 382 bp, Zea mays
  Clone ID: LIB3152-045-P1-K1-F4
ccaactagcaacatagaaggcacattagtgtaccaacaatggcagccaaaatattttgcctccttatgctccttggtctttctgcaagtgctgctacggcgaccattttcccacaatgctcacaagctcctatagcttcccttcttcccccgtacctctcaccagcggtgtcttcggtatgtgaaaacccaattcttcaaccctataggatccaacaggcaatcgcagctggcatcttacctttatcacccttgttcctccaacaatcatcagccctattacagcagttacctttggtgcatttattggcacaaaacatcagggcacaacaactacaacaacttgtgctagcaaaccttgctgcctactctcagcaacaaca

SEQ ID NO: 23876 - DNA, 390 bp, Zea mays
  Clone ID: LIB3152-045-P1-K1-F5
gggtcttcagaccattagctttatctactccagagcgcagaagaacccgatcgacaccatgagggtgttgctcgttgccctcgctctcctggctctcgctgcgagcgccacctccacgcatacaagcggcggctgcggctgccagccaccgccgccggttcatctaccgccgccggtgcatctgccacctccggttcacctgccacctccggtgcatctcccaccgccggtccacctgccgccgccggtccacctgccaccgccggtccatgtgccgccgccggttcatctgccgccgccaccatgccactaccctactcaaccgccccggcctcagcctcatccccagccacacccatgcccgtgccaacagccgcatccaagcccgtg

SEQ ID NO: 23877 - DNA, 390 bp, Zea mays
  unsure at all n locations
  Clone ID: LIB3152-045-P1-K1-F6
ctcatccccagccacacccatgcccgtgccaacagccgcatccaagcccgtgccagctgcagggaacctgcggcgttggcagcaccccgatcctgggccagtgcgtcgagtttctgaggcatcagtgcagcccgacggcgacgccctactgctcgcctcagtgccagtcgttgcggcagcagtgttgccagcagctcaagcaggtggagccgcagcaccggtaccaggcgatcttcggcttggtcctccagtccatcctgcagcagcagccgcaaagcggccaggtcgcggggctgttggcggcgcanatagcgcagcaactgacggcgatgtgcggcctgcagcagccgactccatgcccctacgctgctgccggcggtgtcccccact

SEQ ID NO: 23878 - DNA, 382 bp, Zea mays
  Clone ID: LIB3152-045-P1-K1-F7
catacctctgctccatagtgggcacccgtgtgtcacgggcacgacgagattcggcggggatggcgcggtggcgggcgcggcgcctgctgcctctggccaccttcgtcacactcggcatgatccttggatctttgcttcagttagcacttcttcatcgactagatggctattcagtgcatgcagatagtgatccagaggctgttcttcttcgccttggatatgtgaagcctgaagttatcagctggacgccaaggataattgttttccataattttcttagttcagaggagtgtgattacctaatggcaattgctagaccaagactccaaatatccactgtagtggatgttgcaacaggaaagggtgtaaaaagtgatgttcg

SEQ ID NO: 23879 - DNA, 381 bp, Zea mays
  Clone ID: LIB3152-045-P1-K1-F8
agcaacatagaaagcacaatagtgtaccaacaatggcagccaaaatattttgcctccttatgctccttggtctttctgcaagtgctgctacggcgaccattttcccgaaatgctcgcaagctcctatagcttcccttcttcccccgtacctctcaccagcggtgtcttcggtatgtgaaaacccaattcttcaaccctacaggatccaacaggcaatcacagctggcatcttacctttatcacccttgttcctccaacaatcatcagccctattacatcagttacctttggtgcatttattggcacaaaacatcagggcacaacaactacaacaacttgtgctagcaaaccttgctgcctactctcagcaacagcagtttc

SEQ ID NO: 23880 - DNA, 382 bp, Zea mays
  Clone ID: LIB3152-045-P1-K1-F9
gctttatctactccagagcgcagaataacccgatcgacaccatgagggtgttgctcgttgccctcgctctcctggctctcgctgcgagcgccacctccacgcatacaagcggcggctgcggctgccagccaccgccgccggttcatctaccgccgccggtgcatctgccacctccggttcacctgccacctccggtgcatctcccaccgccggtccacctgccgccgccggtccacctgccaccgccggtccatgtgccgccgccggttcatctgccgccgccaccatgccactaccctactcaaccgccccggcctcagcctcatccccagccacacccatgcccgtgccaacagccgcatccaagcccgtgccagctgca

SEQ ID NO: 23881 - DNA, 383 bp, Zea mays
  unsure at all n locations
  Clone ID: LIB3152-045-P1-K1-G10
caacaagcaacatanaaagtttaattcagtagcaacaatagagcaacaatctcgaccaagatattttccctccttatgctccttgctctttctacatgtgttgctaacgcgacaattttccctcaatgctcacaagctcctatagcttccctttttcccccataccttccatcaattatagcttcagtatgtgaaaacccagctcttcaaccatataggcttcaacaagcaatcgcagcaagcaacatacctttatcgcccttgttgtgtcaacaatcgccagccctatctttggtgcagtcattggtacaaaccatcaaggcacaacagctgcagcaactcgtgctacctgtgatcaaccaaatagctcttgcaaacctttc

SEQ ID NO: 23882 - DNA, 387 bp, Zea mays
  Clone ID: LIB3152-045-P1-K1-G11
attcagaaacacaccaagcgaagcgcactagcaacaacctaacaacaaggcttgcaggatattagccctccttgcgcttcttgcccttttagtgagcgcaacaaatgcgttcattattccacagtgctcacttgctcctagtgccattattccacagttcctcccaccagttacttcaatgggcttcgaacatccagccgtgcaagcctacaggctacaactagcgcttgcggcgagcgtcttacaacaaccaattgcccaattgcaacaacaatccttggcacatctaaacctacaaaccatcgcaacgcaacagcaacaacagtttctgccatcactgagccacctagccgtggtgaaccctgtcgcctacttgcaacagcagct

SEQ ID NO: 23883 - DNA, 377 bp, Zea mays
  Clone ID: LIB3152-045-P1-K1-G12
aactagcaacatagaaagcacaatattgtaccaacaatggcagccaaagtgttgggcctacttatgctccttggtctttctgcaagtgctgctacggcgaccattttcccgcaatgctcgcaagctcctatagcttcccttcttcccccgtacctctcaccagcggtgtcttcggtatgtgaaaacccaattcttcaaccctacaagatccaacacgcaatcgcagctggcatcttacctttatcacccttgttcctgcaacaatcatcagccctattacaacagttacctttggtgcatttattggcacaaaacatcaaggcacaacaactacaacaacttgtgctagcaaaccttgctgcctactctcagcaaca

SEQ ID NO: 23884 - DNA, 257 bp, Zea mays
  unsure at all n locations
  Clone ID: LIB3152-045-P1-K1-G3
caaaaaattgaattccanaaccacaatttttttaccattgaaacccaaaaaaaacgcctgtgctaatcttccttctccttccaccataaatacttaccccaccatttttccttaattcttaacaacctctaatactttccttttttcccccataccttccataaatattaccttcatattttaaaaacccactttttaaaccatttanccttaaccaaccaatcccaccaaccaacataccttattccccctttttt

SEQ ID NO: 23885 - DNA, 405 bp, Zea mays
  Clone ID: LIB3152-045-P1-K1-G4
aaaacccccggccacccaacccttccggaaattgaaatccattaccaacattttttaccaatgaaaaccaaaaaatttcccgtccttatcctccttcctctttctacatatgttgctaacccaacaattttccctcaatgctcacaacctcctatagcttccctttttcccccataccttccatcaattatagcttcagtatgtgaaaacccacctcttcaaccatataggcttcaacaagcaatcgcagcaagcaacatacctttatcgcccttgttgtgtcaacaatcgccagccctatctttggtgcagtcattggtacaaaccatcagggcacaacagctgcagcaactcgtgctacctgtgatcaaccaagtagctctggcaaacctttctccctactct

SEQ ID NO: 23886 - DNA, 306 bp, Zea mays
  unsure at all n locations
  Clone ID: LIB3152-045-P1-K1-G5
aaaaggcaaaaaaaaaatttatttcaaacaacaaaaaaaagatttcgtntttattaaaaatggggcgcaaaaaaaaaaaaaaacaannnnnnataatntcacaancttatataactttcctttttccccataccttacattaattataacttcaatatattaaaacccatttttttaaccatatatnctataacaaacaatttaaacaatcaacatacctttatcatccttaattatattaacaaataactatacctatctttctttcaatcattataacaaaccattattatacaacaacttcaa

SEQ ID NO: 23887 - DNA, 393 bp, Zea mays
  Clone ID: LIB3152-045-P1-K1-G6
cgtaaaacccggggcggcccacgcgtccgggattgaggagaaaataaactaattttctttctcaatcccctccaatcctcctcgtctgccgggtcaccaaatcagccctaaaaccttgttcgattaatcccgttatccatggattagatgagattggaaaaaattaagaaagtgtttgacttagatgggatttaaactcatccaatcctactcaatctatgtggattgggggctaaccgaacaagccctaacagtgtgcgttttcgcaccccaactgcctttctctctataaaagaaactcctcatcgatcaccaccaaagaacacagtaactagttagcagatcaaacaagtagcgacagctcgacaaaaatttgtgagagtgatccggcgc

SEQ ID NO: 23888 - DNA, 381 bp, Zea mays
  unsure at all n locations
  Clone ID: LIB3152-045-P1-K1-G7
ctactgagtgttcctcaagacactttctactcggagttcaaccataggttccgctagcttttcttggagaagggttcccataacactgcgaagcgtgtactcgacacactccacttgcttctcgaccttcttgaggcccctgatcctgccaacttggagaagttccttggaactataccaatgatgttcaacgttgttatcctttctcctcatggctacttcgctcagtccaatgtgcttggataccctgacactggcggtcaggttgtgtacattctggatcaagtccgtgctttgganaatgagatgcttctgaagattaagcagcaaggccttgatatcactccgaagatcctcattgttaccaggctgttgcctgat

SEQ ID NO: 23889 - DNA, 382 bp, Zea mays
  unsure at all n locations
  Clone ID: LIB3152-045-P1-K1-G8
gcagaagcgctgaancaacgcgttttcagactgcaaagacccctgtgaagttcgtttgtactgaggtgttgtccagccaacaatccttgctcccaagattcttccgtactcccccctccatcggaccatcctctaccatagatctcccgaactccgccgtaatcgggacgaatcccgcgcgtgctcttgctccctgtcgttctccgcggccggcgcgagctgccggtggttcgttgccgtcgacctcgtctggccgctcctctgccctgccagctgccggattcctgctgctggactggattgctgcgcgtggagtcgtgagtatagctccatctatcctgactgatacggatcgacctctcctctcgtgggtttttgggtt

SEQ ID NO: 23890 - DNA, 385 bp, Zea mays
  Clone ID: LIB3152-045-P1-K1-G9
agaccattagctttatctactccagttcgcagaagaacccgatcgacaccgtccgtttgttgctcgttgccctcgctctcctggctctcgctgcgagcgccacctccacgcatacaagcggcggctgcggctgccagccaccgccgccggttcatctaccgccgccggtgcatctgccacctccggttcacctgccacctccggtgcatctcccaccgccggtccacctgccgccgccggtccacctgccaccgccggtccatgtgccgccgccggttcatctgccgccgccaccatgccactaccctactcaaccgccccggcctcagcctcatcctcagccacacccatgcccgtgccaacagccgcatccaagcccgtgcca

SEQ ID NO: 23891 - DNA, 385 bp, Zea mays
  Clone ID: LIB3152-045-P1-K1-H10
gcctagcaattagctcatcgactccagattggagaactcgacaccatgaaggtgctgatcgttgcccttgctctcctggcgctcgctgcgagcgccgcctccagtacaagcggcggctgtggctgccagacaccaccgtttcatctaccgcctccgttctatatgccgcctccgttctatctgccgccgcagcagcagccgcagccatggcaataccccactcaaccaccgcagctaagcccgtgccagcagttcggatcctgcggcgtcggcagcgtcggcagcccgttcctgggccagtgcgtcgagttcctgaggcaccagtgcaagccggcggcgacgccctacggctcgccacagtgccaggcgctgcagcagcagtgct

SEQ ID NO: 23892 - DNA, 330 bp, Zea mays
  unsure at all n locations
  Clone ID: LIB3152-045-P1-K1-H11
ntccgggctttgcagcaccaattaacgtttattctacttccacgagcagcaggaaggaacaccgatacgacagccatgcaggagtgttcgctcggttgcctctcgcatgtgctggctactcgctgccgagcgccacctccacgcatacaagcggtagctgtggctgtcatccaccgccgccggatcatctaccgccgtcggtgcatgtgccacctacggttcaactgtcaacgacggagcatgtaacaccggcgggccacctgccgtcgtcagtccagctgctaccacaggtacatgtgctatcaccagatcatctgtcggcgccaccat

SEQ ID NO: 23893 - DNA, 386 bp, Zea mays
  unsure at all n locations
  Clone ID: LIB3152-045-P1-K1-H12
aactagcaacatanaaagcacaattctgtaccaacaatggcagccaaaatattttgcctccttatgctccttggtctttctgcaagtgctgctacggcgaccattttcccgcaatgctcgcaagctcctatagcttcccttcttcccccgtacctctcaccagcggtgtcttcggtatgtgaaaacccaattcttcaaccctacaggatccaacaggcaatcgcagctggcatcttacctttatcacccttgttcctgcaacaatcatcagccctattacaacagttacctttggtgcatttattggcacaaaacatcagggcacaacaactacaacaacttgtgctagcaaaccttgctgcctactctcagcaacagcagtttct

SEQ ID NO: 23894 - DNA, 321 bp, Zea mays
  Clone ID: LIB3152-045-P1-K1-H2
gtccgaatcccggtcgaccacgctccgcactggcacctaaaaggcccattagttcccacaatgcagccaaaatatttgcctcttatgctcctggcctttctgaagggctgttacgggaccattttcccgaaatgctccaggctctatagcttccctcttccccgaacctttaccagcggggcttgggatgggaaaccccaattctcaaccctaaggatccacaggcaatcacagctggcatcttaccttatcacccttgttcctccaccaatcatagccctattacatcagttaccttggtgccattattggcacaaaaca

SEQ ID NO: 23895 - DNA, 386 bp, Zea mays
  unsure at all n locations
  Clone ID: LIB3152-045-P1-K1-H3
agaccaactagcaccataaaaggcccatttttgtcccaacaatggcagccaaaatatttggcctcctaatgctcctgggcctttctgcaagtgctgctacggcgaccattttcccgcaatgctcgcaagctcctatagcttcccttcttcccccgaacctttcaccagcggtgtcttcggtatgtgaaaacccaattcttcaaccctacaggatccaacaggcaatcgcagctggcatcttacctttatcacccttgttcctccaacaatcatcagccctattacaacagttacctttggtgcatttattggcacaaaacatcanggcacaacaactacaacaacttgtgctagcaaaccttgctgcctactctcagcaacagcag

SEQ ID NO: 23896 - DNA, 196 bp, Zea mays
  Clone ID: LIB3152-045-P1-K1-H4
cctacaaggatccaaacaggcaatcgcaacaggcgatcttaccattatcaccctttgttccttcaacaaccgtcagccctattacagcaggtacctttggtccatttggtggcacaaaacattagggcacaacaactacaacaacttgtgctagcaaaccttgctgcatactctcagcaacatcagtttcttccat

SEQ ID NO: 23897 - DNA, 137 bp, Zea mays
  Clone ID: LIB3152-045-P1-K1-H6
gaccgcaccattgttgagtacatctaatatggtgcttctcatacacggcatgtggtttcctacgaaatgaatcaatatatgtgattgaggatttatctgcgataacaaaaaaaaagaaaaagggcgcgccgcttcta

SEQ ID NO: 23898 - DNA, 382 bp, Zea mays
  Clone ID: LIB3152-045-P1-K1-H7
gagaaagcggcggggttcaagaacgccgcggccatccggagccaggattctcccgatacaccccctcgttcccagttcttcagtggcgccgatttggagttccagagacggcgatgggctccggatctctgctcaaggtcttcgccaacaacttcgacgtccttgcagggcctttggtggcattggcttatcctttgtatgcttccattaaggcaatagagaccaaatctcctgtggatgatcaacaatggctcacatattgggtcctgtactcactaataacattgtttgaactcacatttgcatcaattattcagtggcttcctttctggccttcaatgaaattgatctttatttgctggcttgtcttgccatacttcaa

SEQ ID NO: 23899 - DNA, 382 bp, Zea mays
  Clone ID: LIB3152-045-P1-K1-H8
attgagaccaactagcaacatagaatgcacaatagtgtaccaacaatggcagccaaaatattttgcctccttatgctccttggtctttctgcaagtgctgctacggcgaccattttcccgaaatgctcgcaagctcctatagcttcccttcttcccccgtacctctcaccagcggtgtcttcggtatgtgaaaacccaattcttcaaccctacaggatccaacaggcaatcacagctggcatcttacctttatcacccttgttcctccaacaatcatcagccctattacatcagttacctttggtgcatttattggcacaaaacatcagggcacaacaactacaacaacttgtgctagcaaaccttgctgcctactctcagc

SEQ ID NO: 23900 - DNA, 388 bp, Zea mays
  Clone ID: LIB3152-045-P1-K1-H9
accaaatcaaatctgcaacatcaattatctaactccaaaaaccatgaagctggtgcttgtggttcttgctttcattgctttagtatcaagtgtttcttgtacacagacaggcggctgcagctgtggtcaacaacaaagccatgagcagcaacatcatccacaacaacatcatccacaaaaacaacaacatcaaccaccaccacaacatcaccagcagcagcaacaccaacaacaacaagttcacatgcaaccacaaaaacatcagcaacaacaagaagttcatgttcaacaacaacaacaacaaccgcagcaccaacaacaacaacaacaacaacaacatcaccaacaatcacaaggccatgtgcaacaacacgaacagagccatgag

SEQ ID NO: 23901 - DNA, 354 bp, Zea mays
  Clone ID: LIB3152-046-P1-K1-A1
ccaacaagcaacatagaaagtggaatccagtagcaacaatagagcaacaatggcgaccaagatattttccctccttatgctccttgctctttctgcatgtgttgctaacgcgacaattttccctcaatgctcacaagctcctatagcttcccttcttcccccataccttccatcaatgatagcttcagtatgtgaaaacccagctcttcaaccctataggctccaacaagcaatcgcagcaagcaacatacctttatcacccttgtttcaacaatcgccagccctatctttggtgcagtcattggtacaaaccatcagggcacagcagctgcagcaactcgtgctacctgtgat

SEQ ID NO: 23902 - DNA, 384 bp, Zea mays
  Clone ID: LIB3152-046-P1-K1-A10
gagaccaactagcaacatagaaagcacaatagtgtaccaacaatggcagccaaaatattttgcctccttatgctccttggtctttctgcaagtgctgctacggcgaccattttcccgcaatgctcgcaagctcctatagcttcccttcttcccccgtacctctcaccagcggtgtcttcggtatgtgaaaacccaattcttcaaccctacaggatccaacaggcaatcgcagctggcatcttacctttatcacccttgttcctccaacaatcatcagccctattacaacagttacctttggtgcatttattggcacaaaacatcagggcacaacaactacaacaacttgtgctagcaaaccttgctgcctactctcagcaacag

SEQ ID NO: 23903 - DNA, 332 bp, Zea mays
  Clone ID: LIB3152-046-P1-K1-A11
ggtttcacaagcaagctaaagctctcgaggcatggtgtgtccatgaagctgggagtccgtgatccgaggccaacgcagacagtccaagatggactcagtttcgtggcgagcttgaagcgcgtgttcgcctgcgagcctgacaagtacgacgagatcatcgccaccatgcgccagttcaagtccgggagcattcgtagtgcggttgtggttgagcgtgtgaaggtgcttctggaaggtcaccctggtctccttcgccacttcaaccagttcctgccatggggttacatatgggcttatggaccagtcgggaggattcagcgtctgatgcaacc

SEQ ID NO: 23904 - DNA, 384 bp, Zea mays
  Clone ID: LIB3152-046-P1-K1-A12
agcattcagaaacacaccaagctaatcgcactagcaacgacctaacaacaatggctaccaagatattagcccttcttgcgcttcttgcccttgttgagagcgcaacaaatgctttcattattccacaatgctcacttgctactagtgccattattccacagttcctcccaccagttacttcaatgggcttcgaacacctagctgtgcaagccaacatgcaacaacaagcgcttgcggcgagcgtcttacaacaaccaattgcccaattgcaacaacaattcttgccacatctaacaatacaagccatcacaacgcaacagcaacaacagttcctaccagcactgagccacctagccatggtgaaccctgccgcctacttgcaag

SEQ ID NO: 23905 - DNA, 242 bp, Zea mays
  Clone ID: LIB3152-046-P1-K1-A2
cgtcggagaccagcttttaacatatatagttgttttttcgacaaaacaatagagcgggcgggggcttaccaagatattttccctatcttccttccttgctctatctacatgtgttgctaacacatctattcttaatgcttacaagacaagcttctatagctttcctttttcccccatacccttcatcaattatagcttcagtatgtgaaaacccagctcttcaaccatataggcttcaacaa

SEQ ID NO: 23906 - DNA, 500 bp, Zea mays
  unsure at all n locations
  Clone ID: LIB3152-046-P1-K1-A3
ggaaggaaccgggtcggacccaccgccagtccgtatgcagaangcgggtgcctggnnagactatgtctgtgcggttgggtgggtctcnaaccagatnngtagagagggcttnntgggtgnncctcgcnncttccnntgtatgcntnntggagagggtngnnttcccagnnntcgggtnntgatgaaaactggatacccattgtnnttgatgctttctgggctttttcagcaagaagggggtttnntttcaagaacccttggtnntagagggtacccnntcaaatctggtgacccttcgagtcggtttcaaaccaatcattcttcgtgcagtgaaaggagccgccgagttggnggatgacccaatggacttgatgaaggaaaccctatanctgaggttgctcagttgcttttgtggattgtgcgaggattaagggaactagctcagtttgatcatctcaagctcnattgagattgagcctcgctcagcacatctatatcag

SEQ ID NO: 23907 - DNA, 387 bp, Zea mays
  Clone ID: LIB3152-046-P1-K1-A4
ccacttttaacctaaatctcgcgagaagcgaagccggaggaggagggtgcgaggagatcgcgagcagccggagccggagccggagccggaggcctagtagatgaagacgttcgatccgtggccggtcttcttccgccgggagtggaagcgcaattggcccttcctcacggggttcgccatcaccggcttcatcatcactaagatgacggccaacttcaccgaggaggacctcaagaactccaagttcgtccaggagcacaagaagcgctgaccaaccagtaatctatgacatggacgccggatggcactggcagagggatggtgtacggtgttgtccgaattgcctgtctggacagccagttatgttatgctgtttgaatgaaaaat

SEQ ID NO: 23908 - DNA, 382 bp, Zea mays
  Clone ID: LIB3152-046-P1-K1-A6
ttcattttagaagtattttcaccaaatcaaatctgcaacatcaatggtctaactccaaaaaccatgaagctggtgcttgtggttcttgctttcattgctttagtatcaagtgtttcttgtacacagacaggcggctgcagctgtggtcaacaacaaagccatgagcagcaacatcatccacaacaacatcatccacaaaaacaacaacatcaaccaccaccacaacatcaccagcagcagcaacaccaacaacaacaagttcacatgcaaccacaaaaacatcagcaacaacaagaagttcatgttcaacaacaacaacaacaaccgcagcaccaacaacaacaacaacaacagcaccaacaacaacatcaatgtgaaggcc

SEQ ID NO: 23909 - DNA, 350 bp, Zea mays
  Clone ID: LIB3152-046-P1-K1-A7
gagaccaacaagcaacatagaatgtggaatccagtagcaacaatagagcaacaatggagaccaagatattttccctccttatgctccttgctctttctacatgtgttgctaacgcgacaattttccctcaatgctcacaagctcctatagcttccctttttcccccataccttccatcaattatagcttcagtatgtgaaaacccagctcttcaaccatataggcttcaacaagcaatcgcagcaagcaacatacctttatcgcccttgttgtgtcaacaatcgccagccctatctttggtgcagtcattggtacaaaccattagggcacaacagctgcaacaactcgtg

SEQ ID NO: 23910 - DNA, 406 bp, Zea mays
  Clone ID: LIB3152-046-P1-K1-A8
ggacggaccggccggaccgacccacgcgttcgcaacaagcaacatagaaagtgttttccagtagcaacaatagagcaacaatggagaccaagatattttccctccttatgctccttgctctttctacatgtgttgctaacgcgacaattttccctcaatgctcacaagctcctatagcttccctttttcccccataccttccatcaattatagcttcagtatgtgaaaacccagctcttcaaccatataggcttcaacaagcaatcgcagcaagcaacatacctttatcgcccttgttgtgtcaacaattgccagccctatctttggtgcagtcattggtacaaaccatcagggcacaacagctgcagcaactcgtgctacctgtgatcaaccaagtagctctggc

SEQ ID NO: 23911 - DNA, 385 bp, Zea mays
  Clone ID: LIB3152-046-P1-K1-A9
aactagcaacatagaaagcacaattgtgtaccaacaatggcagccaaaatattttgcttccttatgctccttggtctttctgcaagtgctgctaccgcaaccattttcccacaatgctcacaagctcctatagcttcctttcttcccccatacctctcaccagcggtgtcttcagtatgtgaaaacccaattcttcaaccctacaggatccaacaggcaatcgcagcaggcatcttacctttatcacccttgttcctccaacaaccgtcagccctattacagcagttacctttggtgcatttgttggcacaaaacatcaaggcacaacaactacaacaacttgtgctaggaaaccttgctgcctactctcagcaacagcagtttc

SEQ ID NO: 23912 - DNA, 391 bp, Zea mays
  Clone ID: LIB3152-046-P1-K1-B1
caattcttcaaccctacaggatccaacattcaatcacagctggcatcttacctttatcacccttgttcctccaacaatcatcagccctattacatcagttacctttggtgcatttattggcacaaaacatcagggcacaacaactacaacaacttgtgctagcaaaccttgctgcctactctcagcaacagcagtttcttccattcaaccaactagctgcattgaactctgcttcttatttgcaacaacaacaactaccattcagccagctacctgctgcctacccccagcaatttcttccattcaaccaactggcagcattgaactctcctgcttatttacagcagcaacaactactaccattcagccagctagctggtgtgagccctgg

SEQ ID NO: 23913 - DNA, 383 bp, Zea mays
  Clone ID: LIB3152-046-P1-K1-B10
cccacgcgtccgagaccaactagcaacatagaaagcacaatagtgtaccaacaatggcagccaaaatattttgcctccttatgctccttggtatttctgcaagtgctgctacggcgaccattttcccgcaatgctcacaagctcctatagcttcccttcttcccccgtacctctcaccagcggtgtcttcggtatgtgaaaacccaattcttcaaccctacaggatccaacaggcaatcgcagctggcatcttacctttatcacccttgttcctccaacaatcatcagccctattacagcagttacctttggtgcatttattggcacaaaacatcagggcacaacaactacaacaacttgtgctagcaaaccttgctgcctac

SEQ ID NO: 23914 - DNA, 379 bp, Zea mays
  Clone ID: LIB3152-046-P1-K1-B11
cgaagtctgccccgctcttcggcctcgtcccttctctccaggtgagcgctggatgaacctctgctcggctttctgcgttgcgctaatcgattgctggatggtcgccagtctgatttgatgaaacagaagttggggaaattgaggatctccttagggccatggatgtagatgatgtgctcagtaacttgcgtgttgttggtgtgccaacaaagagtgcaatttacatatggggttataaccacagtggccagactgcccgaaagggcaaggaatgccacttgaggatccccaagagcctcccttccaaactattcaaattggggaatgggaagagcctcatgtggaccgatattgcatgtggccgtgagcataccgctgc

SEQ ID NO: 23915 - DNA, 385 bp, Zea mays
  Clone ID: LIB3152-046-P1-K1-B12
gagcattcagaaacacaccaagcgtagcacattagcaacaacctaacaacaatggctaccaagatattatccctccttgcgcttcttgcgctttttgcgagcgcaacaaatgcgttcattattccacaatgctcacttgctccaagttccattattacacagttcctcccaccagttacttcaatgggcttcgaacacccagctgtgcaagcctataggctacaacaagcaattgcggcgagcgtcttacaacaaccaatttcccagttgcaacaacaatccttggcacatctaacaatacaaaccatcgcaacgcaacagcaacaacaattcctaccagcactgagccacctagccatggtgaaccctgccgcctacttgcaac

SEQ ID NO: 23916 - DNA, 386 bp, Zea mays
  Clone ID: LIB3152-046-P1-K1-B2
aagcaacataaaaggtggaatccagtttcaacaatagagcaacaatggagaccaagatattttccctccttatgctccttgctctttctacatgtgttgctaacgcgacaattttccctcaatgctcacaagctcctatagcttccctttttcccccataccttccatcaattatagcttcagtatgtgaaaacccagctcttcaaccatataggcttcaacaagcaatcgcagcaagcaacatacctttatcgcccttgttgtgtcaacaatcgccagccctatctttggtgcagtcattggtacaaaccatcagggcacaacagctgcagcaactcgtgctacctgtgatcaaccaagtagctctggcaaacctttctccctac

SEQ ID NO: 23917 - DNA, 362 bp, Zea mays
  Clone ID: LIB3152-046-P1-K1-B3
aaaaaccgggggggacccacgcgtccggagcattcaaaaacacaccaagcgaatcgcactagcaacaacctaacaacaatggctaccaagatattagccctccttgcgcttcttgcccttttagtgagcgcaacaaatgcgttcattattccacagtgctcacttgctcctagtgccattattccacagttcctcccaccagttacttcaatgggcttcgaacatccagccgtgcaagcctacaggctacaactagcgcttgcggcgagcgtcttacaacaaccaattgcccaattgcaacaacaatccttggcacatctaaacctacaaaccatcgcaacgcatcagcaacaacagttttt

SEQ ID NO: 23918 - DNA, 387 bp, Zea mays
  Clone ID: LIB3152-046-P1-K1-B4
agctcatttacagcgacgtcgagaactccgagcacaagttcgtgctgaaggacaagaagaagccgatcatcttctcgatggcgcgtctcgaccgcgtgaagaacatgacaggcctggtggagatgtacggcaagaacgcgcgcctgagggagctggcgaacctcgtgatcgtcgccggtgaccacggcaaggagtccaaggacagggaggagcaggcggagttcaagaagatgtacagcctcatcgacgagtacaagttgaagggccatatccggtggatctcggcgcagatgaaccgtgtccgcaacggggagctgtaccgctacatttgtgataccaagggcgcattcgtgcagcctgcgttctacgaagcgttcggcctgactg

SEQ ID NO: 23919 - DNA, 385 bp, Zea mays
  Clone ID: LIB3152-046-P1-K1-B5
gcaacatagaaggtggaatccagtttcttcaatagagcaacaatggcggccaagatattttccatccttatgctccttgctctttctgcatgtgttgctaacgcgaccatttttcctcaatactcacaagctcctatagctgcccttcttcccccataccttccatcaatgaccgcttcagtatgtgaaaacccagcccttcaaccctacaggctccaacaagcaatcgcaacaagcaacttacctttatcacccctgttctttcaacaatcgccagccctatctttggtgcagtcattggtacaaaccatcagggcacaacagctgcagcaactcgtgctaccagtgatcagccaagtagctctggcaaacctttctccctact

SEQ ID NO: 23920 - DNA, 385 bp, Zea mays
  Clone ID: LIB3152-046-P1-K1-B6
attcctcccaacaccacctcgcctgcgatctccgtagcctccgtcgcgtcgagcatcgatcatgtcggcctactgcggaaagtacaaggatgagctcatcaagaatgctgcctacattggcacccctggcaagggtatccttgctgctgatgagtccactggcaccattggcaagcgcctttccagcatcaatgtcgagaacgttgaggagaaccgccgtgccctccgtgagctcctattctgctgccctggtgctctccagtacatcagcggtgtgatcctcttcgaggagaccctgtaccagaagaccaaggatggcaagccttttgttgatgtcctcaaggagggaggcgtcctccctggcatcaaggttgacaagggcacc

SEQ ID NO: 23921 - DNA, 388 bp, Zea mays
  Clone ID: LIB3152-046-P1-K1-B7
agaccaactagcaacatagaaagttctaatagtgtaccaacaatggcagccaaaatattttgcttccttatgctccttggtctttctgcaagtgctgctaccgcaaccattttcccacaatgctcacaagctcctatagcttcctttcttcccccatacctctcaccagcggtgtcttcagtatgtgaaaacccaattcttcaaccctacaggatccaacaggcaatcgcagcaggcatcttacctttatcacccttgttcctccaacaaccgtcagccctattacagcagttacctttggtgcatttgttggcacaaaacatcaaggcacaacaactacaacaacttgtgctaggaaaccttgctgcctactctcagcaacagcagt

SEQ ID NO: 23922 - DNA, 236 bp, Zea mays
  Clone ID: LIB3152-046-P1-K1-B8
gatcagcaaagcggcagtgcgtattgaggatcgtcgaacagaacagcatgaagatggtcatcgttctcgtcgtgtgcctggctctgtcagctgccagcgcctctgcaatgcagatgccctgcccctgcgcggggctgcagggcttgtacggcgctggcgccggcctgacgacgatgatgggcgccggcgggctgtacccctacgcggagttcctgaggcagccgcagtgcagcccg

SEQ ID NO: 23923 - DNA, 389 bp, Zea mays
  Clone ID: LIB3152-046-P1-K1-B9
attggcacaaaacatcagggcacatcaactacaacaacttgtgctagcaaaccttgctgcctactctcagcaacagcagtttcttccattcaaccaactagctgcattgaactctgcttcttatttgcaacaacaacaactaccattcagccagctacctgctgcctacccccagcaatttcttccattcaaccaactggcagcattgaactctcctgcttatttacagcagcaacaactactaccattcagccagctagctggtgtgagccctgctaccttcttgatacaaccacagttgttgccgttctaccagcacgctgcgcctaacgctggcaccctcttacaactgcaacaattgctgccattcaaccaacttgctttgacaa

SEQ ID NO: 23924 - DNA, 388 bp, Zea mays
  Clone ID: LIB3152-046-P1-K1-C1
caactagcaacatagaaagcacaatagtgtaccaacaatggcagccaaaatattttgcctccttatgctccttggtctttctgcaagtgctgctacggcgaccattttcccacaatgctcacaagctcctatagcttcccttcttcccccgtacctctcaccagcggtgtcttcggtatgtgaaaacccaattcttcaaccctataggatccaacaggcaatcgcagctggcatcttacctttatcacccttgttcctccaacaatcatcagccctattacagcagttacctttggtgcatttattggcacaaaacatcagggcacaacaactacaacaacttgtgctagcaaaccttgctgcctactctcagcaacaacagtttctt

SEQ ID NO: 23925 - DNA, 313 bp, Zea mays
  Clone ID: LIB3152-046-P1-K1-C10
cagtcccatcaatcatcatttatcttagtagtataggcaccaaatcaaatctgcaacatcaattatctaactccaaaaaccatgaagctggtgcttgtggttcttgctttcattgctttagtatcaagtgtttcttgtacacagacaggcggctgcagctgtggtcaacaacatagccatgagcagcaacatcatccacaacaacatcatccacaaaaacaacaacatcaaccaccaccacaacatcaccagcaggagcaacaccaacaacaacaagttcacatgcaaccacaaaaacatcagcaacaacaag

SEQ ID NO: 23926 - DNA, 379 bp, Zea mays
  Clone ID: LIB3152-046-P1-K1-C11
cgaagtctgccccgctcttcggcctcgtcccttctctccaggtgagcgctggatgaacctctgctcggctttctgcgttgcgctaatcgattgctggatggtcgccagtctgatttgatgaaacagaagttggggaaattgaggatctccttagggccatggatgtagatgatgtgctcagtaacttgcgtgttgttggtgtgccaacaaagagtgcaatttacatatggggttataaccacagtggccagactgcccgaaagggcaaggaatgccacttgaggatccccaagagcctccctcccaaactattcaaattggggaatgggaagagcctcaggtggaccgatattgcatgtggccgtgagcataccgctgc

SEQ ID NO: 23927 - DNA, 383 bp, Zea mays
  Clone ID: LIB3152-046-P1-K1-C12
cggacgcccaccagcagctgcccccttgctgtcgccgcctctccgcgcgaccgatctaccgccgccgccaccatgtcgctgatcgccggcgaggacttccaacatattctgcgtctgctgaacaccaacgtggatgggaagcagaagatcatgttcgccatgacctccataaagggtgttgggcgccgcttctccaacatcgtctgcaagaaggccgacatcgacatgaacaagagggccggtgagctgacgcctgaagagctggagcgcctgatgacggtcgtggccaaccctaggcagttcaaggtgccggactggttcctcaacaggaagaaggattacaaggacggaaggttctcacaggtcgtttccaacgccctcga

SEQ ID NO: 23928 - DNA, 387 bp, Zea mays
  Clone ID: LIB3152-046-P1-K1-C2
gcattcagaaacacaccaagcgaagcacattagcaacaacctaacaacaatggctaccaagatattatccctccttgcgcttcttgcgctttttgcgagcgcaacaaatgcgttcattattccacaatgctcacttgctccaagttccattattacacagttcctcccaccagttacttcaatgggcttcgaacacccagctgtgcaagcctataggctacaacaagcaattgcggcgagcgtcttacaacaaccaatttcccagttgcaacaacaatccttggcacatctaacaatacaaaccaccgcaacgcaacagcaacaacaattcctaccagcactgagccacctagccatggtgaaccctgccgcctacttgcaacagca

SEQ ID NO: 23929 - DNA, 387 bp, Zea mays
  Clone ID: LIB3152-046-P1-K1-C3
ctgccttctgcgcctccatttcggtctctgtcccttgcaagttcaatctcacctccaaccatgggtaaagagaagtcccacatcaacattgtggttattggccatgtcgactctggcaagtcgaccaccacaggacaccttatctacaagcttggaggcattgacaagcgtgtgatcgagaggttcgagaaggaggctgctgaaatgaacaagcggtccttcaagtacgcgtgggtgctcgacaagctcaaggctgagcgtgagagaggtatcaccattgatatcgctctgtggaagtttgagaccaccaagtactactgcacggtcattgatgcccctggacaccgtgacttcatcaagaacatgatcactggtacctcccaggct

SEQ ID NO: 23930 - DNA, 386 bp, Zea mays
  Clone ID: LIB3152-046-P1-K1-C4
gagaccaacaagcaacatagaaagtggaatccagtagcaacaatagagcaacaatggcgaccaagatattttccctccttatgctccttgctctttctgcatgtgttgctaacgcgacaattttccctcaatgctcacaagctcctatagcttcccttcttcccccataccttccatcaatgatagcttcagtatgtgaaaacccagctcttcaaccctataggctccaacaagcaatcgcagcaagcaacatacctttatcacccttgtttcaacaatcgccagccctatctttggtgcagtcattggtacaaaccatcagggcacagcagctgcagcaactcgtgctacctgtgatcaaccaagtagctctggcaaacctttct

SEQ ID NO: 23931 - DNA, 381 bp, Zea mays
  Clone ID: LIB3152-046-P1-K1-C5
agcattaagaaacacaccaagcgaagttacctagcaacgacttaacaacaatggctaccaagatattagccctccttgcgcttcttgccctttttgtgagcgcaacaaatgcgttcattattccacaatgctcacttgctcctagtgccattataccacagttcctccgaccagttacttcaatgggcttcgaacacctagctgtgcaagcctacaggctacaacaagcgcttgcggcgagcgtcttacaacaaccaattaaccaattgcaacaacaatccttggcacatctaaccatacaaaccatcgcaacacaacagcaacaacagtttctaccagcactgagccaactagatgtggtgaaccctgtcgcctacttgc

SEQ ID NO: 23932 - DNA, 386 bp, Zea mays
  Clone ID: LIB3152-046-P1-K1-C6
ggcatcttacctttatcacccttgttcttccaacaaccgtcagccctattacagcagttacctttggtgcatttgttggcacaaaacatcaaggcacaacaactacaacaacttgtgctaggaaaccttgctgcctactctcagcaacaacagtttcttccattcaaccaactagctgcattgaactctgcttcttatttgcaacaacaacaactaccattcagccagctatctgctgcctacccccagcaatttcttccattcaaccaactgacagctttgaactctcctgcttatttacagcagcaacaactactaccattcagccagctagctggtgtgagccctgctaccttcttgacacaaccacaattgttgccgttcta

SEQ ID NO: 23933 - DNA, 387 bp, Zea mays
  Clone ID: LIB3152-046-P1-K1-C7
gagaccaactagcaacatagaaagcacaatagtgtaccaacaatggcagccaaaatattttgcctccttatgctccttggtctttctgcaagtgctgctacggcgaccattttcccgcaatgctcgcaagctcctatagcttcccttcttcccccgtacctctcaccagcggtgtcttcggtatgtgaaaacccaattcttcaaccctacaggatccaacaggcaatcgcagctggcatcttacctttatcacccttgttcctccaacaatcatcagccctattacaacagttacctttggtgcatttattggcacaaaacatcagggcacaacaactacaacaacttgtgctagcaaaccttgctgcctactctcagcaacagcag

SEQ ID NO: 23934 - DNA, 349 bp, Zea mays
  Clone ID: LIB3152-046-P1-K1-C8
cttcggtatgtgaaaacccaattcttcaaccctacttgcaacagttgcttccattcaaccaactggctgtgtcgaactctgctgtgtacctacaacagcgacaacagttacttaatccactagcagtggctaacccattggtcgctaacttcctgcagcagcaacaattgctgccatacaaccagttctctttgatgaaccctgccttgcagcaacccatcgttggaggtgccatcttttagattacatatgagatgtactcaacaatggtgccctcataccggcatgtgtttcctagaaataatcaatatattgattgagatttatcttggtttaaaaaaaaaaataa

SEQ ID NO: 23935 - DNA, 298 bp, Zea mays
  Clone ID: LIB3152-046-P1-K1-C9
acttgcaacagttgcttccattcaaccaactggctgtgtcgaactctgctgggtacctacaacagcgacaacagttacttaatccactagcagtggctaacccattggtcgctaacttcctgcagcagcaacaattgctgccatacaaccagttctctttgatgaaccctgccttgcagcaacccatcgttggaggtgccatcttttagattacatatgagatgtactcaacaatggtgccctcataccggcatgtgtttcctagaaataatcaatatattgattgagatttatcttg

SEQ ID NO: 23936 - DNA, 351 bp, Zea mays
  unsure at all n locations
  Clone ID: LIB3152-046-P1-K1-D1
ccccctccgacatcgncccttcgtgcccacttgcaaccgataatgcgccggcgttgagatgttggtttatcaggatctcctatctggcgacgagctcctgtcggattcattcacctacaaggagctcgagaacggcgtcctgtgggaggtcgagggaaagtgggtcacccaaggtcctgttgatgtggacattggtgccaatccatctcgcgagggtggtgaggacaaaagcgttgatgacacagctgtgaagggggttgattttgttgacacaattccgtctacaggagcatcctccttttgacaagaaatcatttgtgtcttacattaaaaaattcattatgtttcttt

SEQ ID NO: 23937 - DNA, 382 bp, Zea mays
  Clone ID: LIB3152-046-P1-K1-D10
caaagcggcagtgcgtagagaggatcgtcgaacagaacagcatgaagatggtcatcgttctcgtcgtgtgcctggctctgtcagctgccagcgcctctgcaatgcagatgccctgcccctgcgcggggctgcagggcttgtacggcgctggcgccggcctgacgacgatgatgggcgccggcgggctgtacccctacgcggagtacctgaggcagccgcagtgcagcccgctggcggcggcgccctactacgccgggtgtgggcagacgagcgccatgtaccagccgctccggcaacagtgctgccagcagcagatgaggatgatggacgtgcagtccgtcgcgcagcagctgcagatgatgatgcagcttgagcgtgccgc

SEQ ID NO: 23938 - DNA, 384 bp, Zea mays
  Clone ID: LIB3152-046-P1-K1-D11
agaccattagctttatctactccagagcgcagaagaacccgatcgacaccatgagggtgttgctcgttgccctcgctctcctggctctcgctgcgagcgccacctccacgcatacaagcggcggctgcggctgccagccaccgccgccggttcatctaccgccgccggtgcatctgccacctccggttcacctgccacctccggtgcatctcccaccgccggtccacctgccgccgccggtccacctgccaccgccggtccatgtgccgccgccggttcatctgccgccgccaccatgccactaccctactcaaccgccccggcctcagcctcatccccagccacacccatgcccgtgccaacagccgcattcaagcccgtgcc

SEQ ID NO: 23939 - DNA, 380 bp, Zea mays
  Clone ID: LIB3152-046-P1-K1-D12
gcaaatagaatttgaatctctatgctctagttttgatggacatcagaatgtgggcaggcgtatcttgaatgatttctcaagggcgtctgctgatcttgctgctactgctgctgatttgaaagttagacttcagatttacaaggtccgtcttctactgctcactaggaaccttaaggttgcgaagcgagaactcaaagtactaatgaacatggcacgtggtagggattcatctacagagcttctcttgaaatctcagctggagtatgcccgggggaattataggaaggctgtgaagctattgagcacaccaaataatcggactgaaccagcaatgctagccattttccacaacaacatgggatgtatactccaccaacaga

SEQ ID NO: 23940 - DNA, 390 bp, Zea mays
  Clone ID: LIB3152-046-P1-K1-D2
tttctatcagtaccatcaatcatcttttatcttagtagtataggcaccaaatcaggatctgtaacatcaattatctaactccaaaaaccatgaagctggtgcttgtggttcttgctttcattgctttagtatcaagtgtttcttgtacacagacaggcggttgcagctgtggtcaacaacaaagccatgagcagcaacatcatccacaacatcatcatccacaaaaacaacaacatcaaccaccaccacaacatcatcagcagcagcaacaccaacaacaacaagttcacatgcaaccacaaaaacatcagcaacaacatgaagtacatgtttaacaacaacaacaacaaccgttataccaacaacaacaacaactacatgtccaacaac

SEQ ID NO: 23941 - DNA, 389 bp, Zea mays
  Clone ID: LIB3152-046-P1-K1-D3
cgaagagctgtcagacatttagagaaaggaagagttgtcatatttgctgctggaacagggaacccattcttcacgactgatacagctgctgctctccgttgtgccgaaatcaatgcagaggtagtgctgaaagcaacaaatgttgatggtgtgtatgatgcggaccccaggcagaatccaaatgcccgccttctggagactgtgagctatcatgaagttacgacaagagatctctcagtaatggatatgactgctattacactatgccaagaaaacaacattcccattgtcgtgtttaacttgcaagagcctggaaacattgcaaaggctattgtcggtgagaaggttggtaccttcatcggatgcacaagagatcaggagctaaatgg

SEQ ID NO: 23942 - DNA, 385 bp, Zea mays
  Clone ID: LIB3152-046-P1-K1-D4
gcacatatctactatactatactctaggaagcaaggacaccaccgccatggcagccaagatgcttgcattgttcgctctcctagctctttgtgcaagcgccactagtgcgacccatattccagggcacttgccaccagtcatgccattgggtaccatgaacccatgcatgcagtactgcatgatgcaacaggggcttgccagcttgatggcgtgtccgtccctgatgctgcagcaactgttggccttaccgcttcagacgatgccagtgatgatgccacagatgatgacgcctaacatgatgtcaccattgatgatgccgagcatgatgtcaccaatggtcttgccgagcatgatgtcgcaaatgatgatgccacaatgtcactg

SEQ ID NO: 23943 - DNA, 386 bp, Zea mays; identical to SEQ ID NO: 21702
  Clone ID: LIB3152-046-P1-K1-D5

SEQ ID NO: 23944 - DNA, 386 bp, Zea mays
  Clone ID: LIB3152-046-P1-K1-D6
actagcaacatagaaagcacaatagtgttccaacaatggcagccaaaatattttgcctccttatgctccttggtctttctgcaagtgctgctacggcgaccattttcccgaaatgctcgcaagctcctatagcttcccttcttcccccgtacctctcaccagcggtgtcttcggtatgtgaaaacccaattcttcaaccctacaggatccaacaggcaatcacagctggcatcttacctttatcacccttgttcctccaacaatcatcagccctattacatcagttacctttggtgcatttattggcacaaaacatcagggcacaacaactacaacaacttgtgctagcaaaccttgctgcctactctcagcaacagcagtttctt

SEQ ID NO: 23945 - DNA, 385 bp, Zea mays
  Clone ID: LIB3152-046-P1-K1-D7
aagcacaatattgtaccaacaatgtcagccaaaatattttgcctccttatgctccttggtatttctgcaagtgctgctacggcgaccattttcccgcaatgctcacaagctcctatagcttcccttcttcccccgtacctctcaccagcggtgtcttcggtatgtgaaaacccaattcttcaaccctacaggatccaacaggcaatcgcagctggcatcttacctttatcacccttgttcctccaacaatcatcagccctattacagcagttacctttggtgcatttattggcacaaaacatcagggcacaacaactacaacaacttgtgctagcaaaccttgctgcctactcttagcaacagcagtttctttcattcaaccaac

SEQ ID NO: 23946 - DNA, 388 bp, Zea mays
  Clone ID: LIB3152-046-P1-K1-D8
cttgctcctagtgccattattccacagttcctcccaccagttacttcaatgggcttcgaacatccagccgtgcaagcctacaggctacaactagcgcttgcggcgagcgtcttacaacaaccaattgcccaattgcaacaacaatccttggcacatctaaacctacaaaccatcgcaacgcaacagcaacaacagtttctgccatcactgagccacctagccgtggtgaaccctgtcgcctacttgcaacagcagctacttgcatccaacccacttgctctggcgaacgtagctgcataccagcaacaacaacgtctgcaacagtttatgccagcgctcagtcaactagccatggtgaaccctgtcgcctacctacaacagcaacaat

SEQ ID NO: 23947 - DNA, 387 bp, Zea mays
  Clone ID: LIB3152-046-P1-K1-D9
gatcgtcgaacagaacagcatgaatatggtcatcgttctcgtcgtgtgcctggctctgtcagctgccagcgcctctgcaatgcagatgccctgcccctgcgcggggctgcagggcttgtacggcgctggcgccggcctgacgacgatgatgggcgccggcgggctgtacccctacgcggagtacctgaggcagccgcagtgcagcccgctggcggcggcgccctactacgccgggtgtgggcagacgagcgccatgtaccagccgctccggcaacagtgctgccagcagcagatgaggatgatggacgtgcagtccgtcgcgcagcagctgcagatgatgatgcagcttgagcgtgccgctgccgccagcagcagcctgtacgagcc

SEQ ID NO: 23948 - DNA, 389 bp, Zea mays
  Clone ID: LIB3152-046-P1-K1-E1
agaaagcacaatagtgtaccaacattggcagccaaaatattttgcctccttatgctccttggtctttctgcaagtgctgctacggcgaccattttcccacaatgctcacaagctcctatagcttcccttcttcccccgtacctctcaccagcggtgtcttcggtatgtgaaaacccaattcttcaaccctataggatccaacaggcaatcgcagctggcatcttacctttatcacccttgttcctccaacaatcatcagccctattacagcagttacctttggtgcatttattggcacaaaacatcagggcacaacaactacaacaacttgtgctagcaaaccttgctgcctactctcagcaacagcagtttcttccattcaaccaact

SEQ ID NO: 23949 - DNA, 335 bp, Zea mays
  Clone ID: LIB3152-046-P1-K1-E10
cgccggccgcatcagccgtcgtgttgcgctcaggaaggtggtgttcggcgggcaggtgacggaggaggaggccgagagcctcaacaagaggaaaccatgctctgctcccaagtggaaggagatgacaggaagcggcatatttgctgctgggggcgaggctgaagaagatgaatctgccaatgcctctgcaactcccatccgaaccgctccaaagaattatcatgcaattagcactataagccacatctcattttccgaggaagaaagcatttcttcgaagaagccgactttgattgcagaggttgcgaatcatcgcgagctgagcggcacacttt

SEQ ID NO: 23950 - DNA, 222 bp, Zea mays
  Clone ID: LIB3152-046-P1-K1-E11
agcattcatacacacatcaagttattcgcactgccaacagccttacaacaagggtaccacaatgtttaccctgcttttagttcttgctgttctagttggcgcaacagatggcgccactaatgcacagagtttacttgagtgctgagtcgttattacagagattcttccacaagttacttcaatgggctcttaaaatgcattcgtacaagcctacaggctaga

SEQ ID NO: 23951 - DNA, 336 bp, Zea mays
  Clone ID: LIB3152-046-P1-K1-E12
gctcgttgccctcgctctcctggctctcgctgcgagcgccacctccacgcatacaagcggcggctgcggctgccagccaccgccgccggttcatctaccgccgccggtgcatctgccacctccggttcacctgccacctgcggtgcatctaccaccgccggtccacctgccgacggcggtccacctgccaccggcggtccatgtgccgccgtcggttcatatgccgccgccaccatgccactaccctactcaaccgtcccggcctcagcctcatccccagccacacccatgcccgtgccaacagccgcatgcaagcccgtgccagctgcagggaac

SEQ ID NO: 23952 - DNA, 388 bp, Zea mays
  Clone ID: LIB3152-046-P1-K1-E2
aacctggcaccatagaaggcacatttttgtcccaacaatggcagccaaaatatttggcttccttatgctccttggtctttctgcaagtgctgctaccgcaaccattttcccacaatgctcacaagctcctatagcttcctttcttcccccatacctctcaccagcggtgtcttcagtatgtgaaaacccaattcttcaaccctacaggatccaacaggcaatcgcagcaggcatcttacctttatcacccttgttcctccaacaaccgtcagccctattacagcagttacctttggtgcatttgttggcacaaaacatcaaggcacaacaactacaacaacttgtgctaggaaaccttgctgcctactctcagcaacagcagtttctt

SEQ ID NO: 23953 - DNA, 389 bp, Zea mays
  Clone ID: LIB3152-046-P1-K1-E3
attttgagcattcagaaacacaccaagttaagcacattagcaacaacctaacaacaatggctaccaagatattatccctccttgcgcttcttgcgctttttgcgagcgcaacaaatgcgttcattattccacaatgctcacttgctccaagttccattattacacagttcctcccaccagttacttcaatgggcttcgaacacccagctgtgcaagcctataggctacaacaagcaattgcggcgagcgtcttacaacaaccaatttcccagttgcaacaacaatccttggcacatctaacaatacaaaccatcgcaacgcaacagcaacaacaattcctaccagcactgagccacctagccatggtgaaccctgccgcctacttgcaa

SEQ ID NO: 23954 - DNA, 389 bp, Zea mays
  Clone ID: LIB3152-046-P1-K1-E4
acaacattaaccaccaccacaacattttttgcagcagcaacaccaacaacaacaagttcacatgcaaccacaaaaacatcagcaacaacaagaagttcatgttcaacaacaacaacaacaaccgcagcaccaacaacaacaacaacaacagcaccaacaacaacatcaatgtgaaggccaacaacaacatcaccaacaatcacaaggccatgtgcaacaacacgaacagagccatgagcaacaccaaggacagagccatgagcaacaacatcaacaacaattccagggtcatgacaagcagcaacaaccacaacagcctcagcaatatcagcagggccaggaaaaatcacaacagcaacaatgtcattgccaggagcagtaacagacta

SEQ ID NO: 23955 - DNA, 369 bp, Zea mays
  Clone ID: LIB3152-046-P1-K1-E5
gagcattcagaaacacaccaagcgtttcacattagcaacaacctaacaacaatggctaccaagatattatccctccttgcgcttcttgcgctttttgcgagcgcaacaaatgcgttcattattccacaatgctcacttgctccaagttccattattacacagttcctcccaccagttacttcaatgggcttcgaacacccagctgtgcaagcctataggctacaacaagcaattgcggcgagcgtcttacaacaaccaatttcccagttgcaacaacaatccttggcacatctaacaatacaaaccatcgcaacgcaacagcaacaacaattcctaccagcactgagccacctagccatggtgaaccct

SEQ ID NO: 23956 - DNA, 374 bp, Zea mays
  Clone ID: LIB3152-046-P1-K1-E6
accacgcgtccgtccacgcgtccgattagctttatctacttcagagcgcagaagaacccgatcgacaccatgagggtgttgctcgttgccctcgctctcctggctctcgctgcgagcgccacctccacgcatacaagcggcggctgcggctgccagccaccgccgccggttcatctaccgccgccggtgcatttgccaccttcggttcacctgccaccttcggtgcattttccaacggcggtgcacctggcggcggcggtgcaactgtcaacggcggttcatagtgccccgccgggttatatgtcgccgccaccatgccactaccctactcaaccgccccgggcttagactcatatccagccacacccatgccc

SEQ ID NO: 23957 - DNA, 387 bp, Zea mays
  Clone ID: LIB3152-046-P1-K1-E7
accattagctttatctactccagtatcgcagaagaacccgatcgacaccatgagggtgttgctcgttgccctcgctctcctggctctcgctgcgagcgccacctccacgcatacaagcggcggctgcggctgccagccaccgccgccggttcatctaccgccgccggtgcatctgccacctccggttcacctgccacctccggtgcatctcccaccgccggtccacctgccgccgccggtccacctgccaccgccggtccatgtgccgccgccggttcatctgccgccgccaccatgccactaccctactcaaccgccccggccttagcctcatccccagccacacccatgcccgtgccaacagccgcatccaagcccgtgccagct

SEQ ID NO: 23958 - DNA, 388 bp, Zea mays
  Clone ID: LIB3152-046-P1-K1-E9
gttgcaacaacaatccttggcacatttaacaatacaaaccatcgcaacgcaacagcaacaacaattcctaccagcactgagccacctagccatggtgaaccctgccgcctacttgcaacagcagttgcttgcatcaaacccacttgctctggcaaacgtagttgcaaaccagccacaacaacagctgcaacagtttctgccagcgctcagtcaactagccatggtgaaccctgccgcctacctacaacagcaacaactgctttcatctagcccgctcgctgtggccaatgcacctacatacctgcaacaacaattgttgcaacagattgtaccagctctgactcagctagttgtggcaaaccctgctgcctacttgcaacagctgctt

SEQ ID NO: 23959 - DNA, 370 bp, Zea mays
  Clone ID: LIB3152-046-P1-K1-F1
ccaggcgaggctctttaccaccaccctaccaccattggttaccaggatttaatccttcctgggccttttgggccttttggcaggcgcaccaaatgcgtcaatatttcaacaatgctaactggctccaggtcccatattacccagtttcttccaccagttacttaaagggcttcgaacacccagctgtgcagcctataggctacaacaagcaattgcggcgagcgtcttacaacaaccaatttcccagttgcaacaacaatccttggcacatctaacaatacaaaccatcgcaacgcaacagcaacaacaattcctaccagcactgagccacctagccatggtgaaccctgccgcctacttgcaacagcag

SEQ ID NO: 23960 - DNA, 385 bp, Zea mays
  Clone ID: LIB3152-046-P1-K1-F10
cagcattcagaaacacaccaagcgaagcgcactagcaacaacctaacaacaatggctaccaagatattagccctccttgcgcttcttgcccttttagtgagcgcaacaaatgcgttcattattccacagtgctcacttgctcctagtgccattattccacagttcctcccaccagttacttcaatgggcttcgaacatccagccgtgcaagcctacaggctacaactagcgcttgcggcgagcgtcttacaacaaccaattgcccaattgcaacaacaatccttggcacatctaaacctacaaaccatcgcaacgcaacagcaacaacagtttctgccatcactgagccacctagccgtggtgaaccctgtcgcctacttgcaac

SEQ ID NO: 23961 - DNA, 383 bp, Zea mays
  Clone ID: LIB3152-046-P1-K1-F11
cccacgcgtccgattgataccaactagcaacatacatagtgaagtacagtagcaacatcttagcaccaatggcagccaagatttttgccctccttgccctccttgctctttcagcaagtgttgctaccgcgactattattccacaatgctcacaacaatacctctctccggtgacagccgcgagatttgaatacccaactatacaatcctacaggctacaagaggccatcacagcaagcatcttacggtcgttagcattgactgtccaacaaccatatgccctattgcaacaaccatccttagtgaatctatatctccaaagaatcgcagcacaacaactacaacagcagttgcttccaacaatcaatcaagtagttgcagcg

SEQ ID NO: 23962 - DNA, 379 bp, Zea mays; identical to SEQ ID NO: 21767
  Clone ID: LIB3152-046-P1-K1-F12

SEQ ID NO: 23963 - DNA, 390 bp, Zea mays
  Clone ID: LIB3152-046-P1-K1-F2
caattagctcatcgactccagattggagaactcgacaccatgaaggtgctgatcgttgcccttgctctcctggcgctcgctgcgagcgccgcctccagtacaagcggcggctgtggctgccagacaccaccgtttcatctaccgcctccgttctatatgccgcctccgttctatctgccgccgcagcagcagccgcagccatggcaataccccactcaaccaccgcagctaagcccgtgccagcagttcggatcctgcggcgtcggcagcgtcggcagcccgttcctgggccagtgcgtcgagttcctgaggcaccagtgcagcccggcggcgacgccctacggctcgccacagtgccaggcgctgcagcagcagtgctgccaccagatc

SEQ ID NO: 23964 - DNA, 152 bp, Zea mays
  unsure at all n locations
  Clone ID: LIB3152-046-P1-K1-F3
cccccagnncagatttctttccatttcaaccccaactgnngcagcattgaaccctctcctnggcttatttacccagcagcaacaacctaccctaccattnnncagccagcttagcnntggtgtgagggccctnnngctacctntnncttgat

SEQ ID NO: 23965 - DNA, 387 bp, Zea mays
  Clone ID: LIB3152-046-P1-K1-F4
gagaccaactagcaacatagaaagcacaatagtgtaccaacaatggcagctaaaatattttgcctccttatgctccttggtctttctgcaagtgctgctacggcgaccattttcccacaatgctcacaagctcctatagcttcccttcttcccccgtacctctcaccaacggtgtcttcggtatgtgaaaacccaattcttcaaccctacaggatccaacaggcaatcgcagctggcatcttacctttatcacccttgttcctccaacaatcatcagccctattacagcagttacctttggtgcatttattggcacaaaacatcagggcacaacaactacaacaacttgtgctagcaaaccttgctgcctactctcagcaacagcag

SEQ ID NO: 23966 - DNA, 379 bp, Zea mays
  Clone ID: LIB3152-046-P1-K1-F5
gcagatcaaacaagtagcgacagctcgacaaagatttgtgagagtgatccggcgctgagaagagatggctaagatcgccgcagccgccgcggcggcggcggcgctgtgcttcgcggccctggtggccgtggccgtctgccaaggcgaggtcgagcggcagaggctcagggacctgcagtgctggcaggaggtccaggagagcccgctcgacgcgtgccgccaggtcctcgaccggcagctaaccggcggcggcgtcggcggcccgttccggtggggcaccgggctccggatgcggtgctgccagcagctccaggacgtgagccgcgagtgccgctgcgccgccatccggagcatggtcaggggctacgaggaggccatg

SEQ ID NO: 23967 - DNA, 386 bp, Zea mays
  Clone ID: LIB3152-046-P1-K1-F6
cctcaccggcgtcgccatcgtaatcgccttggacagcggcaccagaacctctgcctccgcagggtgcttgctggtatcattacaatctggtagttttagtggttgggcttgacttcctactattcagaaacacagtaccgagaagtctttaggtggggtcaaagatggtgtcgctgaagttgcaaaagcgccttgccgcgagctacctcaagtgtgggaaaggcaaggtgtggcttgacccaaatgaagttagtgagatctccatggcaaactcccgccagaatatccggaagttggttaaggatgggtttatcatcaagaagcctcataagatccactctagatcccgtgcaagaagggcacatgacgccaagcaaaagggacgc

SEQ ID NO: 23968 - DNA, 364 bp, Zea mays
  Clone ID: LIB3152-046-P1-K1-F7
ctaccatttggccagctagctacaacaagccccgcttccttcttgacacaacaacaattgcttccgttctaccagcagtttgtggctaaccccgcaacccttttacaactgcaacagttgctgccctttgtccaacttgctttgacaaacccagcagccttctaccaacaacacatcattggcggtgccctcttttagattgcttattagttgtcattcaataatgaagttttttggctgatgtatgtggcctcctagaaataagaagttatatttccaaaaaaaaaaattttaaatttatttaattatatttttatataaaattaaatttatataaattatttatcatatatatatttaataa

SEQ ID NO: 23969 - DNA, 384 bp, Zea mays
  Clone ID: LIB3152-046-P1-K1-F8
caaagcggcagtgcgtagagaggatcgtcgaacagaacagcatgaagatggggatcgttctcgtcgtgtgcctggctctgtcagctgccagcgcctctgcaatgcagatgccctgcccctgcgcggggctgcagggcttgtacggcgctggcgccggcctgacgacgatgatgggcgccggcgggctgtacccctacgcggagtacctgaggcagccgcagtgcagcccgctggcggcggcgccctactacgccgggtgtgggcagacgagcgccatgtaccagccgctccggcaacagtgctgccagcagcagatgaggatgatggacgtgcagtccgtcgcgcagcaactgcagatgatgatgcagcttgagcgtgccgctg

SEQ ID NO: 23970 - DNA, 388 bp, Zea mays
  Clone ID: LIB3152-046-P1-K1-F9
gacgccactaccaccaccgcatgctacgacggggagatgtttctgcgacggatcctgaccggcggaggtggcctggcggcgctgagggcggcgcgcgccgtgaaggagacgacggggatcgtcggccttgaggtggcgcccaacgcgcgggaggttctcatcgggctctacacgcgtacgctcaaggagatcgaggccgtccccaaagacgagggctaccgcaaggccgttgagtccttcaccaatcaccgcctccagatctgccaggaggaggacgactggaagcgcatcgaggaccgaatcggatgcgggcaagtcgaggagctcatcgaggaggccgaggacgagctcaagctcatcgccaaaatgattgaatgggatccgtggg

SEQ ID NO: 23971 - DNA, 391 bp, Zea mays
  Clone ID: LIB3152-046-P1-K1-G1
ctttggtgtccttctgtgataaaattgcttcacaaggggggccactgcaggctgtggatgatgaagatagagctattcttcaagcagcacctgttgctcagctggtttctggtactagaataagtgcaaggcttcgaaatgtacagcctgaagtaaacctgtcacaaagttatgaagtgctaaggcggcaaaagaaaagtgcagaaaatgaacaaagcatgactagagatgaaaagtctcctgaagatgtagatttgtcgaagccaactgacgcagaagaagctgcaaaagaaccagagtcaaatggcactacgaaagaagccaacgattcaccagccaaagaaccagaagtatctacttcccctgaacccatggagagtgacaacggcaa

SEQ ID NO: 23972 - DNA, 382 bp, Zea mays
  Clone ID: LIB3152-046-P1-K1-G10
gagaccaacaagcaacatagaaagtggaatacagtagcaacaatagagcaacaatggcggccaagatattttccatccttatgctccttgctctttctgcatgtgttgctaacgcgaccatttttcctcaatactcacaagctcctatagctgcccttcttcccccataccttccatcaatgaccgcttcagtatgtgaaaacccagcccttcaaccctacaggctccaacaagcaatcgcaacaagcaacttacctttatcacccctgttctttcaacaatcgccagccctatctttggtgcagtcattggtacaaaccatcaaggcacaacagctgcagcaactcgtgctaccagtgatcagccaagtagctctggcaaa

SEQ ID NO: 23973 - DNA, 381 bp, Zea mays
  Clone ID: LIB3152-046-P1-K1-G11
caactagcaacatagaaagcacaatagtgtaccaacaatggcagccaaaatattttgcctccttatgctccttggtctttctgcaagtgctgctacggcgaccattttcccacaatgctcacaagctcctatagcttcccttcttcccccgtacctctcaccagcggtgtcttcggtatgtgaaaacccaattcttcaaccctataggatccaacaggcaatcgcagctggcatcttacctttatcacccttgttcctccaacaatcatcagccctattacagcagttacctttggtgcatttattggcacaaaacatcagggcacaacaactacaacaacttgtgctagcaaaccttgctgcctactctcagcaacaaca

SEQ ID NO: 23974 - DNA, 384 bp, Zea mays
  Clone ID: LIB3152-046-P1-K1-G12
gcccgttcctgggccagtgcgtcgtgttcctgaggcaccagtgcagcccggcggcgacgccctacggctcgccacagtgccaggcgctgcagcagcagtgctgccaccagatcaggcaggtggagccgctgcaccggtaccaggcgacatacggtgtggtcctgcagtccttcctgcagcagcagccgcagggcgagctcgcggcgctgatggcggcccaggtagcgcagcagctgacggcgatgtgcggcctgcagctgcagcagccaggtccctgcccttgcaacgcagctgccggcggtgtctactactgaggaaactatgtactgtagtaataatgtaatggagccgctgactagctacctagctcgctagtttactcat

SEQ ID NO: 23975 - DNA, 388 bp, Zea mays
  Clone ID: LIB3152-046-P1-K1-G2
tgcaaatctcccttcgcagccgccgaggaaccccttcacagcgcggaagatggctgaacaggaggccccagtcgtggttgaggcaccaaccccagttcttggggagcctatggacttgatgactgctctgcagctcgtgatgaagaagtcaagtgctcatgacggacttgtgaagggtctccgtgaggctgccaaggccatcgagaagcacgccgctcagctttgcgtgcttgctgaggactgtgaccagccagattacgtcaagctggtgaaggcactctgcgctgagcacaatgttcacctggtcactgttcctgccgcgaagactcttggcgagtgggccgggctttgcaagattgactctgagggcaaggcaaggaaggttgta

SEQ ID NO: 23976 - DNA, 390 bp, Zea mays
  Clone ID: LIB3152-046-P1-K1-G3
aagcacaatagtgtaccaacaatggcagccaaaatattttgcctccttatgctccttggtctttctgcaagtgctgctacggcgaccattttcccgaaatgctcgcaagctcctatagcttcccttcttcccccgtacctctcaccagcggtgtcttcggtatgtgaaaacccaattcttcaaccctacaggatccaacaggcaatcacagctggcatcttacctttatcacccttgttcctccaacaatcatcagccctattacatcagttacctttggtgcatttattggcacaaaacatcagggcacaacaactacaacaacttgtgctagcaaaccttgctgcctactctcagcaacagcagtttcttccattcaaccaactagct

SEQ ID NO: 23977 - DNA, 385 bp, Zea mays
  Clone ID: LIB3152-046-P1-K1-G4
atagaaagcacaatagtgtaccaacaatggcagccaaaatattttgcctccttatgctccttggtctttctgcaagtgctgctacggcgaccattttcccgaaatgctcgcaagctcctatagcttcccttcttcccccgtacctctcaccagcggtgtcttcggtatgtgaaaacccaattcttcaaccctacaggatccaacaggcaatcacagctggcatcttacctttatcacccttgttcctccaacaatcatcagccctattacatcagttacctttggtgcatttattggcacaaaacatcagggcacaacaactacaacaacttgtgctagcaaaccttgctgcctactctcagcaacagcagtttcttccattcaa

SEQ ID NO: 23978 - DNA, 260 bp, Zea mays
  Clone ID: LIB3152-046-P1-K1-G6
gctgatgtgagccctgttgccttcttgacacaacaacagttgttgccgttctacctgcacgctgcgcctaacgctggcaccctcttacaactgcaacaattgctgccattcaaccaacttgctttgacaaacccaacagcgttctaccaacaacccatcattggtggtgccctcttttagattgcttatgagttatagttcaataatgaagttttttggatgatgtttgtggcttcccagaaataagaaagtacatttct

SEQ ID NO: 23979 - DNA, 388 bp, Zea mays
  Clone ID: LIB3152-046-P1-K1-G7
attttgagcattcagaaacacaccaagcgaagctacctagcaacgacttaacaacaatggctaccaagatattagccctccttgcgcttcttgccctttttgtgagcgcaacaaatgcgttcattattccacaatgctcacttgctcctagtgccattataccacagttcctccgaccagttacttcaatgggcttcgaacacctagctgtgcaagcctacaggctacaacaagcgcttgcggcgagcgtcttacaacaaccaattaaccaattgcaacaacaatccttggcacatctaaccatacaaaccatcgcaacacaacagcaacaacagttcctaccagcactgagccaactagatgtggtgaaccctgtcgcctacttgca

SEQ ID NO: 23980 - DNA, 388 bp, Zea mays
  Clone ID: LIB3152-046-P1-K1-G8
atcgactccagattggagaactcgacaccatgaaggtgctgatcgttgcccttgctctcctggcgctcgctgcgagcgccgcctccagtacaagcggcggctgtggctgccagacaccaccgtttcatctaccgcctccgttctatatgccgcctccgttctatctgccgccgcagcagcagccgcagccatggcaataccccactcaaccaccgcagctaagcccgtgccagcagttcggatcctgcggcgtcggcagcgtcggcagcccgttcctgggccagtgcgtcgagttcctgaggcaccagtgcagcccggcggcgacgccctacggctcgccacagtgccaggcgctgcagcagcagtgctgccaccagatcaggcaggt

SEQ ID NO: 23981 - DNA, 388 bp, Zea mays; identical to SEQ ID NO: 23979
  Clone ID: LIB3152-046-P1-K1-G9

SEQ ID NO: 23982 - DNA, 393 bp, Zea mays
  Clone ID: LIB3152-046-P1-K1-H1
gtcgaactctgctgcgtacctacaacagcgacaacagttacttaatccactagcagtgcctaacccattggtcactgccttcctacagcagcaacaattgctaccatacagccagttctctttgatgaaccctgccttgtcgtggcagcaacccatcgttggaggtgccatcttttagattacatatgagatgtaatcgataatggtgccctcataccggcatgtgtttcctagaaataatcaatatattgattgacatttaaaaaaaaaaaaaaaaaaaaaaaaaaaaaaaaaaaaaaaaaaaaaaaaaaaattttaaaaaaaaaaaaaaaaaaaaaaaaaaaaaaaaaaaaaaaaaaaaaaaaaaaaaaaaaaaaaaaaaaagggggggcc

SEQ ID NO: 23983 - DNA, 384 bp, Zea mays
  Clone ID: LIB3152-046-P1-K1-H10
caactagcatcatagaaagcttatttgtgtaccaacaatggcagccaaaatatggtgcttccttatgctccttggtctttctgcaagtgctgctaccgcaaccattttcccacaatgctcacaagctcctatagcttcctttcttcccccatacctctcaccagcggtgtcttcagtatgtgaaaacccaattcttcaaccctacaggatccaacaggcaatcgcagcaggcatcttacctttatcacccttgttcctccaacaaccgtcagccctattacagcagttacctttggtgcatttgttggcacaaaacatcaaggcacaacaactacaacaacttgtgctaggaaaccttgctgcctactctcagcaacagcagtt

SEQ ID NO: 23984 - DNA, 386 bp, Zea mays
  Clone ID: LIB3152-046-P1-K1-H12
gcgttcgctctcgcaagtcgcaagccactcgatttgtttacaggcgccggagctcccgacgacgactgagccatgtgcggcggcgcgatccttgccgagctccgcgagccggcgccgcgccggctcacggagcgggacatctggcagcagaagaagaagcccaagaggggcggcgccggcgggaggcgctcgttcgcggcggaagacgatgaggacttcgaggccgacttcgaggactttgaagccgactccggtgattcggatttggagctcggggaaggggctgacgacgacgtcatcgagatcaagcccttcgccgccaagagtactttctccagagatggcttaagcaccatgactactgctggttatgatgcccctgcagc

SEQ ID NO: 23985 - DNA, 392 bp, Zea mays
  Clone ID: LIB3152-046-P1-K1-H2
cgtccggaatccagtggcaccattggggcacttttggcggccaaaatatgccccatccttaggcacctggctctttctgaatgtgatgctaacgcgaccatatgtccttaatactaacaagctcctatagctgcccttctgtacgcataccgtccatcaatgaccgcttcagtctgtgaaaacgcagcccgtcaacgctacatgctccaacaagcaatggcaacaagcaactgacctttataacccctgttctttcaacaatcgccagccctatctttggtgcagtcattggtacaaaccatgacggcacagacagctgcagtagactcgtgctaccagtgatcagccaagtagctctggcaaacctttctccctactctcagcaacaacaa

SEQ ID NO: 23986 - DNA, 395 bp, Zea mays
  Clone ID: LIB3152-046-P1-K1-H3
ccgtccgatggatcccaactagcaccatacatattgaagtacactagcaacatcttagcaccaatgggagccaagatttttgccctccttgccctccttgctctttcagcaagcgctgctacctcgacttttattccacaatgctcacaacaatacctctctccggcgacagccgtgggatttcaatacccaactatacaatcctacatggtacaagaggccatccaagcaagcatcttacggtcattagcattaaccctccaacaaccatatgctctattgcaacagccatccttagtgcatctgtatctccaaagaatcgcggcacaacaactacaacaacagttgctaccaacaatcaatcaagtagttgcagcgaaccttgctgcttacct

SEQ ID NO: 23987 - DNA, 388 bp, Zea mays
  Clone ID: LIB3152-046-P1-K1-H4
tgacaagcagcaacaaccacaacagccttagcaatatcagcagggccaggaaaaatcacaacagcaacaatgtcattgccaggagcagcaacagactacaaggtgcagctataactactatagcagtagctcaaatctaaaaaattgtcatgaattcctaaggcagcagtgcagccctttggtaatgccttttctccaatcacgtttgatacaaccaagtagctgccaggtattgcagcaacaatgttgtcatgatcttaggcagattgagccacaatacattcaccaagcaatctacaacatggttcaatccataatccaggaggagcaacaacaacaaccatgtgagttatgtggatctcaacaagctactcaaagtgcggtggca

SEQ ID NO: 23988 - DNA, 366 bp, Zea mays
  unsure at all n locations
  Clone ID: LIB3152-046-P1-K1-H6
gactacccaacatctcagaagggagggagcgaccctcnncacctggtggcctcnncgctctcagggnnngtggcctgcccagattttctgtagaatgacaaattgacctgtgcaagacactatcacctttggagggtggaggaggctctgacanccattgaccaatgtgaagtgccaagtatccccaggacaaggagtgtgcattccctctcagaccccagcagcgtctggaaatctttgctggcatagcagctcggaaggatggtgcgcacctctcgcgcgactacgaacattcagaagtgagaagtacccttcacgcttgttctccgtcctcagggtgtggtatgcaagatctttgcgaagacc

SEQ ID NO: 23989 - DNA, 387 bp, Zea mays
  Clone ID: LIB3152-046-P1-K1-H7
gtaccatcaatcatcattcatcttattagtataggcaccaaatcaaatctgcaacatcaattatctaactccaaaaaccatgaagctggtgcttgtggttcttgctttcattgctttagtatcaagtgtttcttgtacacagacaggcggctgcagctgtggtcaacaacaaagccatgagcagcaacatcatccacaacaacatcatccacaaaaacaacaacatcaaccaccaccacaacatcaccagcagcagcaacaccaacaacaacaagttcacatgcaaccacaaaaacatcagcaacaacaagaagttcatgttcaacaacaacaacaacaaccgcagcaccaacaacaacaacaacaacagcaacaacaacaacatca

SEQ ID NO: 23990 - DNA, 387 bp, Zea mays
  Clone ID: LIB3152-046-P1-K1-H8
gaaattttcttgggcgttcttcggtttcattgtcacaaggttcgagttcgtcaccgtctagtacgactgtgcgagggaggaagaggcgaggagaagatgcagatcttcgtgaagaccctgacggggaagaccatcaccctcgaggtggagagcagcgacaccgtcgacaacgtcaaggccaaaatccaggacaaggaagggattcccccagatcaacagcgactgatattcgctggcaagcagctggaggatggacgcacgctggctgactacaacatccaaaaggagtcaactcttcatttggtcctcaggcttaggggtggaaccatgatcaaggtcaaaactctcactgggaaagagatcgagatcgacattgaacccactgac

SEQ ID NO: 23991 - DNA, 386 bp, Zea mays
  Clone ID: LIB3152-046-P1-K1-H9
tagcaacatagaaagcacaatagtgtaccaacaatggcagccaaaatattttggctccttatgctccttggtctttctgcaagtgctgctacggcgaccattttcccacaatgctcacaagctcctatagcttcccttcttcccccgtacctctcaccagcggtgtcttcggtatgtgaaaacccaattcttcaaccctataggatccaacaggcaatcgcagctggcatcttacctttatcacccttgttcctccaacaatcatcagccctattacagcagttacctttggtgcatttattggcacaaaacatcagggcacaacaactacaacaacttgtgctagcaaaccttgctgcctactctcagcaacaacagtttcttcc

SEQ ID NO: 23992 - DNA, 393 bp, Zea mays
  Clone ID: LIB3152-047-P1-K1-A10
catcaatcatcattcatctttttattataggcaccaaatcaaatctgcaacatcaattatctaactccaaaaaccatgaagctggtgcttgcggttcttgctttcattgctttagtatcaagtgtttcttgtacacagacaggctgctgcagctgtggtcaacaacaaagtcatgagcagcaacatcatccacaacaacatcatccacataaacaactacatcaaccaccaccacaacatcacctgcagcagcatcaccaacaacaacaattcacatgcatccacaaaacacatcaccaccatcaagaagttcatgttcaacaacaacaacaacaaccgcagcaccaacaacaacaacaacaacagcaccaacaacaacatcaatgtgaaggc

SEQ ID NO: 23993 - DNA, 393 bp, Zea mays
  Clone ID: LIB3152-047-P1-K1-A11
gcaaattgcaccaagaaatccatctagaggccgtcgacaggggaattaatggcgtcgtcgtctagcagcagccaccgccgcctcatcctcgcagccgccgtcctgctctccgtgctcgcggctgccagcgccagcgccgggacctcctgcgtgccggggtgggccatcccgcacaacccgctcccgagctgccgctggtacgtgaccagccggacctgcggcatcgggccgcgcctcccgtggccggagctgaagaggagatgctgccggagctggcggacatcccggcgtactgccggtgcacggcgctgagcatcctcatggacggcgcgatcccgccgggcccggacgcgcagctggagggccgcctagaggacctgccgggctgcccgc

SEQ ID NO: 23994 - DNA, 391 bp, Zea mays
  Clone ID: LIB3152-047-P1-K1-A12
gcattcagaaacacaccaagctaatcgcactagcaacaacctaacaacaatggctaccaagatattatccctccttgcgcttcttgcgctttttgcgagcgcaacaaatgcgtccattattccacaatgctcacttgctcctagttccattattccacagttcctcccaccagttacttcaatggccttcgaacacccagctgtgcaagcctataggctacaacaagcgattgcggcgagcgtcttacaacaaccaattgcccaattgcacaacaatccttggcacatctaacaatacaaaccatcgcaacgcaacagcaacaacagttcctaccagcactgagccacctagccatggtgaaccctgtcgcctacttgcaacagcagctgc

SEQ ID NO: 23995 - DNA, 272 bp, Zea mays
  Clone ID: LIB3152-047-P1-K1-A3
atgacctccaatgccgccgaggtggtactttggtggggaaaatgctgagtctcgggatgctctgggattcgagtgaatgacacatagaatgttgcgaagattgcacgcaatgtgctgcgcgaaggtgagtggctatcgctgaatggatcgaccggcgaagtgatcctcggaaagcaggcgctatacccaccagcccttagtggcgatctgcgaacattcatgtcctaggtggatgaccttagaaagctcaaggtactagcaaacgcggtacc

SEQ ID NO: 23996 - DNA, 395 bp, Zea mays
  unsure at all n locations
  Clone ID: LIB3152-047-P1-K1-A4
atcgactccagattggagaactcgtcaccatgaaggtgctgatcgttgcccttgctctcctggcgctcgctgcgagcgccgcctncagtacaagcggcggctgtggctgccagacaccaccgtttcatctaccgcctccgttctatatgccgcctccgttctatctgccgccgcagcagcagccgcagccatggcaataccccactcaaccaccgcagctaagcccgtgccagcagttcggatcctgcggcgtcggcagcgtcggcagcccgtcctgggccagtgcgtcgagttcctgaggcaccagtgcagcccggcggcgacgccctacggctcgccacagtgccaggcgctgcagcagcagtgctgccaccagatcaggcaggtggagccgc

SEQ ID NO: 23997 - DNA, 397 bp, Zea mays
  Clone ID: LIB3152-047-P1-K1-A5
agaaagcacaatagggtcccaacattggtagccaaaatattttgcctccttatgctccttggtctttctggcaagtgctgctacggcgaccattttcccgcaatgctcgcaagctcctatagcttcccttcttcccccgtacctctcaccagcggtgtcttcggtatgtgaaaacccaattcttcaaccctacaggatccaacaggcaatcgcagctggcatcttacctttatcacccttgttcctccaacaatcatcagccctattacaacagtacctttggtgcatttattggcacaaaacatcagggcacaacaactacaacaacttgtgctagcaaaccttgctgcctactctcagcaacagcagtttcttccattcaaccaactaggttcat

SEQ ID NO: 23998 - DNA, 396 bp, Zea mays
  Clone ID: LIB3152-047-P1-K1-A6
aactacaacaacttgtgctagcaattcttgctgcctactctcagcaacaacagtttcttccattcaaccaactagctgcattgaactctgcttcttatttgcaacaacaacaactaccattcagccagctatctgctgcctacccccagcaatttcttccattcaaccaactgacagctttgaactctcctgcttatttacagcagcaacaactactaccattcagccagctagctggtgtgagccctgctaccttcttgacacaaccacaatgttgccgttctaccagcacgctgcgcctaacgctggcaccctcttacaactgcaacaattgctgccattcaaccaacttgctttgacaaacccaacagcattctaccaacaacccatcattgg

SEQ ID NO: 23999 - DNA, 336 bp, Zea mays
  unsure at all n locations
  Clone ID: LIB3152-047-P1-K1-A7
tcgtatagctggcttttttcctttatatcttccatcaattatagcttcagtatgtgaaaacccagctcttcaaccatataggcttcaacaagcaatcgcagcaagcaacatacctttatcgcccttgttgtgtcaacaatcgccagccctatctttggtgcagtcattggtacaaaccatcagggcacaacagctgcagcaactcgtgctacctgtgatcaaccaagtagctctggcaaacctttctccctactctccgcaacaacatttcttncattcaaccaactgtctacactgaaccctgctgcttatttgcagcaacaactattaccattt

SEQ ID NO: 24000 - DNA, 345 bp, Zea mays
  Clone ID: LIB3152-047-P1-K1-A8
cagaaacacaccaagcgaagcgctttagcaacaacctaacaacaatggctaccaagatattatccctccttgcgcttcttgcgctttttgcgagcgcaacaaatgcgtccattattccacaatgctcacttgctcctagttccattattccacagttcctcccaccagttacttcaatggccttcgaacacccagctgtgcaagcctataggctacaacaagcgattgcggcgagcgtcttacaacaaccaattgcccaattgcacaacaatccttggcacatctaacaatacaaaccatcgcaacgcaacagcaacaacagttcctaccagcactgagccacct

SEQ ID NO: 24001 - DNA, 452 bp, Zea mays
  unsure at all n locations
  Clone ID: LIB3152-047-P1-K1-A9
cggaatnntcccgggtcggacccanncgcgtccgctccgtacccttctcaaaccagcggttgtctttcttggtatgnntgaaaaccccannattcttcaacccctacagtgatnnccaacaggcnagatcacagctggcnnatcttacctttatcanncccttgttcctccaacannatcatcagccctattacatcagttancctttggtgcatttattggcacaaaacatcagggcacaacaactacaacaacttgtgctagcaaaccttgctgcctactctcagcaacagcagtttcttccattcaaccaactagctgcattgaatctgcttcttatttgcaacaacaacaactaccattcagccagctacctgctgcctacccccagcaatttcttccattcaaccaactggcagcattgaactctcctgcttatttacagcagcaac

SEQ ID NO: 24002 - DNA, 390 bp, Zea mays
  Clone ID: LIB3152-047-P1-K1-B10
attgagaccaacaagcaacatatttagtggaatacagtagcaacaatagagcaacaatggcggccaagatattttccatccttatgctccttgctctttctgcatgtgttgctaacgcgaccatttttcctcaatactcacaagctcctatagctgcccttcttcccccataccttccatcaatgaccgcttcagtatgtgaaaacccagcccttcaaccctacaggctccaacaagcaatcgcaacaagcaacttacctttatcaccctgttctttcaacaatcgccagccctatctttggtgcagtcattggtacaaaccatcagggcacaacagctgcagcaactcgtgctaccagtgatcagccaagtagctctggcaaacctttc

SEQ ID NO: 24003 - DNA, 393 bp, Zea mays
  Clone ID: LIB3152-047-P1-K1-B11
cgccgccccgccgccgcatcatacatggcgctggccgctcgcctcgtctcgcgctcccgtcagctatattcggttcaagccactttggggaatggaggtgtcactcaagttcgctcctttgccaaggatgcagctccagctgaccgtcctcctgtcagtggggatgatctcctgaagggcatattctttgaggtaaagaagaagtttgagacagctcttggtgttcttaaaaaggaaaagatcactattgatccagatgacccagcggagtttctcgttatgcccaagtcatgaagactgtaagggaaaaggcggatcttctctctgattctcaaaggattaaatataccattgagaccttcaccaagggcatccctgatgcacggacttact

SEQ ID NO: 24004 - DNA, 394 bp, Zea mays
  Clone ID: LIB3152-047-P1-K1-B12
attttgagcattcagaaacacacttagcgaagcgcactagcaacgacctaacaacaatggctaccaagatattagccctccttgcgcttcttgccctttttgtgagcgcaacaaatgcgttcattattccacaatgctcacttgctcctagtgccattattccacagttcctcccaccagttacttcaatgggcttcgaacacctagctgtgcaagccaacatgcaacaacaagcgcttgcggcgagcgtcttacaacaaccaattgccaattgcaacaacaatccttgccacatctaacaatacaagccatcacaacgcaacagcaacaacagttcctaccagcactgagccacctagccatggtgaaccctgccgcctacttgcaagagcag

SEQ ID NO: 24005 - DNA, 395 bp, Zea mays
  Clone ID: LIB3152-047-P1-K1-B2
atcgactccagattggagaactcgtcaccatgaaggtgctgatcgttgcccttgctctcctggcgctcgctgcgagcgccgtctccagtacaagcggcggctgtggctgccagacaccaccgtttcatctaccgcctccgttctatatgccgcctccgttctatctgccgccgcagcagcagccgcagccatggcaataccccactcaaccaccgcagctaagcccgtgccagcagttcggatcctgcggcgtcggcagcgtcggcagcccttcctgggccagtgcgtcgagttcctgaggcaccagtgcagcccggcggcgacgccctacggctcgccacagtgccaggcgctgcagcagcagtgctgccaccagatcaggcaggtggagccgc

SEQ ID NO: 24006 - DNA, 241 bp, Zea mays
  Clone ID: LIB3152-047-P1-K1-B3
cagaaacacaccaagcgaagcgcactagttacaacctaacaacaatggctaccaagatattatcccttcttgcgcttcttgcgctttttgcgagcgcaacaaatgcgtccattattccacaatgctcacttgctcctagttccattattccacagtttcctcccaccagttaccttcaatgggccttcgaacaccccaggctgtgccaagcccttatagggctacaaaccaaggcgatttg

SEQ ID NO: 24007 - DNA, 395 bp, Zea mays
  Clone ID: LIB3152-047-P1-K1-B4
ggtgaaccctgccgcctacctacaacagtaacaactgctttcatctagcccgctcgctgtggccaatgcacctacatacctgcaacaacaattgttgcaacagattgtaccagctctgactcagctagttgtggcaaaccctgctgcctacttgcaacagctgcttccattcaaccaactgactatgtcgaactctgctgcgtacctacaacagcgacaacagttacttaatccactagcagtggctaacccattggtcgctgccttcctaagcagcaacaattgctgccatacaaccagttctctttgataaaccctgtcttgtcgaggcagcaacccatcgttggaggtgccatcttttagattacatatgagatgtactcgataatggtgcc

SEQ ID NO: 24008 - DNA, 396 bp, Zea mays
  Clone ID: LIB3152-047-P1-K1-B6
cagcattcagaaccacaccaagcgttgttcactaccaccaacctaacaccaatggctaccaagatattagccctccttgcgcttcttgcccttttagtgagcgcaacaaatgcgttcattattccacagtgctcacttgctcctagtgccattattccacagttcctcccaccagttacttcaatgggcttcgaacatccagccgtgcaagcctacaggctacaactagcgcttgcggcgagcgtcttacaacaaccaattgcccaattgcacaacaatccttggcacatctaaacctacaaaccatcgcaacgcaacagcaacaacagtttctgccatcactgagccacctagccgtggtgaaccctgtcgcctacttgcaacagcagctacttg

SEQ ID NO: 24009 - DNA, 388 bp, Zea mays
  Clone ID: LIB3152-047-P1-K1-B7
gaccaactagcaacatagaatgcacaatagtgtaccaacaatggcagccaaaatattttgcctccttatgctccttggtctttctgcaagtgctgctacggcgaccattttcccgaaatgctcgcaagctcctatagcttcccttcttcccccgtacctctcaccagcggtgtcttcggtatgtgaaaacccaattcttcaaccctacaggatccaacaggcaatcacagctggcatcttacctttatcacccttgttcctccaacaacatcagccctattacatcagttacctttggtgcatttattggcacaaaacatcagggcacaacaactacaacaacttgtgctagcaaaccttgctgcctactctcagcaacagcagtttc

SEQ ID NO: 24010 - DNA, 395 bp, Zea mays
  Clone ID: LIB3152-047-P1-K1-B8
attttcagcattcagaaacacacctagcgaagcgcactagcaacaacctaacaacaatggctaccaagatattagccctccttgcgcttcttgcccttttagtgagcgcaacaaatgcgttcattattccacagtgctcacttgctcctagtgccattattccacagttcctcccaccagttacttcaatgggcttcgaacatccagccgtgcaagcctacaggctacaactagcgcttgcggcgagcgtcttacaacaaccaattgccaattgcaacaacaatccttggcacatctaaacctacaaaccatcgcaacgcaacagcaacaacagtttctgccatcactgagccacctagccgtggtgaaccctgtcgcctacttgcaacagcagc

SEQ ID NO: 24011 - DNA, 396 bp, Zea mays
  Clone ID: LIB3152-047-P1-K1-C1
caatagtgtaccaacaatggcagccaatttattttgcctccttatgctccttggtctttctgcaagtgctgctacggcgaccattttcccgcaatgctcgcaagctcctatagcttcccttcttcccccgtacctctcaccagcggtgtcttcggtatgtgaaaacccaattcttcaaccctacaggatccaacaggcaatcgcagctggcatcttacctttatcacccttgttcctccaacaatcatcagccctattacaacagttaccttggtgcatttattggcacaaaacatcagggcacaacaactacaacaacttgtgctagcaaaccttgctgcctactctcagcaacagcagtttcttccattcaaccaactaggttcattgaactct

SEQ ID NO: 24012 - DNA, 388 bp, Zea mays
  Clone ID: LIB3152-047-P1-K1-C10
gcgaccattttcccgcaatgctcgtaagctcctatagcttcccttcttcccccgtacctctcaccagcggtgtcttcggtatgtgaaaacccaattcttcaaccctacaggatccaacaggcaatcgcagctggcatcttacctttatcacccttgttcctccaacaatcatcagccctattacaacagttacctttggtgcatttattggcacaaaacatcagggcacaacaactacaacaacttgtgctagcaaaccttgctgccactctcagcaacagcagtttcttccattcaaccaactaggttcattgaactctgcttcttatttgcaacaacaacaactaccattcagccagctacctgctgcctacccccagcaatttct

SEQ ID NO: 24013 - DNA, 391 bp, Zea mays
  Clone ID: LIB3152-047-P1-K1-C11
gcaacatagaaagcacaatagtgttccaacaatggcagccaaaatattttgcctccttatgctccttggtctttctgcaagtgctgctacggcgaccattttcccacaatgctcacaagctcctatagcttcccttcttcccccgtacctctcaccagcggtgtcttcggtatgtgaaaacccaattcttcaaccctataggatccaacaggcaatcgcagctggcatcttacctttatcacccttgttcctccaacaatcatcagcctattacagcagttacctttggtgcatttattggcacaaaacatcagggcacaacaactacaacaacttgtgctagcaaaccttgctgcctactctcagcaacaacagtttcttccattcaacc

SEQ ID NO: 24014 - DNA, 290 bp, Zea mays
  Clone ID: LIB3152-047-P1-K1-C12
gaactgcaacataaagcacatgtgccaactggcagcaaaatatttgctcttactcttggctttctgagtgctgtcgcaccatttccacatgctacgctctatgcttcttttccccgaccttaccacggtttggttgtgaaaacccatcttaaccctatggatccaacagcatcagtgcattaccttataccctgtctcaacaatcaagcctatacgagtccttgggcattatgcacaaacatagcacacactcaacaactggtacaaacctgtgctcttagaacacagtt

SEQ ID NO: 24015 - DNA, 313 bp, Zea mays
  unsure at all n locations
  Clone ID: LIB3152-047-P1-K1-C2
caactagcaacatagaaagcacaatagtgtaccaacaatggcagccaaaatatttggcctccttatgctccttggtctttctgcaagtgctgctacggcgaccattttcccacaatgctcacaagctcctatagcttcccttcttccccgacctctaccacgggtctcggatggaaaccattttaactatagaccacagcaccagtggtctacttatacctgtctcacatataccatacagagtacttggcattatgccaaacataggcacactcacactgtctncaacctgtgctcttagacacagtctcat

SEQ ID NO: 24016 - DNA, 395 bp, Zea mays
  Clone ID: LIB3152-047-P1-K1-C3
cagcctagcaattagctcatcgactccagattggagaactcgacaccatgaaggtgctgatcgttgcccttgctctcctggcgctcgctgcgagcgccgcctccagtacaagcggcggctgtggctgccagacaccaccgtttcatctaccgcctccgttctatatgccgcctccgttctatctgccgccgcagcagcagccgcagccatggcaataccccactcaaccaccgcagctaagcccgtgccagcagttcggatcctgcggcgtcgcagcgtcggcagcccgttcctgggccagtgcgtcgagttcctgaggcaccagtgcagcccggcggcgacgccctacggctcgccacagtgccaggcgctgcagcagcagtgctgccaccaga

SEQ ID NO: 24017 - DNA, 417 bp, Zea mays
  unsure at all n locations
  Clone ID: LIB3152-047-P1-K1-C4
tccgattttcagcattacagaaacacactcaagtcgtaagcgcacttagccaacacacctaacacacaatgggctacacaagatattaggccctccttgccgcttcttgccncttttagtggagcgcaacaaaatgcgttcatttattccaaacagtgctcacttgctcctagtgccattattccacagttcctcccaccagttacttcaatgggcttcgaacatccagccgtgcaagcctacaggctacaactagcgcttgcggcgagcgtcttacaacaaccaattgcccattgcaacaacaatccttggcacatctaaacctacaaaccatcgcaacgcaacagcaacaacagtttctgccatcactgagccacctagccgtggtgaaccctgtcgcctacttgcaacagcagc

SEQ ID NO: 24018 - DNA, 379 bp, Zea mays
  Clone ID: LIB3152-047-P1-K1-C5
cttaaatcatcattcatctaagtagttttggcaccaaatcaaatctgcaccatcaattttttaactccaaaaaccatgaagctggtgcttgtggttcttgctttcattgctttagtatcaagtgtttcttgtacacagacaggcggctgcagctgtggtcaacaacaaagccatgagcagcaacatcatccacaacaacatcatccacaaaaacaacaacatcaaccaccaccacaacatcaccagcagcagcaacaccaacaacaacaagtcacatgcaaccacaaaaacatcagcaacaacaagaagttcatgttcaacaacaacaacaacaaccgcagcaccaacaacaacaacaacaacagcaccaacaacaaca

SEQ ID NO: 24019 - DNA, 393 bp, Zea mays
  Clone ID: LIB3152-047-P1-K1-C6
cggacgcgtgggatggggtgaaccttgttatctacttgcaggcacaacagctactaccatttaaccaacttgtcgggagcccttatgccttcttactgcaacaacagcttctaccattccatctgcaagctgtggcaaacattgctgctttcttgagacaacaacatttgttgccattttacccacaggttgtgggaaacattaatgccttcttgcaacagcaacaattgctaccattctacccacagaatgtggcaaacattgttgcctcttacaacaacaacaattgttgccatttagccaacatgctttgacgaatcctaccaccttattgcaaccgcccaccattggtggtgccatcttctagattttttatgatttatactgtaataa

SEQ ID NO: 24020 - DNA, 394 bp, Zea mays
  Clone ID: LIB3152-047-P1-K1-C7
attgagaccaactagcaacatagatagcacaatagtgtaccaacaatggcagccaaaatattttgcttccttatgctccttggtctttctgcaagtgttgctaccgcaaccattttcccacaatgctcacaagctcctatagcttcccttcttcccccatacctctcaccagcggtgtcttcaatgtgtgaaaacccaattgttcaaccctacaggatccaacaggcaatcgcaacaggcatcttaccattatcacccttgttcctccacaaccgtcagccctattacagcagttacctttggtccatttggtggcacaaaacatcagggcacaacaactacaacaacttgtgctagcaaaccttgctgcatactctcagcaacatcagtttct

SEQ ID NO: 24021 - DNA, 393 bp, Zea mays
  Clone ID: LIB3152-047-P1-K1-C8
ctaacaacaatggctaccaagatattatccctccttgcgcttcttgcgctttttgcgagcgcaacaaatgcgttcattattccacaatgctcacttgctccaagttccattattacacagttcctcccaccagttacttcaatgggcttcgaacacccagctgtgcaagcctataggctacaacaagcaattgcggcgagcgtcttacaacaaccaatttcccagttgcaacaacaatccttggcacatctaacaatacaaaccatcgaacgcaacagcaacaacaattcctaccagcactgagccacctagccatggtgaaccctgccgcctacttgcaacagcagttgcttgcatcaaacccacttgctctggcaaacgtagttgcaaacc

SEQ ID NO: 24022 - DNA, 391 bp, Zea mays
  Clone ID: LIB3152-047-P1-K1-C9
cagaaacacaccaagcgaagctacttagcaacgacttaacaacaatggctaccaagatattagccctccttgcgcttcttgccctttttgtgagcgcaacaaatgcgttcattattccacaatgctcacttgctcctagtgccattataccacagttcctccgaccagttacttcaatgggcttcgaacacctagctgtgcaagcctacaggctacaacaagcgcttgcggcgagcgtcttacaacaaccaattaaccaattgcaacacaatccttggcacatctaaccatacaaaccatcgcaacacaacagcaacaacagttcctaccagcactgagccaactagatgtggtgaaccctgtcgcctacttgcaacagcaggtgcttgca

SEQ ID NO: 24023 - DNA, 394 bp, Zea mays
  Clone ID: LIB3152-047-P1-K1-D1
attgagaccaacaagcaacatagattgtggaatccagtagcaacaatagagcaacaatggcgaccaagatattttccctccttatgctccttgctctttctgcatgtgttgctaacgcgacaattttccctcaatgctcacaagctcctatagcttcccttcttcccccataccttccatcaatgatagcttcagtatgtgaaaacccagctcttcaaccctataggctccaacaagcaatcgcagcaagcaacatacctttatcacccttgttcaacaatcgccagccctatctttggtgcagtcattggtacaaaccatcagggcacagcagctgcagcaactcgtgctacctgtgatcaaccaagtagctctggcaaacctttctccctac

SEQ ID NO: 24024 - DNA, 393 bp, Zea mays
  Clone ID: LIB3152-047-P1-K1-D10
cccacgcgtccgcccacgcgttcgtattacagtagcaacaatagagcaacaatggcggccaagatattttccatccttatgctccttgctctttctgcatgtgttgctaacgcgaccatttttcctcaatactcacaagctcctatagctgcccttcttcccccataccttccatcaatgaccgcttcagtatgtgaaaacccagcccttcaaccctacaggctccaacaagcaatcgcaacaagcaacttacctttatcacccctgtctttcaacaatcgccagccctatctttggtgcagtcattggtacaaaccatcagggcacaacagctgcagcaactcgtgctaccagtgatcagccaagtagctctggcaaacctttctccctact

SEQ ID NO: 24025 - DNA, 251 bp, Zea mays
  Clone ID: LIB3152-047-P1-K1-D11
ggccgtgggattgaccctagcaacatagaacacaatatgccaactggcgcatattgttcttactcttggtctttctgaggtgtaccgaccatttcactgtacgctctatgcttcttttcccataccttaccacggtttaatgggaaaaccaatgtaaccctcagccaacaggcaaccacagattaccatatacctgtctcaaccgagctatacgagtcctggcattgggccaacatagccacactcacact

SEQ ID NO: 24026 - DNA, 391 bp, Zea mays
  Clone ID: LIB3152-047-P1-K1-D12
attgagaccaacaagcaacatttttagtggaatccagtagcaacaatagagcaacaatggagaccaagatattttccctccttatgctccttgctctttctacatgtgttgctaacgcgacaattttccctcaatgctcacaagctcctatagcttccctttttcccccataccttccatcaattatagcttcagtatgtgaaaacccagctcttcaaccatataggcttcaacaagcaatcgcagcaagcaacatacctttatcgccttgttgtgtcaacaatcgccagccctatctttggtgcagtcattggtacaaaccatcaaggcacaacagctgcagcaactcgtgctacctgtgatcaaccaagtagctctggcaaacctttct

SEQ ID NO: 24027 - DNA, 419 bp, Zea mays
  Clone ID: LIB3152-047-P1-K1-D2
cgcattcagaaaacacacgcaagccgaagttcatttatgcaacaaacctaacaacaatgggctacccaggatattaatcccttccttgcggcttcttgcgcctttttgcgagccgccaacaaatgcgttcaattattccacaaaatgctcacttgctccaagtttccattattacacacgttcctcccaccagttacccttcaatgggcttcgaacacccagctgtgcaagcctataggctacaacaagcaattgcggcgagcgtcttacaacaaccaatttcccagttgcaacacaatccttggcacatctaacaatacaaaccatcgcaacgcaacagcaacaacaattcctaccagcactgagccacctagccatggtgaaccctgccgcctacttgcaacagcagttgcttgcat

SEQ ID NO: 24028 - DNA, 396 bp, Zea mays
  Clone ID: LIB3152-047-P1-K1-D3
gcctagcaattagctcatcgactccagattggagaactcgacaccatgaaggtgctgatcgttgcccttgctctcctggcgctcgctgcgagcgccgcctccagtacaagcggcggctgtggctgccagacaccaccgtttcatctaccgcctccgttctatatgccgcctccgttctatctgccgccgcagcagcagccgcagccatggcaataccccactcaaccaccgcagctaagcccgtgccagcagttcggatcctgcggcgtcggagcgtcggcagcccgttcctgggccagtgcgtcgagttcctgaggcaccagtgcagcccggcggcgacgccctacggctcgccacagtgccaggcgctgcagcagcagtgctgccaccagatca

SEQ ID NO: 24029 - DNA, 394 bp, Zea mays
  Clone ID: LIB3152-047-P1-K1-D4
cagcagttacctttggtccatttggtggcacaaaacatcagggcacaacaactacaacaacttgtgctagcaaaccttgctgcatactctcagcaacatcagtttcttccattcaaccaactggctgcattgaactctgctgcttatttgcaacaacaattaccattcagccagctagttgctgcctacccccagcaatttcttccattcaaccaactagcagcattgaactctgctgcttatttacagcagcaacaactactaccattcaccagctagctgatgtgagccctgctgccttcttgacacaacaacagttgttgccgttctacctgcacgctatgcctaacgctggcaccctcttacaactgcaacaattgctgccattcaacca

SEQ ID NO: 24030 - DNA, 395 bp, Zea mays
  Clone ID: LIB3152-047-P1-K1-D5
gcaacatagaaagcacaatagtgttcctacaatggcagccaaaatattttgcttccttatgctccttggtctttctgcaagtgttgctaccgcaaccattttcccacaatgctcacaagctcctatagcttcccttcttcccccatacctctcaccagcggtgtcttcaatgtgtgaaaacccaattgttcaaccctacaggatccaacaggcaatcgcaacaggcatcttaccattatcacccttgttcctccaacaaccgtcagccctatacagcagttacctttggtccatttggtggcacaaaacatcagggcacaacaactacaacaacttgtgctagcaaaccttgctgcatactctcagcaacatcagtttcttccattcaaccaact

SEQ ID NO: 24031 - DNA, 392 bp, Zea mays
  Clone ID: LIB3152-047-P1-K1-D6
caacatagaaagtggaatccagtatcaacaatagagcaacaatggcgaccaagatattttccctccttatgctccttgctctttctgcatgtgttgctaacgcgacaattttccctcaatgctcacaagctcctatagcttcccttcttcccccataccttccatcaatgatagcttcagtatgtgaaaacccagctcttcaaccctataggctccaacaagcaatcgcagcaagcaacatacctttatcacccttgtttcaacaatcgccgccctatctttggtgcagtcattggtacaaaccatcagggcacagcagctgcagcaactcgtgctacctgtgatcaaccaagtagctctggcaaacctttctccctactctcagcaacaac

SEQ ID NO: 24032 - DNA, 332 bp, Zea mays
  Clone ID: LIB3152-047-P1-K1-D7
ctctaactcagctagctgtggcaaaccctgttgcctacttgcaacagctgcttccattcaaccaactaactatgtcgaactctgttgcgtacctacaacagcgacaacagttacttaatccattggcagtggctaacccattggtcgctgccttcctacagcagcaacaattgctgccatacaaccggttctctttgatgaatcctgtcttgtcgaggcagcaacccatcgttggaggtgccatcttttagattacatatgagatgtatcgataatggtgccctcataccggcatgtgtttcctagaaataatcaatatattggttgagatt

SEQ ID NO: 24033 - DNA, 392 bp, Zea mays
  Clone ID: LIB3152-047-P1-K1-D8
cggacgcgtgggctagcaacatagtaagcacaatagtgtaccaacaatggcagccaaaatattttgcctccttatgctccttggtctttctgcaagtgctgctacggcgaccattttcccgcaatgctcgcaagctcctatagcttcccttcttcccccgtacctctcaccagcggtgtcttcggtatgtgaaaacccaattcttcaaccctacaggatccaacaggcaatcgcagctggcatcttacctttatcacccttgttcctccacaatcatcagccctattacaacagttacctttggtgcatttattggcacaaaacatcagggcacaacaactacaacaacttgtgctagcaaaccttgctgcctactctcagcaacagcagtt

SEQ ID NO: 24034 - DNA, 392 bp, Zea mays
  Clone ID: LIB3152-047-P1-K1-D9
agaaagcacaatagtgtaccaacattggcagctaaaatattttgcctccttatgctccttggtctttctgcaagtgctgctacggcgaccattttcccacaatgctcacaagctcctatagcttcccttcttcccccgtacctctcaccaacggtgtcttcggtatgtgaaaacccaattcttcaaccctacaggatccaacaggcaatcgcagctggcatcttacctttatcacccttgttcctccaacaatcatcagccctattacacagttacctttggtgcatttattggcacaaaacatcagggcacaacaactacaacaacttgtgctagcaaaccttgctgcctactctcagcaacagcagtttcttccattcaaccaactagct

SEQ ID NO: 24035 - DNA, 393 bp, Zea mays
  Clone ID: LIB3152-047-P1-K1-E1
ctttggcgtctaaagcctccccttttgtttggaatgccaccggcgacgagcaggcaattgcaaagcgtgacaaagccgctgccaatgattcaacatacctcaatcctcaagctcatgatagtgctcttggaatcattctgggaggcggtgctgggactagattgtaccccttgacaaacaagcgtgccaagcctgcagtgccattgggtgccaactatagactgatcgatattcctgtcagcaattgtctcaacagcaacatatccaagatcatgtgctaacgcaatttaactctgctttcctcaaccgttacctctcaagagcctacgggagcaacaatggaggcgacaagaatggagggtttgatgaagtcttagctgcacagcaaagccc

SEQ ID NO: 24036 - DNA, 392 bp, Zea mays
  Clone ID: LIB3152-047-P1-K1-E10
cggacgcgtgggcaactagcatcatagaaagcacaatagtgtaccaacaatggcagccaaaatattttgcctccttatgctccttggtctttctgcaagtgctgctacggcgaccattttcccgaaatgctcgcaagctcctatagcttcccttcttcccccgtacctctcaccagcggtgtcttcggtatgtgaaaacccaattcttcaaccctacaggatccaacaggcaatcacagctggcatcttacctttatcacccttgttctccaacaatcatcagccctattacatcagttacctttggtgcatttattggcacaaaacatcagggcacaacaactacaacaacttgtgctagcaaaccttgctgcctactctcagcaacagca

SEQ ID NO: 24037 - DNA, 391 bp, Zea mays
  Clone ID: LIB3152-047-P1-K1-E11
caactagcaacatagaaagcacaatagtgtaccaacaatggcagccaaaatattttgcttccttatgctccttggtctttctgcaagtgttgctaccgcaaccattttcccacaatgctcacaagctcctatagcttcccttcttcccccatacctctcaccagcggtgtcttcaatgtgtgaaaacccaattgttcaaccctacaggatccaacaggcaatcgcaacaggcatcttaccattatcacccttgttcctccaacaaccgcagccctattacagcagttacctttggtccatttggtggcacaaaacatcagggcacaacaactacaacaacttgtgctagcaaaccttgctgcatactctcagcaacatcaagttcttccat

SEQ ID NO: 24038 - DNA, 394 bp, Zea mays
  Clone ID: LIB3152-047-P1-K1-E12
gtagggagaaaggtttgccagtagtttctctcagcaacaacaatttcttccattcaaccaactgtctacattgaaccgtgctgcttatttgcagcaacaactattaccattcagccagctagctactgcctactctcagcaacaacaacttcttccatttaaccaattggccgcactgaaccccgctgcttatttgcagcagcaaatactactaccatttagccagctagctgcagcaagccgtgcttccttcttgacacagcaacagtgctgcctttctaccagcagtttgcggctaaccccgcaaccctcttacaactacaacaattgttgccctttgtccaacttgctttgacaaacccagcagcctcctaccaacaacacatcattggtg

SEQ ID NO: 24039 - DNA, 381 bp, Zea mays
  Clone ID: LIB3152-047-P1-K1-E2
atcagcaaagcggcagtgcgtagagaggatcgtcgaacagaacagcatgaagatggtcatcgttctcgtcgtgtgcctggctctgtcagctgccagcgcctctgcaatgcagatgccctgcccctgcgcggggctgcagggcttgtacggcgctggcgccggcctgacgacgatgatgggcgccggcgggctgtacccctacgcggagtacctgaggcagccgcagtgcagcccgctggcggcggcgccctactacgccgggtgtgggcagcgagcgccatgtaccagccgctccggcaacagtgctgccagcagcagatgaggatgatggacgtgcagtccgtcgcgcagcagctgcagatgatgatgcagcttgagcgt

SEQ ID NO: 24040 - DNA, 391 bp, Zea mays
  Clone ID: LIB3152-047-P1-K1-E3
cagaaacacaccaagcgaagcgcactagcaacaacctaacaacaatggctaccaagatattatccctccttgcgcttcttgcgctttttgcgagcgcaacaaatgcgtccattattccacaatgctcacttgctcctagttccattattccacagttcctcccaccagttacttcaatggccttcgaacacccagctgtgcaagcctataggctacaacaagcgattgcggcgagcgtcttacaacaaccaattgcccaattgcaacaacaaccttggcacatctaacaatacaaaccatcgcaacgcaacagcaacaacagttcctaccagcactgagccacctagccatggtgaaccctgtcgcctacttgcaacagcagctgcttgca

SEQ ID NO: 24041 - DNA, 392 bp, Zea mays
  Clone ID: LIB3152-047-P1-K1-E5
gcgaagcgcactagcaacaacctatcatcaatggctaccaagatattatccctccttgcgcttcttgcgctttttgcgagcgcaacaaatgcgtccattattccacaatgctcacttgctcctagttccattattccacagttcctcccaccagttacttcaatggccttcgaacacccagctgtgcaagcctataggctacaacaagcgattgcggcgagcgtcttacaacaaccaattgcccaattgcaacaacaatccttggcacattaacaatacaaaccatcgcaacgcaacagcaacaacagttcctaccagcactgagccacctagccatggtgaaccctgtcgcctacttgcaacagcagctgcttgcatccaacccacttgct

SEQ ID NO: 24042 - DNA, 394 bp, Zea mays
  Clone ID: LIB3152-047-P1-K1-E6
caagcctacaggctacaactagcgtttttggcgagcgtcttacaacaaccaattgcccaattgcaacaacaatccttggcacatctaaacctacaaaccatcgcaacgcaacagcaacaacagtttctgccatcactgagccacctagccgtggtgaaccctgtcgcctacttgcaacagcagctacttgcatccaacccacttgctctggcgaacgtagctgcataccagcaacaacaacgtctgcaacagtttatgccagcgctcagtcactagccatggtgaaccctgtcgcctacctacaacagcaacaattgctttcatctagcccgctcgctgtgggcaatgcacctacgtacctacaacaacagttgctgcaacagattgtaccagc

SEQ ID NO: 24043 - DNA, 210 bp, Zea mays
  Clone ID: LIB3152-047-P1-K1-E7
aagaatcttgaaatgtactttcttatttctgggaagccgcaaacatcagacaaaaaactttattattgaactataactcataagaaatctaaaagagggcaccctcttacaactgcaacaattgctgccattcaaccaacttgctttgacaaacctagcacagttcttcctacaacccaacattggtggtgccccgttctagattgctta

SEQ ID NO: 24044 - DNA, 261 bp, Zea mays
  Clone ID: LIB3152-047-P1-K1-E8
gatgagcacaataggaccaactggcagccaaaatatttgctcttactcttggtcttttgaggctgtcgcaccatttccaagctccagctctatgcttcttttccccgaccttaccacgggcttggatggaaaacccaattttaaccctcagaccaacgcatacagtcttactataccctgtctcacatatagcctatatagtccttgggcttatgccaaaatagcaacactcacactggctgcaaactgtgctacttacac

SEQ ID NO: 24045 - DNA, 394 bp, Zea mays
  Clone ID: LIB3152-047-P1-K1-E9
ctggacgtcagcctagcaattagctcatcgactccagattggagaactcgacaccatgaaggtgctgatcgttgcccttgctctcctggcgctcgctgcgagcgccgcctccagtacaagcggcggctgtggctgccagacaccaccgtttcatctaccgcctccgttctatatgccgcctccgttctatctgccgccgcagcagcagccgcagccatggcaataccccactcaaccaccgcagctaagcccgtgccagcagttcggatctgcggcgtcggcagcgtcggcagcccgttcctgggccagtgcgtcgagttcctgaggcaccagtgcagcccggcggcgacgccctacggctcgccacagtgccaggcgctgcagcagcagtgct

SEQ ID NO: 24046 - DNA, 392 bp, Zea mays
  Clone ID: LIB3152-047-P1-K1-F10
agctgcccgaggagcttgccttggtggtggtgtgcctcgaatgcgagacatcggccgaagcggcggtgtcgggtgttggcgggacctgccgcgtctacgtcgtcggcaccgctcatgtgtcgcaggaatcatgtgatcaagtgaaggccatcatcaactacctcaaacctcaggctgttttcttggagctctgtatgagcagggttgcaattttgacaccacaaaaccttcaggttcctactatgaatgaaatgattgacatgtggaaaaaaataagatgaacacttttggaattatctacagctggtttcttgcaaaggttgctagccaacttgaggtgttacctggagctgagtttcgggtggcatttgaggaagcaatgagctacggtg

SEQ ID NO: 24047 - DNA, 395 bp, Zea mays
  Clone ID: LIB3152-047-P1-K1-F11
gctttatctactccagagcgcatatgtaacccgatcgacaccatgagggtgttgctcgttgccctcgctctcctggctctcgctgcgagcgccacctccacgcatacaagcggcggctgcggctgccagccaccgccgccggttcatctaccgccaccatgccactaccctactcaaccgccccggcctcagcctcatccccagccacacccatgcccgtgccaacagccgcatccaagcccgtgccagctgcagggaacctgcggcgttgcagcaccccgatcctgggccagtgcgtcgagtttctgaggcatcagtgcagcccgacggcgacgccctactgctcgcctcagtgccagtcgttgcggcagcagtgttgccagcagctcaggcag

SEQ ID NO: 24048 - DNA, 395 bp, Zea mays
  Clone ID: LIB3152-047-P1-K1-F12
agcattcagaaacacaccaatttatgcgcactagcaacaacctaacaacaatggctaccaagatattagccctccttgcgcttcttgcccttttagtgagcgcaacaaatgcgttcattattccacagtgctcacttgctcctagtgccattattccacagttcctcccaccagttacttcaatgggcttcgaacatccagccgtgcaagcctacaggctacaactagcgcttgcggcgagcgtcttacaacaaccaattgcccaattgaacaacaatccttggcacatctaaacctacaaaccatcgcaacgcaacagcaacaacagtttctgccatcactgagccacctagccgtggtgaaccctgtcgcctacttgcaacagcagctacttg

SEQ ID NO: 24049 - DNA, 395 bp, Zea mays
  Clone ID: LIB3152-047-P1-K1-F2
gcaacatagaaagcacaatagtgttccatcaatggcagccaaaatattttgcttccttatgctccttggtctttctgcaagtgctgctaccgcaaccattttcccacaatgctcacaagctcctatagcttcctttcttcccccatacctctcaccagcggtgtcttcagtatgtgaaaacccaattcttcaaccctacaggatccaacaggcaatcgcagcaggcatcttacctttatcacccttgttcctccaacaaccgtcagccctatacagcagttacctttggtgcatttgttggcacaaaacatcaaggcacaacaactacaacaacttgtgctaggaaaccttgctgcctactctcagcaacagcagtttcttccattcaaccaact

SEQ ID NO: 24050 - DNA, 83 bp, Zea mays
  unsure at all n locations
  Clone ID: LIB3152-047-P1-K1-F3
ccgggtccgaccccacgccgnntccgatttttgagcccattcagaaacccacaccatagcttatagtcgcactanngcaacga

SEQ ID NO: 24051 - DNA, 391 bp, Zea mays
  Clone ID: LIB3152-047-P1-K1-F4
gtatctttgaaaggaatgatgagcatagtggtactccttggactggtcataacttccatctattggggagtgaacaagtttgttttgaatgatccttcacttccaaaggctgatcgtaagaagaaaaaggaaaagcctaaacttggcatgaaagagagtctgaaggttctgctctcctcgaggtatgtgagggatctagctaccctagtggttgcttatggcattagtatcaatcttgtcgaagtcacatggaaatcaaaactcaaggcacgttccctagtccaaatgaatattcatctttcatgggtgatttctcgactgcaactgggattgcaactttcacaatgatgctgttaggccgtattatactacggaaatttggcttgggtgt

SEQ ID NO: 24052 - DNA, 396 bp, Zea mays
  Clone ID: LIB3152-047-P1-K1-F5
attggctcatcgactccagattggttatctcgacaccatgaaggtgctgatcgttgcccttgctctcctggcgctcgctgcgagcgccgcctccagtacaagcggcggctgtggctgccagacaccaccgtttcatctaccgcctccgttctatatgccgcctccgttctatctgccgccgcagcagcagccgcagccatggcaataccccactcaaccaccgcagctaagcccgtgccagcagttcggatcctgcggcgtcggcagcgtcgcagcccgttcctgggccagtgcgtcgagttcctgaggcaccagtgcagcccggcggcgacgccctacggctcgccacagtgccaggcgctgcagcagcagtgctgccaccagatcaggcaggtg

SEQ ID NO: 24053 - DNA, 394 bp, Zea mays
  Clone ID: LIB3152-047-P1-K1-F6
catacctctcaccagcgatgtatgggtggaagaagacaaccaatacgattaccgggagggtttcatcaggtgatcgcagcaggcatcttacctttatcacccttgttccttcaacaatcataagccctattacagcagttacctttggtgcattaattggcacaaaacatcatggcacaacaactacaacaactcgtgctagcaaaccttgctgcctactatcagcaacagcagttacctttggtgcatttgttggcacaaaacatcagggccaacaactacaacaactcgtgctagcaaaccttgctggcttactttaacaacaacagtttctgccattcaaccaactagattcattgaacctttgtgcttatttgcagcaaccacaacttct

SEQ ID NO: 24054 - DNA, 397 bp, Zea mays
  Clone ID: LIB3152-047-P1-K1-F8
gtaccatcaatcatcattcattttattagtataggcaccaaatcaaatctgcaacatcaattatctaactccaaaaaccatgaagctggtgcttgtggttcttgctttcattgctttagtatcaagtgtttcttgtacacagacaggcggctgcagctgtggtcaacaacaaagccatgagcagcaacatcatccacaacaacatcatccacaaaaacaacaacatcaaccaccaccacaacatcaccagcagcagcaacaccaacaacacaagttcacatgcaaccacaaaaacatcagcaacaacaagaagttcatgttcaacaacaacaacaacaaccgcagcaccaacaacaacaacaacaacagcaccaacaacaacatcaatgtgaaggcc

SEQ ID NO: 24055 - DNA, 102 bp, Zea mays
  unsure at all n locations
  Clone ID: LIB3152-047-P1-K1-F9
gaaccancaatcattcacccattttttttagaaccggcaccaaaccgaaagaggggggagtatttaaaaaacgccaaaaaccacgaagcgggggctcgggac

SEQ ID NO: 24056 - DNA, 396 bp, Zea mays
  Clone ID: LIB3152-047-P1-K1-G1
agcctagcaattagctcatcgacttcatattggagaactcgacaccatgaaggtgctgatcgttgcccttgctctcctggcgctcgctgcgagcgccgcctccagtacaagcggcggctgtggctgccagacaccaccgtttcatctaccgcctccgttctatatgccgcctccgttctatctgccgccgcagcagcagccgcagccatggcaataccccactcaaccaccgcagctaagcccgtgccagcagttcggatcctgcggcgtcgcagcgtcggcagcccgttcctgggccagtgcgtcgagttcctgaggcaccagtgcagcccggcggcgacgccctacggctcgccacagtgccaggcgctgcagcagcagtgctgccaccagatc

SEQ ID NO: 24057 - DNA, 386 bp, Zea mays
  Clone ID: LIB3152-047-P1-K1-G10
ccaactagcaacatagaaagttcattagtgtaccaacaatggcagccaaaatattttgcttccttatgctccttggtctttctgcaagtgttgctaccgcaaccattttcccacaatgctcacaagctcctatagcttcccttcttcccccatacctctcaccagcggtgtcttcaatgtgtgaaaacccaattgttcaaccctacaggatccaacaggcaatcgcaacaggcatcttaccattatcacccttgttcctccaacaaccgcagccctattacagcagttacctttggtccatttggtggcacaaaacatcagggcacaacaactacaacaacttgtgctagcaaaccttgctgcatactctcagcaacatcagtttc

SEQ ID NO: 24058 - DNA, 395 bp, Zea mays
  Clone ID: LIB3152-047-P1-K1-G12
agaccattagctttatctaccctagagcgcagaagaacccgatcgacaccatgagggtgttgctcgttgccctcgctctcctggctctcgctgcgagcgccacctccacgcatacaagcggcggctgcggctgccagccaccgccgccggttcatctaccgccgccggtgcatctgccacctccggttcacctgccacctccggtgcatctcccaccgccggtccacctgccgccgccggtccacctgccaccgccggtccatgtgccgccccggttcatctgccgccgccaccatgccactaccctactcaaccgccccggcctcagcctcatccccagccacacccatgcccgtgccaacagccgcatccaagcccgtgccagctgcagggaa

SEQ ID NO: 24059 - DNA, 392 bp, Zea mays
  Clone ID: LIB3152-047-P1-K1-G3
agcaacatacatagtgaagtacactatctacatcttagcaccaatgggagccaagatttttgccctccttgccctccttgctctttcagcaagcgctgctacctcgacttttattccacaatgctcacaacaatacctctctccggcgacagccgtgggatttcaatacccaactatacaatcctacatggtacaagaggccatccaagcaagcatcttacggtcattagcattaaccctccaacaaccatatgctctattgcaacagccatcttagtgcatctgtatctccaaagaatcgcggcacaacaactacaacaacagttgctaccaacaatcaatcaagtagttgcagcgaaccttgctgcttacctccagcaacaacagtttct

SEQ ID NO: 24060 - DNA, 413 bp, Zea mays
  Clone ID: LIB3152-047-P1-K1-G4
ggcggcccaacccgtccgacctagcaacatataaagcacaattttgtaccaacaatggcagccaaaatatttggcctccttatgctcctgggtctttctgcaagtgctgctacggcgaccattttcccacaatgctcacaagctcctatagcttcccttcttcccccgtacctctcaccagcggtgtcttcggtatgtgaaaacccaattcttcaaccctataggatccaacaggcaatcgcagctggcatcttacctttatcacccttgttcctccaacaatcatcagcctattacagcagttacctttggtgcatttattggcacaaaacatcagggcacaacaactacaacaacttgtgctagcaaaccttgctgcctactctcagcaacaacagtttcttccattcaac

SEQ ID NO: 24061 - DNA, 381 bp, Zea mays
  Clone ID: LIB3152-047-P1-K1-G5
cggacgcgtgggaagcgaagcgcttttttaacaacctaacaacaatggctaccaagatattatccctccttgcgcttcttgcgctttttgcgagcgcaacaaatgcgtccattattccacaatgctcacttgctcctagttccattattccacagttcctcccaccagttacttcaatggccttcgaacacccagctgtgcaagcctataggctacaacaagcgattgcggcgagcgtcttacaacaaccaattgcccaattgcaacaacaatcttggcacatctaacaatacaaaccatcgcaacgcaacagcaacaacagtttctaccagcactgagccacctagccatggtgaaccctgtcgcctacttgcaacagca

SEQ ID NO: 24062 - DNA, 414 bp, Zea mays
  Clone ID: LIB3152-047-P1-K1-G6
gccgacccacgcgtccgattttcagcattctgaaacacaccatgctaagcgcactagcaacaacctaacaacaatggctaccaagatattagccctccttgcgcttcttgcccttttagtgagcgcaacaaatgcgttcattattccacagtgctcacttgctcctagtgccattattccacagttcctcccaccagttacttcaatgggcttcgaacatccagccgtgcaagcctacaggctacaactagcgcttgcggcgagcgtcttacaacaaccaattgcccaatgcaacaacaatccttggcacatctaaacctacaaaccatcgcaacgcaacagcaacaacagtttctgccatcactgagccacctagccgtggtgaaccctgtcgcctacttgcaacagcagcta

SEQ ID NO: 24063 - DNA, 391 bp, Zea mays
  Clone ID: LIB3152-047-P1-K1-G7
caacaagcaacatagaaagtggaattcagtagcaacaatagagcaacaatggagaccaagatattttccctccttatgctccttgctctttctacatgtgttgctaacgcgacaattttccctcaatgctcacaagctcctatagcttccctttttcccccataccttccatcaattatagcttcagtatgtgaaaacccagctcttcaaccatataggcttcaacaagcaatcgcagcaagcaacatacctttatcgcccttgttgtgcaacaatcgccagccctatctttggtgcagtcattggtacaaaccatcagggcacaacagctgcagcaactcgtgctacctgtgatcaaccaagtagctctggcaaacctttctccctactc

SEQ ID NO: 24064 - DNA, 395 bp, Zea mays
  Clone ID: LIB3152-047-P1-K1-G8
attgagaccaactagcaacatatttagcacaatagtgtaccaacaatggcagccaaaatattttgcctccttatgctccttggtctttctgcaagtgctgctacggcgaccattttcccgaaatgctcgcaagctcctatagcttcccttcttcccccgtacctctcaccagcggtgtcttcggtatgtgaaaacccaattcttcaaccctacaggatccaacaggcaatcacagctggcatcttacctttatcacccttgttcctccacaatcatcagccctattacatcagttacctttggtgcatttattggcacaaaacatcagggcacaacaactacaacaacttgtgctagcaaaccttgctgcctactctcagcaacagcagtttctt

SEQ ID NO: 24065 - DNA, 396 bp, Zea mays
  Clone ID: LIB3152-047-P1-K1-G9
caacatagaaagtggaatccagtatctaacaatagagcaacaatggagaccaagatattttccctccttatgctccttgctctttctacatgtgttgctaacgcgacaattttccctcaatgctcacaagctcctatagcttccctttttcccccataccttccatcaattatagcttcagtatgtgaaaacccagctcttcaaccatataggcttcaacaagcaatcgcagcaagcaacatacctttatcgcccttgttgtgtcaacaatgccagccctatctttggtgcagtcattggtacaaaccatcagggcacaacagctgcagcaactcgtgctacctgtgatcaaccaagtagctctggcaaacctttctccctactctccgcaacaac

SEQ ID NO: 24066 - DNA, 395 bp, Zea mays
  Clone ID: LIB3152-047-P1-K1-H1
gcacaggtgacagcttcgcagcctgggacagctcaagctaccacggtttcagcagcagcagccacagactcatatgcaggtgcatataccagctacccccctgcatatcagcagggagcccaggctggggcatatcagcagggtgctcaggctggggtatatcagcagggagcccaggctggggcatatcagcagggagcccaggctggggcatatcagcaggggggccaggatggggcatatcagcagggggctcaggctggggcatatcacagggagcccaggctggggcatatcagcagggagcccaggctggggcatatcagcagggagcccaggatggggcatatcagcagggagcccaggatggggcatatcagcagggtgctcaggct

SEQ ID NO: 24067 - DNA, 340 bp, Zea mays
  unsure at all n locations
  Clone ID: LIB3152-047-P1-K1-H10
ggaagctcgatcccttccgctcgctagctggctgcacagatcttcctcccgaggttcctctttctaccgtcgagtcgaatcggatcaccggagctatcggattcctcaaaatccgagactttggccgcccgccaccccgtctcagtggcggagctgctccgtctggtccgcctctgcctctctggcttgggggcgctctagggttcccgcgcgcgcgccccgtgatgctcgggaatggcgcttaaagccacggcgcanggcgccgcggagcggcccgagccgccatcggccggggctacgacgtttgttgcgacgttcggcttaaggactgcaagggcaa

SEQ ID NO: 24068 - DNA, 390 bp, Zea mays
  Clone ID: LIB3152-047-P1-K1-H11
ataggctccaacaagcaatctcagttgcaacatacctttatcacccttgtttcaacaatcgccagccctatctttggtgcagtcattggtacaaaccatcagggcacagcagctgcagcaactcgtgctacctgtgatcaaccaagtagctctggcaaacctttctccctactctcagcaacaacaatttcttccattcaaccaactgtctacattgaaccgtgctgcttatttgcagcaacaactattaccattcagccagctagctatgcctactctcagcaacaacaacttcttccatttaaccaattggccgcactgaaccccgctgcttatttgcagcagcaaatactactaccatttagccagctagctgcagcaagccgtgct

SEQ ID NO: 24069 - DNA, 393 bp, Zea mays
  Clone ID: LIB3152-047-P1-K1-H12
gaatttcttgcaaggcactatcactagcgcactatctacatcccacaaccaacctggggaaatcacccaaaagtcttcaccctatctggcttgaacgttaggagctaccgctattatgatcctgcaacatgcagccttcacttcgaaggactcctggaagacctcggttctgctccttcaggttcaattgtactgctgcatgcctgtgctcacaaccctactggagtagatcctaccatcgaacagtgggaacagattaggcagctgatgaatcaaaatcactgcttccgttctttgacagtgcctatcaaggctttgcaagtggaagtcttgacaaagatgctcagtcagtgcgtatgtttgttgctgatggtggtgaacttctcatggctc

SEQ ID NO: 24070 - DNA, 393 bp, Zea mays
  Clone ID: LIB3152-047-P1-K1-H2
cgcccgtgacttcgaccccgacgttctttcccaactcgtccaccgccgccgcccgccgtcgcaaaactcgccagcggccagccatggggtacacgaaggaccagcttctcgcgcacctccagaagcttaagattgatttcacgtgctacgatcacccggttgtgttgacagtggaggaacaggccaaacatgttggccatttaggaggtgctttgagcaaaaatttactcttgaaggacaagaagcatcggttatatgttatttctgcccttctggcaccaaagttgacatgaaaattctttcccaacgtcttgggttgggaaaaggtggtctacgaatggctcctgaggaaaatcttctagaagtacttcaggtgcccttagggtgtgttac

SEQ ID NO: 24071 - DNA, 395 bp, Zea mays
  Clone ID: LIB3152-047-P1-K1-H4
agaccaactagcaacatagaaagcacaatagtgtaccaacaatggcagccaaaatattttgcctccttatgctccttggtctttctgcaagtgctgctacggcgaccattttcccgaaatgctcgcaagctcctatagcttcccttcttcccccgtacctctcaccagcggtgtcttcggtatgtgaaaacccaattcttcaaccctacaggatccaacaggcaatcacagctggcatcttacctttatcacccttgttcctccaacaatcatagccctattacatcagttacctttggtgcatttattggcacaaaacatcagggcacaacaactacaacaacttgtgctagcaaaccttgctgcctactctcagcaacagcagtttcttccat

SEQ ID NO: 24072 - DNA, 432 bp, Zea mays
  Clone ID: LIB3152-047-P1-K1-H5
cgggaatggactgggtcggacccacgcgatgcgtccacgcgtccgcccacgcgtacgtccactcgttcgcccacgcgtccgcttgctcctagtgccattattccacagttcctcccaccagttacttcaatgggcttcgaacacctagctgtgcaagccaacatgcaacaacaagcgcttgcggcgagcgtcttacaacaaccaattgcccaattgcaacaacaatccttgccacatctaacaatacaagccatcacaacgcaacagcaacaacagttcctaccagcactgagccacctagccatgggaaccctgccgcctacttgcaagagcagctgcttgcatccaacccacttgctctggcgaacgtagttgcaaaccagcaacaacaacagctacaacagtttctgccaacgctcagtcaactagcca

SEQ ID NO: 24073 - DNA, 394 bp, Zea mays
  Clone ID: LIB3152-047-P1-K1-H7
attttcagcattcagaaacacaccaagcgaagcgcactagcaacaacctaacaacaatggctaccaagatattagccctccttgcgcttcttgcccttttagtgagcgcaacaaatgcgttcattattccacagtgctcacttgctcctagtgccattattccacagttcctcccaccagttacttcaatgggcttcgaacatccagccgtgcaagcctacaggctacaactagcgcttgcggcgagcgtcttacaacaaccaattgccaattgcaacaacaatccttggcacatctaaacctacaaaccatcgcaacgcaacagcaacaacagtttctgccatcactgagccacctagccgtggtgaaccctgtcgcctacttgcaacagcag

SEQ ID NO: 24074 - DNA, 394 bp, Zea mays
  Clone ID: LIB3152-047-P1-K1-H8
attgagaccaactagcaacatataaagcacaatagtgtaccaacaatggcagccaaaatattttgcctccttatgctccttggtctttctgcaagtgctgctacggcgaccattttcccgcaatgctcgcaagctcctatagcttcccttcttcccccgtacctctcaccagcggtgtcttcggtatgtgaaaacccaattcttcaaccctacaggatccaacaggcaatcgcagctggcatcttacctttatcacccttgttcctccacaatcatcagccctattacaacagttacctttggtgcatttattggcacaaaacatcagggcacaacaactacaacaacttgtgctagcaaaccttgctgcctactctcagcaacagcagtttct

SEQ ID NO: 24075 - DNA, 392 bp, Zea mays
  Clone ID: LIB3152-047-P1-K1-H9
cagaaacacaccaagcgaagcttcttagcaacgacttaacaacaatggctaccaagatattagccctccttgcgcttcttgccctttttgtgagcgcaacaaatgcgttcattattccacaatgctcacttgctcctagtgccattataccacagttcctccgaccagttacttcaatgggcttcgaacacctagctgtgcaagcctacaggctacaacaagcgcttgcggcgagcgtcttacaacaaccaattaaccaattgcaacaaaatccttggcacatctaaccatacaaaccatcgcaacacaacagcaacaacagttcctaccagcactgagccaactagatgtggtgaaccctgtcgcctacttgcaacagcaggtgcttgcat

SEQ ID NO: 24076 - DNA, 384 bp, Zea mays
  Clone ID: LIB3152-048-P1-K1-A10
cagcattcagaaacacaccaagcgaagcgcactagcaacaacctaacaacaatggctaccaagatattagccctccttgcgcttcttgcccttttagtgagcgcaacaaatgcgttcattattccacagtgctcacttgctcctagtgccattattccacagttcctcccaccagttacttcaatgggcttcgaacatccagccgtgcaagcctacaggctacaactagcgcttgcggcgagcgtcttacaacaaccaattgcccaattgcaacaacaatccttggcacatctaaacctacaaaccatcgcaacgcaacagcaacaacagtttctgccatcactgagccacctagccgtggtgaaccctgtcgcctacttgcaa

SEQ ID NO: 24077 - DNA, 378 bp, Zea mays
  Clone ID: LIB3152-048-P1-K1-A11
cagactagcaattagctcatggactccagattggagaactccacaccatgaaggtgctgatcgatgcccttgctctcctggcgctcgctgcgagcgccgcctgcagtacaagcggcggatgtggctgtcagacaccaccggttcatctaccgtctccgttctatatgccgcctccgttctatctggcgtcgcagcagcagccgcagccatggtaatacctcactcaaccaccgcagctaagcccgtgccagcagaccggatcctgcggcgtcggcagagtcggcagccctatcctgggccagtgcgtcgagctcctgaggcaccagagcagaccggcagcaacgccctacggctgcgcacagtgccaggcgcttcagc

SEQ ID NO: 24078 - DNA, 360 bp, Zea mays
  Clone ID: LIB3152-048-P1-K1-A12
cacactcgtacggagacaaagaacgtgggattgaggaacaacaaaccatgaacgatggcgacgaatatacttgttctgctgatgctcgttgctagcgctgcatgcagtgcatagcgcaacatttggctgtcaaagatcacaggttcatatagcgtctctgatttatacataccttccattatatatggcgtcgaacagtgaaacacaagcatgttaaaacctatagtgcaaccaacaagaaatagcagcgtagcaacataccttgatcacgccttgtttgaacaatcggcagccctatctttggccaggcattgggacaaaccatgcacgaacgaaacctgcagcaactccctatagctg

SEQ ID NO: 24079 - DNA, 395 bp, Zea mays
  Clone ID: LIB3152-048-P1-K1-A2
ccggaacggaagggccgacccacgcgacgcgattttgagcattcaaaaacacaccatgcgttgcgcactagcaacgacctaaccccagtggctaccaagatataagccctccttgcgcttcttgccctttttgtgagcgcaacaaatgcgttcatgattacacaatgctcacttgctcctagtgccattattccacagatcctcccaccagttacttcaatgggcttcgaacacctagctgtgcaagccaacatgcaacaacaagcgcttgcggcgagcgtcttacaacaaccaattgcccaattgcaacaacaatccttgccacatctaacaatacaagccatcacaacgcaacagcaacaacagttcctaccagcactgagccacctagccat

SEQ ID NO: 24080 - DNA, 396 bp, Zea mays
  unsure at all n locations
  Clone ID: LIB3152-048-P1-K1-A3
cgtncggagcattcagaaacacaccaagcgattcttattagcaacaacctaacaacaatggctaccaagatattatccctccttgcgcttcttgcgctttttgcgagcgcaacaaatgcgttcattattccacaatgctcacttgctccaagttccattattacacagttcctcccaccagttacttcaatgggcttcgaacacccagctgtgcaagcctataggctacaacaagcaattgcggcgagcgtcttacaacaaccaatttcccagttgcaacaacaatccttggcacatctaacaatacaaaccatcgcaacgcaacagcaacaacaattcctaccagcactgagccacctagccatggtgaaccctgccgcctacttgcaacagcag

SEQ ID NO: 24081 - DNA, 385 bp, Zea mays
  Clone ID: LIB3152-048-P1-K1-A4
caacaagcaacatagaaagtggaattcagtagcaacaatagagcaacaatggcgaccaagatattttccctccttatgctccttgctctttctgcatgtgttgctaacgcgacaattttccctcaatgctcacaagctcctatagcttcccttcttcccccataccttccatcaatgatagcttcagtatgtgaaaacccagctcttcaaccctataggctccaacaagcaatcgcagcaagcaacatacctttatcacccttgtttcaacaatcgccagccctatctttggtgcagtcattggtacaaaccatcagggcacagcagctgcagcaactcgtgctacctgtgatcaaccaagtagctctggcaaacctttctccct

SEQ ID NO: 24082 - DNA, 387 bp, Zea mays
  Clone ID: LIB3152-048-P1-K1-A5
attgataccaactagcaacatacatagtgaagtacactagcaacatcttagcaccaatgggagccaagatttttgccctccttgccctccttgctctttcagcaagcgctgctacctcgacttttattccacaatgctcacaacaatacctctctccggcgacagccgtgggatttcaatacccaactatacaatcctacatggtacaagaggccatccaagcaagcatcttacggtcattagcattaaccctccaacaaccatatgctctattgcaacagccatccttagtgcatctgtatctccaaagaatcgcggcacaacaactacaacaacagttgctaccaacaatcaatcaagtagttgcagcgaaccttgctgcttacc

SEQ ID NO: 24083 - DNA, 297 bp, Zea mays
  Clone ID: LIB3152-048-P1-K1-A6
aagaaacacatcaagaggcgctacgttttatctacttaacaacactgcgtaccaagatattagtcaatgctgagctgcttgcattgtttgcgagcgcaacacatgcgttcaatattccacagcgctaacttgcgtaaaccgacattttacacacatatacgctcgaccaggcacttcaatgggcgcaacaacacctagattgtgcaatgtctacaggaatacaacaacgggcttgtggtgagcgcattacaacaaccaaaccaccaagtgccacaacaatccttggcatcatgttac

SEQ ID NO: 24084 - DNA, 386 bp, Zea mays
  Clone ID: LIB3152-048-P1-K1-A7
tcggaacatacaaagaggaatccagtcgtaacaatagagcaacaatggagaccaagatattttccctccttatgctccttgctctttctacatgtgttgctaacgcgacaattttccctcaatgctcacaagctcctatagcttccctttttcccccataccttccatcaattatagcttcagtatgtgaaaacccagctcttcaaccatataggcttcaacaagcaatcgcagcaagcaacatacctttatcgcccttgttgtgtcaacaatcgccagccctatctttggtgcagtcattggtacaaaccatcagggcacaacagctgcagcaactcgtgctacctgtgatcaaccaagtagctctggcaaacctttctccctac

SEQ ID NO: 24085 - DNA, 383 bp, Zea mays
  Clone ID: LIB3152-048-P1-K1-A8
aaacacaccaagcgaagcacattatcaacaacctaacaacaatggctaccaagatattatccctccttgcgcttcttgcgctttttgcgagcgcaacaaatgcgttcattattccacaatgctcacttgctccaagttccattattacacagttcctcccaccagttacttcaatgggcttcgaacacccagctgtgcaagcctataggctacaacaagcaattgcggcgagcgtcttacaacaaccaatttcccagttgcaacaacaatccttggcacatctaacaatacaaaccatcgcaacgcaacagcaacaacaattcctaccagcactgagccacctagccatggtgaaccctgccgcctacttgcaacagcagttg

SEQ ID NO: 24086 - DNA, 385 bp, Zea mays
  Clone ID: LIB3152-048-P1-K1-A9
cggacgcgtgggcggacgcgttcgctgacgcgtgggcggacgcgtgggcagaaacacaccaagcgaagcgcactagcaacaacctaacaacaatggctaccaagatattatccctccttgcgcttcttgcgctttttgcgagcgcaacaaatgcgtccattattccacaatgctcacttgctcctagttccattattccacagttcctcccaccagttacttcaatggccttcgaacacccagctgtgcaagcctataggctacaacaagcgattgcggcgagcgtcttacaacaaccaattgcccaattgcaacaacaatccttggcacatctaacaatacaaaccatcgcaacgcaacagcaacaacagttcctaccagcact

SEQ ID NO: 24087 - DNA, 382 bp, Zea mays
  Clone ID: LIB3152-048-P1-K1-B10
acacaccaagcgaagcacattagcatcaacctaacaacaatggctaccaagatattatccctccttgcgcttcttgcgctttttgcgagcgcaacaaatgcgttcattattccacaatgctcacttgctccaagttccattattacacagttcctcccaccagttacttcaatgggcttcgaacacccagctgtgcaagcctataggctacaacaagcaattgcggcgagcgtcttacaacaaccaatttcccagttgcaacaacaatccttggcacatctaacaatacaaaccatcgcaacgcaacagcaacaacaattcctaccagcactgagccacctagccatggtgaaccctgccgcctacttgcaacagcagttgc

SEQ ID NO: 24088 - DNA, 381 bp, Zea mays
  Clone ID: LIB3152-048-P1-K1-B12
agcattcagaaacacaccaagcgaatcgcactagcaacaacctaacaacaatggctaccaagatattagccctccttgcgcttcttgcccttttagtgagcgcaacaaatgcgttcattattccacagtgctcacttgctcctagtgccattattccacagttcctcccaccagttacttcaatgggcttcgaacatccagccgtgcaagcctacaggctacaactagcgcttgcggcgagcgtcttacaacaaccaattgcccaattgcaacaacaatccttggcacatctaaacctacaaaccatcgcaacgcaacagcaacaacagtttctgccatcactgagccacctagccgtggtgaaccctgtcgcctacttgc

SEQ ID NO: 24089 - DNA, 379 bp, Zea mays
  Clone ID: LIB3152-048-P1-K1-B2
caacaagcaacatagaaagtggaatccagttgcaacaatagagcaacaatggagaccaagatattttccctccttatgctccttgctctttctacatgtgttgctaacgcgacaattttccctcaatgctcacaagctcctatagcttccctttttcccccataccttccatcaattatagcttcagtatgtgaaaacccagctcttcaaccatataggcttcaacaagcaatcgcagcaagcaacatacctttatcgcccttgttgtgtcaacaatcgccagccctatctttggtgcagtcattggtacaaaccatcagggcacaacagctgcagcaactcgtgctacctgtgatcaaccaagtagctctggcaaacc

SEQ ID NO: 24090 - DNA, 389 bp, Zea mays
  Clone ID: LIB3152-048-P1-K1-B3
agaccattagctttatctactccagagcgcagaagaacccgatcgacaccatgagggtgttgctcgttgccctcgctctcctggctctcgctgcgagcgccacctccacgcatacaagcggcggctgcggctgccagccaccgccgccggttcatctaccgccgccggtgcatctgccacctccggttcacctgccacctccggtgcatctcccaccgccggtccacctgccgccgccggtccacctgccaccgccggtccatgtgccgccgccggttcatctgccgccgccaccatgccactaccctactcaaccgccccggcctcagcctcatccccagccacacccatgcccgtgccaacagccgcatccaagcccgtgccagctg

SEQ ID NO: 24091 - DNA, 387 bp, Zea mays
  Clone ID: LIB3152-048-P1-K1-B4
gcaacatacatagtgaagtacactagcaacatcttagcaccaatgggagccaagatttttgccctccttgccctccttgctctttcagcaagcgctgctacctcgacttttattccacaatgctcacaacaatacctctctccggcgacagccgtgggatttcaatacccaactatacaatcctacatggtacaagaggccatccaagcaagcatcttacggtcattagcattaaccctccaacaaccatatgctctattgcaacagccatccttagtgcatctgtatctccaaagaatcgcggcacaacaactacaacaacagttgctaccaacaatcaatcaagtagttgcagcgaaccttgctgcttacctccagcaacaacag

SEQ ID NO: 24092 - DNA, 456 bp, Zea mays
  unsure at all n locations
  Clone ID: LIB3152-048-P1-K1-B5
ggaattncccgggntcgaccccacgccgnntccgcaactaggcaaacataagaaaggcacaaattatgtgtactcaacannnatggcagnnncaaaatatttgtgccttccttatgccctccttggtnnctttctgcnnaagtgctgctacngnngcgaccannttttcccacccaatgctcacnaagcnntcctatagcttcnnccttcttcccccgtaccctctcaaccagcggtgtcttcggtattgtgaaaacccaattcttcaaccctataggatccaacaggcaatcgcagctggcatcttacctttatcacccttgttcctccaacaatcatcagccctattacagcagttacctttggtgcatttattggcacaaaacatcagggcacaacaactacaacaacttgtgctagcaaaccttgctgcctactctcagcaacaacagtttt

SEQ ID NO: 24093 - DNA, 385 bp, Zea mays
  Clone ID: LIB3152-048-P1-K1-B6
ttcaaccatataggcttcaacaagcaattgcagcaagcaacatacctttatcgcccttgttgtgtcaacaatcgccagccctatctttggtgcagtcattggtacaaaccatcagggcacaacagctgcagcaactcgtgctacctgtgatcaaccaagtagctctggcaaacctttctccctactctccgcaacaacaatttcttccattcaaccaactgtctacactgaaccctgctgcttatttgcagcaacaactattaccatttagccagctagctactgcctactctcaacaacaacaacttcttccatttaaccaattggccgcactgaaccccgctgcttatttgcagcagcaaatactactaccatttagccagct

SEQ ID NO: 24094 - DNA, 372 bp, Zea mays
  Clone ID: LIB3152-048-P1-K1-B7
gaaacacacacctagcgaagcgcactagcaacgacctaacaacaatggctaccaagatattagcccttcttgcgcttcttgccctttttgtgagcgcaacaaatgcgttcattatttcacaatgctcacttgctcctagtgccattattccacaattcctcccaccagttacttcaatgggcttcgaacacccagctgtgcatgcctacaggctacaacaagcgcattacaacaaccaattgcccaattacagcaacaatccttggcacatctaacaatacaaaccatcgcaacgcaacagcaacaacagttcctaccagcactgagccacctagccatggtgaaccctgccgcctacttgcaacagcaact

SEQ ID NO: 24095 - DNA, 384 bp, Zea mays
  Clone ID: LIB3152-048-P1-K1-B8
cacccatgcccgtgccaacagccgtatccaagcccgtgccagctgcagggaacctgcggcgttggcagcaccccgatcctgggccagtgcgtcgagtttctgaggcatcagtgcagcccgacggcgacgccctactgctcgcctcagtgccagtcgttgcggcagcagtgttgccagcagctcaggcaggtggagccgcagcaccggtaccaggcgatcttcggcttggtcctccagtccatcctgcagcagcagccgcaaagcggccaggtcgcggggctgttggcggcgcagatagcgcagcaactgacggcgatgtgcggcctgcagcagccgactccatgcccctacgctgctgccggcggtgtcccccactgaagaaac

SEQ ID NO: 24096 - DNA, 365 bp, Zea mays
  Clone ID: LIB3152-048-P1-K1-B9
gcacgctgcgcctaacgctggcactctcttacaactgcaacaattgctgccattcaaccaacttgctttgacaaacccagcagcgttctaccaacaacccatcattggtggtgccctcttttagatttcttatgagttatagttcaataataaagttttttgtctgatgtttgtggcttcccagaaataagaaagtacatttctagattcttaaaaaaaaaaaaaaaaaaaaaaaaaaaaaaaaaaaaaaaaaaaaaaaataaaaaaaaaaaaaaaaaaaaaaaaaaaaaaaaaatggggaaaaaaaaaaaaaattttaaaaaaaaaaaaaaaaaagggggggcccttttaagggatccaagttt

SEQ ID NO: 24097 - DNA, 383 bp, Zea mays
  Clone ID: LIB3152-048-P1-K1-C11
gaatccagtagcaacaatagagcatcaatggcgaccaagatattttccctccttatgctccttgctctttctgcatgtgttgctaacgcgacaattttccctcaatgctcacaagctcctatagcttcccttcttcccccataccttccatcaatgatagcttcagtatgtgaaaacccagctcttcaaccctataggctccaacaagcaatcgcagcaagcaacatacctttatcacccttgtttcaacaatcgccagccctatctttggtgcagtcattggtacaaaccatcagggcacagcagctgcagcaactcgtgctacctgtgatcaaccaagtagctctggcaaacctttctccctactctcagcaacaacaatt

SEQ ID NO: 24098 - DNA, 384 bp, Zea mays
  Clone ID: LIB3152-048-P1-K1-C12
agcattcagaaacacaccaagcgaatcacattagcaacaacctaacaacaatggctaccaagatattatccctccttgcgcttcttgcgctttttgcgagcgcaacaaatgcgttcattattccacaatgctcacttgctccaagttccattattacacagttcctcccaccagttacttcaatgggcttcgaacacccagctgtgcaagcctataggctacaacaagcaattgcggcgagcgtcttacaacaaccaatttcccagttgcaacaacaatccttggcacatctaacaatacaaaccatcgcaacgcaacagcaacaacaattcctaccagcactgagccacctagccatggtgaaccctgccgcctacttgcaac

SEQ ID NO: 24099 - DNA, 387 bp, Zea mays
  Clone ID: LIB3152-048-P1-K1-C2
agaccattagctttatctactccagagcgcagaagaacccgatcgacaccatgagggtgttgctcgttgccctcgctctcctggctctcgctgcgagcgccaccttcacgcatacaagcggcggctgcggctgccagccaccgccgccggttcatctaccgccgccggtgcatctgccacctccggttcacctgccacctccggtgcatctcccaccgccggtccacctgccgccgccggtccacctgccaccgccggtccatgtgccgccgccggttcatctgccgccgccaccatgccactaccctactcaaccgccccggcctcagcctcatccccagccacacccatgcccgtgccaacagccgcatccaagcccgtgccagc

SEQ ID NO: 24100 - DNA, 429 bp, Zea mays
  unsure at all n locations
  Clone ID: LIB3152-048-P1-K1-C3
ggaatnncccgggntcggacccacgccgnntccgattttgagnccattcagaaaccacaccaagctgaagcttacctagcnaacgacttaacaacaagtggctactcaagatattagccctccttgcgcttcttgccctttttgtgagcgcaacaaatgcgttcattattccacaatgctcacttgctcctagtgccattataccacagttcctccgaccagttacttcaatgggcttcgaacacctagctgtgcaagcctacaggctacaacaagcgcttgcggcgagcgtcttacaacaaccaattaaccaattgcaacaacaatccttggcacatctaaccatacaaaccatcgcaacacaacagcaacaacagttcctaccagcactgagccaactagatgtggtgaaccctgtcgcctacttgc

SEQ ID NO: 24101 - DNA, 387 bp, Zea mays
  unsure at all n locations
  Clone ID: LIB3152-048-P1-K1-C4
aatggattcaatgacttcttgggtcactgtgaaaatatagatggttttttggaaggaaccttcaataaaaggcaaacatcgcggatggttagacctgtggaaaaagagagatacaaggagaacgagggggatagcgatcctgagaaagagagatacaaggaaagcaaaaattctgaaagagtattgaccttcaattctaaggaaggagcagctcatgaagctagtacattccctagcaaagagaagtataacttatgcaaaccaatatcagagcttgatctatcaaattgtcagcggtgcactccaagttaccgacttttgcctaaaaattatccagtaccttctgcaagcaacaggactgacactgaagcttncgtgctgaatgat

SEQ ID NO: 24102 - DNA, 385 bp, Zea mays
  Clone ID: LIB3152-048-P1-K1-C5
caacaagcaacatagaaagtggaatttattagcaacaatagagcaacaatggagaccaagatattttccctccttatgctccttgctctttctacatgtgttgctaacgcgacaattttccctcaatgctcacaagctcctatagcttccctttttcccccataccttccatcaattatagcttcagtatgtgaaaacccagctcttcaaccatataggcttcaacaagcaatcgcagcaagcaacatacctttatcgcccttgttgtgtcaacaatcgccagccctatctttggtgcagtcattggtacaaaccatcagggcacaacagctgcagcaactcgtgctacctgtgatcaaccaagtagctctggcaaacctttctc

SEQ ID NO: 24103 - DNA, 385 bp, Zea mays
  Clone ID: LIB3152-048-P1-K1-C6
agaccaactagcaacatagaaagcacatttgtgtaccaacaatggcagccaaaatattttgcctccttatgctccttggtctttctgcaagtgctgctacggcgaccattttcccacaatgctcacaagctcctatagcttcccttcttcccccgtacctctcaccagcggtgtcttcggtatgtgaaaacccaattcttcaaccctataggatccaacaggcaatcgcagctggcatcttacctttatcacccttgttcctccaacaatcatcagccctattacagcagttacctttggtgcatttattggcacaaaacatcagggcacaacaactacaacaacttgtgctagcaaaccttgctgcctactctcagcaacaaca

SEQ ID NO: 24104 - DNA, 382 bp, Zea mays
  Clone ID: LIB3152-048-P1-K1-C8
agcaacatagaaagcacaatagtgtaccaacaatggcagccaaaatattttgcctccttatgctccttggtctttctgcaagtgctgctacggcgaccattttcccgaaatgctcgcaagctcctatagcttcccttcttcccccgtacctctcaccagcggtgtcttcggtatgtgaaaacccaattcttcaaccctacaggatccaacaggcaatcacagctggcatcttacctttatcacccttgttcctccaacaatcatcagccctattacatcagttacctttggtgcatttattggcacaaaacatcagggcacaacaactacaacaacttgtgctagcaaaccttgctgcctactctcagcaacagcagtttct

SEQ ID NO: 24105 - DNA, 379 bp, Zea mays
  Clone ID: LIB3152-048-P1-K1-C9
gtcacccatcaccatgggtggcagtgtgagcaatgacctgaatgaaccattgaaatggaaaggaataatatataaggaaaaaagatgattggaaactaaaaaaaaaaaaaaaaaaaaaaaaaaaaaaaaaaaaaaaaaaaaaaaaaaaaaaaaaaaaaaaaaaaaaaaaaattaaaaaaaaaaaaaaaaacggggggccgttttaggggaccaaagtttacttccgcgggattgcaacgtaatagtttttttttggggcccccaaatttaaattaatgggccgggttttaaaaacgtcggaattggaaaaacctggggttacccaaattaaatggcttggaagaaaatccccttttgccaagttggctaataaccaaaa

SEQ ID NO: 24106 - DNA, 381 bp, Zea mays
  Clone ID: LIB3152-048-P1-K1-D10
cggacgcgtgggttgagaccaactatcaacatagaaagcacaatagtgtaccaacaatggcagccaaaatattttgcctccttatgctccttggtctttctgcaagtgctgctacggcgaccattttcccgaaatgctcgcaagctcctatagcttcccttcttcccccgtacctctcaccagcggtgtcttcggtatgtgaaaacccaattcttcaaccctacaggatccaacaggcaatcacagctggcatcttacctttatcacccttgttcctccaacaatcatcagccctattacatcagttacctttggtgcatttattggcacaaaacatcagggcacaacaactacaacaacttgtgctagcaaaccttgctg

SEQ ID NO: 24107 - DNA, 381 bp, Zea mays
  Clone ID: LIB3152-048-P1-K1-D11
agaaagcacaatagtgtaccatcaatggcagccaaaatattttgcctccttatgctccttggtatttctgcaagtgctgctacggcgaccattttcccgcaatgctcacaagctcctatagcttcccttcttcccccgtacctctcaccagcggtgtcttcggtatgtgaaaacccaattcttcaaccctacaggatccaacaggcaatcgcagctggcatcttacctttatcacccttgttcctccaacaatcatcagccctattacagcagttacctttggtgcatttattggcacaaaacatcagggcacaacaactacaacaacttgtgctagcaaaccttgctgcctactctcagcaacagcagtttcttccattc

SEQ ID NO: 24108 - DNA, 331 bp, Zea mays
  unsure at all n locations
  Clone ID: LIB3152-048-P1-K1-D12
nncagcanncagaaacacaccaagttaagcgcacnagcaacaaccnaacaacaagggcnaccaaganannagcccnccnggcgcnncnggcccnnnnagngagcgcaacaaangcgnncannannccacagngcncacnngcnccnagngccannannccacagnnccncccaccagnnaccccaangggcnncgaacanccagccgngcaagccnacaggcnacaacnagcgcnngcggcgagcgncnnacaacaaccaanngcccaanngcaacaacaanccnnggcacancnaaaccnacaaaccancgcaacgcaacagcaacaaca

SEQ ID NO: 24109 - DNA, 378 bp, Zea mays
  Clone ID: LIB3152-048-P1-K1-D2
agcaacatagaaagtggaatccagttgcatcaatagagcaacaatggcgaccaagatattttccctccttatgctccttgctctttctgcatgtgttgctaacgcgacaattttccctcaatgctcacaagctcctatagcttcccttcttcccccataccttccatcaatgatagcttcagtatgtgaaaacccagctcttcaaccctataggctccaacaagcaatcgcagcaagcaacatacctttatcacccttgtttcaacaatcgccagccctatctttggtgcagtcattggtacaaaccatcagggcacagcagctgcagcaactcgtgctacctgtgatcaaccaaagataggtctggcaaacctttct

SEQ ID NO: 24110 - DNA, 355 bp, Zea mays
  Clone ID: LIB3152-048-P1-K1-D3
ctgcaacagattgtaccagctctgactcatctagctgtggcaaaccctactgcctacttgcaacagttgcttccattcaaccaactggctgtgtcgaactctgctgtgtacctacaacagcgacaacagttacttaatccactagcagtggctaacccattggtcgctaacttcctgcagcagcaacaattgctgccatacaaccagttctctttgatgaaccctgccttgcagcaacccatcgttggaggtgccatcttttagattacatatgagatgtactcaacaatggtgccctcataccggcatgtgtttcctagaaataatcaatatattgattgagatttatcttgat

SEQ ID NO: 24111 - DNA, 386 bp, Zea mays
  Clone ID: LIB3152-048-P1-K1-D5
caccaagcgaagcacattagcaacttcctaacaacaatggctaccaagatattatccctccttgcgcttcttgcgctttttgcgagcgcaacaaatgcgttcattattccacaatgctcacttgctccaagttccattattacacagttcctcccaccagttacttcaatgggcttcgaacacccagctgtgcaagcctataggctacaacaagcaattgcggcgagcgtcttacaacaaccaatttcccagttgcaacaacaatccttggcacatctaacaatacaaaccatcgcaacgcaacagcaacaacaattcctaccagcactgagccacctagccatggtgaaccctgccgcctacttgcaacagcagttgcttgcatt

SEQ ID NO: 24112 - DNA, 384 bp, Zea mays
  Clone ID: LIB3152-048-P1-K1-D6
tttcagcattcagaaacacaccaagtgatgcgcactagcaacaacctaacaacaatggctaccaagatattagccctccttgcgcttcttgcccttttagtgagcgcaacaaatgcgttcattattccacagtgctcacttgctcctagtgccattattccacagttcctcccaccagttacttcaatgggcttcgaacatccagccgtgcaagcctacaggctacaactagcgcttgcggcgagcgtcttacaacaaccaattgcccaattgcaacaacaatccttggcacatctaaacctacaaaccatcgcaacgcaacagcaacaacagtttctgccatcactgagccacctagccgtggtgaaccctgtcgcctacttg

SEQ ID NO: 24113 - DNA, 383 bp, Zea mays
  Clone ID: LIB3152-048-P1-K1-D7
ctccctccctccttccttccttccccgccactgcgcagcgcgagtgcggcgacagccagtcacacactcccactccctcgaccgctctcggccctcggccccgtccgcgtcgccgcagggcgaggaggcaatggcggcgggcgggaatggcgccggcggggacaccagggcggccttcgcgcggatctacaagacgctcaaggaggagctgctcaccgacccggccttcgagttcaccgaggagtcacgccagtggatcgaccgcatggttgactacaatgtactcggaggcaagtgtaaccgtgggctctctgtggtcgacagctacaagctgctcaagggcgctgatgctctgggcgaggaggaaacgttccttgcttgca

SEQ ID NO: 24114 - DNA, 379 bp, Zea mays
  Clone ID: LIB3152-048-P1-K1-D8
caactagcaacatacatagtgaagtacagtagcaacatcttagcaccaatggcagccaagatttttgccctccttgccctccttgctctttcagcaagtgttgctaccgcgactattattccacaatgctcacaacaatacctctctccggtgacagccgcgagatttgaatacccaactatacaatcctacaggctacaagaggccatcacagcaagcatcttacggtcgttagcattgactgtccaacaaccatatgccctattgcaacaaccatccttagtgaatctatatctccaaagaatcgcagcacaacaactacaacagcagttgcttccaacaatcaatcaagtagttgcagcgaaccttgctgcttacc

SEQ ID NO: 24115 - DNA, 385 bp, Zea mays
  Clone ID: LIB3152-048-P1-K1-D9
ttttgagcattcaaaaacacacaaagggaagtgcactagcaacttcctaacaacaatggctaccaagatattagccctccttgcgctcctttccctttcagtgagcgcaacaactgcattcattattccacaatgctcacttgctcctaatgccattattccacagttcctcccatcagttacatcaatgggcatcgaacaccctattgtgcaagcctataggctacaacaagcgcttgcggcgagcgtcttacaacaaccgtttgcccaattacaacaacaatccttggcacatctaaccatacaaaccatcgcaacacaactagagcaacagtttgtgcccgcattgagccaactagccgcagtgaaccctgtctcctacttg

SEQ ID NO: 24116 - DNA, 315 bp, Zea mays
  Clone ID: LIB3152-048-P1-K1-E1
agcatacaaaaacacaccaagtaaatttcactaacaacaacctaacaacaggcggcgccaaaacaatagcccacgcgccacaacaagccctgcaagagaacgcaacaaatgcgaacattaacccacagagcacacttgcaacaagtgccattaacccacagcaacaaccaccagggaccacaaagggccatgaacacaacacccacacaagccaacaagctccaactaaaaactgccgacagcgacctacaaccaccaaatgacaaataccaacaacaaaacttgccacacataaaccttcaaaccatctgcaac

SEQ ID NO: 24117 - DNA, 380 bp, Zea mays
  Clone ID: LIB3152-048-P1-K1-E10
aagaaccacagccaccgcgatggcgcagatcatcgatggcaaggccatcgccgccgacgtccgccgcgaggtcgccgccgatgtggccgcgctctcgtcagcccacggactcgtgccggggctggccgtggtcatcgtggggagcaggaaggactcgcagacgtacgtgaacatgaagcgcaaggcgtgcgccgaggtcggcatctgctccatcgacgtcgacctcccggaggacatctccgagaccgcgctcgtcgccgaggttcatcgcctcaacgctgaccccgcagtgcacgggatccttgtccagcttccacttcctaagcatatcaacgaagagaagatactgagcgagatttccatcgagaaagatgtggatg

SEQ ID NO: 24118 - DNA, 382 bp, Zea mays
  Clone ID: LIB3152-048-P1-K1-E11
gaccaactagcaacatagaaagcacaatagtgtaccaacaatggcagccaaaatattttgcttccttatgctccttggtctttctgcaagtgctgctaccgcaaccattttcccacaatgctcacaagctcctatagcttcctttcttcccccatacctctcaccagcggtgtcttcagtatgtgaaaacccaattcttcaaccctacaggatccaacaggcaatcgcagcaggcatcttacctttatcacccttgttcctccaacaaccgtcagccctattacagcagttacctttggtgcatttgttggcacaaaacatcaaggcacaacaactacaacaacttgtgctaggaaaccttgctgcctactctcagcaacag

SEQ ID NO: 24119 - DNA, 178 bp, Zea mays
  Clone ID: LIB3152-048-P1-K1-E12
cgcaccaacccctgtggcgtctcctctgccattccgccctactactgattcatgatatttgggaaatctcctctatccatccctctctatctatatatgtaataatgcagtaagacgacacacattatcatgtgtggtatgaccaataatatatgcatcataataaagttttggtttt

SEQ ID NO: 24120 - DNA, 389 bp, Zea mays
  unsure at all n locations
  Clone ID: LIB3152-048-P1-K1-E2
cagaccattagctttatctactccagagcgcagaaaaacccgatcgacaccatgaggggggttgctcgttgccctcgctctcctggctctcgctgcgaggcgccacctncacgcatacaagcggcggctgcggctgccagccaccgccgccggttcatctaccgccgccggtgcatctgccacctncggttcacctgccacctccggtgcatcttccaccgccggtccacctgccgccgccggtccacctgccaccgccggtccatgtgccgccgccggttcatctgccgncgncaccatgccactaccctactcaaccgccccggcctcagcctcatccccagccacacccatgcccgtgccaacagccgcatccaagcccgtgccag

SEQ ID NO: 24121 - DNA, 370 bp, Zea mays
  Clone ID: LIB3152-048-P1-K1-E3
tgctggtgcagccttgctatttgctatttctgcaattagttttgcctatgggcggcgcaggaaaccacaagaacatttctttgatgtacctgccgaggaagatccagaggtgcatcttggccagcttaaaagattttcactacgagaattacaagttgcaacagatggcttcagcaataagaacattcttggaagaggtggatttggcaaagtctacaaaggacggctggcagatggatctttagttgctgttaagagactaaaggaggagcgcacgcctggtggagaattacagtttcaaacagaagttgagatgattagtatggctgtacacagaaatctattgcgtcttcgtggattctgtatgaca

SEQ ID NO: 24122 - DNA, 385 bp, Zea mays
  Clone ID: LIB3152-048-P1-K1-E4
caactagcaacatagaaagcacaatagtgtaccaacaatggcagccaaaatattttgcttccttatgctccttggtctttctgcaagtgctgctaccgcaaccattttcccacaatgctcacaagctcctatagcttcctttcttcccccatacctctcaccagcggtgtcttcagtatgtgaaaacccaattcttcaaccctacaggatccaacaggcaatcgcagcaggcatcttacctttatcacccttgttcctccaacaaccgtcagccctattacagcagttacctttggtgcatttgttggcacaaaacatcaaggcacaacaactacaacaacttgtgctaggaaaccttgctgcctactctcagcaacagcagttt

SEQ ID NO: 24123 - DNA, 384 bp, Zea mays
  Clone ID: LIB3152-048-P1-K1-E5
cttacctttataacccttgttccttcaacaatcatcagccctattacagcagttacctttggtgcatttattggcacaaaacatcagggcacaacaactacaacaacttgtgctagcaaaccttgctgcctactctcagcaacagcagtttcttccattcaaccaactagctgcattgaactctgcttcttatttgcaacaacaacaactaccattcagccagctatctgctgcctacccccagcaatttcttccattcaaccaactgacagcattgaactctcctgcttatttacagcagcaacaactactaccattcagccagctagctggtgtgagccctgctaccttcttgacacaaccacagttgttgccgttctacca

SEQ ID NO: 24124 - DNA, 383 bp, Zea mays
  Clone ID: LIB3152-048-P1-K1-E6
gtgaaaacccagctcttcaaccctataggctccaacaagcaatcgcagcaagcaacatacctttatcacccttgtttcaacaatcgccagccctatctttggtgcagtcattggtacaaaccatcagggcacagcagctgcagcaactcgtgctacctgtgatcaaccaagtagctctggcaaacctttctccctactctcagcaacaacaatttcttccattcaaccaactgtctacattgaaccgtgctgcttatttgcagcaacaactattaccattcagccagctagctactgcctactctcagcaacaacaacttcttccatttaaccaattggccgcactgaaccccgctgcttatttgcagcagcaaatactacta

SEQ ID NO: 24125 - DNA, 383 bp, Zea mays
  Clone ID: LIB3152-048-P1-K1-E7
cttcatcacaatggcccttggaggtgatggctacttgaattttatgggaaatgagtttggtcacccagaatggattgactttccaagagaagggaacaactggagctatgataaatgcagacgacagtggagccttgtggacactgatcacttgcggtacaagtacatgaatgcgtttgaccaagcgatgaatgcgctcgatgagagattttccttcctttcgtcgtcaaagcagatcgtcagcgacatgaacgatgaggaaaaggttattgtctttgaacgtggagatttagtttttgttttcaatttccatcccaagaaaacttacgagggctacaaagtgggatgcgatttgcctgggaaatacagagtagccctggact

SEQ ID NO: 24126 - DNA, 386 bp, Zea mays
  Clone ID: LIB3152-048-P1-K1-E8
agctttatctactccagagcgcagatgaacccgatcgacaccatgagggtgttgctcgttgccctcgctctcctggctctcgctgcgagcgccacctccacgcatacaagcggcggctgcggctgccagccaccgccgccggttcatctaccgccgccggtgcatctgccacctccggttcacctgccacctccggtgcatctcccaccgccggtccacctgccgccgccggtccacctgccaccgccggtccatgtgccgccgccggttcatctgccgccgccaccatgccactaccctactcaaccgccccggcctcagcctcatccccagccacacccatgcccgtgccaacagccgcatccaagcccgtgccagctgcaggg

SEQ ID NO: 24127 - DNA, 381 bp, Zea mays
  Clone ID: LIB3152-048-P1-K1-E9
gcaacatagaaagcacaatagtgtaccaacaatggcagccaaaatattttgcttccttatgctccttggtctttctgcaagtgctgctaccgcaaccattttcccacaatgctcacaagctcctatagcttcctttcttcccccatacctctcaccagcggtgtcttcagtatgtgaaaacccaattcttcaaccctacaggatccaacaggcaatcgcagcaggcatcttacctttatcacccttgttcctccaacaaccgtcagccctattacagcagttacctttggtgcatttgttggcacaaaacatcaaggcacaacaactacaacaacttgtgctaggaaaccttgctgcctactctcagcaacagcagtttct

SEQ ID NO: 24128 - DNA, 381 bp, Zea mays
  Clone ID: LIB3152-048-P1-K1-F10
cccacgcgtccggaccaacaagcatcatagaaagtggaatccagtagcaacaatagagcaacaatggagaccaagatattttccctccttatgctccttgctctttctacatgtgttgctaacgcgacaattttccctcaatgctcacaagctcctatagcttccctttttcccccataccttccatcaattatagcttcagtatgtgaaaacccagctcttcaaccatataggcttcaacaagcaatcgcagcaagcaacatacctttatcgcccttgttgtgtcaacaatcgccagccctatctttggtgcagtcattggtacaaaccatcagggcacaacagctgcagcaactcgtgctacctgtgatcaaccaagta

SEQ ID NO: 24129 - DNA, 368 bp, Zea mays
  Clone ID: LIB3152-048-P1-K1-F11
cccacgcgtccggcattcagaaactcaccaagcgaagcgcactagcaacgacctaacaacaatggctaccaagatattagccctccttgcgcttcttgccctttttgtgagcgcaacaaatgcgttcattattccacaatgctcacttgctcctagtgccattattccacagttcctcccaccagttacttcaatgggcttcgaacacctagctgtgcaagccaacatgcaacaacaagcgcttgcggcgagcgtcttacaacaaccaattgcccaattgcaacaacaatccttgccacatctaacaatacaagccatcacaacgcaacagcaacaacagttcctaccagcactgagccacctagcca

SEQ ID NO: 24130 - DNA, 382 bp, Zea mays
  Clone ID: LIB3152-048-P1-K1-F12
acacaccaagcgaagcacattagcttcaacctaacaacaatggctaccaagatattatccctccttgcgcttcttgcgctttttgcgagcgcaacaaatgcgttcattattccacaatgctcacttgctccaagttccattattacacagttcctcccaccagttacttcaatgggcttcgaacacccagctgtgcaagcctataggctacaacaagcaattgcggcgagcgtcttacaacaaccaatttcccagttgcaacaacaatccttggcacatctaacaatacaaaccatcgcaacgcaacagcaacaacaattcctaccagcactgagccacctagccatggtgaaccctgccgcctacttgcaacagcagttgc

SEQ ID NO: 24131 - DNA, 382 bp, Zea mays
  Clone ID: LIB3152-048-P1-K1-F2
cgcagctaagcccgtgccagcagttcggatcctgcggcgtcggcagcgtcggcagcccgttcctgggccagtgcgtcgagttcctgaggcaccagtgcagcccggcggcgacgccctacggctcgccacagtgccaggcgctgcagcagcagtgctgccaccagatcaggcaggtggagccgctgcaccggtaccaggcgacatacggtgtggtcctgcagtccttcctgcagcagcagccgcagggcgagctcgcggcgctgatggcggcccaggtagcgcagcagctgacggcgatgtgcggcctgcagctgcagcagccaggtccctgcccttgcaacgcagctgccggcggtgtctactactgaggaaactatgtact

SEQ ID NO: 24132 - DNA, 388 bp, Zea mays
  Clone ID: LIB3152-048-P1-K1-F3
aagcgaagcacattagcaacaacctaacatcaatggctaccaagatattatccctccttgcgcttcttgcgctttttgcgagcgcaacaaatgcgttcattattccacaatgctcacttgctccaagttccattattacacagttcctcccaccagttacttcaatgggcttcgaacacccagctgtgcaagcctataggctacaacaagcaattgcggcgagcgtcttacaacaaccaatttcccagttgcaacaacaatccttggcacatctaacaatacaaaccatcgcaacgcaacagcaacaacaattcctaccagcactgagccacctagccatggtgaaccctgccgcctacttgcaacagcagttgcttgcatcaaaccc

SEQ ID NO: 24133 - DNA, 409 bp, Zea mays
  Clone ID: LIB3152-048-P1-K1-F4
ggaaggaccgggcggaccgacccatgcgttccaccgcctacctctgcctgtcatttttagagtgagagtgaggcaccgagtgggagacaaggggaaatggggaagggagcgcaagggagcgatgcggcggcggcgggcggcgaggtggacgagaacatggcggcgtggctggttgccaagaacaccctcaagatcatgcccttcaagctcccgcccgtcggcccttatgatgtccgcgtgcgcatgaaggcagtggggatttgcggcagcgatgtgcactacctaagggagatgcgcatcgcgcacttcgtggtgaaggagccgatggtgatcgggcacgagtgcgcgggcgtggtcgaggaggtgggcgccggcgtgacgcacctgtccgtgggcgaccgcgtggcgc

SEQ ID NO: 24134 - DNA, 384 bp, Zea mays
  Clone ID: LIB3152-048-P1-K1-F5
cccacgcgtccgataggtttaaacatgctttcgcagcaagcaacatacctttatcgcccttgttgtgtcaacaatcgccagccctatctttggtgcagtcattggtacaaaccatcagggcacaacagctgcagcaactcgtgctacctgtgatcaaccaagtagctctggcaaacctttctccctactcttcgcaacaacaatttcttccattcaaccaactgtctacactgaaccctgctgcttatttgcagcaacaactattaccatttagccagctagctactgcctactctcaacaacaacaacttcttccatttaaccaattggccgcactgaaccccgctgcttatttgcagcagcaaatactactaccatttagcc

SEQ ID NO: 24135 - DNA, 381 bp, Zea mays
  Clone ID: LIB3152-048-P1-K1-F6
ggtaagcctagcaattagctcatctacttcagattggagaactcgacaccatgaaggtgctgatcgttgcccttgctctcctggcgctcgctgcgagcgccgcctccagtacaagcggcggctgtggctgccagacaccaccgtttcatctaccgcctccgttctatatgccgcctccgttctatctgccgccgcagcagcagccgcagccatggcaataccccactcaaccaccgcagctaagcccgtgccagcagttcggatcctgcggcgtcggcagcgtcggcagcccgttcctgggccagtgcgtcgagttcctgaggcaccagtgcagcccggcggcgacgccctacggctcgccacagtgccaggcgctgcagc

SEQ ID NO: 24136 - DNA, 386 bp, Zea mays
  Clone ID: LIB3152-048-P1-K1-F7
cagaaacacaccaagcgaagcacattatcaacaacctaacaacaatggctaccaagatattatccctccttgcgcttcttgcgctttttgcgagcgcaacaaatgcgttcattattccacaatgctcacttgctccaagttccattattacacagttcctcccaccagttacttcaatgggcttcgaacacccagctgtgcaagcctataggctacaacaagcaattgcggcgagcgtcttacaacaaccaatttcccagttgcaacaacaatccttggcacatctaacaatacaaaccatcgcaacgcaacagcaacaacaattcctaccagcactgagccacctagccatggtgaaccctgccgcctacttgcaacagcagttg

SEQ ID NO: 24137 - DNA, 386 bp, Zea mays
  Clone ID: LIB3152-048-P1-K1-F8
cagaaacacaccaagcgaagcgcactagcaacgacctaacaacaatggctaccaagatattagccctccttgcgcttcttgccctttttgtgagcgcaacaaatgcgttcattattccacaatgctcacttgctcctagtgccattattccacagttcctcccaccagttacttcaatgggcttcgaacacctagctgtgcaagccaacatgcaacaacaacaacagttcctaccagcactgagccacctagccatggtgaaccctgccgcctacttgcaagagcagctgcttgcatccaacccacttgctctggcgaacgtagttgcaaaccagcaacaacaacagctacaacagtttctgccaacgctcagtcaactagccatg

SEQ ID NO: 24138 - DNA, 382 bp, Zea mays
  Clone ID: LIB3152-048-P1-K1-F9
atttgtcagaagctcaaatactgatctcactgatccagtatggctatggcaaaggcaggcgcgccgagggtctcggcggcccagctggtgactctcgggctatcactcctctgcgctgtcgccggcccggccgccgcgcagaactgcggctgccagccaaacgtatgctgcagcaagtttggctactgcggcacgaccgacgagtactgcggcgacgggtgccagtcgggcccgtgccgctcgggcggcggcggcagcagtggcggcggtggtgcgaacgtggctagcgtcgtcaccggctccttcttcaacggcatcaagagccaggccgggagcgggtgcgagggcaagaacttctacacccggagcgcgttcctgagcg

SEQ ID NO: 24139 - DNA, 378 bp, Zea mays
  Clone ID: LIB3152-048-P1-K1-G10
gggggctcgtgggctcgtcggcgccctccgctaggcacgcccgggcacccatgctcgaccagagccagatgcacctacagagcttgatgagctcgctggctgccggcggcatgttcggcggcgccaacagcggcagcatgattgacccgaggatgtatgacatgaaccaagatgtgaagtttagccagggccgtggtggcgctgagatgacgcgcgacttccttggcgtcggcggcgatggtgtcatgagaggcatgacagtggcgagagcggggcaccaagacggtgccgatgacatgaactccttggaagccgagatgaagtcggcctcgtcgcccttcactggagacaggatgcaataagagttcccaataagag

SEQ ID NO: 24140 - DNA, 292 bp, Zea mays
  unsure at all n locations
  Clone ID: LIB3152-048-P1-K1-G11
ctttnncaagggaatatngnatgtttctgttggattcttttgtggtctggtgggacaagggattgctaatttgataatgacagccaaacggagtgttaagaagtcagaggatgatgtacctgttccacctcttctcaagacttctgctttgtggggtgcattccttgctgtttcttccaacacacggtaccagattattaatggattagagcgcctggttgaggcttcacctgttgcgaagcgtgtcccggctgcttctttgccattcaccgttggtgtgaggtttgccaat

SEQ ID NO: 24141 - DNA, 275 bp, Zea mays
  unsure at all n locations
  Clone ID: LIB3152-048-P1-K1-G12
cggacgcgngggnangganaccaactagcaacanacanagngaagnacacgagcaacancnnagcaccaangggagccaagannnnngcccnccnngcccnccnggcncnnncagcaagcgcngcnaccncgacnnnnannccacaaggcncacaacaanaccncncnccggcgacagccgngggannncaanacccaacnanacaanccnacanggnacaagaggccanccaagcaagcancnnacggncannagcannaacccnccaacaacc

SEQ ID NO: 24142 - DNA, 388 bp, Zea mays
  Clone ID: LIB3152-048-P1-K1-G2
catgccactaccctactcaaccgccccggtctcagcctcatccccagccacacccatgcccgtgccaacagccgcatccaagcccgtgccagctgcagggaacctgcggcgttggcagcaccccgatcctgggccagtgcgtcgagtttctgaggcatcagtgcagcccgacggcgacgccctactgctcgcctcagtgccagtcgttgcggcagcagtgttgccagcagctcaggcaggtggagccgcagcaccggtaccaggcgatcttcggcttggtcctccagtccatcctgcagcagcagccgcaaagcggccaggtcgcggggctgttggcggcgcagatagcgcagcaactgacggcgatgtgcggcctgcagcagccgac

SEQ ID NO: 24143 - DNA, 388 bp, Zea mays
  Clone ID: LIB3152-048-P1-K1-G3
gcaacatagaaagcacaatagtgtaccaacaatggcagccaaaatattttgcctccttatgctccttggtatttctgcaagtgctgctacggcgaccattttcccgcaatgctcacaagctcctatagcttcccttcttcccccgtacctctcaccagcggtgtcttcggtatgtgaaaacccaattcttcaaccctacaggatccaacaggcaatcgcagctggcatcttacctttatcacccttgttcctccaacaatcatcagccctattacagcagttacctttggtgcatttattggcacaaaacatcagggcacaacaactacaacaacttgtgctagcaaaccttgctgcctactctcagcaacagcagtttcttccattc

SEQ ID NO: 24144 - DNA, 405 bp, Zea mays
  Clone ID: LIB3152-048-P1-K1-G4
aggaaggggcggaccgacccgtccgggagaagttcccaggcaaggtgcgcgccttggtcaagttaaacgcggcgctggggcaccacatcatggccggcgccgacgtgctcgccgtaaccagccgcttggagccctgcggcctcatccagctgcaggggatgcgatacggaacgccctgcgcctgcgcgtccaccggtggactcgtcgacaccatcatcgaaggcaagaccgggttccacatgggccgactcagcgtcgactgtaacgtcgtggagccggcggacgtcaagaaggtggccaccacattgcagcgcgccatcaaggtggtcggcacgccggcgtacgaggagatggtgaggaactgcatgatccaggatctctcctggaagggccctgccaagaact

SEQ ID NO: 24145 - DNA, 411 bp, Zea mays
  Clone ID: LIB3152-048-P1-K1-G5
cgtaacggaacggccggaccgacgcgtccgtgctgggcccgtgtccggcggatcgttgtacccggcgaggacgctggcgcccggcgtggccagcaacgtcttcacgggcctctggatctacttcctcggccccgtcgtcggcacgctctccggagcctgggtctacacctacatccgcttcgaggaggcccccgcagccgccaagcccgacacccagaggctctcctccttcaagctccgacgcatgcagagccagtccgccctcgccgccgacgagttcgacaccgtctgacgcgcgcccgcccgcccgaagagatcgagtactactgcgtgtgctccctcgctctgttcaaaatctcaggtgggagagagctatagctagctgcgcgcgcgcgcgtgtgtgctggtagg

SEQ ID NO: 24146 - DNA, 385 bp, Zea mays
  Clone ID: LIB3152-048-P1-K1-G6
tagcaacatagaaagcacaatagtgtacttacaatggcagccaaaatattttgcttccttatgctccttggtctttctgcaagtgctgctaccgcaaccattttcccacaatgctcacaagctcctatagctccctttcttaccccatacctttcaccagcggtgtcttcagtttgtgaaaacccaattcttcaaccctacaggatccaacaggcaatcgcagcaggcatcttacctttatcacccttgttcctccaacaaccgttagccctattacagcaggtacctttggtgcatttgttggcacaaaacatcaaggcacaacaactacaacaacttgtgctaggaaaccttgctgcctactctcagcaacagcagtttgttc

SEQ ID NO: 24147 - DNA, 383 bp, Zea mays
  Clone ID: LIB3152-048-P1-K1-G7
gcatattttggatttcgtgcctatatgtcttaatttacaggaaccttccagaggaaattattgatcagctggagtttcagaaagctttacctcgtgctttaatatggccttctattgatcccagtgtagacaacagagataagattacagatcttctaaattttgctgcttgtaagatggctgaagatattagtgagtgtgttaaaaacggggatccatcttacctgatgttatcacaattcctcgctgttaaccacattagttgtctagcggccattggaggcttaaaatcttctgttgatatgctggtgacctacatgaaggagtacccaatgtgtcctcagattcttctgatctcagctcggttagacagaaagcatggt

SEQ ID NO: 24148 - DNA, 245 bp, Zea mays
  Clone ID: LIB3152-048-P1-K1-G9
cacactagcgatccaacaatggtcttcagattggagaacttgacaccacgaaggggctgatctgtaggcgctgtttcctgagccatgctgcgagacgggtcaacagctcatgtagctgctgtggttgccagacaccaccgaccaatgtaccgtctagcgtgtgtaaaccgacttctttatatctgcaggatccaacagggaactcagacatggcattacaccactaaaacactggagcttacaac

SEQ ID NO: 24149 - DNA, 351 bp, Zea mays
  unsure at all n locations
  Clone ID: LIB3152-048-P1-K1-H10
gcaaagcggcagngcgnagagaggttcgncgaacagaacagcangaagaggggcagcgnncncgncgngggccnggcncngncagctgccagcgccccngcaangcagangcccngccccngcgcggggcngcagggcnnggacggcgccggcgccggcccgacgacgangangggcgccggcgggcngnaccccnacgcggagnaccngaggcagccgcagngcaacccgcnggcggcggcgccccacnacgccgggnnggggcagacgagcgccangnaccagccgcnccggcaacagngcngccagcagcagangagganganggacgngcagnccgncgcgcagcag

SEQ ID NO: 24150 - DNA, 367 bp, Zea mays
  Clone ID: LIB3152-048-P1-K1-H11
atggagaccaactagcaacatagattgcacaatagtgtaccaacaatggcggccaaaatattttgcctccttatgctccttggtctttctgcaagtgctgctacggcgaccattttcccgaaatgctcgcaagctcctatagcttcccttcttcccccgtacctctcaccagcggtgtcttcggtatgtgaaaacccaattcttcaaccctacaggatccaacaggcaatcacagctggcatcttacctttatcacccttgttcctccaacaatcatcagccctattacatcagttacctttggtgcatttattggcacaaaacatcagggcacaacaactacaacaacttgtgctagcaaaccttg

SEQ ID NO: 24151 - DNA, 282 bp, Zea mays
  unsure at all n locations
  Clone ID: LIB3152-048-P1-K1-H12
ggggaatccagnagcaacattagatcaacaatggagaccaagatattttccctccttatgctccttgctctttctacatgtgttgctaacgcgacaattttccctcaatgctcacaagctcctatggctcccttttttccccaatcccttcaataaataatggcttaagattgggaaacccaagttttcaacccatttaggttcaaccaggcattggaagaaggcaccatcctttaatggccttggtggggcaaccaatcgccggccttattttgggggcag

SEQ ID NO: 24152 - DNA, 387 bp, Zea mays
  Clone ID: LIB3152-048-P1-K1-H2
agaccaactagcaacatagaaagcataatagtgtaccaacaatggcagccaaaatattttgcttccttatgctccttggtctttctgcaagtgttgctaccgcaaccattttcccacaatgctcacaagctcctatagcttcccttcttcccccatacctctcaccagcggtgtcttcaatgtgtgaaaacccaattgttcaaccctacaggatccaacaggcaatcgcaacaggcatcttaccattatcacccttgttcctccaacaaccgtcagccctattacagcagttacctttggtccatttggtggcacaaaacatcagggcacaacaactacaacaacttgtgctagcaaaccttgctgcatactctcagcaacatcagt

SEQ ID NO: 24153 - DNA, 384 bp, Zea mays
  Clone ID: LIB3152-048-P1-K1-H3
ggatggtttgcaaaagatggaaccgtcttttgtctgggaattacttttactccttgcgtaagaaaattggagtggcagaagaatgggtgtatgtctttaaaagggaccgtgaagggaagatatcctggtatgcctttgatccactccaccagctatggaagtcactcccaccagttccacaagagtattcagaagcattgggctttgggtgtgccgttctgagtggttgctatctgtacttgtttggcgggaaagatcctttgaggggttctatgaggcgtgttgtattctacaatgctcgtacaaacaaatggcaccgggctccggatatgatgaggaaacgtcacttttttggttcttgtgtaattaacaattgtctctatg

SEQ ID NO: 24154 - DNA, 206 bp, Zea mays
  Clone ID: LIB3152-048-P1-K1-H4
gggcatgagccacctgggggggacctgccacctggggagcatctcccaccggcggtccacgtgccgacaccatgctactaccttacaaaaccgccccggtctgagcctaatccagagccacacctatgcccgtgccaacagccgaatacaagcccgtgccagatggagggaacctgcggggttggaagcacccagatcctgggcca

SEQ ID NO: 24155 - DNA, 375 bp, Zea mays
  Clone ID: LIB3152-048-P1-K1-H6
atttagaccaactagcaacatagaatgcacaatagtgtaccaacaatggcaggggaaatattttgcctccttatgctccttggtatttctgcaagtgctgctacggcgaccattttcccgcaatgctcacaagctcctatagcttcccttcttcccccgtacctctcaccagcggtgtcttcggtatgtgaaaacccaattcttcaaccctacaggatccaacaggcaatcgcagctggcatcttacctttatcacccttgttcctccaacaatcatcagccctattacagcagttacctttggtgcatttattggcacaaaacatcagggcacaacaactacaacaacttgtgctagcaaaccttgctgcctac

SEQ ID NO: 24156 - DNA, 277 bp, Zea mays
  Clone ID: LIB3152-048-P1-K1-H7
gtgctgtaaaccctaatcaggagtgattatccgtgagccatgagtagttgcagctggttcaaggatgccatctccaatgtgggtgccaggagaaatggagttactggactgggaacttaatgctgagaatatatccacaaggcagcttaggcttgtagtgcccatatctgtcagatgaggtcatgctgggatgcagatgttgggggcggagagactgctcatgagtgggttaagaaaagacagacagagctgtagaggctgcagagaccatgctttg

SEQ ID NO: 24157 - DNA, 384 bp, Zea mays
  Clone ID: LIB3152-048-P1-K1-H8
gttggttacaaaaatgatagatgatgttgagcttcttgaagaaaaggctaaagtagccaaacgtgaatcatctgttgctgggacaggcattctaaccaaagttgaggagctcagagaaatgttaactcatgcgaaggaagcaaatgatatgcatgctggcgaggtttttggcgagaaagctattttaaccacagaggcacgtgagcttcaatctcgacttcagaggctttcagatgagaggaataaatatctggtgataattgaagagatacgacaaactcttgatcaaagattggttgctgcacagcaagaaattgcagcagccgagaaagaaaagcttgaaaaggaggttgctgctcagacactactcaatgaacaggaaaa

SEQ ID NO: 24158 - DNA, 377 bp, Zea mays
  Clone ID: LIB3152-048-P1-K1-H9
aagcaagttggacaaagggcattatttgttgtagttgtaagagggttgcggggttagccgcaaactgctggtagaaaggcagcaactcgtgctacctgtgatcaaccaagtagctctggcaaacctttctccctactctcagcaacaacaatttcttccattcaaccaactgtctacattgaaccgtgctgcttatttgcagcaacaactattaccattcagccagctagctactgcctactctcagcaacaacaacttcttccatttaaccaattggccgcactgaaccccgctgcttatttgcagcagcaaatactactaccatttagccagctagctgcagcaagccgtgcttcctttttgcacagcaacaatt

SEQ ID NO: 24159 - DNA, 379 bp, Zea mays
  unsure at all n locations
  Clone ID: LIB3152-049-P1-K1-A1
cggggnggaccaacgcgtccggattggagaactcgacaccatgaaggtgctgatcgttgcccttgctctcctggcgctcgctgcgagcgccgcctccagtacaagcggcggctgtggctgccagacaccaccgtttcatctaccgcctccgttctatatgccgcctccgttctatctgccgccgcagcaacagccgcagccatggcaataccccactcaaccaccgcagctaagcccgtgccagcagttcggatcctgcggcgtcggcagcgtcggcagcccgttcctgggccagtgcgtcgagttcctgaggcaccagtgcaagccggcggcgacgccctacggctcgccacagtgccaggcgctgcaacagcagtgc

SEQ ID NO: 24160 - DNA, 372 bp, Zea mays
  Clone ID: LIB3152-049-P1-K1-A10
gtcgaagtcaggatgagggaagggcatgcagtcaatatccacatgttctgtgcgcgtaggccaggcatcctgctgtcgacaatgacggccctcgacagcctaggcctcgacatcgagcaggcggtcatcagctgcttcaatggctttgcgatggacgtgttccgagctgagtgcgcggatggtcctggaatggtgcctgaagaaattaaggccgtgctgatgcacaccgccggcctccacaacgcaatgtagccggtccgaaaacgggccaccgccaggatgacgacgatcctcctcctttctactaagggcttcggttcggaagcggcataagattaagctgtggtggccattggttttctggggcaagtg

SEQ ID NO: 24161 - DNA, 288 bp, Zea mays
  unsure at all n locations
  Clone ID: LIB3152-049-P1-K1-A11
aaaaaaaaaaaaaaaaaaaaaattataataaaaaaaaaaaaaaaagnntngggggggtttttttctaattaaaggtacccaatatttcgtactatttaggggccccccgttttataggtcccaggtttccctcccctgccttccgaccttttatctttttattagttcccccgaattccatttaactgccccccttttaacaccccttgacctggaaaaccctttgcctccccaaattaacccccttttccccccttcccctttttccccctttcattttttgccaaa

SEQ ID NO: 24162 - DNA, 373 bp, Zea mays
  Clone ID: LIB3152-049-P1-K1-A12
gcggcggctgcggctgccagccaccgccgccggttcatctaccgccgccggttcatctgccgccgccaccatgccactaccctactcaaccgccccggcctcagcctcatccccagccacacccatgcccgtgccaacagccgcatccaagcccgtgccagctgcagggaacctgcggcgttggcagcaccccgatcctgggccagtgcgtcgagttcctgaggcatcagtgcagcccgacggcgacgccctactgctcgcctcagtgccagtcgttgcggcagcagtgttgccagcagctcaggcaggtggagccgcagcaccggtaccaggcgatcttcggcttggtcctccagtccatcctgcagcagca

SEQ ID NO: 24163 - DNA, 403 bp, Zea mays
  unsure at all n locations
  Clone ID: LIB3152-049-P1-K1-A2
cggaanggaagggccgacccgacccacgcgtacgtagcacgtacatagcacagatagtgtaccaacaatggctgccaaaacattggggctccttatgctccttggtctttctgcaagtgctgctacggcgaccattttcccgcaatgctcgcaagctcctatagcttcccttcttcccccgtacctctcaccagcggtgtcttcggtatgtgaaaacccaattcttcaaccctacaggatccaacaggcaatcgcagctggcatcttacctttatcacccttgttcctccaacaatcatcagccctattacaacagttacctttggtgcatttattggcacaaaacatcagggcacaacaactacaacaacttgtgctagcaaaccttgctgcctactctcag

SEQ ID NO: 24164 - DNA, 330 bp, Zea mays
  Clone ID: LIB3152-049-P1-K1-A3
gctcaagaatgctacaagttcaaatttgtttgtctaccaagcaatcagatgcatgccggcatccaagctttttgttggagcgctttcttatggaaccgttgatcacagtctcagagactagcttgccaaatatggacaacttattgaagcttatattatccttgatcgtgagtctgggaggtccagacgttttggctttataacttacacgttttctgacgaggcttcagctgccatcactgccatggcttgaaagactctggatggacggaacatacggagtaatcatgctaacgagaggacatgtggcttccgcagcagcggtggtta

SEQ ID NO: 24165 - DNA, 392 bp, Zea mays
  unsure at all n locations
  Clone ID: LIB3152-049-P1-K1-A4
cggtcagctctagcaattagcctcatcgttttccagaattggagaacctcgacanccatggaagggtgctgatcgttggcccttgctcntcctggncgctcgctgcgagcgccgacctccagtacaagtcggcggctggtggctgccagacanccaccgtttcatctaccgcctccgttctatatgccgcctccgttctatctgccgccgcagcagcagccgcagccatggcaataccccactcaaccaccgcagctaagcccgtgccagcagttcggatcctgcggcgtccgcagcgtcggcagcccgttcctgggccagtgcgtcgagttcctgaggcaccagtgcagcccggcggcgacgccctacggctcgccacagtgccaggcgct

SEQ ID NO: 24166 - DNA, 375 bp, Zea mays; identical to SEQ ID NO: 22057
  Clone ID: LIB3152-049-P1-K1-A5

SEQ ID NO: 24167 - DNA, 391 bp, Zea mays
  Clone ID: LIB3152-049-P1-K1-A7
gggccgacccgacccacgcgtacgtcaacaagcaacatagcaaagtggttttcagtagcaacaatagagcaacaatggcgaccaagatattttccctccttatgctccttgctctttctgcatgtgttgctaacgcgacaattttccctcaatgctcacaagctcctatagcttcccttcttcccccataccttccatcaatgatagcttcagtatgtgaaaacccagctcttcaaccctataggctccaacaagcaatcgcagcaagcaacatacctttatcacccttgtttcaacaatcgccagccctatctttggtgcagtcattggtccaaaccatcaaggcacagcagctgcagcaactcgtgctacctgtgatcaaccaagtagc

SEQ ID NO: 24168 - DNA, 370 bp, Zea mays
  Clone ID: LIB3152-049-P1-K1-A8
attgagaccaacttgcaacattgatttcacaatagtgtaccaacaatggcagggaaaatattttgcttccttatgctccttggtctttctgcaagtgctgctaccgcaaccattttcccacaatgctcacaagctcctatagcttcctttcttcccccatacctctcaccagcggtgtcttcagtatgtgaaaacccaattcttcaaccctacaggatccaacaggcaatcgcagcaggcatcttacctttatcacccttgttcctccaacaaccgtcagccctattacagcagttacctttggtgcatttgttggcacaaaacatcaaggcacaacatctacaacaacttgtgctaggaaaccttgctg

SEQ ID NO: 24169 - DNA, 230 bp, Zea mays
  Clone ID: LIB3152-049-P1-K1-A9
gaaccattagctatactatagcgcaaaaaccgagcacctgggggttgtcgtgctgctttgcttgtgagcgccactcacatcacggggtgggtgcccacgcgctcattaccgcgcgacattgcacctcggtacctgcactcggcattccacgcgtcactccgcgcggtcactgcacgcggccaggcccccggtattgcgcgcacagcgatcaacctgccactgcagaacct

SEQ ID NO: 24170 - DNA, 373 bp, Zea mays
  Clone ID: LIB3152-049-P1-K1-B1
gcaacatagaaagcacaatattgtaccaataatggcagccaaaatattttgcctcattatgctccttggtctttctgcaagtgctgctacggcgagcattttcccgcaatgctcacaagctcctatagcttcccttcttcccccatacctctcaccagcgatgtcttcagtatgtgaaaatccaattcttctaccctacaggatccaacaggcaatcgcagcaggcatcttacctttatcacccttgttcctccaacaatcatcagccctattacagcagttacctttggtgcatttattggcacaaaacatcagggcacaacaactacaacaactcgtgctagcaaaccttgctgcctactctcagcaacag

SEQ ID NO: 24171 - DNA, 284 bp, Zea mays
  Clone ID: LIB3152-049-P1-K1-B10
gtcaaagccagcatgcgggaagggtttcctgccactaatcacatttgctatgggcgtggttctcgcatcctgccgtttactatcaccttccaggacagcgtaagtgtagatatcttgcaagcgctcattacttgcttgaatggattgttaatggacctgtcttgagatgattatgcgcatcgtcctggtatgctgcttgaatgaatttatgtcgcactcattgagaccgactgtctgaacaacgcaatgtatctcatggttgaaggagccatccgcagtataac

SEQ ID NO: 24172 - DNA, 372 bp, Zea mays; identical to SEQ ID NO: 21378
  Clone ID: LIB3152-049-P1-K1-B12

SEQ ID NO: 24173 - DNA, 341 bp, Zea mays
  unsure at all n locations
  Clone ID: LIB3152-049-P1-K1-B2
gccctttgtccaacttgctttgacaaactcagcagcctcctaccaacaacacatcattggtggtgccctcttttagattgcttattagttgtaattcaataataaagttttttggatgatgtatgtggccaaccagaaataagaagttacatttccagattctaaaaaaaaaaaaaaaaaaaaaaaaaaaaaaaaaaaaataaaaaaaaaaaaaaaaaaaagaaaaaaaaaaaaaataaaaaaacaaatgcttgtcttttcatctacaattagggggcaaacattgattgtactcttagtaacatccacttttttttctaattttaaaanntgggggcggg

SEQ ID NO: 24174 - DNA, 335 bp, Zea mays
  Clone ID: LIB3152-049-P1-K1-B3
gctcaagaatgctacgaggtcaaatatgtttgtctaccaagcaatcagatgcatgtcatcatccaagctttttgttggagggctttcttatggaaccgatgatcacagtctcagagacgagtttgccaaatatggacaagttattgaagctaagattatccttgatcgtgagtctgggaggtccagaggttttggctttataacttacacgtattctgaggaggcttgggctgccatcactgccatggatggaaagactctggatggacggaacatacggattaatcatgctaacgagaggacaggtggcttccgcagcagcagtggttatggtg

SEQ ID NO: 24175 - DNA, 375 bp, Zea mays
  Clone ID: LIB3152-049-P1-K1-B4
caacaatagagcaacaatggcgaccaagatattttccctccttatgctccttgctctttctgcatgtgttgctaacgcgacaattttccctcaatgctcacaagctcctatagcttcccttcttcccccataccttccatcaatgatagcttcagtatgtgaaaacccagctcttcaaccctataggctccaacaagcaatcgcagcaagcaacatacctttatcacccttgtttcaacaatcgccagccctatctttggtgcagtcattggtacaaaccatcagggcacagcagctgcagcaactcgtgctacctgtgatcaaccaagtagctctggcaaacctttctccctactctcagcaacaacaatttct

SEQ ID NO: 24176 - DNA, 375 bp, Zea mays
  Clone ID: LIB3152-049-P1-K1-B5
agcattcagaaacacaccaagcgaagcgcactagcaacaacctaacaacaatggctaccaagatattagccctccttgcgcttcttgcccttttagtgagcgcaacaaatgcgttcattattccacagtgctcacttgctcctagtgccattattccacagttcctcccaccagttacttcaatgggcttcgaacatccagccgtgcaagcctacaggctacaactagcgcttgcggcgagcgtcttacaacaaccaattgcccaattgcaacaacaatccttggcacatctaaacctacaaaccatcgcaacgcaacaacaacgtctgcaacagtttatgccagcgctcagtcaactagccatggtgaaccctg

SEQ ID NO: 24177 - DNA, 375 bp, Zea mays
  Clone ID: LIB3152-049-P1-K1-B6
attcagaaacacaccaagcgaagcgcactatcaacgacctaacaacaatggctaccaagatattagccctccttgcgcttcttgccctttttgtgagcgcaacaaatgcgttcattattccacaatgctcacttgctcctagtgccattattccacagttcctcccaccagttacttcaatgggcttcgaacacctagctgtgcaagccaacatgcaacaacaagcgcttgcggcgagcgtcttacaacaaccaattgcccaattgcaacaacaatccttgccacatctaacaatacaagccatcacaacgcaacagcaacaacagttcctaccagcactgagccacctagccatggtgaaccctgccgcctact

SEQ ID NO: 24178 - DNA, 360 bp, Zea mays
  Clone ID: LIB3152-049-P1-K1-B7
caacaaccatccttagtgaatctatatctccaaagaatcgcagcacaacaactacaacagcagttgcttccaacaatcaatcaagtagttgcagcgaaccttgctgcttacctccagcaacaacaatttcttccattcaatcaactagctggggtgaaccttgctgcttacttgcaggcacaacagctactaccattcaaccaacttgtcaggagccctgctgccttcttactgcagcaacagttgctgccattccatctacaagttgtggcaaacattgctgctttcttgcaacaacaacaattgctggccttttacccacagggtgtgggaaacattaacgcctttttgcaacagcaa

SEQ ID NO: 24179 - DNA, 284 bp, Zea mays
  Clone ID: LIB3152-049-P1-K1-B8
agcaaagcggcagtgcgtagagaggatcgtcgaacagaacagcatgaagatggtcatcgttctcgtcgtgtgcctggctctgtcagctgccagcgcctctgcaatgcagatgccctgcccctgcgcggggctgcagggcttgtacggcgctggcgccggcctgacgacgatgatgggcgccggcgggctgtacccctacgcggagtacctgaggcagccgcagtgcagcccgctggcggcggcgccctactacgccgggtgtgggcagacgagcgccatgtacc

SEQ ID NO: 24180 - DNA, 362 bp, Zea mays
  Clone ID: LIB3152-049-P1-K1-B9
gttctctccttcctgccccacgcttatcatgccagcgctgtcgattggcaacgtggggcagctcgccgtcgaccttctcatatcctcgtcgagggcgaggcgggtggcctacctcgacgagccctccgtgctgccctgcgccggtaacgacgccttcggccctgacgccgtcggcgacctcgcactcgctctcgaagcttatgaatctacatctcataagctgggtttcattcagcaaaggtctccagttactacaggaatgatggtttcatttgcaaaaaatgttgctgatttcataaatagcatcgggaagaaccatattgtcattatatcaagtttagattctggaaagaggagagtga

SEQ ID NO: 24181 - DNA, 349 bp, Zea mays
  Clone ID: LIB3152-049-P1-K1-C1
cacccatcaaccgccgcagccgcggtaatggcagcgccgacgacgctgcgctcggggggggagcgggcgctcgcgcgctgcaaggagctcgtgagagggcggtggccgcagcggcgtctggggacgacgtccgcggctgtgacagctagcaaaaagaataaggatgaggaggatgagggagccgcgttccacctgccgccgccggtccacctgccaccgccggtccatgtgacgtcgccggttcatttttcgtcgccaccatgccactaccctacttaaccggcccgggcttaggctcattcccagccacacccatgcccgtgccaacagccgcattcaagcccgtgcc

SEQ ID NO: 24182 - DNA, 371 bp, Zea mays
  Clone ID: LIB3152-049-P1-K1-C10
cagaaacacaccaagcgaagcacattagcaacaacctaacaacaatggctaccaagatattatccctccttgcgcttcttgcgctttttgcgagcgcaacaaatgcgttcattattccacaatgctcacttgctccaagttccattattacacagttcctcccaccagttacttcaatgggcttcgaacacccagctgtgcaagcctataggctacaacaagcaattgcggcgagcgtcttacaacaaccaatttcccagttgcaacaacaatccttggcacatctaacaatacaaaccatcgtaacgcaacagcaacaacaatttctaccagcactgagccacctagccatggtgaaccctgccgcctac

SEQ ID NO: 24183 - DNA, 371 bp, Zea mays
  Clone ID: LIB3152-049-P1-K1-C11
attttcagcattcagaaacacaccatgcgaagcgcactagcaacaacctaacaacaatggctaccaagatattagccctccttgcgcttcttgcccttttagtgagcgcaacaaatgcgttcattattccacagtgctcacttgctcctagtgccattattccacagttcctcccaccagttacttcaatgggcttcgaacatccagccgtgcaagcctacaggctacaactagcgcttgcggcgagcgtcttacaacaaccaattgcccaattgcaacaacaatccttggcacatctaaacctacaaaccatcgcaacgcaacagcaacaacagtttctgccatcactgagccacctagccgtggtgaac

SEQ ID NO: 24184 - DNA, 373 bp, Zea mays
  Clone ID: LIB3152-049-P1-K1-C12
caccaagcgaagcgcactagcaacaacctaacaacaatggctaccaagatattatccctccttgcgcttcttgcgctttttgcgagcgcaacaaatgcgtccattattccacaatgctcacttgctcctagttccattattccacagttcctcccaccagttacttcaatggccttcgaacacccagctgtgcaagcctataggctacaacaagcgattgcggcgagcgtcttacaacaaccaattgcccaattgcaacaacaatccttggcacatctaacaatacaaaccatcgcaacgcaacagcaacaacagttcctaccagcactgagccacctagccatggtgaaccctgtcgcctacttgcaacagc

SEQ ID NO: 24185 - DNA, 404 bp, Zea mays
  Clone ID: LIB3152-049-P1-K1-C2
cggaacggaatggccggaccgacccacgcgtactagcgacaccaaatagcacaattttgtaccaataatggcagccaaaatattttgcctcattatgctccttggtctttctgcaagtgctgctacggcgagcattttcccgcaatgctcacaagctcctatagcttcccttcttcccccatacctctcaccagcgatgtcttcagtatgtgaaaatccaattcttctaccctacaggatccaacaggcaatcgcagcaggcatcttacctttatcacccttgttcctccaacaatcatcagccctattacagcagttacctttggtgcatttattggcacaaaacatcagggcacaacaactacaacaactcgtgctagcaaaccttgctgcctactctcagc

SEQ ID NO: 24186 - DNA, 372 bp, Zea mays
  Clone ID: LIB3152-049-P1-K1-C3
caactagcaacatagaaagcacaattgtgtaccaacaatggcagccaaaatattttgcctccttatgctccttggtctttctgcaagtgctgctacggcgaccattttcccacaatgctcacaagctcctatagcttcccttcttcccccgtacctctcaccagcggtgtcttcggtatgtgaaaacccaattcttcaaccctataggatccaacaggcaatcgcagctggcatcttacctttatcacccttgttcctccaacaatcatcagccctattacagcagttacctttggtgcatttattggcacaaaacatcagggcacaacaactacaacaacttgtgctagcaaaccttgctgcctactctca

SEQ ID NO: 24187 - DNA, 373 bp, Zea mays
  Clone ID: LIB3152-049-P1-K1-C4
gagaccaactagcaacatagaaagcacattagtgtaccaacaatggcagccaaaatattttgcctccttatgctccttggtctttctgcaagtgctgctacggcgaccattttcccacaatgctcacaagctcctatagcttcccttcttcccccgtacctctcaccagcggtgtcttcggtatgtgaaaacccaattcttcaaccctataggatccaacaggcaatcgcagctggcatcttacctttatcacccttgttcctccaacaatcatcagccctattacagcagttacctttggtgcatttattggcacaaaacatcagggcacaacaactacaacaacttgtgctagcaaaccttgctgcctact

SEQ ID NO: 24188 - DNA, 374 bp, Zea mays
  Clone ID: LIB3152-049-P1-K1-C5
ccaactagcaacatagaaagcacaatattgtaccaacaatggcagccaaaatattttgcttccttatgctccttggtctttctgcaagtgctgctaccgcaaccattttcccacaatgctcacaagctcctatagcttcctttcttcccccatacctctcaccagcggtgtcttcagtatgtgaaaacccaattcttcaaccctacaggatccaacaggcaatcgcagcaggcatcttacctttatcacccttgttcctccaacaaccgtcagccctattacagcagttacctttggtgcatttgttggcacaaaacatcaaggcacaacaactacaacaacttgtgctaggaaaccttgctgcctactctcag

SEQ ID NO: 24189 - DNA, 374 bp, Zea mays
  unsure at all n locations
  Clone ID: LIB3152-049-P1-K1-C6
cgtcagcctagcaattagctcatcgtctccagattggagaactcgacaccatgaaggtgctgatcgttgcccttgctctcctggcgctcgctgcgagcgccgcctccagtacaagcggcggctgtggctgccagacaccaccgtttcatctaccgcctccgttctatatgccgcctccgttctatctgccgccgcagcagcagccgcagccatggcaataccccactcaaccaccgcagctaagcccgtgccagcagttcggatcctgcggcgtcggcagcgtcggcagcccgttcctgggccagtgcgtcgagttcctgaggcaccagtgcagnccggcggcgacgccctacggctcgccacagtgccaggcg

SEQ ID NO: 24190 - DNA, 371 bp, Zea mays
  Clone ID: LIB3152-049-P1-K1-C7
ccgatcgacaccatgagggtgttgttcgttgccctcgctctcctggctctcgctgcgagcgccacctccacgcatacaagcggcggctgcggctgccagccaccgccgccggttcatctaccgccgccggtgcatctgccacctccggttcacctgccacctccggtgcatctcccaccgccggtccacctgccgccgccggtccacctgccaccgccggtccatgtgccgccgccggttcatctgccgccgccaccatgccactaccctactcaaccgccccggcctcagcctcatccccagccacacccatgcccgtgccaacagccgcatccaagcccgtgccagctgcagggaacctgcggcgttgg

SEQ ID NO: 24191 - DNA, 366 bp, Zea mays
  Clone ID: LIB3152-049-P1-K1-C8
taccaactagcaacattcattgtgaagtacagtagcaacatcttagcaccaatggcagccaagatttttgccctccttgccctccttgctctttcagcaagtgttgctaccgcgactattattccacaatgctcacaacaatacctctctccggtgacagccgcgagatttgaatacccaactatacaatcctacaggctacaagaggccatcacagcaagcatcttacggtcgttagcattgactgtccaacaaccatatgccctattgcaacaaccatccttagtgaatctatatctccaaagaatcgcagcacaacaactacaacagcagttgcttccaacaatcaatcaagtagttgcagcg

SEQ ID NO: 24192 - DNA, 367 bp, Zea mays
  Clone ID: LIB3152-049-P1-K1-C9
cacaatagtgtaccaacaatggctttcaaaatattttgcctccttatgctccgtggtctttctgcaagtgctgctacggcgaccattttcccgcaatgctcgcaagctcctatagcttcccttcttcccccgtacctctcaccagcggtgtcttcggtatgtgaaaacccaattcttcaaccctacaggatccaacaggcaatcgcagctggcatcttacctttatcacccttgttcctccaacaatcatcagccctattacaacagttacctttggtgcatttattggcacaaaacatcagggcacaacaactacaacaacttgtgctagcaaaccttgctgcctactctcagcaacagcagtttc

SEQ ID NO: 24193 - DNA, 373 bp, Zea mays
  Clone ID: LIB3152-049-P1-K1-D1
atggttaccgtgctagccaagatagaggagatgcagcgcggcgagacgcgggcaagccgccatgcgaaggcgtatatggagggcctcgtgggtgtgctggtccggctaacgacgacgctgtatgacccggacgtgctcttggcggccatggatcacaacctcacgtcggtgctcacagatctcgtgcggtccgcaggcagcgacgaggtccagcgtctcgccgcgattggtctcgagaacctcagcagccagtcgcccaacctttcccagcccccaaccgaggagcggcgcccgaagaagaagaacatcctccggcgcctgcgcgaggcgcacgcggggcgggtgcacgacaaccggaggccgccggcgcaca

SEQ ID NO: 24194 - DNA, 372 bp, Zea mays
  Clone ID: LIB3152-049-P1-K1-D10
gcaacatagaaagtggaatccattttcaacaatagagcaacaatggcgaccaagatattttccctccttatgctccttgctctttctgcatgtgttgctaacgcgacaattttccctcaatgctcacaagctcctatagcttcccttcttcccccataccttccatcaatgatagcttcagtatgtgaaaacccagctcttcaaccctataggctccaacaagcaatcgcagcaagcaacatacctttatcacccttgtttcaacaatcgccagccctatctttggtgcagtcattggtacaaaccatcagggcacagcagctgcagcaactcgtgctacctgtgatcaaccaagtagctctggcaaacctt

SEQ ID NO: 24195 - DNA, 371 bp, Zea mays
  Clone ID: LIB3152-049-P1-K1-D11
cggacgcgtgggcgccgccgacctacggccagctgtgcccatgtcttcgtcgggccctttgctggcgacgggaacccaccacaccggccgccaacctgaggttttgtgggctcagcgctccgagaagattttcttgactatctcattgccagatgcgaaagatgttgtgttaaagaccgatcctaagggcctctttaacttctctgctgttgtccatggggaaccttttagcttcactttggagctttttgattcaatactgtcagagggaagtaaaacgaagacaaagatgggcctgcgaaacataatctgctcaatccagaaagaaaagaaaggttggtggaagcgcttgctaaagtcagaggaaaagc

SEQ ID NO: 24196 - DNA, 373 bp, Zea mays
  Clone ID: LIB3152-049-P1-K1-D12
cagagaacaggtatggcggctgcgcggcacctcagatccggcctccccctcctccgcgcccacctcgcatcctccgaatccgcggccgtcgctcaggtttcgaggggcttcgcgtcgcaggccgctaagcccaccgggaaggagatcaaggttccaaaggctctgtttggcggcacaggcaactatgccagtgcactgttcctcacagcagctaaatctaatgcattggacaaagttgaatctgagattaaagctattgtagaggcttccaagaagagcccgttgttttctcaattcataaaggacttgtcagttccaaaagcgaccagggtgaaggctatagccgaaatatttgctgacgctgggttttcag

SEQ ID NO: 24197 - DNA, 337 bp, Zea mays
  Clone ID: LIB3152-049-P1-K1-D2
cggacgcgtgggtgcaggcagaaccggctctggcgacgcctgggccttcctgaagctgagctcccgcatcgcgagcatcagctcctccatctcggcgtcggcgtcgccgtccttcgacggctcgtcgacccacctgcggccctccacgggggacaccggcggcgactcccatagcgccagctgcaggggggacttggtcgtgagggcttgcaccagctcgtgcggagagcacgcgtgcttggtctaagccccgactgccgccagtgttcagcactcactcggcagccgtacctttggtgcaatcattggttcaaaccatcagggcacaacagctgca

SEQ ID NO: 24198 - DNA, 373 bp, Zea mays
  Clone ID: LIB3152-049-P1-K1-D3
cagaaacacaccaagcgaagcgcactagcaacgacctaacaacaatggctaccaagatattagccctccttgcgcttcttgccctttttgtgagcgcaacaaatgcgttcattattccacaatgctcacttgctcctagtgccattattccacagttcctcccaccagttacttcaatgggcttcgaacacctagctgtgcaagccaacatgcaacaacaagcgcttgcggcgagcgtcttacaacaaccaattgcccaattgcaacaacaatccttgccacatctaacaatacaagccatcacaacgcaacagcaacaacagttcctaccagcactgagccacctagccatggtgaaccctgccgcctactt

SEQ ID NO: 24199 - DNA, 368 bp, Zea mays
  Clone ID: LIB3152-049-P1-K1-D4
caacaagcaacatagaaagtggaattcagtagcaacaatagagcaacaatggagaccaagatattttccctccttatgctccttgctctttctacatgtgttgctaacgcgacaattttccctcaatgctcacaagctcctatagcttccctttttcccccataccttccatcaattatagcttcagtatgtgaaaacccagctcttcaaccatataggcttcaacaagcaatcgcagcaagcaacatacctttatcgcccttgttgtgtcaacaatcgccagccctatctttggtgcagtcattggtacaaaccatcagggcacaacagctgcagcaactcgtgctacctgtgatcaaccaagtagc

SEQ ID NO: 24200 - DNA, 371 bp, Zea mays
  Clone ID: LIB3152-049-P1-K1-D6
gcattcagaaacacaccaagcgaagcgctctagcaacaacctaacaacaatggctaccaagatattagccctccttgcgcttcttgcccttttagtgagcgcaacaaatgcgttcattattccacagtgctcacttgctcctagtgccattattccacagttcctcccaccagttacttcaatgggcttcgaacatccagccgtgcaagcctacaggctacaactagcgcttgcggcgagcgtcttacaacaaccaattgcccaattgcaacaacaatccttggcacatctaaacctacaaaccatcgcaacgcaacagcaacaacagtttctgccatcactgagccacctagccgtggtgaaccctgtcg

SEQ ID NO: 24201 - DNA, 370 bp, Zea mays
  Clone ID: LIB3152-049-P1-K1-D7
gtaccatcaatcatcattcatcttagtagtataggcaccaaatcaaatctgcaacatcaattatctaactccaaaaaccatgaagctggtgcttgtggttcttgctttcattgctttagtatcaagtgtttcttgtacacagacaggcggctgcagctgtggtcaacaacaaagccatgagcagcatcatcatccacaacaacatcatccacaaaaacaacaacatcaaccaccaccacaacatcaccagcagcagcaacaccaacaacaacacgttcacatgcaaccacaaaaacatcagcaacaacaagaagttcatgttcaacaacaacaacaacaaccgcagcaccaacaacaacaacaacaacag

SEQ ID NO: 24202 - DNA, 372 bp, Zea mays
  Clone ID: LIB3152-049-P1-K1-D8
caacaagcaacatagaaagtggaatccagtagcaacaatagagcaacaatggagaccaagatattttccctccttatgctccttgctctttctacatgtgttgctaacgcgacaattttccctcaatgctcacaagctcctatagcttccctttttcccccataccttccatcaattatagcttcagtatgtgaaaacccagctcttcaaccatataggcttcaacaagcaatcgcagcaagcaacatacctttatcgcccttgttgtgtcaacaatcgccagccctatctttggtgcagtcattggtacaaaccatcagggcacaacagctgcagcaactcgtgctacctgtgatcaaccaagtagctctg

SEQ ID NO: 24203 - DNA, 371 bp, Zea mays
  Clone ID: LIB3152-049-P1-K1-D9
ctttgaaaaaccaaagggggctgatttgaattctacgagagatgagaccaacttcctgagctatgctatagatgatgcacagaaatatccataccttgcatcaatgggcatctatgtcttcaagaaagatgcacttttagaccttctcaagtcaaaatatattacaattacatgactatggatctgaaatgctaccaagagctgtactagatcataatgtgcaagcatgcattttgacgggctatcgagaggatgttggaacaatcaaatcattctttgatgcaaactatggtccttactgagcagccttccaagtttgatttttatgatccaaaaacacctttctttactgtaccccgatgcttgccttc

SEQ ID NO: 24204 - DNA, 378 bp, Zea mays
  unsure at all n locations
  Clone ID: LIB3152-049-P1-K1-E1
cgatntttcccgcaatgcttcgcaagccttctttatgcttcccttcttcccccgtacctctcaccagcggtgtcttcggtatgtgaaaacccaattcttcaaccctacaggatccaacaggcaatcgcagctggcatcttacctttatcacccttgttcctccaacaatcatcagccctattacaacagttacctttggtgcatttattggcacaaaacatcagggcacaacaactacaacaacttgtgctagcaaaccttgctgcctactctcagcaacagcagtttcttccattcaaccaactaggttcattgaactctgcttcttatttgcaacaacaacaactaccattcagccagctacctgctgcctacccc

SEQ ID NO: 24205 - DNA, 371 bp, Zea mays
  Clone ID: LIB3152-049-P1-K1-E11
cttctctatctagggattcatctttctctcgtcttccctcttcctctccgaagatacaaggcgccgtcccaggtagaggtagggtcgccaccatgctggaggagctgctcatcttcacccggggcggcctcatcctgtggtcgtcctgccgggcgctcggcgccgcagccctcaagggctcccccatcgacgccctcatccgctcctgtctcctcgaggagcgatccgccgacgccagcttctcccaggacaattacgccctcaagtggaccttccacaacgacctcggccttgtcttcgtcgccgtataccagaagatactccacctcctctacgtcgacgacctcctcgccgccgtccgcagggagttc

SEQ ID NO: 24206 - DNA, 374 bp, Zea mays
  Clone ID: LIB3152-049-P1-K1-E12
cagaaacacaccaagcgaagcgcactagcaacaacctaacaacaatggctaccaagatattagccctccttgcgcttcttgcccttttagtgagcgcaacaaatgcgttcattattccacagtgctcacttgctcctagtgccattattccacagttcctcccaccagttacttcaatgggcttcgaacatccagccgtgcaagcctacaggctacaactagcgcttgcggcgagcgtcttacaacaaccaattgcccaattgcaacaacaatccttggcacatctaaacctacaaaccatcgcaacgcaacagcaacaacagtttctgccatcactgagccacctagccgtggtgaaccctgtcgcctacttg

SEQ ID NO: 24207 - DNA, 369 bp, Zea mays
  Clone ID: LIB3152-049-P1-K1-E2
attcagaaacacaccaagcgaagcgcactagcaacaacctaacaacaatggctaccaagatattatccctccttgcgcttcttgcgctttttgcgagcgcaacaaatgcgtccattattccacaatgctcacttgctcctagttccattattccacagttcctcccaccagttacttcaatggccttcgaacacccagctgtgcaagcctataggctacaacaagcgattgcggcgagcgtcttacaacaaccaattgcccaattgcaacaacaatccttggcacatctaacaatacaaaccatcgcaacgcaacagcaacaacagttcctaccagcactgagccacctagccatggtgaaccctgtcg

SEQ ID NO: 24208 - DNA, 375 bp, Zea mays; identical to SEQ ID NO: 21910
  Clone ID: LIB3152-049-P1-K1-E3

SEQ ID NO: 24209 - DNA, 375 bp, Zea mays
  Clone ID: LIB3152-049-P1-K1-E4
caactagcaacataaaaggcccattttttaccaacaatggcagcccaaaatatttggcctccttatgctccttggtctttctgcaagtgctgctacggcgaccattttcccgcaatgctcgcaagctcctatagcttcccttcttcccccgtacctctcaccagcggtgtcttcggtatgtgaaaacccaattcttcaaccctacaggatccaacaggcaatcgcagctggcatcttacctttatcacccttgttcctccaacaatcatcagccctattacaacagttacctttggtgcatttattggcacaaaacatcagggcacaacaactacaacaacttgtgctagcaaaccttgctgcctactctcagca

SEQ ID NO: 24210 - DNA, 372 bp, Zea mays
  Clone ID: LIB3152-049-P1-K1-E6
caggaatgaagagggctgcattgcatagtaatgtcttgagtaacctacagaatggactgttccatgtcaggaccgtgtcgaaagaagaacccattcccctcatgaagtacagcttcctgccgaagcactcacctctccctttgaggatgcgcctagtgaagcgtcatagtggaacgttactctcagtgatgatacagtacgcatccaatccaatgctgccccagcctctgagcaatgttacattcgttgttaagcttcctgtggatcctactctgctcaatgtttcacctaaggctgtgctaaaccgggcagagaaagagcttagatggcatatttcagacattcccctgaaaggtccagccggaaggctca

SEQ ID NO: 24211 - DNA, 374 bp, Zea mays
  Clone ID: LIB3152-049-P1-K1-E7
ccataaacaagaaaaagaaaagtaaatacccccgctgccagcgacagaagaagaaggggtcccttctccttggttgcgttgcgcctccctcctgtctgcgtgcgtgcaatcgacgcagaggcgcgggcgctcgcaccaccacaaccacgacccgatggctttcatgcgctcccgctcaaatgcatcttctggcatgggagttgctcctaacattagggagacattcgtcgagcttcaaatgaagaaggcattccgatatgttatcttcaaaatcgaagagaagcaaaagcaggtggttgtggagaagacaggggctactactgaaagctatgatgattttttggcctctctcccagagaatgactgccgatacg

SEQ ID NO: 24212 - DNA, 372 bp, Zea mays
  Clone ID: LIB3152-049-P1-K1-E9
cggacgcgtgggctggacgtcagcctagcaattagctcatcgactccagattggagaactcgacaccatgaaggtgctgatcgttgcccttgctctcctggcgctcgctgcgagcgccgcctccagtacaagcggcggctgtggctgccagacaccaccgtttcatctaccgcctccgttctatatgccgcctccgttctatctgccgccgcagcagcagccgcagccatggcaataccccactcaaccaccgcagctaagcccgtgccagcagttcggatcctgcggcgtcggcagcgtcggcagcccgttcctgggccagtgcgtcgagttcctgaggcaccagtgcagcccggcggcgacgccctacgg

SEQ ID NO: 24213 - DNA, 374 bp, Zea mays
  Clone ID: LIB3152-049-P1-K1-F11
gcaacatagaaagcacaatagtgttccaacaatggcagccaaaatattttgcctccttatgctccttggtctttctgcaagtgctgctacggcgaccattttcccacaatgctcacaagctcctatagcttcccttcttcccccgtacctctcaccagcggtgtcttcggtatgtgaaaacccaattcttcaaccctataggatccaacaggcaatcgcagctggcatcttacctttatcacccttgttcctccaacaatcatcagccctattacagcagttacctttggtgcatttattggcacaaaacatcagggcacaacaactacaacaacttgtgctagcaaaccttgctgcctactctcagcaacaac

SEQ ID NO: 24214 - DNA, 374 bp, Zea mays
  Clone ID: LIB3152-049-P1-K1-F12
caacaagcaacatagaaagtggaatccagtagcaacaatagagcaacaatggagaccaagatattttccctccttatgctccttgctctttctacatgtgttgctaacgcgacaattttccctcaatgctcacaagctcctatagcttccctttttcccccataccttccatcaattatagcttcagtatgtgaaaacccagctcttcaaccatataggcttcaacaagcaatcgcagcaagcaacatacctttatcgcccttgttgtgtcaacaatcgccagccctatctttggtgcagtcattggtacaaaccatcagggcacaacagctgcagcaactcgtgctacctgtgatcaaccaagtagctctggc

SEQ ID NO: 24215 - DNA, 263 bp, Zea mays
  Clone ID: LIB3152-049-P1-K1-F2
gggacctgcagtgctggcaggaggtccaggagagcccgctcgacgcgtgccgccaggtcctcgaccggcagctaaccggcggcggcgtcggcggcccgttccggtggggcaccgggctccggatgcggtgctgccagcagctccaggacgtgagccgcgagtgccgctgcgccgccatccggagcatggtcaggggctacgaggaggccatgccgcctctggagaaaggctggtgggccatcggggcggctgcagcagccgtc

SEQ ID NO: 24216 - DNA, 375 bp, Zea mays
  Clone ID: LIB3152-049-P1-K1-F3
gtggaatccagtagcaacaatagagtaacaatggcgaccaagatattttccctccttatgctccttgctctttctgcatgtgttgctaacgcgacaattttccctcaatgctcacaagctcctatagcttcccttcttcccccataccttccatcaatgatagcttcagtatgtgaaaacccagctcttcaaccctataggctccaacaagcaatcgcagcaagcaacatacctttatcacccttgtttcaacaatcgccagccctatctttggtgcagtcattggtacaaaccatcagggcacagcagctgcagcaactcgtgctacctgtgatcaaccaagtagctctggcaaacctttctccctactctcag

SEQ ID NO: 24217 - DNA, 376 bp, Zea mays
  Clone ID: LIB3152-049-P1-K1-F4
caaagagaagggaatggccgagataaccctagagccgagtgatcttatggcgcaaacaaacaaaagaatagtgccaaagttcactgaaatcttccccgtggaggacgcgaactacccttacagcgccttcatcgcgtcggtccggaaagacgtgatcaaacactgcaccgaccataaagggatcttccagcccgtgctgccaccggagaagaaggtcccggagctatggttctacacagagctcaaaactaggaccagctccatcacgctcgccatacgcatggacaacctgtacctcgtgggcttcaggaccccgggcgggggtgtggtggagttcggcaaggacggcgacacccaccttcttggcgacaacccc

SEQ ID NO: 24218 - DNA, 366 bp, Zea mays
  Clone ID: LIB3152-049-P1-K1-F5
ggaccaacaggcaacataaaaggtgtattccagtagcaacaatagagcaacaatggcgaccaagatattttccctccttatgctccttgctctttctgcatgtgttgctaacgcgacaattttccctcaatgctcacaagctcctatagcttcccttcttcccccataccttccatcaatgatagcttcagtatgtgaaaacccagctcttcaaccctataggctccaacaagcaatcgcagcaagcaacatacctttatcacccttgtttcaacaatcgccagccctatctttggtgcagtcattggtacaaaccatcagggcacagcaagccgtgctttctttttgacacagcaacagttgctg

SEQ ID NO: 24219 - DNA, 371 bp, Zea mays
  Clone ID: LIB3152-049-P1-K1-F6
attcaaatctcgcggctgtcaccgtagagaggtattgttgtgagcattgtggaatacccaactatacaatcctacaggctacaagaggccatcacagcaagcatcttacggtcgttagcattgactgtccaacaaccatatgccctattgcaacaaccatccttagtgaatctatatctccaaagaatcgcagcacaacaactacaacagcagttgcttccaacaatcaatcaagtagttgcagcgaaccttgctgcttacctccagcaacaacaatttcttccattcaatcaactagctggggtgaaccttgctgcttacttgcaggcacaacagctactaccattcaaccaacttgtcaggagccctgc

SEQ ID NO: 24220 - DNA, 366 bp, Zea mays
  Clone ID: LIB3152-049-P1-K1-F7
ccgtcttcaacaaggagaaggtcttcctcgccggccacgacgagtacatcgtgcgcggcgggaggaacctgttcccgctgcttccggaggcgttcaagggggtcaagcagatcggagttattggatggggctcgcagggtcctgcccaagcccagaacctgagagattcactggctgaagccaagtcagatattgttgtgaagattgctctacggaaaggatccaaatcttttgaggaagcacgtgccgctggattcaccgaagagagcgcaaccttgggcgatatttgggaaaccgcctccggcagcgatcttgtgttgctgctgatatcggatgctgcacaggctgacaactatgagaagatct

SEQ ID NO: 24221 - DNA, 242 bp, Zea mays
  Clone ID: LIB3152-049-P1-K1-F9
gatcaacaaagcggcagagcgtattgaggctcgacaaacacaacagcatgcagatggttatcgctcttgatgcgcgcctgtctctgtacgctggcagctcctgtgacatgcatatgccaatgctcacaagctgctatagctgccttttctcccccatacgcttccattaactatagctccagtatgtgaaaacccagcttttcaaccatataggcttcaacaagcaatcgttgcaagcaaca

SEQ ID NO: 24222 - DNA, 372 bp, Zea mays
  Clone ID: LIB3152-049-P1-K1-G1
gagcattcagaaacacaccaagcgatgcacattagcaacaacctaacaacaatggctaccaagatattatccctccttgcgcttcttgcgctttttgcgagcgcaacaaatgcgttcattattccacaatgctcacttgctccaagttccattattacacagttcctcccaccagttacttcaatgggcttcgaacacccagctgtgcaagcctataggctacaacaagcaattgcggcgagcgtcttacaacaaccaatttcccagttgcaacaacaatccttggcacatctaacaatacaaaccatcgcaacgcaacagcaacaacaatttctaccagcactgagccacctagccatggtgaaccctgcc

SEQ ID NO: 24223 - DNA, 375 bp, Zea mays
  Clone ID: LIB3152-049-P1-K1-G10
cagaaacacaccaagcgaagcgcactagcaacgacctaacaacaatggctaccaagatattagccctccttgcgcttcttgccctttttgtgagcgcaacaaatgcgttcattattccacaatgctcacttgctcctagtgccattattccacagttcctcccaccagttacttcaatgggcttcgaacacctagctgtgcaagccaacatgcaacaacaagcgcttgcggcgagcgtcttacaacaaccaattgcccaattgcaacaacaatccttgccacatctaacaatacaagccatcacaacgcaacagcaacaacagttcctaccagcactgagccacctagccatggtgaaccctgccgcctacttgc

SEQ ID NO: 24224 - DNA, 373 bp, Zea mays
  Clone ID: LIB3152-049-P1-K1-G12
gcaacatagaaagcacaatagtgttccaacaatggcagccaaaatattttgcctccttatgctccttggtatttctgcaagtgctgctacggcgaccattttcccgcaatgctcacaagctcctatagcttcccttcttcccccgtacctctcaccagcggtgtcttcggtatgtgaaaacccaattcttcaaccctacaggatccaacaggcaatcgcagctggcatcttacctttatcacccttgttcctccaacaatcatcagccctattacagcagttacctttggtgcatttattggcacaaaacatcagggcacaacaactacaacaacttgtgctagcaaaccttgctgcctactctcagcaacag

SEQ ID NO: 24225 - DNA, 371 bp, Zea mays
  Clone ID: LIB3152-049-P1-K1-G2
accacaccaagcgaagcgcactagcaacaacctaacaacaatggctaccaagatattagccctccttgcgcttcttgcccttttagtgagcgcaacaaatgcgttcattattccacagtgctcacttgctcctagtgccattattccacagttcctcccaccagttacttcaatgggcttcgaacatccagccgtgcaagcctacaggctacaactagcgcttgcggcgagcgtcttacaacaaccaattgcccaattgcaacaacaatccttggcacatctaaacctacaaaccatcgcaacgcaacagcaacaacagtttctgccatcactgagccacctagccgtggtgaaccctgtcgcctacttgc

SEQ ID NO: 24226 - DNA, 374 bp, Zea mays
  Clone ID: LIB3152-049-P1-K1-G3
gcagaacgatcggatctagcagaattctctcaacctcatcggcggcggcgaagagcgtgcggatcggagatggcgacaagcgggtggaggaggagagcggcggcgcgggcctcctggagccacaccacggtgtacctgtggctcgcgctcgccgcagcagcactgacgctcgcccaggctaagaaggacctaacggaggttacccacaaggtctacttcgatgtcgagattgacggcaagcccgcaggtcggattgtcatggggctttttgggaagactgttcctaagacagcagagaacttccgagctctttgcacaggagagaaaggaattggcaagagtggcaaatctttccactacaagggaagtacatt

SEQ ID NO: 24227 - DNA, 376 bp, Zea mays
  Clone ID: LIB3152-049-P1-K1-G4
ttttcagcattcagaaacacaccaagcgtagcgcactagcaacaacctaacaacaatggctaccaagatattagccctccttgcgcttcttgcccttttagtgagcgcaacaaatgcgttcattattccacagtgctcacttgctcctagtgccattattccacagttcctcccaccagttacttcaatgggcttcgaacatccagccgtgcaagcctacaggctacaactagcgcttgcggcgagcgtcttacaacaaccaattgcccaattgcaacaacaatccttggcacatctaaacctacaaaccatcgcaacgcaacagcaacaacagtttctgccatcactgagccacctagccgtggtgaaccctgtc

SEQ ID NO: 24228 - DNA, 378 bp, Zea mays
  Clone ID: LIB3152-049-P1-K1-G5
cagaaacacaccaagcgaagcgcactagcatcgacctaacaacaatggctaccaagatattagccctccttgcgcttcttgccctttttgtgagcgcaacaaatgcgttcattattccacaatgctcacttgctcctagtgccattattccacagttcctcccaccagttacttcaatgggcttcgaacacctagctgtgcaagccaacatgcaacaacaagcgcttgcggcgagcgtcttacaacaaccaattgcccaattgcaacaacaatccttgccacatctaacaatacaagccatcacaacgcaacagcaacaacagttcctaccagcactgagccacctagccatggtgaaccctgccgcctacttgcaag

SEQ ID NO: 24229 - DNA, 378 bp, Zea mays
  Clone ID: LIB3152-049-P1-K1-G6
tagcaacatagaaagcacaatagtgtaccaacaatggcagccaaaatattttgcttccttatgctccttggtctttctgcaagtgctgctaccgcaaccattttcccacaatgctcacaagctcctatagcttcctttcttcccccatacctctcaccagcggtgtcttcagtatgtgaaaacccaattcttcaaccctacaggatccaacaggcaatcgcagcaggcatcttacctttatcacccttgttcctccaacaaccgtcagccctattacagcagttacctttggtgcatttgttggcacaaaacatcaaggcacaacaactacaacaacttgtgctaggaaaccttgctgcctactctcagcaacagcag

SEQ ID NO: 24230 - DNA, 371 bp, Zea mays
  Clone ID: LIB3152-049-P1-K1-G7
caactagcaacatagaaagcacaatagtgtaccaacaatggcagccaaaatattttgcctccttatgctccttggtatttctgcaagtgctgctacggcgaccattttcccgcaatgctcacaagctcctatagcttcccttcttcccccgtacctctcaccagcggtgtcttcggtatgtgaaaacccaattcttcaaccctacaggatccaacaggcaatcgcagctggcatcttacctttatcacccttgttcctccaacaatcatcagccctattacagcagttacctttggtgcatttattggcacaaaacatcagggcacaacaactacaacaacttgtgctagcaaaccttgctgcctactctc

SEQ ID NO: 24231 - DNA, 373 bp, Zea mays
  Clone ID: LIB3152-049-P1-K1-G8
gcaattagctcatcgactccagattggagaactcgacaccatgaaggtgctgatcgttgcccttgctctcctggcgctcgctgcgagcgccgcctccagtacaagcggcggctgtggctgccagacaccaccgtttcatctaccgcctccgttctatatgccgcctccgttctatctgccgccgcagcagcagccgcagccatggcaataccccactcaaccaccgcagctaagcccgtgccagcagttcggatcctgcggcgtcggcagcgtcggcagcccgttcctgggccagtgcgtcgagttcctgaggcaccagtgcagcccggcggcgacgccctacggctcgccacagtgccaggcgctgcagcag

SEQ ID NO: 24232 - DNA, 373 bp, Zea mays
  Clone ID: LIB3152-049-P1-K1-G9
attgagaccaacaagcaacatataatgtggaatccagtagcaacaatagagcaacaatggcgaccaagatattttccctccttatgctccttgctctttctgcatgtgttgctaacgcgacaattttccctcaatgctcacaagctcctatagcttcccttcttcccccataccttccatcaatgatagcttcagtatgtgaaaacccagctcttcaaccctataggctccaacaagcaatcgcagcaagcaacatacctttatcacccttgtttcaacaatcgccagccctatctttggtgcagtcattggtacaaaccatcagggcacagcagctgcagcaactcgtgctacctgtgatcaaccaagtagg

SEQ ID NO: 24233 - DNA, 372 bp, Zea mays
  unsure at all n locations
  Clone ID: LIB3152-049-P1-K1-H1
ncaactagcaccatagaaggcacaatagtgtaccaacaatggcagctaaaatattttgcctccttatgctccttggtctttctgcaagtgctgctacggcgaccattttcccacaatgctcacaagctcctatagcttcccttcttcccccgtacctctcaccaacggtgtcttcggtatgtgaaaacccaattcttcaaccctacaggatccaacaggcaatcgcagctggcatcttacctttatcacccttgttcctccaacaatcatcagccctattacagcagttacctttggtgcatttattggcacaaaacatcagggcacaacaactacaacaacttgtgctagcaaaccttgctgcctactctc

SEQ ID NO: 24234 - DNA, 376 bp, Zea mays
  Clone ID: LIB3152-049-P1-K1-H11
caagtacccaacacacacccgagcttatcacagtgacactacacgatggtgagcgccagaatcgttgtcctcctcgccgtcctcctatgcgctgccgccgcagtcgcgtcgtcctgggaggacgacaaccaccaccaccacgggggccacaagtccgggcgatgcgtgcggcggtgcgaggaccggccctggcaccagcgcccccggtgcctggagcagtgcagggaggaggagcgggagaagcggcaagagcggagcaggcacgaggccgacgaccgcagcggcgagggctcgtcggaggatgagcgcgagcgcgagcaggagaaggaggagaagcagaaggaccggcggccgtacgtgttcgaccggcgcagct

SEQ ID NO: 24235 - DNA, 376 bp, Zea mays
  unsure at all n locations
  Clone ID: LIB3152-049-P1-K1-H12
cggacgcgtgggattttgagcanttttaaacacaccaagcgaagcgcactagcagcgacctaacaacaatggctaccaagatattagccctccttgcgcttcttgccctttttgtgagcgcaacaaatgcgttcattattccacaatgctcacttgctcctagtgccattattccacagttcctcccaccagttacttcaatgggcttcgaacacctagctgtgcaagccaacatgcaacaacaagcgcttgcggcgagcgtcttacaacaaccaattgcccaattgcaacaacaatccttgccacatctaacaatacaagccatcacaacgcaacagcaacaacagttcctaccagcactgagccacctagccat

SEQ ID NO: 24236 - DNA, 376 bp, Zea mays
  Clone ID: LIB3152-049-P1-K1-H3
caagcaacatagaaagtggaatccagtagcaacaatagagcaacaatggcgaccaagatattttccctccttatgctccttgctctttctgcatgtgttgctaacgcgacaattttccctcaatgctcacaagctcctatagcttcccttcttcccccataccttccatcaatgatagcttcagtatgtgaaaacccagctcttcaaccctataggctccaacaagcaatcgcagcaagcaacatacctttatcacccttgtttcaacaatcgccagccctatctttggtgcagtcattggtacaaaccatcagggcacagcagctgcagcaactcgtgctacctgtgatcaaccaagtagctctggcaaaccttt

SEQ ID NO: 24237 - DNA, 375 bp, Zea mays
  Clone ID: LIB3152-049-P1-K1-H4
aggcaccatagaaggtggaatccatttgcaacaatagagcaacaatggagaccaagatattttccctccttatgctccttgctctttctacatgtgttgctaacgcgacaattttccctcaatgctcacaagctcctatagcttccctttttcccccataccttccatcaattatagcttcagtatgtgaaaacccagctcttcaaccatataggcttcaacaagcaatcgcagcaagcaacatacctttatcgcccttgttgtgtcaacaatcgccagccctatctttggtgcagtcattggtacaaaccatcagggcacaacagctgcagcaactcgtgctacctgtgatcaaccaagtagctcttgcaaacc

SEQ ID NO: 24238 - DNA, 396 bp, Zea mays
  Clone ID: LIB3152-049-P1-K1-H5
gggccgacccacgcctccggcgccatgtaccagccgttccggcaacattgctgccagcagcagatgaggatgatggacgtgcagtccgtcgcgcagcagctgcagatgatgatgcagcttgagcgtgccgctgccgccagcagcagcctgtacgagccagctctgatgcagcagcagcagcagctgctggcagcccagggtctcaaccccatggccatgatgatggcgcagaacatgccggccatgggtggactctaccagtaccagtaccagctgcccagctaccgcaccaacccctgtggcgtctccgctgccattccgccctactactgattcatgatatttgggaaatctcctctatccatccctctctatctatatatgtaataatgcagt

SEQ ID NO: 24239 - DNA, 373 bp, Zea mays
  Clone ID: LIB3152-049-P1-K1-H6
ggactcgtgagattttgagcatattattcacaccaagcgaaacacactagcggggacttatcaacaatggctgccaatataaaaaaagcactgccgcttattgacctttttgtaaggaaggatgacaaacaacaacaccacgggggggggacttgttaagagagacaaaatttaattgcggggtcgggcaaggtaaaaatttttttttgggggtggagaaaaacaaagaggaggagcgggtgaaacaacaagagcggaggaggaacaagggcgacgaccgcataaaagagggctcgaaagaggatgagcgcgagcgcgagcaggagaaggaggagaagcagaaggaccggcggtcgtacgtgttcgaccggcg

SEQ ID NO: 24240 - DNA, 371 bp, Zea mays
  Clone ID: LIB3152-049-P1-K1-H7
cactcatgcatcacaaaacatccttttatcagtaccatcaatcatcattcatcttagtagtataggcaccaaatcaaatctgcaacatcaattatctaactccaaaaaccatgaagctggtgcttgtggttcttgctttcattgctttagtatcaagtgtttcttgtacacagacaggcggctgcagctgtggtcaacaacaaagccatgagcagcaacatcatccacaacaacatcatccacaaaaacaacaacatcaaccaccaccacaacatcaccagcagcagcaacaccaacaacaacaagttcacatgcaaccacaaaaacatcagcaacaacaagaagttcatgttcaacaacaacaacaacaa

SEQ ID NO: 24241 - DNA, 325 bp, Zea mays
  Clone ID: LIB3152-049-P1-K1-H8
tttttgtttgactgcctattttttctgccccccgtatggttggggcaatgaggcgtagtggtcgataataaaacccagcggaacaaagaaaacgtgtaccagaaactgtttgcaaacaccggtgcctttttttgtgttgaaccaccattagttgagccgtgagggaatggtgaacaagctttccacttgctcatttccgagcgcttctctttgattgtatccatggtttggactcatgactgtacgtcttggcagttggcttggcacccaggaatctaatcactggagttgctgctgttatcgagactttgcagcgttgcattct

SEQ ID NO: 24242 - DNA, 113 bp, Zea mays
  Clone ID: LIB3152-049-P1-K1-H9
caacaactactaccatacagcctgttagctggtgtgagccctgctacctgggggacactaccacaattgtggccgttctaccatcacgctgcgcctaacgctggcaccctttt

SEQ ID NO: 24243 - DNA, 363 bp, Zea mays
  Clone ID: LIB3152-050-P1-K1-A10
gtggaatccagtagcaacaatagagcaacaatggagaccaagatattttccctccttatgctccttgctctttctacatgtgttgctaacgcgacaattttccctcaatgctcacaagctcctatagcttccctttttcccccataccttccatcaattatagcttcagtatgtgaaaacccagctcttcaaccatataggcttcaacaagcaatcgcagcaagcaacatacctttatcgcccttgttgtgtcaacaatcgccagccctatctttggtgcagtcattggtacaaaccatcatggcacaacagctgcagcaactcgtgctacctgtgatcaaccaagtagctctggcaaacctt

SEQ ID NO: 24244 - DNA, 364 bp, Zea mays
  Clone ID: LIB3152-050-P1-K1-A11
attttgagcattcagaaacacacctttcgaagcgcactagcaacaacctaacaacaatggctaccaagatattatccctccttgcgcttcttgcgctttttgcgagcgcaacaaatgcgtccattattccacaatgctcacttgctcctagttccattattccacagttcctcccaccagttacttcaatggccttcgaacacccagctgtgcaagcctataggctacaacaagcgattgcggcgagcgtcttacaacaaccaattgcccaattgcaacaacaatccttggcacatctaacaatacaaaccatcgcaacgcaacagcaacaacagttcctaccagcactgagccacctagccat

SEQ ID NO: 24245 - DNA, 366 bp, Zea mays
  Clone ID: LIB3152-050-P1-K1-A12
ggatcgcgccgaccccgctcggggttctccttgccgtgctctcctcccacctccgtggtgcaggggccgaggaggcggcggggctggagaggtcgccggtatccgcgccggcgcccgggccccgcgccggcgcgcttgccgtggtggacgggaggaccgggaagcggcacgaggtcaaggtctccgaagacggcaccgtgcgcgccaccgacttcaagaagattaccactggaaaggacgacaagggtcttaagatttatgatcctggttaccttaacactgcccctgttcgctcgtccatctgctacatcgatggagatgagggaatccttcgctataggggttatccaatcgaagaattggctg

SEQ ID NO: 24246 - DNA, 366 bp, Zea mays
  Clone ID: LIB3152-050-P1-K1-A2
aactagcaacatataaagcacaatagtgtaccaacaatggcagccaaaatattctgcttccttatgctccttggtctttctgcaagtgttgctaccgcaaccattttcccacaatgctcacaagctcctatagcttcccttcttcccccatacctctcaccagcggtgtcttcaatgtgtgaaaacccaattgttcaaccctacaggatccaacaggcaatcgcaacaggcatcttaccattatcacccttgttcctccaacaaccgtcagccctattacagcagttacctttggtccatttggtggcacaaaacatcagggcacaacaactacaacaacttgtgctagcaaaccttgctgcatac

SEQ ID NO: 24247 - DNA, 382 bp, Zea mays
  Clone ID: LIB3152-050-P1-K1-A3
gggccggaattcgggattcgagccacgcctcacgacccggacgatatgggccgcaagttcttcgttggtggcaactggaaatgcaatggaaccgcagatcaggttgagaagattgtcaaaaccctgaatgaaggaaatgttccctcttcagatgttgttgaggtcgttgtcagtcctccttatgtgttcctaccggtggtcaagagccagctgcgccaagagttccaagttgctgctcagaactgctgggtgaagaagggaggtgcattcactggtgaaattagtgctgaaatgctcgtcaaccttggcgttccctgggtcattcttggacactctgaaaggagagctctgctgggagaatcaaatgagttcgttggagaca

SEQ ID NO: 24248 - DNA, 369 bp, Zea mays
  Clone ID: LIB3152-050-P1-K1-A4
aaaatccccaaaccctagcgaactcttcacggcggcgatggcagcggcgggcctgcggaaggggaacgcgcgcctcccacccgaagtgaaccgggtgctgtacgtgcggaatctgccgttcaacatctcgagcgaggagatgtacgacatcttcggcaagtacggcgcgattcggcagatccggctgggcaacgccaaggacacgcgcggcaccgcctacgtcgtctacgaggacatatacgacgccaagaacgccgtcgaccacctctccggcttcaacgttgccaaccgctatctcatcgtgctctactaccagcccgccaagatgtccaagaagtcggatgtcaagaagaaggaggacgagatcac

SEQ ID NO: 24249 - DNA, 145 bp, Zea mays
  unsure at all n locations
  Clone ID: LIB3152-050-P1-K1-A5
nnnaaaaaaaaataaaaaaaaaaaattttaatctattttnncaaaaaaaaaaaaaaaaaaaaggaaaacttaaaaatatttgggggccccctgcccccgtaaaaaactttcctgagggttatttgaaacaatcaaatttggggcc

SEQ ID NO: 24250 - DNA, 359 bp, Zea mays
  Clone ID: LIB3152-050-P1-K1-A6
agcaactcgtgctacctgtgatcaactcaagtttctctggcaaacctttctccctactctccgcaacaacaatttcttccattcaaccaactgtctacactgaaccctgctgcttatttgcagcaacaactattaccatttagccagctagctactgcctactctcaacaacaacaacttcttccatttaaccaattggccgcactgaaccccgctgcttatttgcagcagcaaatactactaccatttagccagctagctacagcaagccgtgcttccttcttgacacaacaacagttgctgccgttctaccagcagtttgcggctaaccccgcaaccctcttacaactacaacaatt

SEQ ID NO: 24251 - DNA, 373 bp, Zea mays
  unsure at all n locations
  Clone ID: LIB3152-050-P1-K1-A7
cgtcacgcctagcagcatataaagcacaatagtgtgccaacatatggcagccaaaatattttgcttccttatgctccttggtctttctncttgcgcttcttgccctttttgtgagcgcaacaaatgcgttcattattacacaatgctcacttgctcctagtgccattataccacagttcctccgaccagttacttcaatgggcttcgaacacctagctgtgcaagcctacaggctacaacaagcgcttgcggcgagcgtcttacaacaaccaattaaccaattgcaacaacaatccttggcacatctaaccatacaaaccatcgcaacacaacagcaacaacagttcctaccagcactgagccaactagatgt

SEQ ID NO: 24252 - DNA, 363 bp, Zea mays
  Clone ID: LIB3152-050-P1-K1-A8
attttgagcattcaaaaacacaccatgcgaagcacattagcaacaacctaacaacaatggctaccaagatattatccctccttgcgcttcttgcgctttttgcgagcgcaacaaatgcgttcattattccacaatgctcacttgctccaagttccattattacacagttcctcccaccagttacttcaatgggcttcgaacacccagctgtgcaagcctataggctacaacaagcaattgcggcgagcgtcttacaacaaccaatttcccagttgcaacaacaatccttggcacatctaacaatacaaaccatcgcaacgcaacagcaacaacaattcctaccagcactgagccacctagcca

SEQ ID NO: 24253 - DNA, 324 bp, Zea mays
  Clone ID: LIB3152-050-P1-K1-A9
cagctctcgaagaaaacaaagaaggcacccaaggtggagctcggaactggaacaactgatgccaacatcgatgagtggctggagggcacttcgtttgtgcagagaagcaaatccaagaagaagcagacctgaggctctccaggctagttaaatccttttgaggatctagaatgagacatttgagggtagcccttcacaagtgacttttgcagaaagatagatgcgtaaggaggtgctgaaaaccgtaaacatcttcgttgacattttcgaccttgtgtactttacatggaacaaaattttgttaaaagaaagtatatgctgttg

SEQ ID NO: 24254 - DNA, 361 bp, Zea mays
  Clone ID: LIB3152-050-P1-K1-B1
gcacgccacgcgtccggcgaggagctgtatagacgccggcttcttgtttcaaccgcccgatcggagccgcggctgatcaggaggagggagccggagatggtgggtctcgtcggcggcagcacggcgcgggcggagcacgttgtcgccaactccggaggggaggcagagtacgtgcgcctcatgcaccgtcacgcgccggtcgtgcaccagtgcaccttcaccctcgtcaagcacatcaaggcgcccgtccacctcgtgtggcagctcgtgcggaggttcgaccagccgcagcggtacaagccgttcgtcaggaactgcgtcgtgcgcggggaccagcttgaggtcggcagcctgctcgacg

SEQ ID NO: 24255 - DNA, 367 bp, Zea mays
  Clone ID: LIB3152-050-P1-K1-B10
gcaattagctcatcgactccagattggagaactcgacaccatgaaggtgctgatcgttgcccttgctctcctggcgctcgctgcgagcgccgcctccagtacaagcggcggctgtggctgccagacaccaccgtttcatctaccgcctccgttctatatgccgcctccgttctatctgccgccgcagcagcagccgcagccatggcaataccccactcaaccaccgcagctaagcccgtgccagcagttcggatcctgcggcgtcggcagcgtcggcagcccgttcctgggccagtgcgtctagttcctgaggcaccagtgcagcccggcggcgacgccctacggctcgccacagtgccaggcgctg

SEQ ID NO: 24256 - DNA, 362 bp, Zea mays
  Clone ID: LIB3152-050-P1-K1-B11
atattttcagcattcagaaacacaccaagcgaagcgcactagcaacaacctaacaacaatggctaccaagatattagccctccttgcgcttcttgcccttttagtgagcgcaacaaatgcgttcattattccacagtgctcacttgctcctagtgccattattccacagttcctcccaccagttacttcaatgggcttcgaacatccagccgtgcaagcctacaggctacaactagcgcttgcggcgagcgtcttacaacaaccaattgcccaattgcaacaacaatccttggcacatctaaacctacaaaccatcgcaacgcaacagcaacaacagtttctgccatcactgagccacctag

SEQ ID NO: 24257 - DNA, 337 bp, Zea mays
  unsure at all n locations
  Clone ID: LIB3152-050-P1-K1-B12
ggatcatacacaccgaagtttactctgttcagccgagcaccaacgggagccacggggngcgtgggccgaggaggcgccgcgcctgaagaggcggccgtatccggaccggcacacagactgcgcacaacaatacttgctgtggggggacagacgaccgataagaagtaccgagcgtaaacagttctacatgaggcacgaggcgctccaagcacgcaaataacggtaccaatcataaagccttcaacgaccatatgctttatggccccagtcacccttagagcatccgtgtctgcaaaggaattgtggcacaacaactgcaacaacagatgctaccaac

SEQ ID NO: 24258 - DNA, 351 bp, Zea mays
  Clone ID: LIB3152-050-P1-K1-B2
gtacctaccaatcaccggtctggcttaattcaataagctgagcgctaagcttatctttggcgctgacagccctgctattcaggagaatagggttgctaccgtgcagtgcctatcgggtactggttctttaagagtcggaggtgaatttcttgcaaggcactatcacgagcgcactatctacattccacaaccaacctggggaaatcacccaaaagtcttcaccctatctggcttgaacgttaggagctaccgctattatgatcctgcaacatgcagccttcacttcgaaggactcctggaagacctcggttctgctccttcaggttcaattgtactgctgcatgcctgtgc

SEQ ID NO: 24259 - DNA, 362 bp, Zea mays
  Clone ID: LIB3152-050-P1-K1-B3
gcaattagctaatcgactccagattggagatctcgacaccatgaaggtgctgatcgttgcccttgctctcctggcgctcgctgcgagcgccgcctccagtacaagcggcggctgtggctgccagacaccaccgtttcatctaccgcctccgttctatatgccggctccgttctatctgccgccgcagcagcagccgcaggcatggcaataccccactgaaccaccggagctaagcccgcgccagcagttcggatcctgcggccgtcgcagcgtgggcagtccgttcctgggccagtgcgtcgagttcctgaggcaccagtgcagcccggcggcgacgccctacggctcgccacagtgccagg

SEQ ID NO: 24260 - DNA, 307 bp, Zea mays
  Clone ID: LIB3152-050-P1-K1-B4
cccctctctctaacccatggcttctgtggcttcggcgactcaggtggggacttacttcctgcggaactactacaacctgctgcaacaaacccccgatgtcgtccaccagttctacagcgaagccagcaccatggtccgcgtcgacgacctcaccggcacgaccgcggctgccaacaacatgatggacatacactcactcatcatgtctttgaacttcacccaaattgagatcaagactgccaattttgtgaactcatggggcgatggggtgctagttatggtctctggtctagtgcagaccaaggag

SEQ ID NO: 24261 - DNA, 229 bp, Zea mays
  Clone ID: LIB3152-050-P1-K1-B5
agaccattagctttatctactccatttcgcttaagaacccgaccgacaccatgagggtgttgctcgttgccctagctctcctggctctcgctgcgagcgccaccttcacgcatacaagcggcgggtgcggctgccagccaccgtcgacggttcatctaccgccgccggtgcatctaccaccatcggtttacctgccaccttcggagcatctaccaccgccggtccacct

SEQ ID NO: 24262 - DNA, 394 bp, Zea mays
  Clone ID: LIB3152-050-P1-K1-B6
ccggtttccaggtcgacccagcgtccgcccacgcgtccgattgagaccaacttgcattttagaaagcacaatagtgtaccaacaatggcagccaaaatattttgcctccttatgctccttggtctttctgcaagtgctgctacggcgaccattttcccgcaatgctcgcaagctcctatagcttcccttcttcccccgtacctctcaccagcggtgtcttcggtatgtgaaaacccaattcttcaaccctacaggatccaacaggcaatcgcagctggcatcttacctttatcacccttgttcctccaacaatcatcagccctattacaacagttacctttggtgcatttattggcacaaaacatcagggcacaacaactacaacaacttgtgc

SEQ ID NO: 24263 - DNA, 360 bp, Zea mays
  Clone ID: LIB3152-050-P1-K1-B8
cggcctccaactctaaccccgtcgtttccggctcccgcagcgtcgccgaccttcacagccggttccttcatccgccaccatggggaagacacgtggtatgggagctgggcgcaagctcaagacccaccgcagaaaccagaggtgggctgacaaagcatacaagaagagccacttgggcaatgagtggaaaaaaccttttgctggatcatctcacgccaagggcatcgttctggagaagattggtattgaggccaagcagccaaattcggccatccgtaagtgtgcccgtgttcagctggtgaagaatggaaagaagattgctgcctttgtgccgaatgatggttgcctaaactacatcga

SEQ ID NO: 24264 - DNA, 362 bp, Zea mays
  Clone ID: LIB3152-050-P1-K1-B9
caccaagcgaagcgcactttcaacatcctaacaacaatggctaccaagatattagccctccttgcgcttcttgcccttttagtgagcgcaacaaatgcgttcattattccacagtgctcacttgctcctagtgccattattccacagttcctcccaccagttacttcaatgggcttcgaacatccagccgtgcaagcctacaggctacaactagcgcttgcggcgagcgtcttacaacaaccaattgcccaattgcaacaacaatccttggcacatctaaacctacaaaccatcgcaacgcaacagcaacaacagtttctgccatcactgagccacctagccgtggtgaaccctgtcgccta

SEQ ID NO: 24265 - DNA, 227 bp, Zea mays
  Clone ID: LIB3152-050-P1-K1-C1
cggacgcgcgggaaccaggctcgtttacgctatcggtgtctacctgcgtcaactttgatttcaacggcatgatgcttgatttcaaatagatatattaattagttcctcgtcacagtcgatcctgtgtcaaataataaagaagctcttgtatgcatgtgtatatgttagtccttcgttctgtatgtgtcaaataaaggttgatcaaaaagacctagaataagctgtac

SEQ ID NO: 24266 - DNA, 365 bp, Zea mays
  Clone ID: LIB3152-050-P1-K1-C10
gcaacaacaatccttggctcatctaaacctacaaaccatcgcaacgcaacagcaacaacagtttctgccatcactgagccacctagccgtggtgaaccctgtcgcctacttgcaacagcagctacttgcatccaacccacttgctctggcgaacgtagctgcataccagcaacaacaacgtctgcaacagtttatgccagcgctcagtcaactagccatggtgaaccctgtcgcctacctacaacagcaacaattgctttcatctagcccgctcgctgtgggcaatgcacctacgtacctacaacaacagttgctgcaacagattgtaccagctctgactcagctagctgtggcaaaccctactg

SEQ ID NO: 24267 - DNA, 59 bp, Zea mays
  Clone ID: LIB3152-050-P1-K1-C11
gtcagtgtgagcaatgacctgaatgtacaattgaaatgaaaagaaaaaagtattgttcc

SEQ ID NO: 24268 - DNA, 368 bp, Zea mays
  Clone ID: LIB3152-050-P1-K1-C12
gcaacatacatagtgaagtacactatcaacatcttagcaccaatgggagccaagatttttgccctccttgccctccttgctctttcagcaagcgctgctacctcgacttttattccacaatgctcacaacaatacctctctccggcgacagccgtgggatttcaatacccaactatacaatcctacatggtacaagaggccatccaagcaagcatcttacggtcattagcattaaccctccaacaaccatatgctctattgcaacagccatccttagtgcatctgtatctccaaagaatcgcggcacaacaactacaacaacagttgctaccaacaatcaatcaagtagttgcagcgaaccttgctgc

SEQ ID NO: 24269 - DNA, 128 bp, Zea mays
  Clone ID: LIB3152-050-P1-K1-C3
ctcttttagattgcttattagttgttattctttaataaagttttttggatgatgtatgtggccaaccagaaataagaagttacatttccagattctaatgtgatattggtctccaagggtgttcgatt

SEQ ID NO: 24270 - DNA, 366 bp, Zea mays
  Clone ID: LIB3152-050-P1-K1-C4
cagaccattagctttatctactccatagcgctgaagaacccgatcgacaccatgagggtgttgctcgttgccctcgctctcctggctctcgctgcgagcgccacctccacgcatacaagcggcggctgcggctgccagccaccgccgccggttcatctaccgccgccggtgcatctgccaccttcggttcacctgccacctccggtgcatctcccaccgccggtccacctgccgccgccggtccacctgccaccgccggtccatgtgccgccgccggttcatctgccgtcgccaccatgccactaccctactcaaccgtcccggacttagcctcattcccagccacacccatgcccgtgccaacag

SEQ ID NO: 24271 - DNA, 363 bp, Zea mays
  Clone ID: LIB3152-050-P1-K1-C5
caaaatattgctagggattcgagggtaggaatatccaggcgcccaggcctggcaatccgttcgtcggagaggccatgagctcggcgcaggatccgttctacatcgtccgggaggagatccaggagtcgattgataaattgcaaagtaacttccaccgctgggagcaaactgcttcaaacacaggagaatatgttcatctgacaaaggagcttctgaccagctgtgaaagcatcgagtggcaggtagatgagctggaaaagacaatctcagttgcatcaagggatccatcatactatggacttgatgaagttgaactttccagacgaagaaactggactggttctgctcataagcaagttggta

SEQ ID NO: 24272 - DNA, 347 bp, Zea mays
  Clone ID: LIB3152-050-P1-K1-C6
cacatcacacacactcgcgaactctatttctgttcccatttgaaatcaacccatcctcgtttcctccgtctagcagcctctcaccctcatggccaagatcaagatcgggatcaatgggttcggcaggatcggaaggctggtggccagggtggccctgcatagcgacgacgtcgagctcgtcgccgtgaacgaccccttcatcagcaccggttacatgacctacatgttcaagtatgacactgtgcacggacagtggaagcaccatgaggtcaaggtgaaggactccaagacccttctctttggtgagaaggaggttgctgtgtttggctggaggaaccctgaagaga

SEQ ID NO: 24273 - DNA, 355 bp, Zea mays
  Clone ID: LIB3152-050-P1-K1-C7
ccaacaagcaacatagaaagtggaatccagtagcaacaatagagcaacaatggcgaccaagatattttccctccttatgctccttgctctttctgcatgtgttgctaacgcgacaattttccctcaatgctcacaagctcctatagcttcccttcttcccccataccttccatcaatgatagcttcagtatgtgaaaacccagctcttcaaccctataggctccaacaagcaatcgcagcaagcaacatacctttatcacccttgtttcaacaatcgccagccctatctttggtgcagtcattggtacaaaccatcagggcacagcagctgcagcaactcgtgctacctgtgatc

SEQ ID NO: 24274 - DNA, 361 bp, Zea mays
  Clone ID: LIB3152-050-P1-K1-C8
gccatggtgaaccctgtcgtctacctacaacagcaacaattgctttcatctagcccgctcgctgtgggcaatgcacctacgtacctacaacaacagttgctgcaacagattgtaccagctctgactcagctagctgtggcaaaccctactgcctacttgcaacagttgcttccattcaaccaactggctgtgtcgaactctgctgtgtacctacaacagcgacaacagttacttaatccactagcagtggctaacccattggtcgctaacttcctgcagcagcaacaattgctgccatacaaccagttctctttgatgaaccctgccttgcagcaacccatcgttggaggtgccatctttt

SEQ ID NO: 24275 - DNA, 375 bp, Zea mays
  unsure at all n locations
  Clone ID: LIB3152-050-P1-K1-C9
ccgaccacgcgtncgattttagcattcagaaacacaccatgcgaagcgcactagcaacaacctaacaacaatggctaccaagatattagccctccttgcgcttcttgcccttttagtgagcgcaacaaatgcgttcattattccacagtgctcacttgctcctagtgccattattccacagttcctcccaccagttacttcaatgggcttcgaacatccagccgtgcaagcctacaggctacaactagcgcttgcggcgagcgtcttacaacaaccaattgcccaattgcaacaacaatccttggcacatctaaacctacaaaccatcgcaacgcaacagcaacaacagtttctgtcgtcactgagccacctagc

SEQ ID NO: 24276 - DNA, 369 bp, Zea mays
  Clone ID: LIB3152-050-P1-K1-D1
attttgagcattcagaaacacaccatgcgattcgcactagcaacgacctaacaacaatggctaccaagatattagccctccttgcgcttcttgccctttttgtgagcgcaacaaatgcgttcattattccacaatgctcacttgctcctagtgccattattccacagttcctcccaccagttacttcaatgggcttcgaacacctagctgtgcaagccaacatgcaacaacaagcgcttgcggcgagcgtcttacaacaaccaattgcccaattgcaacaacaatccttgccacatctaacaatacaagccatcacaacgcaacagcaacaacagttcctaccagcactgagccacctagccatggtga

SEQ ID NO: 24277 - DNA, 349 bp, Zea mays
  Clone ID: LIB3152-050-P1-K1-D10
attttgagcattcagaaactactttttgaagcacatagcaacaacctaacagcaatggctaccaagatattatccctccttgcgcttcttgcgctttttgcgagcgcaacaaatgcgtcattattcacaatgctacttgctgaagttccatattacacagtcctcccaccagttacttaatgggcttcgaacacccagctggcaagcctatggctcaacaagcattgcgggagcgtcttacaacaaccaatttcccagctgaacatcaatccttggcacatctaacaatacaaaccatcgcaacgcatcagcatcaacaatttctaccagcactgagccacctagccat

SEQ ID NO: 24278 - DNA, 343 bp, Zea mays
  Clone ID: LIB3152-050-P1-K1-D11
ttttgcgagcgcaacaaatgcgtccattattccacaatgctcacttgctcctagttccattattccacagttcctcccaccagttacttcaatggccttcgaacacccagctgtgcaagcctataggctacaacaagcgattgcggcgagcgtcttacaacaaccaattgcccaattgcaacaacaatccttggcacatctaacaatacaaaccatcgcaacgcaacagcaacaacagttcctaccagcactgagccacctagccatggtgaaccctgtcgcctacttgcaacagcagctgcttgcatccaacccacttgctctagcaaacgtagttgcaaac

SEQ ID NO: 24279 - DNA, 366 bp, Zea mays
  Clone ID: LIB3152-050-P1-K1-D12
gagaccaactagcaacatttaaagctcaatagtgtaccaacaatggcagccaaaatattttgcctccttatgctccttggtctttctgcaagtgctgctacggcgaccattttcccgcaatgctcgcaagctcctatagcttcccttcttcccccgtacctctcaccagcggtgtcttcggtatgtgaaaacccaattcttcaaccctacaggatccaacaggcaatcgcagctggcatcttacctttatcacccttgttcctccaacaatcatcagccctattacaacagttacctttggtgcatttattggcacaaaacatcagggcacaacaactacaacaacttgtgctagcaaaccttgct

SEQ ID NO: 24280 - DNA, 367 bp, Zea mays
  Clone ID: LIB3152-050-P1-K1-D2
aaagcacaatagtgtaccaacaatggcagcctaaatattttgcctccttatgctccttggtatttctgcaagtgctgctacggcgaccattttcccgcaatgctcacaagctcctatagcttcccttcttcccccgtacctctcaccagcggtgtcttcggtatgtgaaaacccaattcttcaaccctacaggatccaacaggcaatcgcagctggcatcttacctttatcacccttgttcctccaacaatcatcagccctattacagcagttacctttggtgcatttattggcacaaaacatcagggcacaacaactacaacaacttgtgctagcaaaccttgctgcctactctcagcaacagcag

SEQ ID NO: 24281 - DNA, 372 bp, Zea mays
  Clone ID: LIB3152-050-P1-K1-D3
gtccggttaccttgggtgcattaatgggctcaaattttcagggcacaacaactacaacaacttgtgctagcaaaccttgctgcctactctcagcaacagcagtttcttccattcaaccaactagctgcattgaactctgcttcttatttgcaacaacaacaactaccattcagccagctagctggtgtgagccctgctaccttcttgacacaaccacagttgttgccgttctaccagcacgctgcgcctaacgctggcaccctcttacaactgcaacaattgctgccattcaaccaacttgctttgacaaacctagcagtgttctaccaacaacccatcattggtggtgccctcttttagatttcttatgag

SEQ ID NO: 24282 - DNA, 382 bp, Zea mays
  Clone ID: LIB3152-050-P1-K1-D4
cgcgtccggtcaacaacaaatttcttgagcagctttatctttcacaacaacagcatccacaaaaacaacagcatcaaccaccaccacaacatcaccagcagcagcaacaccaacaacaacaagttcacatgcaaccacaaaaacatcagcaacaacaagaagttcatgttcaacaacaacaacaacaaccgcagcaccaacaacaacaacaacaacagcaccaacaacaacatcaatgtgaaggccaacaacaacatcaccaacaatcacaaggccatgtgcaacaacacgaacagagccatgagcaacaccaaggtcagagccatgagcaacaacatcaacaacaattccagggtcatgacaaggtgcaacaaccacaaca

SEQ ID NO: 24283 - DNA, 373 bp, Zea mays
  Clone ID: LIB3152-050-P1-K1-D5
cccacgcgtccgattctctttgcgttcttgttgatattctgaaagttgaagtgctgggggaacaactaagcagacgcggtgaatcagtagccggtctccgtccaatattgcaaaggatacttgcagatgttcatgagcggctagcattttgtgctcggactcatatccgtgaagagattgcaaatttccgtccttctgtcgaagatctagattatcctgggaaacttgaacgacctgtggatatgtcttcaagtgctactgttggtgacaactcagacatatatataacatggtacagaccattggagaaaacagtttcatgcctttcaaagctatatcgctgcttagagccttctgtcttcactggattagc

SEQ ID NO: 24284 - DNA, 359 bp, Zea mays
  Clone ID: LIB3152-050-P1-K1-D6
acttagaccaactagcaacatagaatgcacattagtgtaccaacaatggcagccaaaatattttgcctccttatgctccttggtatttctgcaagtgctgctacggcgaccattttcccgcaatgctcacaagctcctatagcttcccttcttcccccgtacctctcaccagcggtgtcttcggtatgtgaaaacccaattcttcaaccctacaggatccaacaggcaatcgcagctggcatcttacctttatcacccttgttcctccaacaatcatcagtcctattacagcagttaccttctgtgcatatattggtgcaaaaaatcagggcacaacatctacaacaacttgtgctagc

SEQ ID NO: 24285 - DNA, 361 bp, Zea mays
  Clone ID: LIB3152-050-P1-K1-D7
ctctcacgctcgcgtcaccggagctctccagaaccgaaccccaactgcccaagggcgagcgatccgaacccctcggcggcttcgtcaacgacgccgagaacactttgaggaatggctgaagaggatgtccagccccttgtgtgtgacaatggcactggaatggtcaaggcgggtttcgctggtgacgacgcaccgagagctgtctttcctagcattgtaggcaggccacgccacactggtgtgatggtgggcatgggccaaaaggatgcatatgtgggcgatgaagctcagtccaaaagaggtattctgacactgaagtacccaattgagcacggcattgtccgcaactgggatgacatgg

SEQ ID NO: 24286 - DNA, 363 bp, Zea mays
  Clone ID: LIB3152-050-P1-K1-D8
ccagttacttcaatgggcttcgaacatccagccgtgcaagcctacaggctacaactagcgcttgcggcgagcgtcttacaacaaccaattgcccaattgcaacaacaatccttggcacatctaaacctacaaaccatcgcaacgcaacagcaacaacagtttctgccatcactgagccacctagccgtggtgaaccctgtcgcctacttgcaacagcagctacttgcatccaacccacttgctctggcgaacgtagctgcataccagcaacaacaacgtctgcaacagtttatgccagcgctcagtcaactagccatggtgaaccctgtcgcctacctacaacagcaacaattgctttcatct

SEQ ID NO: 24287 - DNA, 362 bp, Zea mays
  Clone ID: LIB3152-050-P1-K1-D9
cggacgcgtgggctcccacctgtttcttcaatggccttcgaacacccagctgtgcaagcctataggctacaacaagcgattgcggcgagcgtcttacaacaaccaattgcccaattgcaacaacaatccttggcacatctaacaatacaaaccatcgcaacgcaacagcaacaacagttcctaccagcactgagccacctagccatggtgaaccctgtcgcctacttgcaacagcagctgcttgcatccaacccacttgctctagcaaacgtagttgcaaaccagctacaacaacaactgcaacagtttctgccagcgcttagtcaactagccatggtgaaccctgccgcctacctacaaca

SEQ ID NO: 24288 - DNA, 365 bp, Zea mays
  Clone ID: LIB3152-050-P1-K1-E1
gcaacatagaaagtggaatccagtatcaacaatagagcaacaatggagaccaagatattttccctccttatgctccttgctctttctacatgtgttgctaacgcgacaattttccctcaatgctcacaagctcctatagcttccctttttcccccataccttccatcaattatagcttcagtatgtgaaaacccagctcttcaaccatataggcttcaacaagcaatcgcagcaagcaacatacctttatcgcccttgttgtgtcaacaatcgccagccctatctttggtgcagtcattggtacaaaccatcagggcacaacagctgcagcaactcgtgctacctgtgatcaaccaagtagctct

SEQ ID NO: 24289 - DNA, 369 bp, Zea mays
  unsure at all n locations
  Clone ID: LIB3152-050-P1-K1-E10
agaccaacaagcaacattgtatagtttgttcagnagcaacaatagagcaacaatggcggccaagatattttccatccttatgctccttgctctttctgcatgtgttgctaacgcgaccatttttcctcaatactcacaagctcctatagctgcccttcttcccccataccttccatcaatgaccgcttcagtatgtgaaaacccagcccttcaaccctacaggctccaacaagcaatcgcaacaagcaacttacctttatcacccctgttctttcaacaatcgccagccctatctttggtgcagtcattggtacaaaccatcagggcacaacagctgctgcaactcgtgctaccagtgatcagccaagt

SEQ ID NO: 24290 - DNA, 362 bp, Zea mays
  Clone ID: LIB3152-050-P1-K1-E11
agaccaacaagcaacatataaagtggaatacagtagcaacaatagagcaacaatggcggccaagatattttccatccttatgctccttgctctttctgcatgtgttgctaacgcgaccatttttcctcaatactcacaagctcctatagctgcccttcttcccccataccttccatcaatgaccgcttcagtatgtgaaaacccagcccttcaaccctacaggctccaacaagcaatcgcaacaagcaacttacctttatcacccctgttctttcaacaatcgccagccctatctttggtgcagtcattggtacaaaccatcagggcacaacagctgcagcaactcgtgctaccagtgatca

SEQ ID NO: 24291 - DNA, 364 bp, Zea mays
  Clone ID: LIB3152-050-P1-K1-E2
aaagtggaatacagtagcaacaatttatcatcaatggcggccaagatattttccatccttatgctccttgctctttctgcatgtgttgctaacgcgaccatttttcctcaatactcacaagctcctatagctgcccttcttcccccataccttccatcaatgaccgcttcagtatgtgaaaacccagcccttcaaccctacaggctccaacaagcaatcgcaacaagcaacttacctttatcacccctgttctttcaacaatcgccagccctatctttggtgcagtcattggtacaaaccatcagggcacaacagctgcagcaactcgtgctaccagtgatcagccaagtagctctggcaaacc

SEQ ID NO: 24292 - DNA, 73 bp, Zea mays
  Clone ID: LIB3152-050-P1-K1-E3
ccaatttccaagtgggtggtggtattacgctcgccgcaattgcttgttgtagcctataggcttgcacagctgg

SEQ ID NO: 24293 - DNA, 365 bp, Zea mays
  Clone ID: LIB3152-050-P1-K1-E4
caaccaattgcccaattgcaacaactatccttggcacatctaacaatacaaaccatcgcaacgcaacagcaacaacagttcctaccagcactgagccacctagccatggtgaaccctgtcgcctacttgcaacagcagctgcttgcatccaacccacttgctctagcaaacgtagttgcaaaccagcaacaacaacaactgcaacagtttctgccagcgcttagtcaactagccatggtgaaccctgccgcctacctacaacagcaacaactgctttcatctagcccgctcgctgtggccaatgcacctacatacctgcaacaagaattgttgcaacagattgtaccagctctaactcagctagc

SEQ ID NO: 24294 - DNA, 182 bp, Zea mays
  Clone ID: LIB3152-050-P1-K1-E5
ccccatacctctaccagcggtgtcttcaatgtgtgaagaagggaagctataggagcttgtgagcattgtgggaaaatgagcgcggtagcaacacttgcagcaagaccaaggagcataagctcatgtcgtttacctcctttaccattcctctcaccagaggtgtattgcatcaagaaaaaaca

SEQ ID NO: 24295 - DNA, 364 bp, Zea mays
  Clone ID: LIB3152-050-P1-K1-E6
tgagcattcagaaacacaccaagcgtagcgctctagcaacgacctaacaacaatggctaccaagatattagccctccttgcgcttcttgccctttttgtgagcgcaacaaatgcgttcattattccacaatgctcacttgctcctagtgccattattccacagttcctcccaccagttacttcaatgggcttcgaacacctagctgtgcaagccaacatgcaacaacaagcgcttgcggcgagcgtcttacaacaaccaattgcccaattgcaacaacaatccttgccacatctaacaatacaagccatcacaacgcaacagcaacaacagttcctaccagcactgagccacctagccatggtg

SEQ ID NO: 24296 - DNA, 366 bp, Zea mays
  Clone ID: LIB3152-050-P1-K1-E7
cttgcaatcacaacgaacatttagctctcgatctcaccgacaccgaggaagaagagatcaatggcgtccgagcagggagtcgtgatcgcgtgccacagcaaggctgagtttgacgcccacatgaccaaggcccaggaagccggcaagctggtggtcattgacttcactgccgcctggtgcggtccatgccgcgccatcgccccactgttcgtcgaacacgccaagaagttcactcaggtcgtgttcctgaaggtggacgtggacgaagtgaaggaagtcaccgcggcctacgaggtcgaggcgatgccgaccttccacttcgtcaagaacggcaagacggtcgcgaccatcgtgggtgccaggaag

SEQ ID NO: 24297 - DNA, 364 bp, Zea mays
  Clone ID: LIB3152-050-P1-K1-E8
tagtgaagtacactagcatcatcttagcaccaatgggagccaagatttttgccctccttgccctccttgctctttcagcaagcgctgctacctcgacttttattccacaatgctcacaacaatacctctctccggcgacagccgtgggatttcaatacccaactatacaatcctacatggtacaagaggccatccaagcaagcatcttacggtcattagcattaaccctccaacaaccatatgctctattgcaacagccatccttagtgcatctgtatctccaaagaatcgcggcacaacaactacaacaacagttgctaccaacaatcaatcaagtagttgcagcgaaccttgctgcttacct

SEQ ID NO: 24298 - DNA, 365 bp, Zea mays
  Clone ID: LIB3152-050-P1-K1-E9
cagaaacacaccaagcgaatctctctatcaacaacctaacaacaatggctaccaagatattagccctccttgcgcttcttgcccttttagtgagcgcaacaaatgcgttcattattccacagtgctcacttgctcctagtgccattattccacaggtcctcccaccagttacttcaatgggcttcgaacatccagccgtgcaagcctacaggctacaactagcgcttgcggcgagcgtcttacaacaaccaattgcccaattgcaacaacaattcttggcacatctaaacctacaaaccattgcaacgcaacagcaacaacagtttctgccatcactgagccacctagccgtggtgaaccctgtc

SEQ ID NO: 24299 - DNA, 369 bp, Zea mays
  Clone ID: LIB3152-050-P1-K1-F1
gagcattcagaaacacaccaagcgtttcgcactagcaacaacctaacaacaatggctaccaagatattatccctccttgcgcttcttgcgctttttgcgagcgcaacaaatgcgtccattattccacaatgctcacttgctcctagttccattattccacagttcctcccaccagttacttcaatggccttcgaacacccagctgtgcaagcctataggctacaacaagcgattgcggcgagcgtcttacaacaaccaattgcccaattgcaacaacaatccttggcacatctaacaatacaaaccatcgcaacgcaacagcaacaacagttcctaccagcactgagccacctagccatggtgaaccct

SEQ ID NO: 24300 - DNA, 349 bp, Zea mays
  Clone ID: LIB3152-050-P1-K1-F10
ctccccagcaatccctatcagaagttttccatcctcactcgctcgatggcccgcacgaagcagacggcgaggaagtccaccggcggcaaggcgccgaggaagcagttggcgactaaggcggcccgcaagtctgcccctgcgaccggcggagttaagaagccccaccgcttccgccccggtaccgtcgcgctccgggagatccgcaagtaccagaagagcacggagctgctgatccgcaagctgccgttccagcgcctggtgcgggagatcgcgcaggacttcaagaccgacctacgcttccagagctccgctgtctacgcgctgcaggaggcgagtgaggcctaccttg

SEQ ID NO: 24301 - DNA, 370 bp, Zea mays
  Clone ID: LIB3152-050-P1-K1-F11
ccaactagcaacatagaatgcacaatagtgtaccaacaatggcagctaaaatattttgcctccttatgctccttggtctttctgcaagtgctgctacggcgaccattttcccacaatgctcacaagctcctatagcttcccttcttcccccgtacctctcaccaacggtgtcttcggtatgtgaaaacccaattcttcaaccctacaggatccaacaggcaatcgcagctggcatcttacctttatcacccttgttcctccaacaatcatcagccctattacagcagttacctttggtgcatttattggcacaaaacatcagggcacaacaactacaacaacttgtgctagcaaaccttgctgcctactc

SEQ ID NO: 24302 - DNA, 373 bp, Zea mays
  Clone ID: LIB3152-050-P1-K1-F12
gccgcatccaagcccgtgccagcttctagggaacctgcggcgttggcagcaccccgatcctgggccagtgcgtcgagttcctgaggcatcagtgcagcccgacggcgacgccctactgctcgcctcagtgccagtcgttgcggcagcagtgttgccagcagctcaggcaggtggagccgcagcaccggtaccaggcgatcttcggcttggtcctccagtccatcctgcagcagcagccgcaaagcggccaggtcgcggggctgttggcggcgcagatagcgcagcaactgacggcgatgtgcggcctgcagcagccgactccatgcccctacgctgctgccggcggtgtcccccactgaagaaactatgtgct

SEQ ID NO: 24303 - DNA, 364 bp, Zea mays
  Clone ID: LIB3152-050-P1-K1-F2
attgagaccaacaagcaacatagaatgtggtatccagtagcaacaatagagcaacaatggagaccaagatattttccctccttatgctccttgctctttctacatgtgttgctaacgcgacaattttccctcaatgctcacaagctcctatagcttccctttttcccccataccttccatcaattatagcttcagtatgtgaaaacccagctcttcaaccatataggcttcaacaagcaatcgcagcaagcaacatacctttatcgcccttgttgtgtcaacaatcgccagccctatctttggtgcagtcattggtacaaaccatcagggcacaacagctgcagcaactcgtgctacctgtgat

SEQ ID NO: 24304 - DNA, 367 bp, Zea mays
  Clone ID: LIB3152-050-P1-K1-F3
gaaaagcggcagtgcgtaaagaggttcgtttaacagaacagcatgaagatggtcatcgttctcgtcgtgtgcctggctctgtcagctgccagcgcctctgcaatgcagatgccctgcccctgcgcggggctgcagggcttgtacggcgctggcgccggcctgacgacgatgatgggcgccggcgggctgtacccctacgcggagtacctgaggcagccgcagtgcagcccgctggcggcggcgccctactacgccgggtgtgggcagacgagcgccatgtaccagccgctccggcaacagtgctgccagcagcagatgaggatgatggacgtgcagtccgtcgcgcagcagctgcagatgatgatgc

SEQ ID NO: 24305 - DNA, 355 bp, Zea mays
  Clone ID: LIB3152-050-P1-K1-F4
gttccggatttcggttcgcgatttaattccgtttagtggtcgtgctcgtcgtgggttttcgatccgcgaagtggcccggcccagcccaacccaacccagctgcccagctaccgcaccaacccctgtggcgtctccgctgccattccgccctactactgattcatgatatttgggaaatctcctctatccatccctctctatctatatatgtaataatgcagtaagacgacacacattatcatgtgtggtatgaccaataatatatgcatcataataaagttttggttttaaaaaaaaaaaaaataaaataaataaataaatataatatataatatataatttattttaatttttt

SEQ ID NO: 24306 - DNA, 375 bp, Zea mays
  Clone ID: LIB3152-050-P1-K1-F5
gttctagatcgcgagcggccgcctttttttttttttttttttttttttaggcatagaatcacttatgtcatagaactaattctcacgaagaatcagaataagatagaacttaccaaaccgacccttacatacactgatgctgacacatacaaacagacacacgcacatactgagagacacaagcatgtcgacacacacatacgaccataatatataggaggcatacacactaaaacgaacacatgacatacaggaaattaaactaagtttaaattgcttattttccacgagacgaaacacgagcacggaaaatggcaagacaagagagcgacaccaccaaacatgcatgcatgggtatgctagttcacatgacac

SEQ ID NO: 24307 - DNA, 378 bp, Zea mays
  Clone ID: LIB3152-050-P1-K1-F6
atatgctctattgcaacagccatctttagtgcatctgtatctccaaagaatcgcggcacaacaactacaacaacagttgctaccaacaatcaatcaagtagttgcagcgaaccttgctgcttacctccagcaacaacagtttcttccattcaatcaactagatggggtgaaccctgctatctacttgcaggcacaacagctactaccatttaaccaacttgtcgggagcccttatgccttcttactgcaacaacagcttctaccattccatctgcaagctgtggcaaacattgctgctttcttgagacaacaacatttgttgccattttacccacaggttgtgggaaacattaatgccttcttgcaacagcaacaatt

SEQ ID NO: 24308 - DNA, 344 bp, Zea mays
  Clone ID: LIB3152-050-P1-K1-F7
acttcttccatttaaccaattggcctcactgaaccccgctgcttatttgcagcagcaaatactactaccatttagccagctagctacagcaagccgtgcttccttcttgacacaacaacagttgctgccgttctaccagcagtttgcggctaaccccgcaaccctcttacaactacaacaattgttgccctttgtccaacttgctttgacaaacccagcagcctcctaccaacaacacatcattggtggtgccctcttttagattgcttattagatgtaattcaataataaagttttttggatgatgtatgtggccaaccagaaataaaaagttacatttccag

SEQ ID NO: 24309 - DNA, 364 bp, Zea mays
  Clone ID: LIB3152-050-P1-K1-F8
cgccggttcatctgccgccttcaccatgccactaccctactcaaccgccccggcctcagcctcatccccagccacacccatgcccgtgccaacagccgcatccaagcccgtgccagctgcagggaacctgcggcgttggcagcaccccgatcctgggccagtgcgtcgagttcctgaggcatcagtgcagcccgacggcgacgccctactgctcgcctcagtgccagtcgttgcggcagcagtgttgccagcagctcaggcaggtggagccgcagcaccggtaccaggcgatcttcggcttggtcctccagtccatcctgcagcagcagccgcaaagcggccaggtcgcggtgctgttggcggc

SEQ ID NO: 24310 - DNA, 308 bp, Zea mays
  Clone ID: LIB3152-050-P1-K1-F9
caaagcggcagtgcgtagagtggatcttcgaacagaacagcatgaagatggtcatcgttctcgtcgtgtgcctggctctgtcagctgccagcgcctctgcaatgcagatgccctgcccctgcgcggggctgcatggcttgtacggcgctggcgccggcctgacgacgatgatgggcgccggcgggctgtacccctacgcggagtacctgaggcagccgcagtgcatcccgctggcggcggcgccctactactccgggtgtgggcagactagcgccatgttccagtcgctccggcatcagtgcttgtca

SEQ ID NO: 24311 - DNA, 345 bp, Zea mays
  Clone ID: LIB3152-050-P1-K1-G1
ctagccgttcagacatcttgtagcaagagccattttgatagtctatgccatgcttgtcagctaggctgctatgctcgcccccctttctctagttcctcctctcgggttgatcaggcctttgatcttgtacattgtgatctatggacttctcatgttttcaacctttcagattatgaatattacttggtgattgtggatgaccttttccattgcgattgaagtaggatactttccacactctttcgcacttttttgcttgggtctccacccagttcggccgcctggtttgtgctctccagtgcgacaatggttgcgagttcaacaactccaccttccgctctttct

SEQ ID NO: 24312 - DNA, 276 bp, Zea mays
  Clone ID: LIB3152-050-P1-K1-G10
agaccaactagcaacatataaagctcaatagtgtaccaacaatggcagccaaaatattttgcctccttatgctccttggtctttctgcaagtgctgctacggcgaccattttcccacaatgctcacaagctcctatagcttcccttcttcccccgtacctctcaccagcggtgtcttcggtatgtgaaaacccaattcttcaaccctataggatccaacaggcaatcgcagctggcatcttacctttatcacccttgttcctccaacaatcatcag

SEQ ID NO: 24313 - DNA, 334 bp, Zea mays
  Clone ID: LIB3152-050-P1-K1-G11
cagcattcagaaacactccaagctatagcgcactagcaacaacctaacaacaatggctaccaagatattagccctccttgcgcttcttgcccttttagtgagcgcaacaaatgcgttcattattccacagtgctcacttgctcctagtgccattattccacagttcctcccaccagttacttcaatgggcttcgaacatccagccgtgcaagcctacaggctacaactagcgcttgggcgagcgttttacaacaaccaattgcccaatttgaacaacaatccttggcacatctaaacctacaaaccatcgcaacgcaacagcaacaacagtttt

SEQ ID NO: 24314 - DNA, 329 bp, Zea mays
  unsure at all n locations
  Clone ID: LIB3152-050-P1-K1-G12
gaaagcacaatagngtaccaacaatggcagccaaaatattttgcctccttatgctccttggtctttctgcaagtgctgctacggcgaccattttcccgcaatgctcgcaagctcctatagcttcccttcttcccccgtacctctcaccagcggtgtcttcggtatgtgaaaacccaattcttcaaccctacaggatccaacaggcaatcgcagctggcatcttacctttatcacccttgttcctccaacaatcatcagccctattacaacagttacctttggtgcatttattggcacaaaacatcagggcacaacaactacaacaactt

SEQ ID NO: 24315 - DNA, 360 bp, Zea mays
  Clone ID: LIB3152-050-P1-K1-G2
cgacggcgaggccacgccgatcctatctatttatattcactcgatcgtagtcgtaccatggaggaggaattccaggaggccgaaatcctatggccggcaggcgtggacggcggcggcgaggcggcgcctgcttgctcggtccgtcatcgtcccagggcagccacgccggtcgacatctctcggcagaagcggcggtgccgcccctggccggtgtcgtcgtcggagcattactacgccaccacgctcgacgaccaggaaaccgacgacgtcggcgatggtgcaaaagggacgactgcgaaccacggctcggcggtcgtgccgccgcacgttcttgtcgcgcggcggatgaggctggtgcgc

SEQ ID NO: 24316 - DNA, 212 bp, Zea mays
  unsure at all n locations
  Clone ID: LIB3152-050-P1-K1-G4
ctgggtcttcagaccattagctttatctacttcagagcgcagaagaacccgatcgacaccatgagggtgttgctcgttgccctcgctctcctggctctcgctgcgagcgccacctccacgcatacaagcggcggctgcggctgccagccaccgccgccggttcatcttnngtcgcctgtgcatatgtctcctacggttcagctgccacctcc

SEQ ID NO: 24317 - DNA, 192 bp, Zea mays
  Clone ID: LIB3152-050-P1-K1-G5
tcaggcaacatagaaagcacaatagtgttctcaacattttcagctaaaaaaaaccgcctacatatgctccttggtctttatgcaagtgctgcttccgcgaccatttgccgacaatgctcacaagctactatagcttccattgcttactcgttccttttaccaacatgtgcttagtgctgtgaaaacccaatt

SEQ ID NO: 24318 - DNA, 365 bp, Zea mays
  Clone ID: LIB3152-050-P1-K1-G7
agaaagcacaatagtgtaccaacaatggcagccaaaatattttgcttccttatgctccttggtctttctgcaagtgttgctaccgcaaccattttcccacaatgctcacaagctcctatagcttcccttcttcccccatacctctcaccagcggtgtcttcaatgtgtgaaaacccaattgttcaaccctacaggatccaacaggcaatcgcaacaggcatcttaccattatcacccttgttcctccaacaaccgtcagccctattacagcagttacctttggtccatttggtggcacaaaacatcagggcacaacaactacaacaacttgtgctagcaaaccttgctgcatactctcagcaaca

SEQ ID NO: 24319 - DNA, 309 bp, Zea mays
  unsure at all n locations
  Clone ID: LIB3152-050-P1-K1-G8
ccggccgtcgcgtaccgctcctccttggcagcggcgacggcgtcggcggtccacgagagagcagcgcccgcctcagcctccgtgctcccggacaccctcgaaaggggctccgacgcgtaccatcgcaacacggncgccgtcggcgggttgctctccgacctgcgcgcccgngtctcccaggtgctgcgcgggggaggcgccgaggctgtgaggcttaatgcggcgcgggttaagctgctccccctctaccgtattttcctactgttccacccttttgcattcttgctagtgatggtgcaaattgcaatt

SEQ ID NO: 24320 - DNA, 366 bp, Zea mays
  Clone ID: LIB3152-050-P1-K1-G9
cagcattcagaaacacaccaagcgtttcgcactagcaacaacctaacaacaatggctaccaagatattagccctccttgcgcttcttgcccttttagtgagcgcaacaaatgcgttcattattccacagtgctcacttgctcctagtgccattattccacagttcctcccaccagttacttcaatgggcttcgaacatccagccgtgcaagcctacaggctacaactagcgcttgcggcgagcgtcttacaacaaccaattgcccaattgcaacaacaatccttggcacatctaaacctacaaaccatcgcaacgcaacagcaacaacagtttctgccatcactgagccacctagccgtggtgaac

SEQ ID NO: 24321 - DNA, 227 bp, Zea mays
  Clone ID: LIB3152-050-P1-K1-H1
ctcgaacatgatgtatgtagtggagtagcgtatccggtggtgcaacggccaggggtactacctcgctgatgagcccggggtgcacttcgtttggcagcccaaccaagagtcatcgatacttgtcatgtcgcgcacgttcgacgactactatatcgaggattgtggcgtcatcttggcgccggaggtgcgcataggaggatcgacaatagtgaccagttcgttatcct

SEQ ID NO: 24322 - DNA, 263 bp, Zea mays
  Clone ID: LIB3152-050-P1-K1-H10
gccacacgcaacagacaagagcggctttctattttagaactcgacaaccttaaggggccgatcgttgcccttgctttactggcgctcgctgcgagcgccggcttcagtacaagccgcagctgtggctgtgcacacacacgtttatataccgcctccgttctatatgccgcctacagtctatctgccgccgcatcagcacccgcagccatggcaataccccactcaaccaccgcagctaagcccgggccagcagtttggatcct

SEQ ID NO: 24323 - DNA, 314 bp, Zea mays
  Clone ID: LIB3152-050-P1-K1-H11
gatctgttaccttctttggagttgtttacaaaaatgatagaggatgttgagcttcttgaagaaaaggctaaagtagccaaacgtgaatcatctgttgctgggacaggcattctaaccaaagttgaggagctcagagaaatgttaactcatgcgaaggaagcaaatgatatgcatgctggcgaggtttttggcgagaaagctattttaaccacagaggcacgtgagcttcaatctcgacttcagaggcttttagatgagaggaataaatatctggtgataattgaagagatacgacaaaactttgatcaaagatt

SEQ ID NO: 24324 - DNA, 263 bp, Zea mays
  Clone ID: LIB3152-050-P1-K1-H12
tcggcaattagctcatcgactccagattggagaactcgacaccatgaaggtgctgatcgttgcccttgctctcctggcgctcgctgcgagcgccgtctccagtacaagcggcggctgtggctgccagacaccaccgcttcatctaccgactccgttctatatgccgactgcgttctatctgacgccgcagcagcagccgcatgcatggcaataccccactcaaccaccgcagctaagcccgtgccagcagttcggatcctgcg

SEQ ID NO: 24325 - DNA, 77 bp, Zea mays
  Clone ID: LIB3152-050-P1-K1-H2
caagatttttgccctccttgccctccttgctctttcagcaagcgctgctacctcgacttttattccacaatgctcac

SEQ ID NO: 24326 - DNA, 368 bp, Zea mays
  Clone ID: LIB3152-050-P1-K1-H3
caactagcaccatagaaagcacatttttgtaccaacaatggcagccaaaatattttgcctccttatgctccttggtctttctgcaagtgctgctacggcgaccattttcccgaaatgctcgcaagctcctatagcttcccttcttcccccgtacctctcaccagcggtgtcttcggtatgtgaaaacccaattcttcaaccctacaggatccaacaggcaatcacagctggcatcttacctttatcacccttgttcctccaacaatcatcagccctattacatcagttacctttggtgcatttattggcacaaaacatcagggcacaacaactacaacaacttgtgctagcaaaccttgctgcctact

SEQ ID NO: 24327 - DNA, 212 bp, Zea mays
  Clone ID: LIB3152-050-P1-K1-H4
gccacagcaaacacaaggggctttcatcgcgcgacggagcacataggggccaagagatgtccctccttatgctccatgcctgcagcatgtgttgataacgagaccatttatgtcagtgccaacaagctcatatagctcccgtccatctgcaatcacctgatgaatataagtcagatgtgaaaacccactgttagacatatggcttaacaagc

SEQ ID NO: 24328 - DNA, 75 bp, Zea mays
  Clone ID: LIB3152-050-P1-K1-H5
ggcaggcaggtcggcgaggagggctttaagtcttaagaccgagccgagcggggtgctgatcgtgacccttgctct

SEQ ID NO: 24329 - DNA, 364 bp, Zea mays
  Clone ID: LIB3152-050-P1-K1-H7
tgagaccaactagcaacatattaatgttcaatagtgtaccaacaatggcagccaaaatattttgcttccttatgctccttggtctttctgcaagtgttgctaccgcaaccattttcccacaatgctcacaagctcctatagcttcccttcttcccccatacctctcaccagcggtgtctttaatgtgtgaaaacccaattgttcaaccctacaggatccaacaggcaatctcaacaggcatcttaccattatcacccttgttccttcaacaaccgttagccctattacagcagttacctttggtccatttggtggcacaaaacattcagggcacaacaactacaacaacttgtgctagcaaacc

SEQ ID NO: 24330 - DNA, 349 bp, Zea mays
  Clone ID: LIB3152-050-P1-K1-H8
caacaacaacaacaattgcaacagtttctgccagcgctcagtcaactagccatggtgaaccctgccgcctacctacaacagcaacaactgctttcatctagccctctcgttgtgggtaatgcacctacatacctgcaacaacaattgctgcaacagattgtaccagctctgactcagctagctgtggcaaaccctgctgcctacttgcaacagctgcttccattcaaccaactgactgtgtcgaactctgctgcgtacctacaacagcgacaacagttacttaatccactagcagtgcctaacccattggtcactgcctttctacagcagcaacaattgctaccataca

SEQ ID NO: 24331 - DNA, 352 bp, Zea mays
  Clone ID: LIB3152-050-P1-K1-H9
agcattcagaaacacaccatgttattcgcactagcaacgacctaacaacaatggctaccaagatattagccctccttgcgcttcttgccctttttgtgagcgcaacaaatgcgttcattattccacaatgctcacttgctcctagtgccattattccacagttcctcccaccagttacttcaatgggcttcgaacacctagctgtgcaagccaacatgcaacaacaagcgcttgcggcgagcgtcttacaacaaccaattgcccaattgcaacaacaatccttgccacatctaacaatacaagccatcacaacgcaacagcaacaacagtttctaccagcactgagccacct

SEQ ID NO: 24332 - DNA, 380 bp, Zea mays
  Clone ID: LIB3152-051-P1-K1-A1
gccctccttgcgcttcttgcccttttagtgagcgcaacaaatgcgttcattattccacagtgctcacttgctcctagtgccattattccacagttcctcccaccagttacttcaatgggcttcgaacatccagccgtgcaagcctacaggctacaactagcgcttgcggcgagcgtcttacaacaaccaattgcccaattgcaacaacaatccttggcacatctaaacctacaaaccatcgcaacgcaacagcaacaacagtttctgccatcactgagccacctagccgtggtgaaccctgtcgcctacttgcaacagcagctacttgcatccaacccacttgctctggcgaacgtagctgcataccagcaacaacaacg

SEQ ID NO: 24333 - DNA, 381 bp, Zea mays
  Clone ID: LIB3152-051-P1-K1-A10
gttcctgaggcatcagtgcatccctacggcgacgccctactgctcgcctcagtgccagtcgttgcggcagcagtgttgccagcagctcaggcaggtggagccgcagcaccggtaccaggcgatcttcggcttggtcctccagtccatcctgcagcagcagccgcaaagcggccaggtcgcggggctgttggcggcgcagatagcgcagcaactgacggcgatgtgcggcctgcagcagccgactccatgcccctacgctgctgccggcggtgtcccccactgaagaaactatgtgctgtagtatagccgctggctagctagctagttgagtcatttagcggcgatgattgagtaataatgtgtcacgcatcaccatgggtg

SEQ ID NO: 24334 - DNA, 356 bp, Zea mays
  Clone ID: LIB3152-051-P1-K1-A11
attatataaaccatctagctttaatgatagcacaacaggctaccaacaagggggggcaatatatattgcctacttatgctccttgctatttgtgctatgtgctgctactgcgaccatttacccgcaatgctcacaagctactatatcttatatttttccttcgtacctcataccatctatatctgacctttgtaaaaacccaaaacttaaaccttacagcatccaacaggcaacaacagatggcatcatacctttatcacccttgatccttcaacaatcatcagtcctattacatatgttacctttggtgaatgtaacgtaccaaaacatcacgtcacaatcacttacatcaactt

SEQ ID NO: 24335 - DNA, 393 bp, Zea mays
  unsure at all n locations
  Clone ID: LIB3152-051-P1-K1-A2
gtgcgtcttcagaccattagctttatctactccagagcgcagaagaacccgatcgacaccatgagggtgttgctcgttgccctcgctctcctggctctcgctgcgagcgccacctccacgcatacaagcggcggctgcggctgccagccaccgccgccggttcatctaccgccgccggtgcatctgccacctccggttcacctgccacctccggtgcatctcccaccgccggtccacctgccgccgccggtccacctgccaccgccggtccatgtgccgccgccggttcatctgccgccgccaccatgccactaccctactcaaccgccccggcctcagcctcatccccagccacacccatgcccgtgccaacagccgcatncaagcccgtgc

SEQ ID NO: 24336 - DNA, 382 bp, Zea mays
  Clone ID: LIB3152-051-P1-K1-A4
cagcggcttcttccaaagctccaactacgacgagaaccgccactcctcgaaatctccaaggattttctgcggcgaaccccttcgtgacgtgacccaatgggagaggcctcgccgtcgatcgccaaggacgtcaccgagttgatcgggaacacgccgctggtgtacctcaacaaggtgaccgatgggtgcgtcggccgcgtcgccgccaagctcgagtccatggagccctgctccagcgtcaaggataggattggctacagcatgatcacggacgcagaggagaaagggctgattactccaggcgtgagtgttctgattgaaccaactagcggcaacacaggcattggactggcctttatggctgctgtcaagggctacaaac

SEQ ID NO: 24337 - DNA, 385 bp, Zea mays
  unsure at all n locations
  Clone ID: LIB3152-051-P1-K1-A5
cccacgcgtccgcccacgcgtccgtccacgcgtccgcccacgcgtccgcaacaatacctctctccggcgacagccgtgggatttcaatacccaactatacaatcctacatggtacaagaggccatccaagcaagcatcttacggtcattagcattaaccctccaacaaccatatgctctattgcaacagccatccttagtgcatctgtatctccaaagaatcgcggcacaacaactacaacaacagttgctaccaacaatcaatcaagtagttgcagcgaaccttgctgcttacctccagcaacaacagttttttccattcaatcaactagatggngtgaaccctgctatctacttgcaggcacaacagctactaccatttaacc

SEQ ID NO: 24338 - DNA, 379 bp, Zea mays
  Clone ID: LIB3152-051-P1-K1-A6
aaagcacaatagtgtaccaacaatggcattcaaaatattttgcctccttatgctccttggtctttctgcaagtgctgctacggcgaccattttcccgaaatgctcgcaagctcctatagcttcccttcttcccccgtacctctcaccagcggtgtcttcggtatgtgaaaacccaattcttcaaccctacaggatccaacaggcaatcacagctggcatcttacctttatcacccttgttcctccaacaatcatcagccctattacatcagttacctttggtgcatttattggcacaaaacatcagggcacaacaactacaacaacttgtgctagcaaaccttgctgcctactctcagcaacagcagtttcttccattc

SEQ ID NO: 24339 - DNA, 370 bp, Zea mays
  Clone ID: LIB3152-051-P1-K1-A7
gctctgtcagctgccagcgcctctgcaatgcagatgccctgcccctgcgcggggctgcagggcttgtacggcgctggcgccggcctgacgacgatgatgggcgccggcgggctgtacccctacgcggagtacctgaggcagccgcagtgcagcccgctggcggcggcgccctactacgccgggtgtgggcagacgagcgccatgtaccagccgctccggcaacagtgctgccagcagcagatgaggatgatggacgtgcagtccgtcgcgcagcagctgcagatgatgatgcagcttgagcgtgccgctgccgccagcagcagcctgtacgagccagctctgatgcagcagcagcagcagctgctggcag

SEQ ID NO: 24340 - DNA, 460 bp, Zea mays
  unsure at all n locations
  Clone ID: LIB3152-051-P1-K1-A8
aggtacccggaacggaattgcccgggctcagacccacgcccgtccgnncatcatatcatcannttcatcttagtattgtataggcaccccaaatctagaatctgcagacatcgaattattctaacctccaaagaacctatgaanngctggtgcttnngtggttcttgggctttcattgctttagtnatcaagtgtttcnttgtacacagaccaggcggctgcagctgtggtcaacaacaaagccatgagcagcaacatcatccacaacaacatcatccacaaaaacaacaacatcaaccaccaccacaacatcaccagcagcagcaacaccaacaacaacaagttcacatgcaaccacaaaaacatcagcaacaacaagaagttcatgttcaacaacaacaacaacaaccgcagcaccaacaacaacaacaacaacagcaccaacaacaacatcaatgtg

SEQ ID NO: 24341 - DNA, 391 bp, Zea mays
  unsure at all n locations
  Clone ID: LIB3152-051-P1-K1-B1
gtggcaatcttccaaaagctgcagaaaccctggcaactatgagacattgcttgtcagcagttggagaggttgccgagtttgcaaacgtcagaaaacaacttgaagtattggaagaaaggctagatgaaatggtgcagcctcgattagtagatgcactttctaatcgcaaggttgatgccgtgcaagatcttcgtggtatactgatccgtatcaataggttcaagtcactggaagtgcaatacactaagatccatgttaagcctctaaagaaactctgggatgattttgagctaaagcaaagatccagcaaggtagacatggagaaactcagtggtgaaagcattagtggcctctcattctctangtggctgcctaaattctatgatgagac

SEQ ID NO: 24342 - DNA, 373 bp, Zea mays
  Clone ID: LIB3152-051-P1-K1-B10
gagaccaacaagcaacatagaaagttgaatacagtagcaacaatagagcaacaatggcggccaagatattttccatccttatgctccttgctctttctgcatgtgttgctaacgcgaccatttttcctcaatactcacaagctcctatagctgcccttcttcccccataccttccatcaatgaccgcttcagtatgtgaaaacccagcccttcaaccctacaggctccaacaagcaatcgcaacaagcaacttacctttatcacccctgttctttcaacaatcgccagccctatctttggtgcagtcattggtacaaaccatcagggcacaacagctgcagcaactcgtgctaccagtgatcagccaagtagc

SEQ ID NO: 24343 - DNA, 379 bp, Zea mays
  Clone ID: LIB3152-051-P1-K1-B11
caacaagcaacatagaaagtggaattcagtagcaacaatagagcaacaatggagaccaagatattttccctccttatgctccttgctctttctacatgtgttgctaacgcgacaattttccctcaatgctcacaagctcctatagcttccctttttcccccataccttccatcaattatagcttcagtatgtgaaaacccagctcttcaaccatataggcttcaacaagcaatcgcagcaagcaacatacctttatcgcccttgttgtgtcaacaatcgccagccctatctttggtgcagtcattggtacaaaccatcagggcacaacagctgcagcaactcgtgctacctgtgatcaaccaagtagctctggcaaacc

SEQ ID NO: 24344 - DNA, 391 bp, Zea mays
  Clone ID: LIB3152-051-P1-K1-B2
gcagtttcttccattcaaccaactagctgtattgaactctgcttcttatttgcaacagcaacaactaccattcagccagctacctgctgcctacccccagcaatttcttccattcaaccaactggcagcattgaactctcctgcttatttacagcagcaacaactactaccattcagccagctagctggtgtgagccctgctaccttcttgatacaaccacaggtgttgccgttctaccagcacgctgcgcctaacgctggcaccctcttacaactgcaacaattgctgccattcaaccaacttgctttgacaaacccagcagcgttctaccaacaacccatcattggtggtgccctcttttagatgtcttatgagttatagttcaataat

SEQ ID NO: 24345 - DNA, 95 bp, Zea mays
  Clone ID: LIB3152-051-P1-K1-B3
aaaaaaaaaaaaaaaaaaaaaaaattattttaaaaaaataaaaaagggaaaaaagaaaagaaagaacaagcttacaaacgcatacatgctgcgcg

SEQ ID NO: 24346 - DNA, 379 bp, Zea mays
  Clone ID: LIB3152-051-P1-K1-B4
caacaagcaacatagaaagtggaatccagtagcaacaatagagcaacaatggagaccaagatattttccctccttatgctccttgctctttctacatgtgttgctaacgcgacaattttccctcaatgctcacaagctcctatagcttccctttttcccccataccttccatcaattatagcttcagtatgtgaaaacccagctcttcaaccatataggcttcaacaagcaatcgcagcaagcaacatacctttatcgcccttgttgtgtcaacaatcgccagccctatctttggtgcagtcattggtacaaaccatcagggcacaacagctgcagcaactcgtgctacctgtgatcaaccaagtagctcttgcaaacc

SEQ ID NO: 24347 - DNA, 383 bp, Zea mays
  Clone ID: LIB3152-051-P1-K1-B5
attagctttatctactccagagcgcagaagaacccgatcgacaccatgagggtgttgctcgttgccctcgctctcctggctctcgctgcgagcgccacctccacgcatacaagcggcggctgcggctgccagccaccgccgccggttcatctaccgccgccggtgcatctgccacctccggttcacctgccacctccggtgcatctcccaccgccggtccacctgccgccgccggtccacctgccaccgccggtccatgtgccgccgccggttcatctgccgccgccaccatgccactaccctactcaaccgccccggcctcagcctcatccccagccacacccatgcccgtgccaacagccgcatccaagcccgtgccagct

SEQ ID NO: 24348 - DNA, 382 bp, Zea mays
  Clone ID: LIB3152-051-P1-K1-B6
cagaaacacaccaagcgaagcgcactagcaacgacctaacaacaatggctaccaagatattagccctccttgcgcttcttgccctttttgtgagcgcaacaaatgcgttcattattccacaatgctcacttgctcctagtgccattattccacagttcctcccaccagttacttcaatgggcttcgaacacctagctgtgcaagccaacatgcaacaacaagcgcttgcggcgagcgtcttacaacaaccaattgcccaattgcaacaacaatccttgccacatctaacaatacaagccatcacaacgcaacagcaacaacagttcctaccagcactgagccacctagccatggtgaaccctgccgcctacttgcaagagca

SEQ ID NO: 24349 - DNA, 388 bp, Zea mays
  Clone ID: LIB3152-051-P1-K1-B7
caagcaacatagaaagtggaatccagtagcaacaatagagcaacaatggcgaccaagatattttccctccttatgctccttgctctttctgcatgtgttgctaacgcgacaattttccctcaatgctcacaagctcctatagcttcccttcttcccccataccttccatcaatgatagcttcagtatgtgaaaacccagctcttcaaccctataggctccaacaagcaatcgcagcaagcaacatacctttatcacccttgtttcaacaatcgccagccctatctttggtgcagtcattggtacaaaccatcagggcacagcagctgcagcaactcgtgctacctgtgatcaaccaagtagctcttgcaaacctttctccctactctc

SEQ ID NO: 24350 - DNA, 376 bp, Zea mays
  Clone ID: LIB3152-051-P1-K1-B8
gccaagagttcttctggtttatgttatggcaaaagcaggagcaaaaaggtttcgttggcgatggcgagctcgaggacgcttgctgaccacccgaagctccctaaggggaagccggtggctgacggcgtgctggacggatggggcgaggtcaaccccgaccagtacaactgcatgcatgtcgctcagactcctgtcatggactcgttaaagaatggtgctcctgagaaatggagactagtgaaggctcatggaacagctgtgggtctaccatctgatgatgacatgggcaacaatgaagttggtcacaatgtactgggtgctggtcggaatttcgtccaacgtgctgagctcgtcgaacagctcttgcctcacgaaa

SEQ ID NO: 24351 - DNA, 261 bp, Zea mays
  Clone ID: LIB3152-051-P1-K1-B9
tcgactcacattaaaagggttcttttttcacactagaccacaatggggcgatgattttccatcttatgccccttgcctctccatgctgtgtgcaacgcgacacttgtttctttattctacaagctccttagttttgtttctctcctatacttccataatgattgctcagtatctgaatcccagatcttaacctatggcccatcagcattttatcatgcaacatactttttcacccttggttatcaatttcagatctttttt

SEQ ID NO: 24352 - DNA, 390 bp, Zea mays
  Clone ID: LIB3152-051-P1-K1-C1
catcagtgcagcccgacggcgacgccctactgctcgcctcagtgccagtcgttgcggcagcagtgttgccagcagctcaggcaggtggagccgcagcaccggtaccaggcgatcttcggcttggtcctccagtccatcctgcagcagcagccgcaaagcggccaggtcgcggggctgttggcggcgcagatagcgcagcaactgacggcgatgtgcggcctgcagcagccgactccatgcccctacgctgctgccggcggtgtcccccactgaagaaactatgtgctgtagtatagccgctggctagctagctagttgagtcatttagcggcgatgattgagtaataatgtgtcacgcatcaccatgggtggcagtgtcagtgtgagcaa

SEQ ID NO: 24353 - DNA, 332 bp, Zea mays
  Clone ID: LIB3152-051-P1-K1-C11
aacaagcaacatataaagttgaatttagtagcaacaatagagcaacaatggcggccaatatattttccatccttatgctccttgctctttctgcatgtgttgctaacgcgaccattttttctcaatactcacaagctcctatagctgcccttcttcccccataccttccatcaatgaccgtttcagtatgtgaaaaccctatccttcaaccctacaggctccaacaagcaatcgcaacaagcaatttacctttatcacccctgtactattttcaattgccagtcctatctttggttcattcattggtacaaaccattattgtacaatatttt

SEQ ID NO: 24354 - DNA, 329 bp, Zea mays
  Clone ID: LIB3152-051-P1-K1-C12
cccagttgcaacaacaatccttggtatatctaacaatacaaaccatcgcaacggggcagtaacaacaattcctaccagcactgatccacctagccatggtgaaccctgccgcctacttgcaacagcagttgcttgcatcaaacccacttgctctggcaaacgtagtttgcaaaccagtcacaacaacagttgcatcatgtttttgccatcgctcattcaacttgccatggtgaaccctgccgcctacctacaatagtaacatctgtttttatctatcccgcttgctgtggccattgcacctacataccttgaacaacatttgttgcaac

SEQ ID NO: 24355 - DNA, 323 bp, Zea mays
  unsure at all n locations
  Clone ID: LIB3152-051-P1-K1-C2
gaccattagctctttctactccagagcgcagaagaacccgatcgacaccgtgagggcgttgtacagggcccaagctctcctgcctctcgatgcgagcgccacctncacgcatacaagcggcagatgcagctgacagccaccggcgtcagaacatctacagtcggcaagcatttgccacctccagttcacctgccacctacggagcatctcttaccgccggtgcacctgacgccaacaggccacctgccaccgccggtccaagcaccggcgcagatagcacagcaactgacagccatgtgcgggctgcagcataagactccatg

SEQ ID NO: 24356 - DNA, 388 bp, Zea mays
  Clone ID: LIB3152-051-P1-K1-C3
agcattcagaaacacaccaagcgaagcgcactagcaacaacctaacaacaatggctaccaagatattatccctccttgcgcttcttgcgctttttgcgagcgcaacaaatgcgtccattattccacaatgctcacttgctcctagttccattattccacagttcctcccaccagttacttcaatggccttcgaacacccagctgtgcaagcctataggctacaacaagcgattgcggcgagcgtcttacaacaaccaattgcccaattgcaacaacaatccttggcacatctaacaatacaaaccatcgcaacgcaacagcaacaacagttcctaccagcactgagccacctagccatggtgaaccctgtcgcctacttgcaacagca

SEQ ID NO: 24357 - DNA, 381 bp, Zea mays
  unsure at all n locations
  Clone ID: LIB3152-051-P1-K1-C4
ctgggtcttcagaccattagctttatctactccagagcgcagaagaacccgatcgacaccatgagggtgttgctcgttgccctcgctctcctggctctcgctgcgagcgccacctccacgcatacaagcggcggctgcggctgccagccaccgccgccggttcatctaccgccgccggtgcatctgccacctccggttcacctgccacctccggtgcatctcccaccgccggtccacctgccgccgccggtccacctgccaccgccggtccatgtgccgccgccggttcatctgccgccgccaccatgccactaccctactcaaccgccccggcctcagcctcatncncagccacacccatgcccgtgccaacagccgcat

SEQ ID NO: 24358 - DNA, 380 bp, Zea mays; identical to SEQ ID NO: 21716
  Clone ID: LIB3152-051-P1-K1-C5

SEQ ID NO: 24359 - DNA, 376 bp, Zea mays
  Clone ID: LIB3152-051-P1-K1-C6
gcaacatagaaagcacaatagtgtaccaacaatggcagccaaaatattttgcttccttatgctccttggtctttctgcaagtgctgctaccgcaaccattttcccacaatgctcacaagctcctatagcttcctttcttcccccatacctctcaccagcggtgtcttcagtatgtgaaaacccaattcttcaaccctacaggatccaacaggcaatcgcagcaggcatcttacctttatcacccttgttcctccaacaaccgtcagccctattacagcagttacctttggtgcatttgttggcacaaaacatcaaggcacaacaactacaacaacttgtgctaggaaaccttgctgcctactctcaacaacagcag

SEQ ID NO: 24360 - DNA, 379 bp, Zea mays
  Clone ID: LIB3152-051-P1-K1-C7
aaacacaccaagcgaagcgttctatcaacaacctaacaacaatggctaccaagatattatccctccttgcgcttcttgcgctttttgcgagcgcaacaaatgcgtccattattccacaatgctcacttgctcctagttccattattccacagttcctcccaccagttacttcaatggccttcgaacacccagctgtgcaagcctataggctacaacaagcgattgcggcgagcgtcttacaacaaccaattgcccaattgcaacaacaatccttggcacatctaacaatacaaaccatcgtaacgcaacagtaacatcagttcctaccagcactgagccacctagccatggtgaaccctgttgcctacttgcaacagca

SEQ ID NO: 24361 - DNA, 383 bp, Zea mays
  Clone ID: LIB3152-051-P1-K1-C8
cggacgcgtgggctccctcctccctgcaaatcctgcagacaccaccgctcgtttttctctccgggacaggagaaaaggggagagagaggtgaggcgcggtgtccgcccgatctgctctgccccgacgcagctgttacgacctcctcagtctcagtcaggagcaagatgggtgccggcggcaggatgaccgagaaggagcgggagaagcaggagcagctcgcccgagctaccggtggcgccgcgatgcagcggtcgccggtggagaagcctccgttcactctgggtcagatcaagaaggccatcccgccacactgcttcgagcgctcggtgctcaagtccttctcgtacgtggtccacgacctggtgatcgccgcggcgctcct

SEQ ID NO: 24362 - DNA, 232 bp, Zea mays
  Clone ID: LIB3152-051-P1-K1-C9
aggacgcgtgggctcccttttttttgcaaatcctgcagacaccaccggtcgtcgttctcttcgggacaggataaaagggtagagagaggtgaggcgcgttgtaccagccgatctgttttgtcctgacgcatttgttacgacttcttcagtcttagtctggagcaagatgtgtgccggtggcaggttgacctagaagtagtgtgagaagcagcagcatatttatctagctatc

SEQ ID NO: 24363 - DNA, 386 bp, Zea mays
  Clone ID: LIB3152-051-P1-K1-D1
caactagcaacatagaaagcacaatagtgtaccaacaatggcagccaaaatattttgcctccttatgctccttggtctttctgcaagtgctgctacggcgaccattttcccgcaatgctcgcaagctcctatagcttcccttcttcccccgtacctctcaccagcggtgtcttcggtatgtgaaaacccaattcttcaaccctacaggatccaacaggcaatcgcagctggcatcttacctttatcacccttgttcctccaacaatcatcagccctattacaacagttacctttggtgcatttattggcacaaaacatcagggcacaacaactacaacaacttgtgctagcaaaccttgctgcctactctcagcaacagcagtttc

SEQ ID NO: 24364 - DNA, 374 bp, Zea mays
  Clone ID: LIB3152-051-P1-K1-D10
gtccaacaaccatatgccctttttgttacaaccatccttagtgaatctatatctccaaagaatcgcagcacaacaactacaacagcagttgcttccaacaatcaatcaagtagttgcagcgaaccttgctgtttaccttcagcaacaacaatttcttccattcaatcaactagctggggtgaaccttgctgcttacttgcaggcacaacagctactaccattcaaccaacttgttaggagccctgctgtcttcttactgcagcaacagttgctgccatttcatctacaagttgtggcatacattgttgctttcttgcaacaacaacaattgctgccattttacccacaggttgtgggaaacattaacgcctttt

SEQ ID NO: 24365 - DNA, 267 bp, Zea mays
  Clone ID: LIB3152-051-P1-K1-D11
tcgagcattcagaaacacaccatttttttttttattatcatcaacctaacaacagggggtaccaagatattatccctccttgcgcttcttgcgctttttgcgagcgcaacatatgcgttcattattccacaatgctcacttgttccatgttcctattttacacagttacttttaccagattctttaatgggcttctaacacccagctgtgctagcttattggtttacaacatgcaattgcggcgagcgtttttacaacaaccaattt

SEQ ID NO: 24366 - DNA, 275 bp, Zea mays
  Clone ID: LIB3152-051-P1-K1-D12
gcagaacacacctgcagctgtgttttagggtcatgtcctgctagcttgggagctctggtacggtgttgcaaggtacgggagagagagagagtagcaaactagctagggcacagggcagggcaggggccggctgcattatattgggatcggatctgggggcgaccgagctagcatcagctgagagaagagagagggggcattatataatggagttgttgtcgctggaggcgttgaggaagatgaacgtggtcgatccgctgctgcttgtcaacctt

SEQ ID NO: 24367 - DNA, 390 bp, Zea mays
  Clone ID: LIB3152-051-P1-K1-D2
tttcagcattcagaaacacaccaagcgattcgcactagcaacaacctaacaacaatggctaccaagatattagccctccttgcgcttcttgcccttttagtgagcgcaacaaatgcgttcattattccacagtgctcacttgctcctagtgccattattccacagttcctcccaccagttacttcaatgggcttcgaacatccagccgtgcaagcctacaggctacaactagcgcttgcggcgagcgtcttacaacaaccaattgcccaattgcaacaacaatccttggcacatctaaacctacaaaccatcgcaacgcaacagcaacaacagtttctgccatcactgagccacctagccgtggtgaaccctgtcgcctacttgcaacag

SEQ ID NO: 24368 - DNA, 388 bp, Zea mays
  Clone ID: LIB3152-051-P1-K1-D3
attttgagcattcagaaacacaccaagctatagcgcactagcaacaacctaacaacaatggctaccaagatattatccctccttgcgcttcttgcgctttttgcgagcgcaacaaatgcgtccattattccacaatgctcacttgctcctagttccattattccacagttcctcccaccagttacttcaatggccttcgaacacccagctgtgcaagcctataggctacaacaagcgattgcggcgagcgtcttacaacaaccaattgcccaattgcaacaacaatccttggcacatctaacaatacaaaccatcgcaacgcaacagcaacaacagttcctaccagcactgagccacctagccatggtgaaccctgtcgcctacttgc

SEQ ID NO: 24369 - DNA, 417 bp, Zea mays
  unsure at all n locations
  Clone ID: LIB3152-051-P1-K1-D4
caaacgcgtctcggcaacctatagaaaggcatccaatagtgtactcaactaanttggcagccannaaatattttnngcttccttagtgctcnncttggtctttctgcaagtgccctgctaccgcaacctattttcccacaantgctcacaagnctcctatnagcttcctttcttcccccatacctctcaccagcggtgtcttcagtatgtgaaaacccaattcttcaaccctacaggatccaacaggcaatcgcagcaggcatcttacctttatcacccttgttcctccaacaaccgtcagccctattacagcagttacctttggtgcatttgttggcacaaaacatcaaggcacaacaactacaacaacttgtgctaggaaaccttgctgcctactctcagcaacagcagtttctt

SEQ ID NO: 24370 - DNA, 277 bp, Zea mays
  Clone ID: LIB3152-051-P1-K1-D5
gcagttcgaaaccaaggatcgatctatgagcttccggaaggcgaggcgcgcgcgcagcgtcgaggtgctggtgccggtgccgcccatggatcgggctcgcggatccgcgttcctgctcggcgtcctgctcgcaggatccttgttcgcgttttcagatgctaaagaggagaccaagaagctcgggaccgtgatcggtatcgatctcggtaccacctacttctgtgtcggtgtctacaagaacggtcatgtctagatcatcggcaatgaccagggtaac

SEQ ID NO: 24371 - DNA, 377 bp, Zea mays
  Clone ID: LIB3152-051-P1-K1-D6
cccacgcgtccggcggcagtgcgtagagaggatcgtcgaacagaacagcatgaagatggtcatcgttctcgtcgtgtgcctggctctgtcagctgccagcgcctctgcaatgcagatgccctgcccctgcgcggggctgcagggcttgtacggcgctggcgccggcctgacgacgatgatgggcgccggcgggctgtacccctacgcggagtacctgaggcagccgcagtgcagcccgctggcggcggcgccctactacgccgggtgtgggcagacgagcgccatgtaccagccgctccggcaacagtgctgccagcagcagatgaggatgatggacgtgcagtccgtcgcgcagcagctgcagatgatgatgcagc

SEQ ID NO: 24372 - DNA, 385 bp, Zea mays
  Clone ID: LIB3152-051-P1-K1-D7
caccgcctcaccaccagcgttcattgaggaggaaagggaaggaggaaccgtggaacccgtcgcaccgcaggcacaggcaggcagggcagcagatcgcgagttccgacttccgacgcgtctccgaccaggccgccgccatttctctgtctccacacagcgggatccctccgacgatcgccgtttctcccttggtccaccgtccacccaaccatgtataacaattaccggaatccttccgggacgcatatgcccccgcagaattctcaacctgttcagtttgacaattcattgtacggtgcaagcttgggtctaatccgatctgggattggagtgtacggtgagaagttcttgggctctagttcaaagttcattgcaaagcaacatc

SEQ ID NO: 24373 - DNA, 383 bp, Zea mays
  Clone ID: LIB3152-051-P1-K1-D8
aactagcaacatagaaagcacaattttgtaccaacaatggcagccaaaatattttgcctccttatgctccttggtctttctgcaagtgctgctacggcgaccattttcccacaatgctcacaagctcctatagcttcccttcttcccccgtacctctcaccagcggtgtcttcggtatgtgaaaacccaattcttcaaccctataggatccaacaggcaatcgcagctggcatcttacctttatcacccttgttcctccaacaatcatcagccctattacagcagttacctttggtgcatttattggcacaaaacatcagggcacaacaactacaacaacttgtgctagcaaaccttgctgcctactctcagcaacaacagtt

SEQ ID NO: 24374 - DNA, 152 bp, Zea mays
  unsure at all n locations
  Clone ID: LIB3152-051-P1-K1-D9
aacccncncactttccaccttttttttccacccacagcaggggcaggccggccgcgtcttttaaaggaggaggagctcgataaggccgcttggcagagccgtgttatggcacgatgttctgagctgcgctggaaggatcgggatcctggcca

SEQ ID NO: 24375 - DNA, 389 bp, Zea mays
  Clone ID: LIB3152-051-P1-K1-E1
attttgagcattcagaaacacaccaagctaagctacctagcaacgacttaacaacaatggctaccaagatattagccctccttgcgcttcttgccctttttgtgagcgcaacaaatgcgttcattattccacaatgctcacttgctcctagtgccattataccacagttcctccgaccagttacttcaatgggcttcgaacacctagctgtgcaagcctacaggctacaacaagcgcttgcggcgagcgtcttacaacaaccaattaaccaattgcaacaacaatccttggcacatctaaccatacaaaccatcgcaacacaacagcaacaacagttcctaccagcactgagccaactagatgtggtgaaccctgtcgcctacttgcaa

SEQ ID NO: 24376 - DNA, 377 bp, Zea mays
  Clone ID: LIB3152-051-P1-K1-E10
tcgttgccctcgctctcctgttttttgctgcgagcgccacctccacgcatgcgggcggcggctgcggctgccagccaccgccgccggttcatctaccgccgccggtgcatctgccacctccggttcacctgccaccgccggtccatgtgccgccgccggttcatctgccgccgccaccatgccactaccctactcaaccgccccggcctcagcctcatccccagccacacccatgcccgtgccaacagccgcatccaagcccgtgccagctgcagggaacctgcggcgttggcagcaccccgatcctgggccagtgcgttgagtttctgaggcatcagtgcagcccgacggcgactccctactgctcgcctcagtgc

SEQ ID NO: 24377 - DNA, 131 bp, Zea mays
  unsure at all n locations
  Clone ID: LIB3152-051-P1-K1-E11
cggaannnncccgggtcggacccacgcccgtccccgcccacgccgtnctcgctctacgccgtctcgtgtgtacgtcagnncctagnnnaattagcttcatgcgacggtgccagattggggagaaaactcga

SEQ ID NO: 24378 - DNA, 378 bp, Zea mays
  Clone ID: LIB3152-051-P1-K1-E12
attgagaccaacaagcaacatagatagtggaatccagtagcaacaatagagcaacaatggcgaccaagatattttccctccttatgctccttgctctttctgcatgtgttgctaacgcgacaattttccctcaatgctcacaagctcctatagcttcccttcttcccccataccttccatcaatgatagcttcagtatgtgaaaacccagctcttcaaccctataggctccaacaagcaatcgcagcaagcaacatacctttatcacccttgtttcaacaatcgccagccctatctttggtgcagacattggtacaaaccatcagggcacagcagctgcagcaactcgtgctacctgtgatcaaccaagtagctctgg

SEQ ID NO: 24379 - DNA, 388 bp, Zea mays
  Clone ID: LIB3152-051-P1-K1-E2
ggcacaacagctgcagcaactcgtgctaccagtgatcagccaagtagctctggcaaacctttctccctactctcagcaacaacaatttcttccattcaaccaactgtctacactgaaccctgctgcttatttgcagcaacaacaactactaccattcagccagctagctactgcctactctcagcagcaacaatttcttccatttaaccaattcgccgcactgaacccctctgcttatttccagcagcaaatactactaccatttggccagctagctacaacaagccccgcttccttcttgacacaacaacaattgcttccgttctaccagcagtttgtggctaaccccgcaacccttttacaactgcaacagttgctgccctttgtc

SEQ ID NO: 24380 - DNA, 404 bp, Zea mays
  Clone ID: LIB3152-051-P1-K1-E3
ccgggcgacccacgcgtcgtcgacaccatgaaggctgatcgttgtccttgctctcctggcgctcgctgcgagcgccgcctccagtacaagcggcggctgtggctgccagacaccaccgtttcatctaccgcctccgttctatatgccgcctccgttctatctgccgccgcagcagcagccgcagccatggcaataccccactcaaccaccgcagctaagcccgtgccagcagttcggatcctgcggcgtcggcagcgtcggcagcccgttcctgggccagtgcgtcgagttcctgaggcaccagtgcagcccggcggcgacgccctacggctcgccacagtgccaggcgctgcagcagcagtgctgccaccagatcaggcaggtggagccgctgcaccggtacc

SEQ ID NO: 24381 - DNA, 378 bp, Zea mays
  Clone ID: LIB3152-051-P1-K1-E4
gtgctagcaaaccttgctgcctactctcagcaacagcagtttcttccattcaaccaactagctgcattgaactctgcttcttatttgcaacaacaacaactaccattcagccagctatctgctgcctacccccagcaatttcttccattcaaccaactgacagcattgaactctcctgcttatttacagcagcaacaactactaccattcagccagctagctggtgtgagccctgctaccttcttgacacaaccacagttgttgccgttctaccagcacgctgcgcctaacgctggcaccctcttacaactgcaacaattgctgccattcaaccaacttgctttgacaaacccagcagcattctaccaacaacccatc

SEQ ID NO: 24382 - DNA, 377 bp, Zea mays
  Clone ID: LIB3152-051-P1-K1-E5
caagcgaagcgcactagcaacaacttattaacaatggctaccaagatattagccctgcttgcgcttcttgcccttttagtgagcgcaacaaatgcgttcattattccacagtgctcacttgctcctagtgccattattccacagttcctcccaccagttacttcaatgggcttcgaacatccagccgtgcaagcctacaggctacaactagcgcttgcggcgagcgtcttacaacaaccaattgcccaattgcaacaacaatccttggcacatctaaacctacaaaccatcgcaacgcaacagcaacaacagtttctgccatcactgagccacctagccgtggtgaaccctgtcgcctacttgcaacagcagctact

SEQ ID NO: 24383 - DNA, 376 bp, Zea mays
  Clone ID: LIB3152-051-P1-K1-E6
tttcagcattcagaaacacaccaagcgattcgcactagcaacaacctaacaacaatggctaccaagatattagccctccttgcgcttcttgcccttttagtgagcgcaacaaatgcgttcattattccacagtgctcacttgctcctagtgccattattccacagttcctcccaccagttacttcaatgggcttcgaacatccagccgtgcaagcctacaggctacaactagcgcttgcggcgagcgtcttacaacaaccaattgcccaattgcaacaacaatccttggcacatctaaacctacaaaccatcgcaacgcaacagcaacaacagtttctgccatcactgagccacctagccgtggtgaaccctgtcg

SEQ ID NO: 24384 - DNA, 388 bp, Zea mays
  Clone ID: LIB3152-051-P1-K1-E7
ggcgcgggtgcatgctgacagtctatagactctctctatagctgctcacctacaattctaattcacgtggcacgtctgttttactaactgttcgtgtacttgtggaataactccttgtgcgttaccccaaactattatatcagcacttgtcagcatcaatcctcctcttttcgcctagcttggtcgataatagtcgaagtaggctccgcactcgattcgtcctttaccaacatgttgcgcagtcctgatatggctaatgggacgcgctcctgtagcggtcgcattaatgcgcggtcgggtgttggtggttaacacgcagtcgtgacccgttacactttgtcaagcgccctagctgcccgcttcatttcgatttgttgccattcctttc

SEQ ID NO: 24385 - DNA, 376 bp, Zea mays
  unsure at all n locations
  Clone ID: LIB3152-051-P1-K1-E8
acttgcaacagctgcttccattctttcaactaactatgtcgaactctgtggcgtgcctacaacagcgacaacagttacttaatccattggcagtggctaacccattggtcgctgccttcctacagcagcaacaattgctgccatacaaccggttctctttgatgaatcctgtcttgtcgaggcagcaacccatcgttggaggtgccatcttttagattacatatgagatgtactcgataatggtgccctcataccggcatgtgtttcctagaaataatcaatatattggttgagatttatctcgatnnanaaaaaaaaaaaaaaaatatttaattaaattataaataaaaaataaattttttttatataaaaattt

SEQ ID NO: 24386 - DNA, 374 bp, Zea mays
  Clone ID: LIB3152-051-P1-K1-F1
caacatagaaagcacaatagtgtactaacaatggcagccaaaatattttgcttccttatgctccttggtctttctgcaagtgctgctaccgcaaccattttcccacaatgctcacaagctcctatagcttcctttcttcccccatacctctcaccagcggtgtcttcagtatgtgaaaacccaattcttcaaccctacaggatccaacaggcaatcgcagcaggcatcttacctttatcacccttgttcctccaacaaccgtcagccctattacagcagttacctttggtgcatttgttggcacaaaacatcaaggcacaacaactacaacaacttgtgctaggaaaccttgctgcctactctcagcaacagca

SEQ ID NO: 24387 - DNA, 376 bp, Zea mays
  Clone ID: LIB3152-051-P1-K1-F10
gtggaatacagtagcaacaatagatcaacaatggcggccaagatattttccatccttatgctccttgctctttctgcatgtgttgctaacgcgaccatttttcctcaatactcacaagctcctatagctgcccttcttcccccataccttccatcaatgaccgcttcagtatgtgaaaacccagcccttcaaccctacaggctccaacaagcaatcgcaacaagcaacttacctttatcacccctgttctttcaacaatcgccagccctatctttggtgcagtcattggtacaaaccatcagggcacaacagctgcagcaactcgtgctaccagtgatcagccaagtagctctggcaaacctttcttcctactctc

SEQ ID NO: 24388 - DNA, 379 bp, Zea mays
  Clone ID: LIB3152-051-P1-K1-F2
gtcatcagcagcttctgcttgctctggggggaaggagagagagagagagcgagagagagatctagtagagaggctagtaggtggtcctcgaacgaagatgttggcggtgttcagcgggcaggtggtggaggtgccggcggagctggtggcggcgggcagccggacgccgtcgcccaagacgaaggcgtcgcagctggtggggcgcttcctggccgcgtccgagccggccgtgtccgtgcagctcggcgaccacggacacctcgcctacttccacaccaaccaggcgctcctccgccccaggtcgttcgcggccaaggacgaggtgttctgcctgttcgaggaggtgctggacaacctgtgtcgtctgagccagcagcac

SEQ ID NO: 24389 - DNA, 373 bp, Zea mays
  Clone ID: LIB3152-051-P1-K1-F3
cccacgcgtccgagaccaacaagcaacatataaagtggaatacagtagcaacaatagagcaacaatggcggccaagatattttccatccttatgctccttgctctttctgcatgtgttgctaacgcgaccatttttcctcaatactcacaagctcctatagctgcccttcttcccccataccttccatcaatgaccgcttcagtatgtgaaaacccagcccttcaaccctacaggctccaacaagcaatcgcaacaagcaacttacctttatcacccctgttctttcaacaatcgccagccctatctttggtgcagtcattggtacaaaccatcagggcacaacagctgcagcaactcgtgctaccagtgatc

SEQ ID NO: 24390 - DNA, 381 bp, Zea mays
  Clone ID: LIB3152-051-P1-K1-F4
caactagcaacatagaaagcacaatagtgtaccaacaatggcagccaaaatattttgcttccttatgctccttggtctttctgcaagtgttgctaccgcaaccattttcccacaatgctcacaagctcctatagcttcccttcttcccccatacctctcaccagcggtgtcttcaatgtgtgaaaacccaattgttcaaccctacaggatccaacaggcaatcgcaacaggcatcttaccattatcacccttgttcctccaacaaccgtcagccctattacagcagttacctttggtccatttggtggcacaaaacatcagggcacaacaactacaacaacttgtgctagcaaaccttgctgcctactctcagcaacaaca

SEQ ID NO: 24391 - DNA, 439 bp, Zea mays
  unsure at all n locations
  Clone ID: LIB3152-051-P1-K1-F5
ggaatnncccgggntcggacccacgccccgtccgcggaccgnnngtgggattttgagggcatttagatatactacaccaagcgaagcacaattagtcaaccaactctaactaaccaatggctacnncaagatattatccctccttggcgcttcttggcgctttttggcgagcgcaacanaatgcgttcannttattcctacaatgctcacttgctccaagnttccattattacacnagttcctcccaccagttacttcaatgggcttcgaacacccagctgtgcaagcctataggctacaacaagcaattgcggcgagcgtcttacaacaaccaatttcccagttgcaacaacaatccttggcacatctaacaatacaaaccatcgcaacgcaacagcaacaacaattcctaccagcactgagccacctagccatggtg

SEQ ID NO: 24392 - DNA, 380 bp, Zea mays
  Clone ID: LIB3152-051-P1-K1-F6
gccacatacctgcaacagcaacaactgctttcatctagcccactcgctgggggcaatgcggctacatacctgcaacagcagctgctacaacagatcgtaccggctcttagtcagctagttgtggcgaaccctactgcctacttacaacagcttcttccattcaaccaactagatgtggcaaactctgctgcgtacctacaacagcggcagcaactacttaatccacttgcagcggctaacccattggtcgccgccttcctgcaacagcaacaatttctgccatacaaccaaatctctttgatgaaccttgccttgtcaaggcagcaaccgatcgttggaggtgccatcttttagattacaaatgagatgtacttgataac

SEQ ID NO: 24393 - DNA, 365 bp, Zea mays
  Clone ID: LIB3152-051-P1-K1-F7
caacaagcaacataaaaagtttaattcagtagcaacaatagagcaacaatggcgaccacgatattttccctgcttatgctccttgctctttctacatgtgttgctaacgcgacaattttccctcaatgctcacaagctcctatagcttacctttttcccccataccttctatcaattatagcttcagtatgtgaaaacccagctcttcaaccatataggcttcaacaagcaatcgcagcaagcaacatacctttatcgcccttgttgcgacaacaatcgccagccctatctttggtgcagtcatagctacaaaccatcagggcacaacagctgcagcaactcgcgctacctgtgatcaaccaagt

SEQ ID NO: 24394 - DNA, 382 bp, Zea mays
  Clone ID: LIB3152-051-P1-K1-F8
attgagaccaactagcaacatagaaagcacaatagtgtaccaacaatggcagccaaaatattttgcttccttatgctccttggtctttctgcaagtgttgctaccgcaaccattttcccacaatgctcacaagctcctatagcttcccttcttcccccatacctctcaccagcggtgtcttcaatgtgtgaaaacccaattgttcaaccctacaggatccaacaggcaatcgcaacaggcatcttaccattatcacccttgttcctccaacaaccgtcagccctattacagcagttacctttggtccatttggtggcacaaaacatcagggcacaacaactacaacaacttgtgctagcaaaccttgctgcatactctcagc

SEQ ID NO: 24395 - DNA, 384 bp, Zea mays
  Clone ID: LIB3152-051-P1-K1-F9
ctagcaacatagaaagcacaatagtttaccaacaatggcagccaaaatattttgcttccttatgctccttggtctttctgcaagtgctgctaccgcaaccattttcccacaatgctcacaagctcctatagcttcctttcttcccccatacctctcaccagcggtgtcttcagtatgtgaaaacccaattcttcaaccctacaggatccaacaggcaatcgcagcaggcatcttacctttatcacccttgttcctccaacaaccgtcagccctattacagcagttacctttggtgcatttgttggcacaaaacatcaaggcacaacaactacaacaacttgtgctaggaaaccttgctgcctactctcagcaacagcagtttct

SEQ ID NO: 24396 - DNA, 372 bp, Zea mays
  Clone ID: LIB3152-051-P1-K1-G1
agcgaacacattagcaacaacctaactcaatggctaccaagatattatccctccttgcgcttttgcgcttttgcgagcgcacaaatgcgttcattattccacaatgctcacttgcttaagttcattattacacagttcctcccaccagttacttcaatgggcttcgaacacccagctgtgcaagcctataggctacaacaagcaattgcggcgagcgtcttacaacaaccaatttcccagttgcaacaacaatccttggcacatctaacaatacaaaccatcgcaacgcaacagcaacaacaattcctaccagcactgagccacctagccatggtgaaccctgccgcctacttgcaacagcagttgcttgca

SEQ ID NO: 24397 - DNA, 371 bp, Zea mays
  Clone ID: LIB3152-051-P1-K1-G10
gaccaacaagcaacatagaaagtgtaatccagtagcaacaatagagcaacaatggagaccaagatattttccctccttatgctccttgctctttctacatgtgttgctaacgcgacaattttccctcaatgctcacaagctcctatagcttccctttttcccccataccttccatcaattatagcttcagtatgtgaaaacccagctcttcaaccatataggcttcaacaagcaatcgcagcaagcaacatacctttatcgcccttgttgtgtcaacaatcgccagccctatctttggtgcagtcattggtacaaaccatcagggcacaacagctgcagcaactcgtgctacctgtgatcaaccaagtagc

SEQ ID NO: 24398 - DNA, 382 bp, Zea mays
  Clone ID: LIB3152-051-P1-K1-G2
agaccaacaagcaacatagaaagtggaatccagtagcaacaatagagcaacaatggcgaccaagatattttccctccttatgctccttgctctttctgcatgtgttgctaacgcgacaattttccctcaatgctcacaagctcctatagcttcccttcttcccccataccttccatcaatgatagcttcagtatgtgaaaacccagctcttcaaccctataggctccaacaagcaatcgcagcaagcaacatacctttatcacccttgtttcaacaatcgccagccctatctttggtgcagtcattggtacaaaccatcagggcacagcagctgcagcaactcgtgctacctgtgatcaaccaagtagctctggcaaacctt

SEQ ID NO: 24399 - DNA, 321 bp, Zea mays
  Clone ID: LIB3152-051-P1-K1-G3
ggaccatctagcgtcatatcaagttgcattcattgggcaccatagagcaacaatggcggccacgatattatgcctcctgatgctcctggatgtgtttgtatgtgttgctaacgcgacaattgctcctaaatgcttacaggctcctttagatgcccttatttccccataccttccatcaaagattgcttcaacacgtgaaaacccagctataaagccctacaggctacagcaagcagtcgcataaggcaacataccttgatcacacatgtttcaacactagccaggcctatgttaggggcacacatcgttacagaccatcag

SEQ ID NO: 24400 - DNA, 378 bp, Zea mays
  Clone ID: LIB3152-051-P1-K1-G4
gcacaatagtgtaccaacaatggcagccaaaatattttgcctccttatgctccttggtctttctgcaagtgctgctacggcgaccattttcccgaaatgctcgcaagctcctatagcttcccttcttcccccgtacctctcaccagcggtgtcttcggtatgtgaaaacccaattcttcaaccctacaggatccaacaggcaatcacagctggcatcttacctttatcacccttgttcctccaacaatcatcagccctattacatcagttacctttggtgcatttattggcacaaaacatcagggcacaacaactacaacaacttgtgctagcaaaccttgctgcctactctcagcaacagcagtttcttccattcaa

SEQ ID NO: 24401 - DNA, 379 bp, Zea mays
  Clone ID: LIB3152-051-P1-K1-G5
caacaagcaacatagaaagtggaattcagtagcaacaatagagcaacaatggcgaccaagatattttccctccttatgctccttgctctttctgcatgtgttgctaacgcgacaattttccctcaatgctcacaagctcctatagcttcccttcttcccccataccttccatcaatgatagcttcagtatgtgaaaacccagctcttcaaccctataggctccaacaagcaatcgcagcaagcaactcgtgctacctgtgatcaaccaagtagctctggcaaacctttctccctactctcagcaacaacaatttcttccattcaaccaactgtctacattgaaccgtgctgcttatttgcagcaacaactattaccatt

SEQ ID NO: 24402 - DNA, 375 bp, Zea mays
  Clone ID: LIB3152-051-P1-K1-G6
atcagggcacagcagctgcagcaactcgtgctacctgtgatcaaccaagtagctctggcaaacctttctccctactctcagcaacaacaatttcttccattcaaccaactgtctacattgaaccgtgctgcttatttgcagcaacaactattaccattcagccagctagctactgcctactctcagcaacaacaacttcttccatttaaccaattggccgcactgaaccccgctgcttatttgcagcagcaaatactactaccatttagccagctagctgcagcaagccgtgcttccttcttgacacagcaacagttgctgcctttctaccagcagtttgcggctaaccccgcaaccctcttacaactacaacaa

SEQ ID NO: 24403 - DNA, 245 bp, Zea mays
  Clone ID: LIB3152-051-P1-K1-G7
atcagggcacagcagctgctttaatttttgctacctgtgaccaaccaagtggcgggggcaaacttttatccctactcgcagcaacaacattatctatcattcaaccaactgactacattgaaccgagctgcttattcgcattatacaactatttcctttcacccacctagctactgcctactattagcaacatcaacatcctaccagtaaccaattggctcgtacttcaccccgctgcttatctg

SEQ ID NO: 24404 - DNA, 354 bp, Zea mays
  Clone ID: LIB3152-051-P1-K1-G8
gcacgaactgattaagaaatcctttcgggccactaacacagtcgcctccttcctgcgccgccgccgtcgccgccgctaccaccgtctcgcggtcgcctgcggctccgcgtttccgcacggaagttggtgaaggtttcttgaggctgagaacatggtgctgaagacggaactttgccgtttcagcggccagaagatctatcctgggaaaggcattagatttatccgtgctgattcttatgtctttcttgttgccaactcgtaatgcaagcgcttctttctcaaccgcctgaaacctgcaaagcttacctggacagttatgtacaggtagctgcacatgatggatattcatgctga

SEQ ID NO: 24405 - DNA, 382 bp, Zea mays
  Clone ID: LIB3152-051-P1-K1-G9
attgataccaactagcaacatacatagtgaagtacactagcaacatcttagcaccaatgggagccaagatttttgccctccttgccctccttgctctttcagcaagcgctgctacctcgacttttattccacaatgctcacaacaatacctctctccggcgacagccgtgggatttcaatacccaactatacaatcctacatggtacaagaggccatccaagcaagcatcttacggtcattagcattaaccctccaacaaccatatgctctattgcaacagccatccttagtgcatctgtatctccaaagaatcgcggcacaacaactacaacaacagttgctaccaacaatcaatcaagtagttgcagcgaaccttgctgc

SEQ ID NO: 24406 - DNA, 376 bp, Zea mays
  Clone ID: LIB3152-051-P1-K1-H1
tgcttatttgcagcaacaactattaccattcagccagctagctactgcctactgtcagcaacaacaacttcttccatttaaccaattggccgcactgaaccccgctgcttatttgcagcagcaaatactactaccatttagccagctagctgcagcaagccgtgcttccttcttgacacagcaacagttgctgcctttctaccagcagtttgcggctaaccccgcaaccctcttacaactacaacaattgttgccctttgtccaacttgctttgacaaacccagcagcctcctaccaacaacacatcattggtggtgccctcttttagattgcttattagttgtaattcaataataaagttttttggatgatgtat

SEQ ID NO: 24407 - DNA, 372 bp, Zea mays
  Clone ID: LIB3152-051-P1-K1-H10
gccagctgcagggaacctgttgcgttggcagcaccccgatcctgggccagtgcgtcgagttcctgaggcatcagtgcagcccgacggcgacgccctactgctcgcctcagtgccagtcgttgcggcagcagtgttgccagcagctcaggcaggtggagccgcagcaccggtaccaggcgatcttcggcttggtcctccagtccatcctgcagcagcagccgcaaagcggccaggtcgcggggctgttggcggcgcagatagcgcagcaactgacggcgatgtgcggcctgcagcagccgactccatgcccctacgctgctgccggcggtgtcccccactgaagaaactatgtgctgtagtatagccgctggc

SEQ ID NO: 24408 - DNA, 153 bp, Zea mays
  Clone ID: LIB3152-051-P1-K1-H11
aaactattcagcactagcaacaaccttttgttttcggccgcccagccaagaacgcgcgcgtggcgtatctcgcttgtcgccaccacaacacaggcacgccctacagcacgcctcaagggcactcctagtggcattattgcacagagactctca

SEQ ID NO: 24409 - DNA, 386 bp, Zea mays
  Clone ID: LIB3152-051-P1-K1-H2
gcaacatagaaagtggaatccagtttcaacaatagagcaacaatggcgaccaagatattttccctccttatgctccttgctctttctgcatgtgttgctaacgcgacaattttccctcaatgctcacaagctcctatagcttcccttcttcccccataccttccatcaatgatagcttcagtatgtgaaaacccagctcttcaaccctataggctccaacaagcaatcgcagcaagcaacatacctttatcacccttgtttcaacaatcgccagccctatctttggtgcagtcattggtacaaaccatcagggcacagcagctgcagcaactcgtgctacctgtgatcaaccaagtagctctggcaaacctttctccctactctca

SEQ ID NO: 24410 - DNA, 361 bp, Zea mays
  Clone ID: LIB3152-051-P1-K1-H3
aatattttgagcattcagaaacacaccaagcgaagcacattagcaacaacctaacaacaatggctaccaagatattatccctccttgcgcttcttgcgctttttgcgagcgcaacaaatgcgttcattattccacaatgctcacttgctccaagttccattattacacagttcctcccaccagttacttcaatgggcttcgaacacccagctgtgcaagcctataggctacaacaagcaattgcggcgagcgtcttacaacaaccaatttcccagttgcaacaacaatccttggcacatctaacaatacaaaccatcgcaacgcaacagcaacaacaattcctaccagcactgagccacct

SEQ ID NO: 24411 - DNA, 377 bp, Zea mays
  Clone ID: LIB3152-051-P1-K1-H4
gggggacgggagaggccgtctgccaccagtccaactaccgagtgggggaggaccgggaaaccggaggaggggatttctcggggagcggagggtcggccaggacctgattgggctccagggcgcgatctttgagcgcagatttggtgcccgcgatctgccatggatttgatttaagattgcaagaacgggactgctaagcaagctaagatttcattttttttctggatcaatctcaaattaggatttaggaggaggaaataaagcaagaatagaaagttttttttttttgggtgaagccatgatgctggaagggaagtcctaccttgttccgcgctctctgctgagctcctgcgagacggagacgcagtgggcgtacc

SEQ ID NO: 24412 - DNA, 380 bp, Zea mays
  Clone ID: LIB3152-051-P1-K1-H5
caactagcaacatagaaagcacaatattgtaccaacaatggcagccaaaatattttgcctccttatgctccttggtatttctgcaagtgctgctacggcgaccattttcccgcaatgctcacaagctcctatagcttcccttcttcccccgtacctctcaccagcggtgtcttcggtatgtgaaaacccaattcttcaaccctacaggatccaacaggcaatcgcagctggcatcttacctttatcacccttgttcctccaacaatcatcagccctattacagcagttacctttggtgcatttattggcacaaaacatcagggcacaacaactacaacaacttgtgctagcaaaccttgctgcctactctcagcaacagc

SEQ ID NO: 24413 - DNA, 380 bp, Zea mays
  Clone ID: LIB3152-051-P1-K1-H6
aagcgaagcgcactagcaacaacctaacaacaatggctaccaagatattatccctccttgcgcttcttgcgctttttgcgagcgcaacaaatgcgtccattattccacaatgctcacttgctcctagttccattattccacagttcctcccaccagttacttcaatggccttcgaacacccagctgtgcaagcctataggctacaacaagcgattgcggcgagcgtcttacaacaaccaattgcccaattgcaacaacaatccttggcacatctaacaatacaaaccatcgcaacgcaacagcaacaacagttcctaccagcactgagccacctagccatggtgaaccctgtcgcctacttgcaacagcagctgcttgca

SEQ ID NO: 24414 - DNA, 382 bp, Zea mays
  Clone ID: LIB3152-051-P1-K1-H7
tgatgctatttctcgagcaaagcatattcttgcaactattcctggacgggcaacaggtgcatatagtcacagtcagggtatcaaaggattgcgtgatgcaattgctgctgggatcacctcacgtgacggattccctgcaaatgcagatgacattttcattacagacggagcaagtcctggggtccacatgatgatgcaattactgattaggaatgagaaagatggcattctgtgcccaattcctcagtaccccttgtactcggcctccatagctcttcatggtggagctcttgtcccctattaccttgatgaaaaaactgggtggggtttggagatctctgatcttaagaaacaactcgaagatgctcggtcaaaaggcatt

SEQ ID NO: 24415 - DNA, 381 bp, Zea mays
  Clone ID: LIB3152-051-P1-K1-H8
tggacgtcagcctagcaattagcttatcgactccagattggagaactcgacaccatgaaggtgctgatcgttgcccttgctctcctggcgctcgctgcgagcgccgcctccagtacaagcggcggctgtggctgccagacaccaccgtttcatctaccgcctccgttctatatgccgcctccgttctatctgccgccgcagcagcagccgcagccatggcaataccccactcaaccaccgcagctaagcccgtgccagcagttcggatcctgcggcgtcggcagcgtcggcagcccgttcctgggccagtgcgtcgagttcctgaggcaccagtgcagcccggcggcgacgccctacggctcgccacagtgccaggcgctg

SEQ ID NO: 24416 - DNA, 153 bp, Zea mays
  Clone ID: LIB3152-051-P1-K1-H9
cggacgcgtgggtgctttgacaaactcaacagtgttctaccaacaacccatcattggtggtgccctcttttagattgcttatgagttatagttcaataatgaagttttttggatgatgtttgtggcgtcccagaaataagaaagtacatttct

SEQ ID NO: 24417 - DNA, 316 bp, Zea mays
  Clone ID: LIB3152-053-P1-K1-A10
caactagaacatagaaagcacaattgtgtaccaacaatggcagccaaaatattttgcctccttatgctccttggtctttctgcaagtgctgctacggcgaccattttcccacaatgctcacaagctcctatagcttcccttcttcccccgtacctctcaccagcggtgtcttcggtatgtgaaaacccaattcttcaaccctataggatccaacatgcaatcgcagctggcatcttacctttatcacccttgttcctccaacaatcatcagccctatttcagcagttacctttggtgcatttattgtcacaaaaca

SEQ ID NO: 24418 - DNA, 358 bp, Zea mays
  Clone ID: LIB3152-053-P1-K1-A11
caccaagcaagcgcactagctactttctctaacaacaatggctaccaagatattagccctccttgcgcttcttgccctttttgtgagcgcaacaaatgcgttcattattccacaatgctcacttgctcctagtgccattattccacagttcctcccaccagttacttcaatgggcttcgaacacctagctgtgcaagccaacatgcaacaacaagcgcttgcggcgagcgtcttacaacaaccaattgcccaattgcaacaacaatccttgccacatcttacaattcaagccatcacaacgcaacagcaacaacagtttctaccatcactgagccaccttgccatggtgaaccctgcc

SEQ ID NO: 24419 - DNA, 314 bp, Zea mays
  Clone ID: LIB3152-053-P1-K1-A12
cagagaagttgctgaactatcagattcgacgtctcccggtgtgcaagaaactattcattctgtggttcatggtttgcttgctactctttcccccaaggtacattcaaaggcccctccaccgctagataacatttctggtggtgttctaaaccttgggggcgaggatgatgatcgtgcagaacttgtggagaatgcttccctcccatttcagcccctaatatctgttccccggattatcttgcacgttggctgttctggtgcatgctgctgggtcactacattcggggtctggagtaccggttagagctggctcg

SEQ ID NO: 24420 - DNA, 372 bp, Zea mays
  Clone ID: LIB3152-053-P1-K1-A2
acgagatcttcgacgtaacccgactactatcaagaactatggcatctggctgcgctaccagagcagaaccggctaccacaacatgtacaaggagtaccgcgacacaaccctgaacggcgctgtagagcagatgtacaatgagatggcttctcgccaccgcgtgaggtccccctgcatccagatcatcaagaccgccacagtacacttcaagctgtgcaagagggacaacaccaagcagtttcacaacagtgagatcaagttcccactcgtgtaccgcaaggtcaggccgccgaccaggaagctgaagaccacgttcaaggcttcgaggcccaacctgttcatgtgatttagctgtgggcagtgtatgtgatc

SEQ ID NO: 24421 - DNA, 371 bp, Zea mays
  unsure at all n locations
  Clone ID: LIB3152-053-P1-K1-A3
cgtncgattgagaccaacagcaacatagatttctttttagtgtaccaacaatggcagccaaaatattttgcctccttatgctccttggcctttctgcaagtgctgctacggcgaccattttcccacaatgctcacaagctcctatagcttcccttcttcccccgtacctctcaccagcggtgtcttcggtatgagaaaacccaattcttcaaccctataggatccaacaggctatcgcagctggcattttacctttatcacccttgttcctccaacaatcatcagccctattacagcagttacctttggtgcatttattggcactaaacatcatggcacaacatcttctacaacttgtgctagcaaacctt

SEQ ID NO: 24422 - DNA, 372 bp, Zea mays
  Clone ID: LIB3152-053-P1-K1-A4
gagaccaacaagaacatagaaagtgtattccagtagcaacaatagagcaacaatggcgaccaagatattttccctccttatgctccttgctctttctgcatgtgttgctaacgcgacaattttccctcaatgctcacaagctcctatagcttcccttcttcccccataccttccatcaatgatagcttcagtatgtgaaaacccagctcttcaaccctataggctccaacaagcaatcgcagcaagcaacatacctttatcacccttgtttcaacaatcgccagccctatctttggtgcagtcattggtacaaaccatcagggcacagcagctgcagcaactcgtgctacctgtgatcaaccaagtagctct

SEQ ID NO: 24423 - DNA, 367 bp, Zea mays
  Clone ID: LIB3152-053-P1-K1-A5
caaccaactgtcacattgaaccgtgctgcttatttgcagcaacaactattaccattcagccagctagctactgcctactctcagcaacaacaacttcttccatttaaccaattggccgcactgaaccccgctgcttatttgcagcagcaaatactactaccatttagccagctagctgcagcaagccgtgcttccttcttgacacagcaacagttgctgcctttctaccagcagtttgcggctaaccccgcaaccctcttacaactacaacaattgttgccctttgtccaacttgctttgacaaacccagcagcctcctaccaacaacacatcattggtggtggccctctttagattgcttattagt

SEQ ID NO: 24424 - DNA, 313 bp, Zea mays
  Clone ID: LIB3152-053-P1-K1-A6
gagaaatgtacccaaccattgattttttttatacatgacccatacacattttaccaggtgtcagatggccaacacctaattctccatccactaaacatgagatgtcttctaaaccattttggaggttctgatatgcttccacctagaataactgccaaaatattggagctggaaactgtaacacagtctgaggctataaggaagcgctatcggtttttgagtcacttctcattaacaactacatttcatttctgtgaaattgactcgagtgatgtagtgtcttctaactcactggctccattcttggatgaaa

SEQ ID NO: 24425 - DNA, 387 bp, Zea mays
  Clone ID: LIB3152-053-P1-K1-A7
aagggccgacccaaccctcccacgagaagtaacaaccaagcgaagctcattatcaacaacctaacaacaatggctaccaagatattatccctccttgcgcttcttgcgctttttgcgagcgcaacaaatgcgttcattattccacaatgctcacttgctccaagttccattattacacagttcctcccaccagttacttcaatgggcttcgaacacccagctgtgcaagcctataggctacaacaagcaattgcggcgagcgtcttacaacaaccaatttcccagttgcaacaacaatccttggcacatctaacaatacaaaccatcgcaacgcaacagcaacaacaatttctaccagcactgtgccacctagccatggtgaaccct

SEQ ID NO: 24426 - DNA, 140 bp, Zea mays
  Clone ID: LIB3152-053-P1-K1-A8
taactagaacatacatagtttttttcactagcaacatactatcaccaatgggagccaatattttagccctcctagccctcctagctcttttagcaagcgctgcttcctatacttttattatacaatgctaacaacaatac

SEQ ID NO: 24427 - DNA, 361 bp, Zea mays
  Clone ID: LIB3152-053-P1-K1-A9
ggcaggcggtcggcgaggagggcttgaagaccgaagaccgagccgtgcgggggctcgggacgggaacgggacaggaccccaaaatctcagatccttcctgcccgcccgcccgtgcccgtcgacgcgtcgttcttgccggccgcgccccacctccgccctctcctcctccagggggatcggatacgccacaggctgcgcgatggtgctgtgggtcttcggctacggctccctcatctggaaccccggcttcgacttcgacgacaaaatcctcggcttcatcaagggctacaagcgcacctttaatctcgcttgcattgaccacagtggcacaccggagcattcggcgaggacctgcacgctt

SEQ ID NO: 24428 - DNA, 275 bp, Zea mays
  Clone ID: LIB3152-053-P1-K1-B1
caagcgtccgattttcagcattagaaacacacctttcgttgtgcactagcaacaacctaacaacaatggctaccaagatattaggcctccttgcgcttattggccttttagtgagcgcaacaaatgcgttcattatttcacagtgctcacttgctcctagtgccattattccacagttcctcccaccagttactttaatgggctttgaacatccagccgtgcaagccttctggctacaactagcgcttgcggggagcgtcttacaacaaccaatt

SEQ ID NO: 24429 - DNA, 157 bp, Zea mays
  Clone ID: LIB3152-053-P1-K1-B10
gcagtttctccattcaacctattttctgcattgaactctgctgcttattggcgacaacatctaccattcagtcagctagctgctgcctacccccagcattcattttgatgcaaccaactggctgtattaaactctgctgcttatttactacagcaac

SEQ ID NO: 24430 - DNA, 369 bp, Zea mays
  Clone ID: LIB3152-053-P1-K1-B11
gtcggcgcggcaacctggccgagatcatcgcccgcggcgtggcggcgtcgggcgtcctcccggcctccgccatccgcaccgcgccccaccgccgccccgagcgcggcgaggccttcgcgtccttcggcgcgtgcttgctccaaaccaatgcccatgttgtggacgacagcgatgtgatcgtcatctccgtgaagcctcagatcgtgaagcaagttctacttcagctgaggccacggctgtcagaaaaaaagcttctcgtgtccattgctgccggcatcaagatgcaagatttgcaggattggtctggtcaacgacgtattattagagtaatgcccaacaccccttcagctgttggacaagctgcatcag

SEQ ID NO: 24431 - DNA, 373 bp, Zea mays
  Clone ID: LIB3152-053-P1-K1-B2
ttttgagcattctaaacacaccaatcgatgctacctagcaacgacttaacaacaatggctaccaagatattagccctccttgcgcttcttgccctttttgtgagcgcaacaaatgcgttcattattccacaatgctcacttgctcctagtgccattataccacagttcctccgaccagttacttcaatgggcttcgaacacctagctgtgcaagcctacaggctacaacaagcgcttgcggcgagcgtcttacaacaaccaattaaccaattgcaacaacaatccttggcacatctaaccatacaaaccatcgcaacacaacagcaacaacagttcctaccagcactgagccaactagatgtggtgaaccctg

SEQ ID NO: 24432 - DNA, 304 bp, Zea mays
  Clone ID: LIB3152-053-P1-K1-B3
aaaagagggcacaccaatgatgggttattgttcaataataaagttttttgtctgatgtttgtggcttcccagaaataagaaagtacatttcttaaaataaaaaaaaaataaaataaaaaaaaaatataaaaaaaaaaaaaaaattaaaaaaaaaaaaaaatttttttttaaaaaaaaaaaaaaaaaataaataaaaaattaaaaaatttataaaaaaaaaatttttaaaaaaaaaaaaaatggggtggtctttttaaaaaatacaaaattaacatccgtagtataaaaatatattttctttttt

SEQ ID NO: 24433 - DNA, 354 bp, Zea mays
  Clone ID: LIB3152-053-P1-K1-B4
gaccacgcgtacggttggatcctgtaggttgaacaggcattctcaacaggcatcttaccattatcacccttgttcctccaacaaccgtcagccctattacagcagttacctttggtccatttggtggcacaaaacatcagggcacaacaactacaacaacttgtgctagcaaaccttgctgcatactctcagcaacatcattttcttccattcaaccaactggctgcattgaactctgctgcttatttgcaacatcaattaccattcatccagctagttgctgcctacccccagcaattttttgcattcaaccaactagcagcattgaactctgctgcttatttacagcagcaa

SEQ ID NO: 24434 - DNA, 384 bp, Zea mays
  Clone ID: LIB3152-053-P1-K1-B6
caacaactactacattcagccagcttgctggtgtgagccctgctaccttcttgacacaaccacagttgttgccgttctaccagcacgttgcgcctaacgctggcaccctcttacaactgcaacaattgctgccattcaaccaacttgctttgacaaacccagcagtgttctaccaacaacccatcattggtggtgccctcttttagatttcttatgagttatagttcaataataaaagctttttatctgatgatttgtggctttcctatgatataaaaaaagtttcagtttctaagattcaatatacatttattttttttgaacgatttttttatttatattattgttttatggaggttttcacataatttatatatatttttg

SEQ ID NO: 24435 - DNA, 274 bp, Zea mays
  Clone ID: LIB3152-053-P1-K1-B7
ctagcaactagaaagcacatttgttttccaacaatggcagccaaaatattttgcctccttatgctccttggtctttctgcaagtgctgctacggcgaccattttcccacaatgctcacaagctcctatagcttcccttcttcccccgtacctctcaccagcggtgtcttcggtatgtgaaaacccaattcttcaaccctataagatccaacaggcaatcgcagctgggatcttacctttatcacccttgttccttcaacaatcatcaaccctat

SEQ ID NO: 24436 - DNA, 369 bp, Zea mays
  Clone ID: LIB3152-053-P1-K1-B8
ctgggtctcagaccattagctttatctactccagagcgcagaagaacccgatcgacaccatgagggtgttgctcgttgccctcgctctcctggctctcgctgcgagcgccacctccacgcatacaagcggcggctgcggctgccagccaccgccgccggttcatctaccgccgccggtgcatctgccaccttcggttcacctgccacctccggtgcatcttccaccgccggtccacctgccgccgccggtccacctgccaccgccggtccatgtgccgccgccggttcatctgccgtcgccaccatgccactaccctacttaaccgccccggtcttagtctcatacccagccacacccatgcccctgcc

SEQ ID NO: 24437 - DNA, 159 bp, Zea mays
  Clone ID: LIB3152-053-P1-K1-B9
ctatacttactctaggaagtttggttcaccaccgccagggcagccatcatgcttgcattgttcgctatcttagcctcttgtgcatgcgccactagtgctaccctatattttcagggcactcgctaccatactttccaatgggtaccattaccccatgca

SEQ ID NO: 24438 - DNA, 373 bp, Zea mays
  Clone ID: LIB3152-053-P1-K1-C1
cccacgcgtccgttttcagcattcataatcacaccaagcgaagcgcactagcaacaacctaacaacaatggctaccaagatattagccctccttgcgcttcttgcccttttagtgagcgcaacaaatgcgttcattattccacagtgctcacttgctcctagtgccattattccacagttcctcccaccagttacttcaatgggcttcgaacatccagccgtgcaagcctacaggctacaactagcgcttgcggcgagcgtcttacaacaaccaattgcccaattgcaacaacaatccttggcacatctaaacctacaaaccatcgcaacgcaacagcaacaacagtttctgccatcactgagccacctagcc

SEQ ID NO: 24439 - DNA, 345 bp, Zea mays
  Clone ID: LIB3152-053-P1-K1-C10
gtttagtctgttgcactacttatgtgttatggtaattgattacaagctgacttatcccagtgggacagccacggctatgttgataaatagtttccacacaactactggagctgagcttgcagacaagcaagtcaggtgtcttgggaagtacttgagcattaattttatatggaactgctttaaatggttctttagcggtggtggagattctagtggtttcgataatttcccttttttgggacttgcatcatttaagaatacattttattttagatttcatatcctaccctattttggatgtggtgttaattgtccacaatattgttaattgttatacactatatt

SEQ ID NO: 24440 - DNA, 111 bp, Zea mays
  Clone ID: LIB3152-053-P1-K1-C11
gtcagcctacaattagctcattttctccagataggagaactcgacaccatgaaggtgctgatcgttgcccttgccctcctggcgctcgctgcgagcgccgcctacagtaca

SEQ ID NO: 24441 - DNA, 341 bp, Zea mays
  Clone ID: LIB3152-053-P1-K1-C12
gcaacataaaagcacaatattgttccaacaatggcagccaaaatattttgcttccttatgctccttggtctttctgcaagtgttgctaccgcaaccattttcccacaatgctcacaagctcctatagcttcccttcttcccccatacctctcaccagcggtgtcttcaatgtgtgaaaacccaattgttcaaccctacatgatccaacaggcaatcgcaacaggcattttaccattatcacccttgttccttcaacaaccgtcagccctattacagctgttacctttggtccatttggtggcacaaaacatcagggtacaacaactacaacaacttgtgct

SEQ ID NO: 24442 - DNA, 382 bp, Zea mays
  Clone ID: LIB3152-053-P1-K1-C2
cgacccacgcgttcgattgagaccaacagcaacatagattgtctcaatagtgtaccaacaatggcagctaaaatattttgcctccttatgctccttggtctttctgcaagtgctgctacggcgaccattttcccacaatgctcacaagctcctatagcttcccttcttcccccgtacctctcaccaacggtgtcttcggtatgtgaaaacccaattcttcaaccctacaggatccaacaggcaatcgcagctggcatcttacctttatcacccttgttcctccaacaatcatcagccctattacagcagttacctttggtgcatttattggcacaaaacatcagggcacaacaactacaacaacttgtgctagcaaaccttg

SEQ ID NO: 24443 - DNA, 68 bp, Zea mays
  unsure at all n locations
  Clone ID: LIB3152-053-P1-K1-C3
naaaaaaaaaataaaaaaaaaaatttattttaaaaaaaaaaaaaaaaaaaaaaaaaaaaaaatattag

SEQ ID NO: 24444 - DNA, 374 bp, Zea mays
  Clone ID: LIB3152-053-P1-K1-C4
cagaaacacaccagcgaagcacatttgctacaacctaacaacaatggctaccaagatattatccctccttgcgcttcttgcgctttttgcgagcgcaacaaatgcgttcattattccacaatgctcacttgctccaagttccattattacacagttcctcccaccagttacttcaatgggcttcgaacacccagctgtgcaagcctataggctacaacaagcaattgcggcgagcgtcttacaacaaccaatttcccagttgcaacaacaatccttggcacatctaacaatacaaaccatcgcaacgcaacagcaacaacaattcctaccagcactgagccacctagccatggtgaaccctgccgcctacttgc

SEQ ID NO: 24445 - DNA, 374 bp, Zea mays
  Clone ID: LIB3152-053-P1-K1-C5
cagaaacacaccagcgaagcgcacttcctacaacctaacaacattggctaccaagatattagccctccttgcgcttcttgcccttttagtgagcgcaacaaatgcgttcattattccacagtgctcacttgctcctagtgccattattccacagttcctcccaccagttacttcaatgggcttcgaacatccagccgtgcaagcctacaggctacaactagcgcttgcggcgagcgtcttacaacaaccaattgcccaattgcaacaacaatccttggcacatctaaacctacaaaccatcgcaacgcaacagcaacaacagtttctgccatcactgagccacctagccgtggtgaaccctgtcgcctacttgc

SEQ ID NO: 24446 - DNA, 370 bp, Zea mays
  Clone ID: LIB3152-053-P1-K1-C8
attttgacattcagaaacacaccattcgaagctacctagcaacgacttaacaacaatggctaccaagatattagccctccttgcgcttcttgccctttttgtgagcgcaacaaatgcgttcattattccacaatgctcacttgctcctagtgccattataccacagttcctccgaccagttacttcaatgggcttcgaacacctagctgtgcaagcctacaggctacaacaagcgcttgcggcgagcgtcttacaacaaccaattaaccaattgcaacaacaatccttggcacatctaaccatacaaaccatcgcaacacaacagcaacaacaggttctaccagcactgagccaactagatgtggtgaac

SEQ ID NO: 24447 - DNA, 217 bp, Zea mays
  Clone ID: LIB3152-053-P1-K1-C9
cagaaataaaagttacattttcagtgtctaaaaaaaaaaaaaaaaaaaaaaaaaaaaaaaaaaaaaaaaaaaaaaaaaaaaaaaaaaaataaaaaaaaaaaaaaaaaaataaaaaaaaaaaaaaataaataataataataaattaaaataaataatatgaaaaaaattctaatattataatttattggggggcctcttttttataatataaaatttt

SEQ ID NO: 24448 - DNA, 268 bp, Zea mays
  Clone ID: LIB3152-053-P1-K1-D10
tacaactgcacaattgctgttatttataccaacttgctttgacaaacccagcagcattctaccaacaacccatcattggtggtgccctcttttagatttcttatgagttatagttcaataataaagttttttgtctgatgtttgtggcttcccagaaataagaaagtacatttctaaaaaaaaaaaaatatgtatcatacaaaaattttaaatattttaatatttttattatatgtgtgtcttttatttatatttttatatcaattat

SEQ ID NO: 24449 - DNA, 370 bp, Zea mays
  Clone ID: LIB3152-053-P1-K1-D11
gcgaagcgcctagcaacgacctatcaacaatggctaccaagatattagccctccttgcgcttcttgccctttttgtgagcgcaacaaatgcgttcattattccacaatgctcacttgctcctagtgccattattccacagttcctcccaccagttacttcaatgggcttcgaacacctagctgtgcaagccaacatgcaacaacaagcgcttgcggcgagcgtcttacaacaaccaattgcccaattgcaacaacaattcttgccacatctaacaatacaagccatcacaacgcatcagcaacaacagttcctaccagcactgagccacctagccatggtgaaccctgccgcctacttgcaagagcagct

SEQ ID NO: 24450 - DNA, 231 bp, Zea mays
  Clone ID: LIB3152-053-P1-K1-D12
cggacgcggggttcagcattcagttacacaccaagcgaagcgcactagcaacaacctatcatcaatggctaccaagatattagccctccttgcgcttcttgcccttttagtgagcgcaacaaatgcgttcattattccacagtgctcacttgctcctagtgccattattccacagttactcccaccagttactttaatgggctttgaacatccattcgtgcaagcctacag

SEQ ID NO: 24451 - DNA, 368 bp, Zea mays
  Clone ID: LIB3152-053-P1-K1-D2
gagcattcagaacacaccaagcgtttcttctctagcaacgacttaacaacaatggctaccaagatattagccctccttgcgcttcttgccctttttgtgagcgcaacaaatgcgttcattattccacaatgctcacttgctcctagtgccattataccacagttcctccgaccagttacttcaatgggcttcgaacacctagctgtgcaagcctacaggctacaacaagcgcttgcggcgagcgtcttacaacaaccaattaaccaattgcaacaacaatccttggcacatctaaccatacaaaccatcgcatcacatcatctacaacagttcctaccagcactgatcacactatatggggcgaaccc

SEQ ID NO: 24452 - DNA, 381 bp, Zea mays
  unsure at all n locations
  Clone ID: LIB3152-053-P1-K1-D3
ntccggctggcatcnttcctttatcaccacttgttttctccaacaatcatctagccctattacatcagttacctttggtgcatttattggcacaaaacatcagggcacaacaactacaacaacttgtgctagcaaaccttgctgcctactctcagcaacagcagtttcttccattcaaccaactagctgcattgaactctgcttcttatttgcaacaacaacaactaccattcagccagctacctgctgcctacccccagcaatttcttccattcaaccaactggcagcattgaactctcctgcttatttacagcagcaacaactactaccattcagccagctagctggtgtgagccctgctaccttcttgatacaaccac

SEQ ID NO: 24453 - DNA, 374 bp, Zea mays
  Clone ID: LIB3152-053-P1-K1-D4
gcaacatagaaagggaatccagtttcatcattagagcaacaatggcgaccaagatattttccctccttatgctccttgctctttctgcatgtgttgctaacgcgacaattttccctcaatgctcacaagctcctatagcttcccttcttcccccataccttccatcaatgatagcttcagtatgtgaaaacccagctcttcaaccctataggctccaacaagcaatcgcagcaagcaacatacctttatcacccttgtttcaacaatcgccagccctatctttggtgcagtcattggtacaaaccatcagggcacagcagctgcagcaactcgtgctacctgtgatcaaccaagtagctctggcaaacctttct

SEQ ID NO: 24454 - DNA, 373 bp, Zea mays
  Clone ID: LIB3152-053-P1-K1-D5
attttgagcattcaaaacacacctttctatgctacctagcaacgacttaacaacaatggctaccaagatattagccctccttgcgcttcttgccctttttgtgagcgcaacaaatgcgttcattattccacaatgctcacttgctcctagtgccattataccacagttcctccgaccagttacttcaatgggcttcgaacacctagctgtgcaagcctacaggctacaacaagcgcttgcggcgagcgtcttacaacaaccaattaaccaattgcaacaacaatccttggcacatctaaccatacaaaccatcgcaacacaacagcaacaacagttcctaccagcactgagccaactagatgtggtgaaccct

SEQ ID NO: 24455 - DNA, 222 bp, Zea mays
  unsure at all n locations
  Clone ID: LIB3152-053-P1-K1-D6
gaccaangcgttcgtttacaattatctaatctactccttttttttattaaaaacccgaacgacaccatgagggggttgctcgttgccctcgctctcctggctctcgctgcgagcgccacctccacgcatacaagtcggcggttgctggtgccagccaccgccgcccgttcattctaccgccgccagtgcatctgccacctccggttacctgccaccttcgga

SEQ ID NO: 24456 - DNA, 98 bp, Zea mays
  Clone ID: LIB3152-053-P1-K1-D7
tggcggtccctcttttagattgcttattagttgtcattcaataatgaagttttttggctgatgtatgtggcctcctagaaataagaagttatatttcc

SEQ ID NO: 24457 - DNA, 100 bp, Zea mays
  Clone ID: LIB3152-053-P1-K1-D8
tataaaaaaaaaaaaaaaatttttttattaaaaaaaaaaaaaaaaaaaaaagaaaaaaaaaaaaaaaaaaaaatttaaatggtgggatgtgggggggggt

SEQ ID NO: 24458 - DNA, 331 bp, Zea mays
  Clone ID: LIB3152-053-P1-K1-D9
ggacgcctcctcaacctcgtagctctgcgacccgacgatgtaccgggcgttctggcgggaggttggggactgcggcgccaccgtgatccgcgggtgccaggggatgagctacttctccgacgacgacgccgtgctctgctggttcctcgagccggagctggagcgcgaggtgcgccgactccaccgcatcgttggaaacgccgtcgtcgacggctaccacctcgtggtcggcaccggcgccacccagctctaccaggccgtcatgtacgcgctcagttcgccggcgcgccgggaccagcccgtacccgtcgtcttgccggcgccgtactac

SEQ ID NO: 24459 - DNA, 293 bp, Zea mays
  Clone ID: LIB3152-053-P1-K1-E1
gcaacatagaatcacaatagtgttccatcaatggcagccaaaatattttgcctccttatgctccttggtctttctgcaagtgctgctacggcgaccattttcccgaaatgctcgcaagctcctatagcttcccttcttcccccgtacctctcaccagcggtgtcttcggtatgtgaaaacccaattcttcaaccctacaggatccaacaggcaatcacagctggcatcttacctttatcacccttgttcctccaacaatcatcagccctattacatcaagtacctttggggca

SEQ ID NO: 24460 - DNA, 369 bp, Zea mays
  unsure at all n locations
  Clone ID: LIB3152-053-P1-K1-E10
ctcgtcctgtcctcatccttccattggagcaaacaagcaagcaagtaaacgggcgaggagctggatagaggccggcgactcgaagcaaccgccgatcggagccgcggctgaggaggaggagcaagctcgagatggtgggtctcgtcggcggcagcacggcgcgggcggagcacgtcgtggccaacgccggaggagagacggagtacgtgcgccgtctgcaccgtcacgcgccggccgagcaccagtgtacttccaccctcgtcaagcacatcaaggcgcccgtccacctcgtgtgggagctggtccggagcttcgaccagccgcagcggnccaagccgttcgttaaaaactgcgttgtgcgcggtgacc

SEQ ID NO: 24461 - DNA, 368 bp, Zea mays
  Clone ID: LIB3152-053-P1-K1-E11
gagcattctaaacacaccaagcgttgcacattagcaacaacctaacaacaatggctaccaagatattatccctccttgcgcttcttgcgctttttgcgagcgcaacaaatgcgttcattattccacaatgctcacttgctccaagttccattattacacagttcctcccaccagttacttcaatgggcttcgaacacccagctgtgcaagcctataggctacaacaagcaattgcggcgagcgtcttacaacaaccaatttcccagttgcaacaacaatccttggcacatctaacaatacaaaccatcgcaacgtaacaacaacaacttcttccatttaaccaattggccgcactgaaccccgctgct

SEQ ID NO: 24462 - DNA, 369 bp, Zea mays
  Clone ID: LIB3152-053-P1-K1-E12
caacaataagcaacaatggagacctagatattttccctccttatgctccttgctctttctacatgtgttgctaacgcgacaattttccctcaatgctcacaagctcctatagcttccctttttcccccataccttccatcaattatagcttcagtatgtgaaaacccagctcttcaaccatataggcttcaacaagcaatcgcagcaagcaacatacctttatcgcccttgttgtgtcaacaatcgccagccctatctttggtgcagtcattggtacaaaccatcagggcacaacagctgcagcaactcgtgctacctgtgatcaaccaagtagctctggcaaacctttctccctactctccgcaacaa

SEQ ID NO: 24463 - DNA, 364 bp, Zea mays
  Clone ID: LIB3152-053-P1-K1-E2
agaccattagcttatctactccagagcgcagaagaacccgatcgacaccatgagggtgttgctcgttgccctcgctctcctggctctcgctgcgagcgccacctccacgcatacaagcggcggctgcggctgccagccaccgccgccggttcatctaccgccgccggtgcatctgccacctccggttcacctgccacctccggtgcatctcccaccgccggtccacctgccgccgccggtccacctgccaccgccggtccatgtgccgccgccggttcatctgccgccgtcaccatgccactaccctactcaaccgccccggcctcagcctcatcctcagccacacccatgcccgtgccaacag

SEQ ID NO: 24464 - DNA, 244 bp, Zea mays
  Clone ID: LIB3152-053-P1-K1-E4
attttgagcatcagaaacacacctttgctattcacattagcaacaacctaacaacaatggctaccaagatattatccctccttgcgcttcttgcgctttttgcgagcgcaacaaatgcgttcattattccacattgctcacttgctccaagttccattatttacacagttccttccaccaggtacttcaatgggcttctgaacacccatctgtgcaagcctatttgcttcatacaagcaaattg

SEQ ID NO: 24465 - DNA, 256 bp, Zea mays
  unsure at all n locations
  Clone ID: LIB3152-053-P1-K1-E5
tccggctggncaccacttctatccgagagtcttcttttgactcccatagccagctccgcttccccctggttccgcgccgacagccgattgcaaccccaaggctatccgcgtgtgccgcgccgccaggggctcctctgggctgcgtgcgagggcccgctcgcagnntccccggagtgaggggacctgttctgtacgatagggaaggggcgatcgtttgaaggtgggtgggttctcaattgagaagaaagcttcgatc

SEQ ID NO: 24466 - DNA, 291 bp, Zea mays
  Clone ID: LIB3152-053-P1-K1-E6
ggtttgtagggacttactggaggctttttcttcggcaaacccaggggttttggaacaaatgacatgggagacgataaaggcttcaacacagaagtttattcagcttctgagatcgatcgtattgcacgagttgcatttgaggtcgctcgcatgagaagagggaaactatgctcgggtgataaagtaaatgtgctggaggcatccatgctttggaggaaaatggggactgcactagcctctgaattccctgacattgagctctcacacatgtattgtgacaatgctgcaatt

SEQ ID NO: 24467 - DNA, 177 bp, Zea mays
  Clone ID: LIB3152-053-P1-K1-E7
gtattaacacttacacatgattcttctccgcgagtggttcgagaccgacgcggtgctcatggtcagcctcagcaactacctcttcttcaccatcctcaccgtcatcattggtcgtgataaaggtccataatgacccccgtgacttgatccatcacggcggttagttggccaagatct

SEQ ID NO: 24468 - DNA, 258 bp, Zea mays
  Clone ID: LIB3152-053-P1-K1-E8
ctcttcgctgttatcctttctcttttaatttattgaatattgtattgttggtatggataatctgccaagaactctgctgatgtactacactaacatgcccttgccacacaggaagtattttcagacagttctttgcaactccgctgaattcaacaagactgtagttaaccatgacctacactattcaacatgggatgctcggtccaaaaactagccacgcctactgactatagatgatgtaaaatatatgaccgtaag

SEQ ID NO: 24469 - DNA, 193 bp, Zea mays
  Clone ID: LIB3152-053-P1-K1-E9
caatagttaccaacaatggcttttttaatattttgcctccttatgctccttggtctttctgcaagtgctgctacggcgaccattttcccacaatgctcacaagctcctatagcttaccttcttaccccgtacctttcaccagcggtgtcttcggattgtgaaaacccaattcttcatccctattggatccaac

SEQ ID NO: 24470 - DNA, 372 bp, Zea mays
  Clone ID: LIB3152-053-P1-K1-F1
gcaacatagaagcacaatagtgtaccaacaatggcagccaaaatattttgcttccttatgctccttggtctttctgcaagtgttgctaccgcaaccattttcccacaatgctcacaagctcctatagcttcccttcttcccccatacctctcaccagcggtgtcttcaatgtgtgaaaacccaattgttcaaccctacaggatccaacaggcaatcgcaacaggcatcttaccattatcacccttgttcctccaacaaccgtcagccctattacagcagttacctttggtccatttggtggcacaaaacatcagggcacaacaactacaacaacttgtgctagcaaaccttgctgcatactctcagcaacat

SEQ ID NO: 24471 - DNA, 369 bp, Zea mays
  Clone ID: LIB3152-053-P1-K1-F10
tccgtgacaaagatcgagttgcctttaagaagagagatgaacgccgacttcggcgcgcccaaggagctcgcgggaggcctgcagcagcggcggagtacggtgacgcgaccacaaccatcgatcccacctgtgcccaagccgtcgcgcaggccttcccgcacacctttggccagccgctcgtcagcttcgtcgcgccggccgccggcgccggcgccgttgaggagcgccacccgatcagggtgggcgtggtgttctctgggaggcagtcgccgggagggcacaacgtcgtctggggcctccatgacgcacttaaagcctacaatcctcaaagcttgctctacgggattcgcggtggcacggagggactgt

SEQ ID NO: 24472 - DNA, 370 bp, Zea mays
  Clone ID: LIB3152-053-P1-K1-F11
ggcacaacactacaacaacttgtgctaggaaaccttgctgcctactctcagcaacagcagtttcttccattcaaccaactggctgcattgaactctgctgcttatttgcaacaacaactaccattcagtcagctagctgctgcctacccccagcaatttcttccattcaaccaactggcagcattgaactctgctgcttatttacaacagcaacagctaccaccattcagccagctagctgatgtgagccctgttgccttcttgacacaacaacagttgttgccgttctacctgcacgctgcgcctaacgctggcaccctcttacaactgcaacaattgctgccattcaaccaacttgctttgacaaacc

SEQ ID NO: 24473 - DNA, 371 bp, Zea mays
  Clone ID: LIB3152-053-P1-K1-F12
ccctttttccccataccttccatctattatagcttcagtatgtgaaaacccagctcttcaaccatataggcttcaacaagcaatcgcagcaagcaacatacctttatcgcccttgttgtgtcaacaatcgccagccctatctttggtgcagtcattggtacaaaccatcagggcacaacagctgcagcaactcgtgctacctgtgatcaaccaagtagctctggcaaacctttctccctactctccgcaacaacaatttcttccattcaaccaactgtctacactgaaccctgctgcttatttgcagcaacaactattaccatttagccagctagctactgcctactctcaacaacaacaacttctttcat

SEQ ID NO: 24474 - DNA, 375 bp, Zea mays
  Clone ID: LIB3152-053-P1-K1-F2
tcgaagcacaatagttaccaacaatggcagcctaaatattttgcctccttatgctccttggtatttctgcaagtgctgctacggcgaccattttcccgcaatgctcacaagctcctatagcttcccttcttcccccgtacctctcaccagcggtgtcttcggtatgtgaaaacccaattcttcaaccctacaggatccaacaggcaatcgcagctggcatcttacctttatcacccttgttcctccaacaatcatcagccctattacagcagttacctttggtgcatttattggcacaaaacatcagggcacaacaactacaacaacttgtgctagcaaaccttgctgcctactctcagcaaacagcagtttctt

SEQ ID NO: 24475 - DNA, 372 bp, Zea mays
  Clone ID: LIB3152-053-P1-K1-F3
gtcccttcgtcccacgagcaaccgttattccgccggcgttgagatgttggtttatcaggatctcctatctggcgacgagctcctgtcggattcattcacctacaaggagctcgagaacggcgtcctgtgggaggtcgagggaaagtgggtcacccaaggtcctgttgatgtggacattggtgccaatccatccgccgagggtggtgaggacgaaagcgttgatgacacagctgtgaaggtggttgatattgttgacacattccgtctacaggagcaacctccttttgacaagaaatcatttgtgtcttacatcaaaaaatacatcaagaatctcactgctgtgttggagccagagaaagcggatgagttcaa

SEQ ID NO: 24476 - DNA, 386 bp, Zea mays
  Clone ID: LIB3152-053-P1-K1-F4
gggcggacccacgcgtccgagctttcataacacaccaagcgaatcgttttagcaacgacctaacaacaatggctaccaagatattagccctccttgcgcttcttgccctttttgtgagcgcaacaaatgcgttcattattccacaatgctcacttgctcctagtgccattattccacagttcctcccaccagttacttcaatgggcttcgaacacctagctgtgcaagccaacatgcaacaacaagcgcttgcggcgagcgtcttacaacaaccaattgcccaattgcaacaacaatccttgccacatctaacaatacaagccatcacaacgcaacagcaacaacagttcctaccagcactgagccacctagccatggtgaaccct

SEQ ID NO: 24477 - DNA, 352 bp, Zea mays
  Clone ID: LIB3152-053-P1-K1-F5
attgataccactagcaacatacattttgaagtacactagcaacatcttagcaccaatgggagccaagatttttgccctccttgccctccttgctctttcagcaagcgctgctacctcgacttttattccacaatgctcacaacaatacctctctccggcgacagccgtgggatttcaatacccaactatacaatcctacatggtacaagaggccatccaagcaagcatcttacggtcattagcattaaccctcctacaaccatatgctctattgcaacattcatccttagtgcatctgtatctccaaagaattgcgtcacaacatctactactacagttgttaccaacaatc

SEQ ID NO: 24478 - DNA, 402 bp, Zea mays
  unsure at all n locations
  Clone ID: LIB3152-053-P1-K1-F6
ggaattnccgggngggccccacccgtccgaaacaggcaactaaaaagtggattcttttagcaacaatagagcaacaatggcgaccaagatattttccctccttatgctccttgctctttctgcatgtgttgctaacgcgacaattttccctcaatgctcacaagctcctatagcttcccttcttcccccataccttccatcaatgatagcttcagtatgtgaaaacccagctcttcaaccctataggctccaacaagcaatcgcagcaagcaacatacctttatcacccttgtttcaacaatcgccagccctatctttggtgcagtcattggtacaaaccatcagggcacagcagctgcagcaactcgtgctacctgtgatcaaccaagtagctctggcaaa

SEQ ID NO: 24479 - DNA, 269 bp, Zea mays
  Clone ID: LIB3152-053-P1-K1-F7
gtcttcgctacggcaagctgagggttggcttcgcggagtcggcctaaggaaacgtatggtttggcgcctcctccagaggaggcaaaacgcatgcgccgagagagaagcttcgcttgtttttaacttgtgtatttatgcggccggcggtgtgaatatgctacatgtttagtgatgctttccgagacctgagacaatgcccgtctgttttaacctggcacaaggaaatttctcgatgtgtttgccatcgtggttaagcccatcttgtaccc

SEQ ID NO: 24480 - DNA, 277 bp, Zea mays
  unsure at all n locations
  Clone ID: LIB3152-053-P1-K1-F8
ctctatttttccctttgccttgngtccattctccggcgtccgcccttctatcgtgcgcgcctaccgccgccgccaggtgccaggaagtcgtgggaagtcttcttcggcgacgagcacccgccaggccatatctctgcaatgggtgactacacaatccatattagcaccaagcttattgaccagcttgctcgtgatgacgagaaggttaaactgaaagccatgaagccctatcctaagatgaagcccaccgtccatccacatgaagagcccttggaaa

SEQ ID NO: 24481 - DNA, 363 bp, Zea mays
  Clone ID: LIB3152-053-P1-K1-F9
gaccaacagcaacatagaaagcactatattgtaccaataatggcagccaaaatattttgcctcattatgctccttggtctttctgcaagtgctgctacggcgagcattttcccgcaatgctcacaagctcctatagcttcccttcttcccccatacctctcaccagcgatgtcttcagtatgtgaaaatccaattcttctaccctacaggatccaacaggcaatcgcagcaggcatcttacctttatcacccttgttcctccaacaatcatcagccctattacagcagttacctttggtgcatttattggcacaaaacatcagggcacaacaactacaacaactcgtgctagcaaaccttgct

SEQ ID NO: 24482 - DNA, 366 bp, Zea mays
  Clone ID: LIB3152-053-P1-K1-G1
tggacgtcagctagcaattagctcatcgactccagattggagaactcgacaccatgaaggtgctgatcgttgcccttgctctcctggcgctcgctgcgagcgccgcctccagtacaagcggcggctgtggctgccagacaccaccgtttcatctaccgcctccgttctatatgccgcctccgttctatctgccgccgcagcagcagccgcagccatggcaataccccactcaaccaccgcagctaagcccgtgccagcagttcggatcctgcggcgtcggcagcgtcggcagcccgttcctgggccagtgcgtcgagttcctgaggcaccagtgcagcccggcggcgacgccctacggctcgccac

SEQ ID NO: 24483 - DNA, 369 bp, Zea mays
  Clone ID: LIB3152-053-P1-K1-G10
gctgtgcagcctacaggctacaactagcgcttgcggcgagcgtcttacaacaaccaattaaccaattgcaacaacaatccttggcacatctaaccatacaaaccatcgcaacacaacagcaacaacagttcctaccagcactgagccaactagatgtggtgaaccctgtcgcctacttgcaacagcaggtgcttgcatccaacccacttgctctggcaaacgtagctgcataccaacaacaacaacaattgcaacagtttctgccagcgctcagtcaactagccatggtgaaccctgccgcctacctacaacagcaacaactgcttttatccagccctctcgttgtgggtgatgcacctacatacctgc

SEQ ID NO: 24484 - DNA, 65 bp, Zea mays
  Clone ID: LIB3152-053-P1-K1-G11
agacgacaacattatcatgtgtggtatgaccaataatatatgcatcataataaagttttggtttt

SEQ ID NO: 24485 - DNA, 366 bp, Zea mays
  Clone ID: LIB3152-053-P1-K1-G12
cggacgcggggttttcatgcgcgaggaggggccgtggggaccaccaccagcacctccatccgcgcgcatctcgcggtggtgctcctcctcctcctccccctgctcccggggcgggcgctctcctgttcctcctcctcctgctgctggtgccagggccgggagggcggcgtggaggtggcgctcatggggctcgccggggacgggtcggcggacaccgccaacctcagtaatagtgaaaatggtcggttcagttatggagttgcaagttctcccgggaaaagagcatcgatggaggacttctatgaggcaaggatagacgacgttgacggagagaaagttggaatgtttggtgtgtatgatggtcat

SEQ ID NO: 24486 - DNA, 374 bp, Zea mays
  Clone ID: LIB3152-053-P1-K1-G2
cccacgcgtccgatgaaactgcgcatgccaatgatttttggtgccacaagccatgctgagaggacaagaattctctaccaattcaagaacagtccagaagtcaatacaatttttctttcaaaggtcggtgataactcgattgatatcccagaagctaatgttatcatacaaatatcatctcacgctggttcgagacgtcaagaagctcagcgtctgggccgtattctcagagcaaagggtaaacaccaagataggatggctggaggaaaagaagaatacaatgcttttttctattcccttgtatcaactgacacacaggaaatgtactactcaacaaaaaggcagcagtttcttattgaccagggatatagctt

SEQ ID NO: 24487 - DNA, 437 bp, Zea mays
  Clone ID: LIB3152-053-P1-K1-G4
gaccggggcgggacccaccgcgtccggcaaagcggcatggctgtaaagagggatctttctaactagacacagcttgtaagtatggtcatcggttcttctgtcgtgtgccctggctcatgtcagcatgcacagcgcctctgcaatgcattatgccctgcccctgtcgcggggcatgcagggactcgtacggtcgctggctgccggccctgacgacgatgatgtggcgccggcggtgctgtaccccctaccgcggagtaccttgaggcatgccgcagttgcatgcccgcttggcgggcggcgcctctactactgccgggttgtgtggcagacgatgcgccatgtaccatgccgctccggcaaccagtgctgtcagcaggcagatgaggatgatggacgtgcagtccgtcgcgcagcagctgcagatgatgatgcagctt

SEQ ID NO: 24488 - DNA, 212 bp, Zea mays
  Clone ID: LIB3152-053-P1-K1-G5
aacaacatcataacaaaaacaactttcttttaccaccaccacaacatcaccagcagctgcaacaccaacaacaacaagttcacatgctaccacaaaaacatcagcaacaacaagaagttcatgttcaacaacaacaacaacatccgtagcaccaactacaacaacatcaacagctccaacaacatcatcaatgtgaaggccaacaacaactt

SEQ ID NO: 24489 - DNA, 316 bp, Zea mays
  Clone ID: LIB3152-053-P1-K1-G6
agaccaactagcacatagaaagctcaattgtgtaccaacaatggcagctaaaatattttgcctccttatgctccttggtctttctgcaagtgctgctacggcgaccattttcccacaatgctcacaagctcctatagcttcccttcttcccccgtacctctcaccaacggtgtcttcggtatgtgaaaacccaattcttcaaccctacaggatccaacaggcaatcgcagctggcatcttacctttatcacccttgttcctccaacaatcatcagccctattacagcagttacctttggtgcatttattggcacaa

SEQ ID NO: 24490 - DNA, 364 bp, Zea mays
  Clone ID: LIB3152-053-P1-K1-G7
attcagaacacaccaagcgattttctctatcaacgacctaacaacaatggctaccaagatattagccctccttgcgcttcttgccctttttgtgagcgcaacaaatgcgttcattattccacaatgctcacttgctcctagtgccattattccacagtttctcccaccagttacttcaatgggcttcgaacacctagctgtgcaagccaacatgcaacaacaagcgcttgcggcgagcgtcttacaacaaccaattgcccaattgcaacaacaatccttgccacatctaacaatacaagccatcacaacgcaacagcaacaacagttcctaccagcactgagccacctagccatggtgaaccct

SEQ ID NO: 24491 - DNA, 163 bp, Zea mays
  Clone ID: LIB3152-053-P1-K1-G8
gaagaaatatgtgctgtagtatagccgctggctagctagctagttgagtcatttagcggcgatgattgagtaataatgtgtcacgcatcaccatgggtggcagtgtcagtgtgagcaatgacctgaatgaacaattgaaatgaaaagaaaaaagtattgttcc

SEQ ID NO: 24492 - DNA, 273 bp, Zea mays
  unsure at all n locations
  Clone ID: LIB3152-053-P1-K1-G9
ggaannncccgggnncgacccangcgtnncgattcggttgtgaaaacccaattttttatccctacaggatccaacaggcattcacagctggcatcttacctttatcacccttgttcctccaacaatcatcatccctattacatcagttacctttggtgcatttattggcacaaaacatcatgtcactacaactacaacatcttgtgctagcaaaccttgctttctactctcataaacagcatttttttccattcaaccatctatgttcattta

SEQ ID NO: 24493 - DNA, 379 bp, Zea mays
  unsure at all n locations
  Clone ID: LIB3152-053-P1-K1-H1
cgtncgnaaggatcctgacctcaacaacaacccattcttctccggaccatacggggaggacgtcgtgttcgtctgcaacgactggcacaccggccctctctcgtgctacctcaagagcaactaccagtcccacggcatctacagggacgcaaagaccgctttctgcatccacaacatcttctaccagggccggttcgccttctccgactacccggagctgaacctcccggagagattcaagtcgtccttcgatttcatcgacggctacgagaagcccgtggaaggccggaagatcaactggatgaaagccgggatcctcgaggccgacagggtcctcaccgtcagcccctacttcgccgaggagctcatctccggcatc

SEQ ID NO: 24494 - DNA, 368 bp, Zea mays
  unsure at all n locations
  Clone ID: LIB3152-053-P1-K1-H10
atatnnnnacattcagaaacacaccaagcgaagcgcactagcaacgacctaacaacaatggctaccaagatattagccctccttgcgcttcttgccctttttgtgagcgcaacaaatgcgttcattattccacaatgctcacttgctcctagtgccattattccacagttcctcccaccagttacttcaatgggcttcgaacacctagctgtgcaagccaacatgcaacaacaagcgcttgcggcgagcgtcttacaacaaccaattgcccaattgcaacaacaatccttgccacatctaacaatacaagccatcacaacgcaacagcaacaactgtttctaccagctctgagccaccttagccatgg

SEQ ID NO: 24495 - DNA, 66 bp, Zea mays
  Clone ID: LIB3152-053-P1-K1-H12
gcgtcaactgcagccctactcgggctcccccgccaacttggcggcctaaacggggcggttaaaccg

SEQ ID NO: 24496 - DNA, 389 bp, Zea mays
  unsure at all n locations
  Clone ID: LIB3152-053-P1-K1-H2
gggtcgaccacgcgttcgcggacgcgtggggacgcgtgggccctgtcagcctnccgccgccgacacccacctntgccccgtcggcacatgtgtagttgccacttcgctttcccgttctctctcaccttacctcacactcctctccatcgattaatctcctcccccctcaacaaccgcgagatcttcagctaccgctctctccggtcgcgtttgcatccgcattcctcagatccagattcgagccccagccccgcttcgagatccagctagctctctatcaagcatccggcggagcgagcagcggggggctcggcgagagagaagatgaagcggaagacgcggaacaagatcatcgtatggacactggccctggctgcagtggcgattct

SEQ ID NO: 24497 - DNA, 371 bp, Zea mays
  Clone ID: LIB3152-053-P1-K1-H4
cggacgcgtgggcgcagtgcgtatagaggatcgtcgaacagaacagcatgaagatggtcatcgttctcgtcgtgtgcctggctctgtcagctgccagcgcctctgcaatgcagatgccctgcccctgcgcggggctgcagggcttgtacggcgctggcgccggcctgacgacgatgatgggcgccggcgggctgtacccctacgcggagtacctgaggcagccgcagtgcagcccgctggcggcggcgccctactacgccgggtgtgggcagacgagcgccatgtaccagccgctccggcaacagtgctgccagcagcagatgaggatgatggacgtgcagtccgtcgcgcagcagctgcagatgatgatg

SEQ ID NO: 24498 - DNA, 370 bp, Zea mays
  Clone ID: LIB3152-053-P1-K1-H5
gaccaactagcacatagaaagcacaatagtgtaccaacaatggcagccaaaatattttgcttccttatgctccttggtctttctgcaagtgctgctaccgcaaccattttcccacaatgctcacaagctcctatagcttcctttcttcccccatacctctcaccagcggtgtcttcagtatgtgaaaacccaattcttcaaccctacaggatccaacaggcaatcgcagcaggcatcttacctttatcacccttgttcctccaacaaccgtcagccctattacagcagttacctttggtgcatttgttggcacaaaacatcaaggcacaacaactacaacaacttgtgctaggaaaccttgctgcctact

SEQ ID NO: 24499 - DNA, 299 bp, Zea mays
  unsure at all n locations
  Clone ID: LIB3152-053-P1-K1-H6
agccgcaaagcggcaggtcgcggtgctgttggcggcgcanatagcgcagcaactgacggcgatgtgcggcctgcagcagccgactccatgcccctacgctgctgccggcggtgtcccccactgaagaaactatgtgctgtagtatagccgctggctagctagctagttgagtcatttagcggcgatgattgagtaataatgtgtcacgcatcaccatgggtggcagtgtcagtgtgagcaatgacctgaatgaacaattgaaatgaaaagaaaaaagtattgctccccagataaattat

SEQ ID NO: 24500 - DNA, 366 bp, Zea mays
  Clone ID: LIB3152-053-P1-K1-H7
gcaacacaacaacaacaagttcacttgcaaccacaaaaacatcagcaacaacaatttcttccattcaaccaactgtctacattgaaccgtgctgcttatttgcagcaacaactattaccattcagccagctagctactgcctactctcagcaacaacaacttcttccatttaaccaattggccgcactgaaccccgctgcttatttgcagcagcaaatactactaccatttagccagctagctgcagcaagccgtgcttccttcttgacacagcaacagttgctgcctttctaccagcagtttgcggctaaccccgcaaccctcttacaactacaacaattgttgccctttgtccaacttgctttg

SEQ ID NO: 24501 - DNA, 369 bp, Zea mays
  Clone ID: LIB3152-053-P1-K1-H8
ctatacttaggaagcaaggacacctccgccatggcagccaagatgcttgcattgttcgctctcctagctctttgtgcaagcgccactagtgcgacccatattccagggcacttgccaccagtcatgccattgggtaccatgaacccatgcatgcagtactgcatgatgcaacaggggcttgccagcttgatggcgtgtccgtccctgatgctgcagcaactgttggccttaccgcttcagacgatgccagtgatgatgccacagatgatgacgcctaacatgatgtcaccattgatgatgccgagcatgatgtcaccaatggtcttgccgagcatgatgtcgcaaatgatgatgccacaatgtcactgg

SEQ ID NO: 24502 - DNA, 298 bp, Zea mays
  Clone ID: LIB3152-054-P1-K1-A10
agaaaggattagaaaaaggaatgatccatggacatgatctccggcagcactgcagcaacattaacaccccacatcaaccaacaggcggtgatgttgtcattccccattataaaggaggaagctagggacccaaagcagacacgagccatgccccaaataggtggcagtggggagctgtagccgaggccgtatttacctgaggctgctcaagtgttcatgctgagactcctacaacaccaagtttagctactacaacaattatagcatgtttcacccacgctttcgtttttcaaggctt

SEQ ID NO: 24503 - DNA, 315 bp, Zea mays
  Clone ID: LIB3152-054-P1-K1-A11
agcggcagtgcgtagagaggatcgtttaacagaacagcatgaagatggtcatcgttctcgtcgtgtgcctggctctgtcagctgccagcgcctctgcaatgcagatgccctgcccctgcgcggggctgcagggcttgtacggcgctggcgccggcctgacgacgatgatgggcgccggcgggctgtacccctacgcggagtacctgaggcagccgcagtgcagcccgctggcggcggcgccctactacgccgggtgtgggcagacgagcgccatgtaccatccgctccggcaacatttgctgccagcagcagatg

SEQ ID NO: 24504 - DNA, 319 bp, Zea mays
  Clone ID: LIB3152-054-P1-K1-A12
ccagagcgcagaagaacccgatcgacaccatgagggtgttgctcgttgccctcgctctcctggctctcgctgcgagcgccacctccacgcatacaagcggcggctgcggctgccagccaccgccgccggttcatctaccgccgccggtgcatctgccacctccggttcacctgccacctccggtgcatctcccaccgccggtccacctgccgccgccggtccacctgccaccgtcggtccatgtgccgccgccggttcatctgccgccgccaccatgccactaccctactcaaccggcccggtctcagcctcatcccca

SEQ ID NO: 24505 - DNA, 100 bp, Zea mays
  Clone ID: LIB3152-054-P1-K1-A2
aatattttgagcattcagaaactcatcaagcgaagcacattagcaacaacctaacaacaatggctaccaagatagagcccttcttgcgctactgcgcttt

SEQ ID NO: 24506 - DNA, 300 bp, Zea mays
  Clone ID: LIB3152-054-P1-K1-A3
ctgtcgcctacttgcaacagcagctactttcatccaacccacttgctctggcgaacgtagctgcataccagcaacaacaacgtctgcaacagtttatgccagcgctcagtcaactagccatggtgaaccctgtcgcctacctacaacagcaacaattgctttcatctagcccgctcgctgtgggcaatgcacctacgtacctacaacaacagttgctgcaacagattgtaccagctctgactcaactaggtgtggcaaaccctactgcctacttgcaacagttgctttcattcaaccaac

SEQ ID NO: 24507 - DNA, 343 bp, Zea mays
  Clone ID: LIB3152-054-P1-K1-A4
gaaagtggaatccagtagcaacaatagatcaacaatggcgaccaagatattttccctgcttatgctccttgctctttctgcatgtgttgctaacgcgacaattttccctcaatgctcacaagctcctatagcttcccttcttaccccataccttccatcaatgatagcttcagtatgtgaaaacccagctcttcaaccctataggctccaacacgcaatcgcagcaagcaacataccccaatcaccctagtttcaacaatcgccagccctatctttggtgcagtcattggtacaaaccatcagggcacaccatctgcagcaactcgttctacctgtgatcaac

SEQ ID NO: 24508 - DNA, 322 bp, Zea mays
  Clone ID: LIB3152-054-P1-K1-A5
catcaatcatcattcatcttagtattatttgcaccaaatcaaatctgcaacatcgattatctaactccaaaaaccatgaagctggtgcttgtggttcttgctttcattgctttagtatcaagtgtttcttgtacacagacaggcggctgcagctgtggtcaacaacaaagccatgagcagcaacatcatccacaacaacatcattcacaaaaacaacaacatcaaccaccaccacaacatcaccagcagcagcaacaccatcaacaacatgttcacatgctaccacataaacatcagctacaacaagaagttcatgttcaac

SEQ ID NO: 24509 - DNA, 234 bp, Zea mays
  Clone ID: LIB3152-054-P1-K1-A6
gtacactagcaacatcttagcaccaatgggagccaagatttttgccctccttgccctccttgctctttcagcaagcgctgctaccttgacttttattccacaatgctcacaacaatacctctctccggcgacagccgtgggaattcaatacccaactatacaatcctacatggtacaagaggccatccaagcaagcatcttacggtcatttgcatgaacccttcaacaactata

SEQ ID NO: 24510 - DNA, 289 bp, Zea mays
  Clone ID: LIB3152-054-P1-K1-A8
tcgcccacacttgcggggtcttcataccattagctttatctactccagagcgcagaagaacccgatcgacaccatgagggtgttgctcgttgccctcgctctcctggctctcgctgcgagcgccacctccacgcatacaagcggcggctgcggctgccagccaccgccgccggttcatctaccgccgccggtgcatctgccacctccggttcacctgccacctccggtgcattttccaccgccggtccacctgccgccgccggtccacctgccaccgccggtccatgtg

SEQ ID NO: 24511 - DNA, 362 bp, Zea mays
  Clone ID: LIB3152-054-P1-K1-A9
cccacgcgtccgcaacaagcaacatagaaagtggaatccagtagcaacaatagagcaacaatggagaccaagatattttccctccttatgctccttgctctttctacatgtgttgctaacgcgacaattttccctcaatgctcacaagctcctatagcttccctttttcccccataccttccatcaattatagcttcagtatgtgaaaacccagctcttcaaccatataggcttcaacaagcaatcgcagcaagcaacatacctttatcgcccttgttgtgtcaacaatcgccagccctatctttggtgcagtcattggtacaaaccatcagggcacaacagctgcagcaactcgggctacc

SEQ ID NO: 24512 - DNA, 255 bp, Zea mays
  Clone ID: LIB3152-054-P1-K1-B10
ccggttccggtcgacccagcgtcggatagcttaccccatgcggtcggggccgcgggtgggaggcagggtgcgctgacctgaggagaacaggacaaaaatgaccctggacaccggcctaaggacagctgcagcatggacaggggctgggacctggccccgtctgaaccggtgcacagttatcggccgcggtcggggcggcgtcagggggctactgcacgcaaggttcagaatgccgctggaccacgcgaagcgggc

SEQ ID NO: 24513 - DNA, 369 bp, Zea mays
  Clone ID: LIB3152-054-P1-K1-B11
aattagctcatcgactccagattggagaactcgacaccatgaaggtgctgatcgttgcccttgctctcctggcgctcgctgcgagcgccgcctccagtacaagcggcggctgtggctgccagacaccaccgtttcatctaccgcctccgttctatatgccgcctccgttctatctgccgccgcagcagcagccgcagccatggcaataccccactcaaccaccgcagctaagcccgtgccagcagttcggatcctgcggcgtcggcagcgtcggcagcccgttcctgggccagtgcgtcgagttcctgaggcaccagtgcagcccggcggcgacgccctacggctcgccacagtgccaggcgctgcagc

SEQ ID NO: 24514 - DNA, 351 bp, Zea mays
  Clone ID: LIB3152-054-P1-K1-B12
agcattcagaaacacaccaagcgaatcgcactagcaacgacctaacaacaatggctaccaagatattagccctccttgcgcttcttgccctttttgtgagcgcaacaaatgcgttcattattccacaatgctcacttgctcctagtgccattattccacagttcctcccaccagttacttcaatgggcttcgaacacctagctgtgcaagccaacatgcaacaacaagcgcttgcggcgagcgtcttacaacaaccaattgcccaattgcaacaacaatccttgccacatctaacaatacaagccatcacaacgcaacagcaacaacagttcctaccagcactgagccacc

SEQ ID NO: 24515 - DNA, 346 bp, Zea mays
  Clone ID: LIB3152-054-P1-K1-B2
agaccaactagcatcatacaaagcacaattgtgtgccaccaatggcagccaaaacatgaagcttccatatgctcctaggactatctgcaagcgctgctaccgtagccatattgccacaatgctcacaagctcctatagatagatttgttgctgcatacctgtgaccagccgagtctccagtctgtgaaaacccaattcttcaaccctacaggatccaacaggccatcgcagcaggcatcttacctttatgacgcttgttcctccaacacccgagagtcctattacagcacttacctttggcgcattcgttggcgcaatagcataaagcacaacaactacagcaact

SEQ ID NO: 24516 - DNA, 370 bp, Zea mays
  Clone ID: LIB3152-054-P1-K1-B4
aaagtggaatccagtagcaacaatagagcaacaatggcgaccaagatattttccctccttatgctccttgctctttctgcatgtgttgctaacgcgacaattttccctcaatgctcacaagctcctatagcttcccttcttcccccataccttccatcaatgatagcttcagtatgtgaaaacccagctcttcaaccctataggctccaacaagcaatcgcagcaagcaacatacctttatcacccttgtttcaacaatcgccagccctatctttggtgcagtcattggtacaaaccatcagggcacagcagctgcagcaactcgtgctacctgtgatcaaccaagtagctctggcaaaccttttctcct

SEQ ID NO: 24517 - DNA, 359 bp, Zea mays
  Clone ID: LIB3152-054-P1-K1-B5
tgagcattcaaaaacacaccaagcttttcgcactagcaacaacctaacaacaatggctaccaagatattatccctccttgcgcttcttgcgctttttgcgagcgcaacaaatgcgtccattattccacaatgctcacttgctcctagttccattattccacagttcctcccaccagttacttcaatggccttcgaacacccagctgtgcaagcctataggctacaacaagcgattgcggcgagcgtcttacaacaaccaattgcccaattgcaacaacaatccttggcacatctaacaatacaaaccatcgcaacgcaacagcaacaacagttcctaccaacactgagccacctagcca

SEQ ID NO: 24518 - DNA, 230 bp, Zea mays
  unsure at all n locations
  Clone ID: LIB3152-054-P1-K1-B6
tgagcattcanaatcacaccaagtttatttcactagcaacaacctaacaacaggggcggcttttatattatccctccttgctctacttgcgctttttgcgagcgcaacaaatgcgtacattatttcacaatgcttacttgttcctagttccattattctacagaatctccctccatttaacatattggttttctaacacttttctttgcatccctttttttctacaacca

SEQ ID NO: 24519 - DNA, 345 bp, Zea mays
  Clone ID: LIB3152-054-P1-K1-B7
gaggccatccaagcaagcatcttactgtcattagcattaaccctccaacaaccatatgctctattgcaacagccatccttagtgcatctgtatctccaaagaatcgcggcacaacaactacaacaacagttgctaccaacaatcaatcaagtagttgcagcgaaccttgctgcttacctccagcaacaacagtttcttccattcaatcaactagatggggtgaaccctgctatctacttgcaggcacaacagctactaccatttaaccaacttgtcgggagcccttatgccttcttactgcaacaacagcttctaccattccatcttgcagctgtggcaaacatt

SEQ ID NO: 24520 - DNA, 136 bp, Zea mays
  Clone ID: LIB3152-054-P1-K1-B8
ggctggcaccattttacaagtgttttgattgctgcaatacaaccaacttggtgggacaaatttaggagagttctaccaacagcgcattattgatggggccctatttcggatcaattatgacttatagttcagtaac

SEQ ID NO: 24521 - DNA, 373 bp, Zea mays
  Clone ID: LIB3152-054-P1-K1-B9
tttgagcattcagaaacacaccatgttgaagctacctagcaacgacttaacaacagtggctaccaagatattagccctccttgcgcttcttgccctttttgtgagcgcaacaaatgcgttcattattccacaatgctcacttgctcctagtgccattataccacagttcctccgaccagttacttcaatgggcttcgaacacctagctgtgcaagcctacaggctacaacaagcgcttgcggcgagcgtcttacaacaaccaattaaccaattgcaacaacaatccttggcacatctaaccatacaaaccatcgcaacacaacagcaacaacagtttctatcagtactgagccaactagatgtggtgaaccct

SEQ ID NO: 24522 - DNA, 322 bp, Zea mays
  Clone ID: LIB3152-054-P1-K1-C1
attgagaccaacaagcaacatagaatgttttatccagtagcaacaatagagcaacagtggcgaccaagatattttccctccttatgctccttgctctttctgcatgcgttgctaacgcgacaatttttcctcaatgctcacaagctcctatagcttcccttcttcccccataccttccatcaatgatagcttcagtatgtgaaaacccagctcttcaaccctataggctccaacaagcaatcgcaacatgcaacatacctctatcaccctagtttcaacaatcgccagccctatctttggtgcagacattggtacaaaccat

SEQ ID NO: 24523 - DNA, 319 bp, Zea mays
  Clone ID: LIB3152-054-P1-K1-C10
gcactcatgcatcacaaaacatccttctatcagtaccatcaatcatcattcatgttagtagtataggcaccaaatcaaatctgcaacatcaattatctaactccaaaaaccatgaagctggtgcttgtggttcttgctttcattgctttagtatcaagtgtttcttgtacacagacaggcggctgcagctgtggtcaacaacaaagccatgagcagcaacatcatccacaacaacatcatccacaaaaacaacaacatcaaccaccaccacaacatcaccagcagcagcaacaccaacaacaacaagttcacatgcaac

SEQ ID NO: 24524 - DNA, 367 bp, Zea mays
  Clone ID: LIB3152-054-P1-K1-C11
cagaaacacaccaagcgaagcgcactagcaacaacctaacaacaatggctaccaagatattagccctccttgcgcttcttgcccttttagtgagcgcaacaaatgcgttcattattccacagtgctcacttgctcctagtgccattattccacagttcctcccaccagttacttcaatgggcttcgaacatccagccgtgcaagcctacaggctacaactagcgcttgcggcgagcgtcttacaacaaccaattgcccaattgcaacaacaatccttggcacatctaaacctacaaaccatcgcaacgcaacagcaacaacagtttctgccatcactgagccacctagccgtggtgaaccctgtcgc

SEQ ID NO: 24525 - DNA, 352 bp, Zea mays
  Clone ID: LIB3152-054-P1-K1-C12
attttgagcattcagaaacacaccatgcgaagcgcactagcaacgacctaacaacaatggctaccaagatattagccctccttgcgcttcttgccctttttgtgagcgcaacaaatgcgttcattattccacaatgctcacttgctcctagtgccattattccacagttcctcccaccagttacttcaatgggcttcgaacacctagctgtgcaagccaacatgcaacaacaagcgcttgcggcgagcgtcttacaacaaccaattgcccaattgcaacaacaatccttgccacatctaacaatacaagccatcacaactcagcagcatcaacagttcctaccagcactgag

SEQ ID NO: 24526 - DNA, 320 bp, Zea mays
  Clone ID: LIB3152-054-P1-K1-C2
cccacgcgtccgcagaaacacaccttgctatagcgcactagcaacaacctaacaacaatggctaccaagatattatccctccttgcgcttcttgcgctttttgcgagcgcaacaaatgcgtccattattccacaatgctcacttgctcctagttccattattccacagttcctcccaccagttacttcaatggccttcgaacacccagctgtgcaagcctataggctacaacaagcgattgctgcgagcgtcttacaacaaccaattgcccaattgcaacaacaatccttggcacatctaacattacaaaccatcgcaac

SEQ ID NO: 24527 - DNA, 372 bp, Zea mays
  Clone ID: LIB3152-054-P1-K1-C3
attgagaccaactagcaacatagaaagctcaatagtgtaccaacaatggcagccaaaatattttgcctccttatgctccttggtctttctgcaagtgctgctacggcgaccattttcccgcaatgctcgcaagctcctatagcttcccttcttcccccgtacctctcaccagcggtgtcttcggtatgtgaaaacccaattcttcaaccctacaggatccaacaggcaatcgcagctggcatcttacctttatcacccttgttcctccaacaatcatcagccctattacaacagttacctttggtgcatttattggcacaaaacattagggcacaacaactacaacaacttgtgctagcaaaccttgctgcc

SEQ ID NO: 24528 - DNA, 371 bp, Zea mays
  unsure at all n locations
  Clone ID: LIB3152-054-P1-K1-C4
ctatactatactctaggaagcaaggtcactcaccgccatggcagccaagatgcttgcattgttcgctctcctagctctttgtgcaagcgccactagtgcgacccatattccagggcacttgccaccagtcatgccattgggtaccatgaacccatgcatgcagtactgcatgatgcaacaggggcttgccagcttgatggcgtgtccgtccctgatgctgcagcaactgttggccttaccgcttcagacgatgccagtgatgatgccacagatgatgacgcctaacatgatgtcaccattgatgatgccgagcatgatgtcaccaatggncttgccgagcatgatgtcccaaatgacgatgccacaatgtc

SEQ ID NO: 24529 - DNA, 372 bp, Zea mays
  Clone ID: LIB3152-054-P1-K1-C5
attttgagcattcagaaacacaccaagcgaagcacattagcaacaacctaacaacaatggctaccaagatattatccctccttgcgcttcttgcgctttttgcgagcgcaacaaatgcgttcattattccacaatgctcacttgctccaagttccattattacacagttcctcccaccagttacttcaatgggcttcgaacacccagctgtgcaagcctataggctacaacaagcaattgcggcgagcgtcttacaacaaccaatttcccagttgcaacaacaatccttggcacatctaacaatacaaaccatcgcaacgcaacagcaacaacaattcctaccagcactgagccacctagccatggtgaacc

SEQ ID NO: 24530 - DNA, 321 bp, Zea mays
  Clone ID: LIB3152-054-P1-K1-C6
aaagtggaatccagtagcaacaatatagcaacaatggcgaccaagatattttccctccttatgctccttgctctttctgcatgtgttgctaacgcgacaattttccctcaatgctcacaagctcctatagcttcccttcttcccccataccttccatcaatgatagcttcagtatgtgaaaacccagctcttcaaccctataggctccaacaagcaatcgcagcaagcaacatacctttatcacccttgtttcaacaatcgccagccctatctttggtgcagtcattggtacaaaccatcagggcacagcagctgcagcaa

SEQ ID NO: 24531 - DNA, 313 bp, Zea mays
  Clone ID: LIB3152-054-P1-K1-C8
atcgagaccaactagcaacatagttagcacaatacagtaccaccaatggcgggggaaatattttgcctccttatgctcctagctctttctgcaagtgctgctacagcgaccattttcccacaatgctcacaagctcctatatctttcctccttcccccgtacctctcaccagcggtgtacttccgtttgtgaaaacccaaatctttaaccctatatgatccatcaagcaatctcatcttgcatctaacctttatcacccatttttctccaacaaacatcagtcctataacagtatttccctttggagcattta

SEQ ID NO: 24532 - DNA, 312 bp, Zea mays
  Clone ID: LIB3152-054-P1-K1-C9
attttcagcattcagaaacacaccatgcgaagcgcactagcaacaacctaacaacaatggctaccaagatattagccctccttgcgcttcttgcccttttagtgagcgcaacaaatgcgttcattattccacagtgctcacttgctcctagtgccattattccacagttcctcccaccagttacttcaatgggcttcgaacatccagccgtgcaagcctacaggctacaactagcgcttgcggcgagcgtcttacaacaaccaattgcccaattgcaacaacaatccttggcacatctaaacctacaaacca

SEQ ID NO: 24533 - DNA, 383 bp, Zea mays
  Clone ID: LIB3152-054-P1-K1-D1
cccgggcggcccaacccgtccggcaacatagaaagcacaatagtgttccaacaatggcagctaaaatattttgcctccttatgctccttggtctttctgcaagtgctgctacggcgaccattttcccacaatgctcacaagctcctatagcttcccttcttcccccgtacctctcaccaacggtgtcttcggtatgtgaaaacccaattcttcaaccctacaggatccaacaggcaatcgcagctggcatcttacctttatcacccttgttcctccaacaatcatcagccctattacagcagttacctttggtgcatttattggcacaaaacatcagggcacaacaactacaacaacttgtgctagcaaaccttgctgcctac

SEQ ID NO: 24534 - DNA, 191 bp, Zea mays
  Clone ID: LIB3152-054-P1-K1-D10
gagcattcagaaacacaccatgtctttgcacattagcaacaacctaacaacaatggctaccaagatattatccctccttgcgcttcttgcgctttttgcgagcgcaacaaatgcgttcattattccacaatgctcacttgctccaagtttcattattacacagttcctcccacctgtttcttcaatgggct

SEQ ID NO: 24535 - DNA, 314 bp, Zea mays
  Clone ID: LIB3152-054-P1-K1-D11
gttcgtagcgaaggcagcatcagcttctactgttggatttgcaatattcattattgggttcttgactcagcttgttaccacctttgggttcccttattcggctgactacaaaaagttgtaccggacattgtggtctttatttcctcctgatttatttgccaaagccctcaacattctaggcaaggcaacagccactcctgaggataaaggtgttagctggaatcagcgtggggagtgcccatcttatgagactgactgtgtcattactattgatgatttatataagtggctcatattcacatctttcttgtggt

SEQ ID NO: 24536 - DNA, 369 bp, Zea mays
  Clone ID: LIB3152-054-P1-K1-D12
tacaggaccaggtcaaaatcatcggggagggcattgatggaataaagaaggaaagacaggcagtaagatctaagattaaggtcctggaggatgagctaaaacttgttgatgctgagattggattgcttcaagaagatttagatgcagcaactgccagaaaggataaggcatatgaatcgttgcaagaattgagagcagtgcgtgatgcaaaaaacgcatcctccatgcataaccgtacagttttaaccagagctagggattattcttcaaggaatatgctgacagaattgcaagagctccacaaaactgaggtcgacaagttcatgacccaatggtgtgaaagtaaggcctttaagagaggactacgag

SEQ ID NO: 24537 - DNA, 152 bp, Zea mays
  Clone ID: LIB3152-054-P1-K1-D2
attagctttatctactccagagcgcagaataacccgatcgacaccatgagggtgtggctcgttgccctcgctctcctggctctcgctgcgagcgccacctccacgcatacaagcggcggctgctgttgccagccaccgtcgtcggttcatct

SEQ ID NO: 24538 - DNA, 330 bp, Zea mays
  unsure at all n locations
  Clone ID: LIB3152-054-P1-K1-D3
cgcggacgcgtgggcggaccgcgtgggtagtatagtggaatccagtagcaacaatagagcaacaatggcgaccaagatattttccctccttatgctccttgctctntctgcatgtgttgctaacgcgacaattttccctcaatgctcacaagctcctatagcttcccttcttcccccataccttccatcaatgatagcttcagtatgtgaaaacccagctcttcaaccctatatgctccaacaagcaatcgcagcaagcaacatacctttatcacccttgtttcaacaatcgccagccctatctttggtgcagtcattggtacaaaccat

SEQ ID NO: 24539 - DNA, 334 bp, Zea mays
  Clone ID: LIB3152-054-P1-K1-D4
ctagcaacatagaaagcacaatagtgtaccaacaatggcagccaaaatattttgcctccttatgctccttggtctttctgcaagtgctgctacggcgaccattttcccacaatgctcacaagctcctatagcttcccttcttcccccgtacctctcaccagcggtgtcttcggtatgtgaaaacccaattcttcaaccctataggatccaacaggcaatcgcagctggcatcttacctttatcacccttgttcctccaacaatcatcagccctattacagcagttacctttggtgcatttattggcacaaaacatcatggcacaacaactacaa

SEQ ID NO: 24540 - DNA, 321 bp, Zea mays
  Clone ID: LIB3152-054-P1-K1-D5
tagcaacatacatagtgaagtacactagcaacatcttagcaccaatgggagccaagatttttgccctccttgccctccttgctctttcagcaagcgctgctacctcgacttttattccacaatgctcacaacaatacctctctccggcgacagccgtgggatttcaatacccaactatacaatcctacatggtacaagaggccatccaagcaagcatcttacggtcattagcattaaccctccaacaaccatatgctctattgcaacagccatccttagtgcatctgtatctccaaagaatcgcggcacatcaactacaac

SEQ ID NO: 24541 - DNA, 294 bp, Zea mays
  unsure at all n locations
  Clone ID: LIB3152-054-P1-K1-D6
caaatgcgttcattattccacagtgctcacttgctcctagtgccattattccacaggtcctcccaccagttacttcaatgggcttcgaacatccagccgtgcaagcctacaggctacaactagcgcttgcggcgagcgtcttacaacaaccaattgcccaattgcaacaacaatccttggcacatctaaacctacaaaccatcgcagcgcatcaatatcaacagtttctgccatcactgaaccatctagccgnggtgaaccctgtcgcctacttgtaacagcagctacttgcat

SEQ ID NO: 24542 - DNA, 291 bp, Zea mays
  Clone ID: LIB3152-054-P1-K1-D7
atgaatcccgagtacgactaccttttcaaacttctgcttattggtgattctggtgttgggaaatcatgcttgcttctcagatttgcagacgattcttatttggacagctatatcagcacaattggggttgatttcaaaattcgcacagtggagcaagatgggaagaccataaaacttcaaatttgggatactgctgggcaagagcgcttcaagacaatcactagcagctcctaccgcggagctcatggaatcattattgtatatgacgtgacagaccaagaaagccttaat

SEQ ID NO: 24543 - DNA, 367 bp, Zea mays
  Clone ID: LIB3152-054-P1-K1-D8
ctgggtcttcagaccattagctttatctactccagagcgcagaagaacccgatcgacaccatgagggtgttgctcgttgccctcgctctcctggctctcgctgcgagcgccacctccacgcatacaagcggcggctgcggctgccagccaccgccgccggttcatctaccgccgccggtgcatctgccacctccggttcacctgccacctccggtgcatctcccaccgccggtccacctgccgccgccggtccacctgccaccgccggtccatgtgccgccgccggttcatctgccgtcgccaccatgccactaccctacttaaccgccccggtcttagactgatccgcagccacacccatgcccgt

SEQ ID NO: 24544 - DNA, 179 bp, Zea mays
  Clone ID: LIB3152-054-P1-K1-D9
cggacgcgtgggtgggtcttcttatcattagctatatctactccagagcgcaggggaaccctatcgacaccatgagggtgttgctcgctgccctctctctcctggatctcgatttgagcgccacctacacgcatacaagcttttgttgcggctgccagctttcgtcgacagtttttttt

SEQ ID NO: 24545 - DNA, 369 bp, Zea mays
  Clone ID: LIB3152-054-P1-K1-E1
ctcgaattccccattctataaattctagttaaacttaattcgtaagatcaatcataattctcgagttgcaaaccatggacatggctttggcgtctaaagcctcccctccgccatggaatgccaccgccgccgagcagccaattccaaagcgtgacaaagccgctgcaaatgattcaacatacctcaatcctcaagctcatgatagtgttcttggaatcattctgggaggtggtgctgggactagattgtaccccttgacaaagaagcgtgccaagcctgcagtgccattgggtgccaactatagactgattgatattcctgtcagcaattgtctcaacagcaacatatccaagatctatgtgctaacgc

SEQ ID NO: 24546 - DNA, 369 bp, Zea mays
  Clone ID: LIB3152-054-P1-K1-E10
cccggatccgagctaggcacctgctcgaccacccgcctcctgccggtcaccgggacctagcatcgccgggcggcggcgggggaggggaaggtaggcgatgaggaaacgtgagcgggagaatccgtgcgggatctgcgggcactaccacaagtacgaggagggggaggtatgcggggtgtgcggccaccgctggaaaccgtcggacggggagggcgccccgtctaggctcgagtccgtctttcccacagaggtgctcaaggactttctcttacttgggagctacgacaacgcctgacgcttcgaggtcctcaggacgctcagtatctcccacattcttaatactgggcctgattgccacaatctgtacaa

SEQ ID NO: 24547 - DNA, 370 bp, Zea mays
  Clone ID: LIB3152-054-P1-K1-E11
attgataccaactagcaacatacatagtgaagtacactagcaacatcttagcaccaatgggagccaagatttttgccctccttgccctccttgctctttcagcaagcgctgctacctcgacttttattccacaatgctcacaacaatacctctctccggcgacagccgtgggatttcaatacccaactatacaatcctacatggtacaagaggccatccaagcaagcatcttacggtcattagcattaaccctccaacaaccatatgctctattgcaacagccatccttagtgcatctgtatctccaaagaatcgcggcacaacaactacaacaacagttgctaccaacaatcaatcaagtagttgcagg

SEQ ID NO: 24548 - DNA, 283 bp, Zea mays
  Clone ID: LIB3152-054-P1-K1-E12
gtctctacccccatctgtagttcgtactgcggccaagcagagcccggggagacgatcgagacgatatgtgcgggggagcgatccttgccgaactcatcccagcacgggtgcaccggccgctgaccgccgccacgctctgggcggcggccctgagtgggaccactaccgtcggcaagtggaaggccgatgcagccgccgttaccgtcgacgacgactactaagagttctgggccgagtttcagcttttcgactacgattactagtgcgaggccgtgttccagct

SEQ ID NO: 24549 - DNA, 393 bp, Zea mays
  Clone ID: LIB3152-054-P1-K1-E2
cccgggcggaccaaggcgtccggggcacaccacctgcagcaactcgtgcttcctgggatcaaccaagtagctctggcaggcctttctccctactctcagcaacaacaatttcttccattcaaccaactgtctacattgaaccgtgctgcttatttgcagcaacaactattaccattcagccagctagctactgcctactctcagcaacaacaacttcttccatttaaccaattggccgcactgaaccccgctgcttatttgcagcagcaaatactactaccatttagccagctagctgcagcaagccgtgcttccttcttgacacagcaacagttgctgcctttctaccagcagattgcggctaaccccgcaacccttttacaactacaacaa

SEQ ID NO: 24550 - DNA, 289 bp, Zea mays
  unsure at all n locations
  Clone ID: LIB3152-054-P1-K1-E3
cgtncggcacaatagtgtaccaacaacggcttcctaaatatancgcctccttatgctcggtggtctttcttcaagagctgctaccgcaaccattttcccgaaatgctcgcaagctcctatagcttcccgccttccaccgtacctctcaccagcggcgatttaggcatgtgaaaacccaattcttcaaccctacaggatccaacacgcaatcacagttggcatcttacctttatcatccttgttccttcaacaataatcagccctattacatcagttacctttggtgcat

SEQ ID NO: 24551 - DNA, 368 bp, Zea mays
  Clone ID: LIB3152-054-P1-K1-E4
ggagaccaagatattttccctccttatgctccttgctctttctacatgtgttgctaacgcgacaattttccctcaatgctcacaagctcctatagcttccctttttcccccataccttccatcaattatagcttcagtatgtgaaaacccagctcttcaaccatataggcttcaacaagcaatcgcagcaagcaacatacctttatcgcccttgttgtgtcaacaatcgccagccctatctttggtgcagtcattggtacaaaccatcagggcacaacagctgcagcaactcgtgctacctgtgatcaaccaagtagctctggcaaacctttctccctactctccgcaacaacaatttcttccattca

SEQ ID NO: 24552 - DNA, 366 bp, Zea mays
  unsure at all n locations
  Clone ID: LIB3152-054-P1-K1-E6
acccacgccgtccgtgaacacctgccgcctactntgcaacattcttttgcttgcatcnaaacccacttgcgtgtggcaaacgtagttgcaaaccagccacaacaacagctgcaacagtttctgccagcgctcagtcaactagccatggtgaaccctgccgcctacctacaacagcaacaactgctttcatctagcccgctcgctgtggccaatgcacctacatacctgcaacaacaattgttgcaacagattgtaccagctctgactcagctagttgtggcaaaccctgctgcctacttgcaacagctgcttccattcaaccaactgactatgtcgaactctgctgtgnacctacaacagcgacaa

SEQ ID NO: 24553 - DNA, 363 bp, Zea mays
  Clone ID: LIB3152-054-P1-K1-E7
gcaacatagaaagcacaatagtgtatcaacaatggcagccaaaatattttgcctgcttatgctccttggtctttctgcaagtgctgctacggcgaccattttcccgaaatgctcgcaagctcctatagcttcccttcttcccccgtacctctcaccagcggtgtcttcggtatgtgaaaacccaattcttcaaccctacaggatccaacaggcaatcacagctggcatcttacctttatcacccttgttcctccaacaatcatcagccctattacatcagttacctttggtgcatttattggcacaaaacatcagggcacaacaactacaacaacttgtgctagcaaaccttgctgcctactc

SEQ ID NO: 24554 - DNA, 369 bp, Zea mays
  Clone ID: LIB3152-054-P1-K1-E8
caacaagcaacatagaaagtggaattcagtagcaacaatagagcaacaatggcgaccaagatattttccctccttatgctccttgctctttctgcatgtgttgctaacgcgacaattttccctcaatgctcacaagctcctatagcttcccttcttcccccataccttccatcaatgatagcttcagtatgtgaaaacccagctcttcaaccctataggctccaacaagcaatcgcagcaagcaacatacctttatcacccttgtttcaacaatcgccagccctatctttggtgcagtcattggtacaaaccatcagggcacagcagctgcagcaactcgtgctacctgtgatcaaccaagtagctctg

SEQ ID NO: 24555 - DNA, 369 bp, Zea mays
  Clone ID: LIB3152-054-P1-K1-E9
gaaagcacaatagtgtaccaacaatggcagccaaaatattttgcttccttatgctccttggtctttctgcaagtgctgctaccgcaaccattttcccacaatgctcacaagctcctatagcttcctttcttcccccatacctctcaccagcggtgtcttcagtatgtgaaaacccaattcttcaaccctacaggatccaacaggcaatcgcagcaggcatcttacctttatcacccttgttcctccaacaaccgtcagccctattacagcagttacctttggtgcatttgttggcacaaaacatcaaggcacaacaactacaacaacttgtgctaggaaaccttgctgcctactctcagcaacagcagt

SEQ ID NO: 24556 - DNA, 372 bp, Zea mays
  Clone ID: LIB3152-054-P1-K1-F1
gaaacacaccaagcgaagcacattatcatcaacctaacaacaatggctaccaagatattatccctccttgcgcttcttgcgctttttgcgagcgcaacaaatgcgttcattattccacaatgctcacttgctccaagttccattattacacagttcctcccaccagttacttcaatgggcttcgaacacccagctgtgcaagcctataggctacaacaagcaattgcggcgagcgtcttacaacaaccaatttcccagttgcaacaacaatccttggcacatctaacaatacaaaccatcgcaacgcaacagcaacaacaattcctaccagcactgagccacctagccatggtgaaccctgccgcctacttg

SEQ ID NO: 24557 - DNA, 369 bp, Zea mays
  Clone ID: LIB3152-054-P1-K1-F10
gcaacatagaaagcacaatagtgttctcaacaatggcagccaaaatattttgccgccttatgctccttggtctttctgcaagtgctgctacggcgaccattttcccgcaatgctcgcaagctcctatagcttcccttcttcccccgtacctctcaccagcggtgtcttcggtatgtgaaaacccaattcttcaaccctacaggatccaacaggcaatcgcagctggcatcttacctttatcacccttgttcctccaacaatcatcagccctattacaacagttacctttggtgcatttattggcacaaaacatcagggcacaacaactacaacaacttgtgctagcaaaccttgctgcctactctcagc

SEQ ID NO: 24558 - DNA, 359 bp, Zea mays
  Clone ID: LIB3152-054-P1-K1-F11
gcacacacacacaaccagatctccttcaaatccacccgtcggcacctccgcttgaagatgcagatctttgtgaaaaccctgaccggcaagactatcaccctcgaggtggagtcgtctgacaccattgacaacgttaaggccaagatccaggacaaggagggcatccccccagaccagcagcggctcatcttcgctggcaaacagcttgaggacgggcgcacgcttgctgactacaacatccagaaggagagcaccctccaccttgtgctccgcctcaggggaggcatgcagatctttgtgaaaaccctgaccggcaagactatcaccctcgaggtggagtcctctgacaccattgacaa

SEQ ID NO: 24559 - DNA, 320 bp, Zea mays
  Clone ID: LIB3152-054-P1-K1-F12
gagaccaactagcaacatatatagttcaatagtgtaccaacaatggcagccaaaatattttgcttccttatgctccttggtctttctgcaagtgctgctaccgcaaccattttcccacaatgctcacaagctcctatagcttcctttcttcccccatacctctcaccagcggtgtcttcagtatgtgaaaacccaattcttcaaccctacaggatccaacaggcaatcgcagcaggcatcttacctttatcacccttgttcctccaacaaccgtcagccctattacagcagttacctttggtgcatttgttggcacaaaa

SEQ ID NO: 24560 - DNA, 399 bp, Zea mays
  unsure at all n locations
  Clone ID: LIB3152-054-P1-K1-F2
ggtccgacccacgcgtnccgcaacctagcaacatacgaaagcacaatatttttaccaacaatgcgcagccaaaatatgtgtgcctccttatgctcgcttggtatttcntgcaagtgcctgctacgcgcgaccattnttcccgcaatgctcacaagctcctatagcttcccttcttcccccgtacctctcaccagcggtgtcttcggtatgtgaaaacccaattcttcaaccctacaggatccaacaggcaatcgcagctggcatcttacctttatcacccttgttcctccaacaatcatcagccctattacagcagttacctttggtgcatttattggcacaaaacatcagggcacaacaactacaacaacttgtgctagcaaaccttgctgcctactc

SEQ ID NO: 24561 - DNA, 312 bp, Zea mays
  Clone ID: LIB3152-054-P1-K1-F3
caaagcggcagtgcgtatagaggatcgttgatacagaacagcatgaagatggtcgtcggtctcgtcgtgtgcctggctctgtcagctgccagcgcctctgcaatgcagatgccctgcccctgcgcggggctgcagggctagtacggcgctggcgccggcctgacgacgatgatgggcgccggcgggctgtacccctacgcggagtacctgatgcaaccggattgcagcccgctggcggcggcgccctactacgccgggtgtgggcagacgagcgccatgtaccaaccgctccggcgacagtgctgccagcat

SEQ ID NO: 24562 - DNA, 325 bp, Zea mays
  unsure at all n locations
  Clone ID: LIB3152-054-P1-K1-F4
cgtncgattttgagcattcataaacacactatgctttagcacattagcaacaacctaacagcagtggctaccaagatattatccctccttgcgcttcttgcgctttttgcgagcgcaacaaatgcgttcattattccacaatgctcacttgctccaagttccattattacacagttcctcccaccagttacttcaatgggcttcgaacacccagctttgcaagcctataggctacaacaagcaattgcggcgagctgtcttacaacaaccaattttccagttgcaacaacaatccttggcacatctaacaatacaaaccattgca

SEQ ID NO: 24563 - DNA, 372 bp, Zea mays
  Clone ID: LIB3152-054-P1-K1-F5
gtcagcctagcaattagctcatcgactctagattggagaactcgacaccatgaaggtgctgatcgttgcccttgctctcctggcgctcgctgcgagcgccgcctccagtacaagcggcggctgtggctgccagacaccaccgtttcatctaccgcctccgttctatatgccgcctccgttctatctgccgccgcagcagcagccgcagccatggcaataccccactcaaccaccgcagctaagcccgtgccagcagttcggatcctgcggcgtcggcagcgtcggcagcccgttcctgggccagtgcgtcgagttcctgaggcaccagtgcagcccggcggcgacgccctacggctcgccacagtgccaggc

SEQ ID NO: 24564 - DNA, 178 bp, Zea mays
  unsure at all n locations
  Clone ID: LIB3152-054-P1-K1-F6
ggccgacccacgcgnncggtggaagcaagagatctcacacggtttctcttacgaggaggagcacaaggtttacgggcgggatattcccttggacggccacatgcacggcgctgacgttgatttggctgccttcggtgattacgcctcgaagactcaagagctcgactagatgactcgc

SEQ ID NO: 24565 - DNA, 317 bp, Zea mays
  Clone ID: LIB3152-054-P1-K1-F7
actagcaacatagaaagcacattattgtaccaacaatggcagccaaaatattgggcttccttatgctccttggtctttctgcaagtgctgctaccgcaaccattttcccacaatgctcacaagctcctatagcttcctttcttcccccatacctctcaccagcggtgtcttcagtatgtgaaaacccaattcttcaaccctacaggatccaacatgcaatcgcagcaggcatcttacctttatcacccttgttcctccaacaaccgtcagccctattacagcagttacctttggtgcatttgttggcacaaaaacat

SEQ ID NO: 24566 - DNA, 354 bp, Zea mays
  Clone ID: LIB3152-054-P1-K1-F8
agcgcactagcaacaacctaacatctatggctaccaagatattagccctccttgcgcttcttgcccttttagtgagcgcaacaaatgcgttcattattccacagtgctcacttgctcctagtgccattataccacagttcctcccaccagttacttcaatgggcttcgaacatccagccgtgcaagcctacaggctacaactagcgcttgcggtgagcgtcttacaacaaccaattgcccaattgcaacaacaatccttggcacatctaaacctacaaaccatcgtatcgcatcagcaacaacagtttctgacattactgaaccacctagccgtggtgaaccctgtagcctact

SEQ ID NO: 24567 - DNA, 369 bp, Zea mays
  Clone ID: LIB3152-054-P1-K1-F9
ttgagaccaacatgtcaacatatatattggaatacagtagcaacaatagagcaacaatggcggccaagatattttccatccttatgctccttgctctttctgcatgtgttgctaacgcgaccatttttcctcaatactcacaagctcctatagctgcccttcttcccccataccttccatcaatgaccgcttcagtatgtgaaaacccagcccttcaaccctacaggctccaacaagcaatcgcaacaagcaacttacctttatcacccctgttctttcaacaatcgccagccctatctttggtgcagtcattggtacaaaccatcagggcacaacagctgcagcaactcgtgctaccagtgatcagcc

SEQ ID NO: 24568 - DNA, 322 bp, Zea mays
  Clone ID: LIB3152-054-P1-K1-G1
tgagcattcataaacacaccaagcgtagtgcactagcaacgacctaacaacaatggctaccaagatattagccctccttgcgcttcttgccctttttgtgagcgcaacaaatgcgttcattattccacaatgctcacttgctcctagtgccattattccacagttcctcccaccagttacttcaatgggcttcgaacacctagctgtgcaagccaacatgcaacaacaagcgcttgcggcgagcgtcttacaacaaccaattgcccaattgcaacaacaatccttgccacatctaacaatacaagccatcacaacgcaacag

SEQ ID NO: 24569 - DNA, 372 bp, Zea mays
  Clone ID: LIB3152-054-P1-K1-G10
gaaacacaccaagcgaagcgctctatcaacaacctaacaacaatggctaccaagatattagccctccttgcgcttcttgcccttttagtgagcgcaacaaatgcgttcattattccacagtgctcacttgctcctagtgccattattccacagttcctcccaccagttacttcaatgggcttcgaacatccagccgtgcaagcctacaggctacaactagcgcttgcggcgagcgtcttacaacaaccaattgcccaattgcaacaacaatccttggcacatctaaacctacaaaccatcgcaacgcaacagcaacaacagtttctgccatcactgagccacctagccggggtgaaccctgtcgcctacttg

SEQ ID NO: 24570 - DNA, 365 bp, Zea mays
  unsure at all n locations
  Clone ID: LIB3152-054-P1-K1-G11
attttgagcattcagaaacactcctagcgaagcacattagcaacaacctaacaacaatggctaccaagatattatccctccttgcgcttcttgcgctttttgcgagcgcaacaaatgcgttcattattccacaatgctcacttgctccaagttccattattacacagttcctcccaccagttacttcaatgggcttcgaacacccagctgtgcaagcctataggctacaacaagcaattgcggcgagcgtcttacaacaaccaatttcccagttgcaacaacaatccttggcacatctaacaatacaaaccatcgcaacgcaacagcaacaacaattnctaccagcactgagccacctagccatg

SEQ ID NO: 24571 - DNA, 372 bp, Zea mays
  Clone ID: LIB3152-054-P1-K1-G12
tgagcattcagaaacacaccatgctaagcgcactagcaacaacctaacaacaatggctaccaagatattatccctccttgcgcttcttgcgctttttgcgagcgcaacaaatgcgtccattattccacaatgctcacttgctcctagttccattattccacagttcctcccaccagttacttcaatggccttcgaacacccagctgtgcaagcctataggctacaacaagcgattgcggcgagcgtcttacaacaaccaattgcccaattgcaacaacaatccttggcacatctaacaatacaaaccatcgcaacgcaacagcaacaacagttcctaccagcactgagccacctagccatggtgaaccctgt

SEQ ID NO: 24572 - DNA, 373 bp, Zea mays
  unsure at all n locations
  Clone ID: LIB3152-054-P1-K1-G2
gtgccattataccacagttcctcctaccagttacttcaatgggcttcgaacacctagctgtgcaagcctacaggctacaacaagcgcttgcggcgagcgtcttacaacaaccaattaaccaattgcaacaacaatccttggcacatctaaccatacaaaccatcgcaacacaacagcaacaacagttcctaccagcactgagccaactagatgtggtgaaccctgtcgcctacttgcaacagcaggtgcttgcatccaacccacttgctctggcaaacgtagctgcataccaacaacaacaacaattgcaacagtttctgccagcgctcagtcaactagccatggtgaaccctgccgnctacctacaacagca

SEQ ID NO: 24573 - DNA, 214 bp, Zea mays
  Clone ID: LIB3152-054-P1-K1-G3
ttttaattcgccgtcgccgcctgctctctgctgccgtcgccatggggagaaaggcctgcgagatgctatcgccagatcaagaacaagccataccccaagtgcaggtactgccgtggtgtccctgaccccaagatcaggatctacgaagttggcatgaagagaaagggtgttgatgagttcccctactgtgtgcaccttgtctcttgggagaagg

SEQ ID NO: 24574 - DNA, 369 bp, Zea mays
  Clone ID: LIB3152-054-P1-K1-G4
attgagaccaactagcaacatagatagcacaatagtgtaccaacaatggcagccaaaatattttgcttccttatgctccttggtctttctgcaagtgctgctaccgcaaccattttcccacaatgctcacaagctcctatagcttcctttcttcccccatacctctcaccagcggtgtcttcagtatgtgaaaacccaattcttcaaccctacaggatccaacaggcaatcgcagcaggcatcttacctttatcacccttgttcctccaacaaccgtcagccctattacagcagttacctttggtgcatttgttggcacaaaacatcaaggcacaacaactacaacaacttgtgctaggaaaccttgct

SEQ ID NO: 24575 - DNA, 367 bp, Zea mays
  Clone ID: LIB3152-054-P1-K1-G5
cattcagaaacacaccaagcgaagctcactagcaacaacctaacaacaatggctaccaagatattatccctccttgcgcttcttgcgctttttgcgagcgcaacaaatgcgtccattattccacaatgctcacttgctcctagttccattattccacagttcctcccaccagttacttcaatggccttcgaacacccagctgtgcaagcctataggctacaacaagcgattgcggcgagcgtcttacaacaaccaattgcccaattgcaacaacaatccttggcacatctaacaatacaaaccatcgcaacgcaacagcaacaacagttcctaccagcactgagccacctagccatggtgaaccctg

SEQ ID NO: 24576 - DNA, 324 bp, Zea mays
  Clone ID: LIB3152-054-P1-K1-G6
agctcatccactccagattggagaatgctacaccatgaacgagctgatcggtggccgtgctctcctggagctcgctgcgagcgccgcctccagttcaagcggcggctgcggctgccagacaccaccgtttcatctaccgcctccgttctatatgccgcctccgttctatctgccgccgcagcagcagccgaagccatggcaataccccactcaaccacccgcattgagcccgcgccagctgtttggatcctgcggcgtcggcagctgcagcagcccgctcctgggccactgcgtcgagttcctgaggcaccacgtgtcgcaacg

SEQ ID NO: 24577 - DNA, 270 bp, Zea mays
  unsure at all n locations
  Clone ID: LIB3152-054-P1-K1-G7
agcgcattcacaaacacacctttcttagcgcactaactacaacctaacagcggtggctaccaagatatcatccctccctgcgctctttgcgcattttgcgagcgcaacaaatgcgtccatcannacacaaagctcactagatcctagttccattattccacagcccctcccaccagatactttaatggcctgagaacacccatctgtgcatgtctataggttacaacaatcgattgcggcgagcctctcacaacaaccaattgcccaatt

SEQ ID NO: 24578 - DNA, 317 bp, Zea mays
  Clone ID: LIB3152-054-P1-K1-G9
aacgagctccataaaaagcgtttttcagtgccaacaatacagccacaatggagaccatgatattttcccttcttatgctccgtgctttgtctacatgtgttgctaacgcgacaattttaccttaatgctcacaagcttcgatagcttcccttttttccccatacctttcatcaattatagcttaagtgtgtgaaaacccagctctgtatccatataggctttaacaagcaatcttagcgggcaacatacctttatcgcccttgttgtgtcaacaatcgacagccctatctttggtgcatttattggcacaaaccatc

SEQ ID NO: 24579 - DNA, 372 bp, Zea mays
  Clone ID: LIB3152-054-P1-K1-H1
ggcgtataggaaggacgacaacttctgatagtggtactctgaggttgttgttaacagtgaaatgattgagtactatgacatctctggttgttatatattgaggccatgggcaatggaaatctgggagctaatgaaagaattctttgatgctgaaattaaaaagctgaagctcaaaccatattatttccctttgtttgttaccgagaatgttctacagaaggaaaaggaccacattgagggctttgcacctgaggtagcttgggttactaagtcagggaaatctgacctggaagcacctattgcaatccgccccacaagtgagactgtcatgtatccatacttctccaaatggataagaagccacagagactt

SEQ ID NO: 24580 - DNA, 372 bp, Zea mays
  Clone ID: LIB3152-054-P1-K1-H10
ctatactctaggaagcaaggacaccaccgccatggcagccaagatgcttgcattgttcgctctcctagctctttgtgcaagcgccactagtgcgacccatattccagggcacttgccaccagtcatgccattgggtaccatgaacccatgcatgcagtactgcatgatgcaacaggggcttgccagcttgatggcgtgtccgtccctgatgctgcagcaactgttggccttaccgcttcagacgatgccagtgatgatgccacagatgatgacgcctaacatgatgtcaccattgatgatgccgagcatgatgtcaccaatggtcttgccgagcattgatgtcgcaaatgatgatgccacaatgtcactgcg

SEQ ID NO: 24581 - DNA, 371 bp, Zea mays
  Clone ID: LIB3152-054-P1-K1-H11
attgagaccaactagcaacatagatagcacaatagtgtaccaacaatggcagccaaaatattttgcttccttatgctccttggtctttctgcaagtgttgctaccgcaaccattttcccacaatgctcacaagctcctatagcttcccttcttcccccatacctctcaccagcggtgtcttcaatgtgtgaaaacccaattgttcaaccctacaggatccaacaggcaatcgcaacaggcatcttaccattatcacccttgttcctccaacaaccgtcagccctattacagcagttacctttggtccatttggtggcacaaaacatcagggcacaacaactacaacaacttgtgctatcaaaccttgctgc

SEQ ID NO: 24582 - DNA, 370 bp, Zea mays
  unsure at all n locations
  Clone ID: LIB3152-054-P1-K1-H3
attagctttatctactccagagcgcagattaacccgatcgacaccatgagggtgttgcgtcgttgccctcgctctcctggctctcgctgcgagcgccacctccacgcatacaagcggcggctgcggctgccagccaccgccgccggttcatctaccgccgccggtgcatctgccacctccggttcacctgccacctccggtgcatctcccaccgccggtccacctgccgccgccggtccacctgccaccgccggtccatgtgccgccgccggttcatctgccgccgccaccatgccactaccctactcaaccgccccggcctnagcctcatccccagccacacccatgcccgtgccaacagccgcatcca

SEQ ID NO: 24583 - DNA, 356 bp, Zea mays
  Clone ID: LIB3152-054-P1-K1-H4
cagcattcataaacacaccaagcgtatatcttactagcaacaacctaacaacaatggctgccaagatattagccctccttgcgcttcttgcccttttagtgagcgcaacaaatgcgttcattattccacagtgctcacttgctcctagtgccattattccacagttcctcccaccagttacttcaatgggcttcgaacatccagccgtgcaagcctacaggctacaactagcgcttgcggcgagcgtcttacaacaaccaattgcccaattgcaacaacaatccttggcacatctaaacctacaaaccatcgcaacgcaacagcaacaacaggttctgtcatcactgagccaccta

SEQ ID NO: 24584 - DNA, 347 bp, Zea mays
  Clone ID: LIB3152-054-P1-K1-H6
ggaaggacaggccggaccgacgccacgcgatccggagaccaactagcagcatcgttaagtctcaatcatgttccaactgtggatggctctatgatgtgggcctggctgtgtcagctgccagcgcctctgcaatgcagatgccctgcccctgcgcggggctgcaaggcttgtacggcgctggcgcctgcctgacgacgatgatgggcgccggcgggctgtacccctacacagagtacctgaagcagccgcagtgcaacccggtggcggcggcgccctactacgccgggtgtgggcagacgagcgccatgtaccagccgctccggccacagtgctgccagcagcagatg

SEQ ID NO: 24585 - DNA, 369 bp, Zea mays
  Clone ID: LIB3152-054-P1-K1-H7
caactagcaacatagaaagcacaattttgtaccaacaatggcagccaaaatattttgcctccttatgctccttggtctttctgcaagtgctgctacggcgaccattttcccacaatgctcacaagctcctatagcttcccttcttcccccgtacctctcaccagcggtgtcttcggtatgtgaaaacccaattcttcaaccctataggatccaacaggcaatcgcagctggcatcttacctttatcacccttgttcctccaacaatcatcagccctattacagcagttacctttggtgcatttattggcacaaaacatcagggcacaacaactacaacaacttgtgctagcaaaccttgctgcctactc

SEQ ID NO: 24586 - DNA, 339 bp, Zea mays
  Clone ID: LIB3152-054-P1-K1-H8
acaccaagcgaagcgcactagcaactacctaacaacaatggctaccaagatatgagccctccttgcgcttcttgcccttttagtgagcgcaacaaatgcgttcattattccacagtgctcacttgctcctagtgccattattccacagttcctcccaccagttacttcaatgggcttcgaacatccagccgtgcaagcctactggctacaactagcgcttgcggcgagcgtcttacaacaaccaattgcccaattgcaacaacaatccttggcacatttaaacctacaaaccatcgcaactcaacagcaacaacagtttttgccattactgatccacct

SEQ ID NO: 24587 - DNA, 368 bp, Zea mays
  Clone ID: LIB3152-054-P1-K1-H9
gcgaagcgcactatcaacgacctatcaacaatggctaccaagatattagccctccttgcgcttcttgccctttttgtgagcgcaacaaatgcgttcattattccacaatgctcacttgctcctagtgccattattccacagttcctcccaccagttacttcaatgggcttcgaacacctagctgtgcaagccaacatgcaacaacaagcgcttgcggcgagcgtcttacaacaaccaattgcccaattgcaacaacaatccttgccacatctaacaatacaagccatcacaacgcaacagcaacaacagttcctaccagcactgagccacctagccatggtgaaccctgccgcctacttgcaagagca

SEQ ID NO: 24588 - DNA, 157 bp, Zea mays
  Clone ID: LIB3152-056-P1-K1-A1
cgtccgaaaggggaagggcgaaaaggggatcgtttaacagaacagcatgaaaatggggggcggtctcgtcgtgtgcctggctctgcccagctgccagcgcctttgcaatgcagtgccctgcccctgcgcggagctgaagggcttgtacggcgctggc

SEQ ID NO: 24589 - DNA, 348 bp, Zea mays
  Clone ID: LIB3152-056-P1-K1-A10
caactagcaacatacatagtgaagtacagtagcaacatcttagcaccaatggcagccaagatttttgccctccttgccctccttgctctttcagcaagtgtgctaccgcgactattattccacaatgctcacaacaatacctctctccggtgacagccgcgagatttgaatacccactatacaatcctacaggctacaagaggccatcacagcaagcatcttacggtcgttagcattgactgtccaacaaccatatgccctattgcaacaaccatccttagtgaatctatatctccaaagaatcgcagcacaacaactacaacagcagttgcttccaacaatcaatca

SEQ ID NO: 24590 - DNA, 345 bp, Zea mays
  Clone ID: LIB3152-056-P1-K1-A11
attccacagttcctcccaccagttacttcaatgggcttcgaacatccagccgtgcaagcctacaggctacaactagcgcttgcggcgagcgtcttacaacaccaattgcccaattgcaacaacaatccttggcacatctaaacctacaaaccatcgcaacgcaacagcaacaacagttctgccatcactgagccacctagccgtggtgaaccctgtcgcctacttgcaacagcagctacttgcatccaacccacttgctctggcgaacgtagctgcataccagcaacaacaacgtctgcaacagtttatgccagcgctcagtcaactagccatggtgaaccctgt

SEQ ID NO: 24591 - DNA, 349 bp, Zea mays
  Clone ID: LIB3152-056-P1-K1-A12
gcaacatagaaagtggaatccagtatcaacaatagagcaacaatggcgaccaagatattttccctccttatgctccttgctctttctgcatgtgttgctaaccgacaattttccctcaatgctcacaagctcctatagcttcccttcttcccccataccttccatcaatgatagcttagtatgtgaaaacccagctcttcaaccctataggctccaacaagcaatcgcagcaagcaacatacctttatcacccttgtttcaacaatcgccagccctatctttggtgcagtcattggtacaaaccatcagggcacagcagctgcagcaactcgtgctacctgtgatcaac

SEQ ID NO: 24592 - DNA, 378 bp, Zea mays
  Clone ID: LIB3152-056-P1-K1-A2
cggaactgccgggccgacccacccgttggaaaccagcaacaacaacatttactttagtttctgccaacgctcagtcagagtagccatggtgaaccctgccgcctacctacaacaacaacaactgctttcatctgcccgctcgctgtgggcaatgcacctacatacctgcaacaacaattgttgcaacagattgtaccagctctgactaactagctgtggcaaaccctgttgcctacttgcaacagctgcttccattcaaccaactgactctgtcgaactctgctgcgtacctacaacagcgacaacagttacttaatccattggtagtggctaacccattggtcgccgccttcctacagcagcaacaattgctgccat

SEQ ID NO: 24593 - DNA, 352 bp, Zea mays
  Clone ID: LIB3152-056-P1-K1-A3
cccgatcgacaccatgagggtgtttcttgttgccctcgctctcctggctctcggtgggagcgccacctccacgcatacaagcggcggctgcggctgccagccaccgcgccggttcatctaccgccgccggtgcatctgccacctccggttcacctgccacctccggtgcatcttccaccgcggtccacctgccgtcgccggtccacctgtcaccgccggtccatgtgccgccgccggttcatctgccgccggcaccatgccactaccctactcaaccgccccgtactcagcctcatccccagccacacccatgcccgtgccaacagccgcatccaagcccgtgccagctgca

SEQ ID NO: 24594 - DNA, 140 bp, Zea mays
  Clone ID: LIB3152-056-P1-K1-A5
caacatagaaggcacatttttttaccaacaatggcagcacaaaatatgggggcgtgtccttattgctccttggggtctttctcgcaaagtgcctgcttacccgcaaactcatttttccccaccaaatgctttcacaaagc

SEQ ID NO: 24595 - DNA, 353 bp, Zea mays
  Clone ID: LIB3152-056-P1-K1-A6
agaccaacaagcaacatagaaagtgttattcagtagcaacaatagagcaacaatggcgaccaagatattttccctccttatgctccttgctctttctgcatgtgttctaacgcgacaattttccctcaatgctcacaagctcctatagcttcccttcttcccccataccttccatcaatgttagcttcagtatgtgaaaacccagctcttcaaccctataggctccaacaagcaatcgcagcaagcaacatacctttatcacccttgtttcaacaatcgccagccctatctttggtgcagtcattggtacaaaccatcagggcacagcagctgcagcaactcgtgctacctgt

SEQ ID NO: 24596 - DNA, 349 bp, Zea mays
  Clone ID: LIB3152-056-P1-K1-A7
cccacgcgtccgaattagcttatttactccagattggagaactcgacaccatgggggtgctgatcgttgcccttgctctcctggcgctcgctgcgagcgccgctccagtacaagcggcggctgtggctgccagacaccaccgtttcatctaccgcctccgttctatatgccgcctccttctatctgccgccgcagcagcagccgcagccatggcaataccccactcaaccaccgcagctaagcccgtgccagcagttcggatcctgcggcgtcggcagcgtcggcagcccgttcctgggccagtgcgtcgagttcctgaggcaccagtgcagcccggcggcgacgccct

SEQ ID NO: 24597 - DNA, 349 bp, Zea mays
  Clone ID: LIB3152-056-P1-K1-A9
caaaaccagaccatcaaacatgtgccagcgccctctcgcagtcgccgcagtggagagcaccttcatcatgatcaagcctgacggcgtccagaggggcctcattgtgagatcatcagccgttttgagaagaagggcttctacctcaaggccttgaagcttgtgaacgtggagaggtcgttgctgagaagcactacgccgatctcgcctccaagcccttcttccagggcctcgtggactacatcatctctggccctgtggtggccatggtctgggagggcaatagcgtcgtcacaactggccgcaagatcattggcgccaccaaccccctggcttctgagcccggcaccat

SEQ ID NO: 24598 - DNA, 367 bp, Zea mays
  Clone ID: LIB3152-056-P1-K1-B1
gacccacgcgtccgattttgagcattcagaaacacacctagctttagctacctagcaacgacttaacagcagtggctaccaagatattagccctccttgcgcttcttgccctttttgtgagccaacaaatgcgttcattattccacaatgctcacttgctcctagtgccattataccacagttcctccgaccagtacttcaatgggcttcgaacacctagctgtgcaagcctacaggctacaacaagcgcttgcggcgagcgttttacaacaaccaattaaccaattgcaacaacaatccttggcacatctaaccatacaaaccatcgcaacacaacagcaacaacagttcctaccagcactgagcc

SEQ ID NO: 24599 - DNA, 351 bp, Zea mays
  Clone ID: LIB3152-056-P1-K1-B10
agagcaccctccacctggtgctccttctcaggggtggcatgcagatctttgtggagacactcactggcaagacaatcacccttgaggtggagtcttcggatacattgacaatgtcaaggccaagatccaggacaaggagggcatcccaccggaccagcagcgcctcatcttcgccggaagcagctggaggatggccgcaccctggcggactacaacatccagaaggagagcaccctccacctggtgctccgcctcaggggtggcatgcagatttttgtgaagacattgactggcaagaccatcaccttggaggtggagagctctgacaccattgacaatgtgaaggccaag

SEQ ID NO: 24600 - DNA, 347 bp, Zea mays
  Clone ID: LIB3152-056-P1-K1-B11
ctcgcaccggctccggtcctcctctcatcaccatcaccaccgtcgttcctctcacgagtcccgacacacgcaaaccgcacgaaccctggctggcggcgggatacgcggcggtgctcgcactgcagccacaacgggcacaactcgcggacgtgccccaaccgcggggtcaagatcttcgggtgcgcctcaccgatggctcggccatccgcaagagcgcaagcatggggaacctctccctcctctccgcggggtcaaccagcggcggcgcgtcgcccgccgacgggcccgacctcgccgacggcggcgggggctacgcctccgacgacttcgtccaggggtcgtcctcc

SEQ ID NO: 24601 - DNA, 351 bp, Zea mays
  Clone ID: LIB3152-056-P1-K1-B12
accaactagcaacatagaaagcacattagtgtaccaacaatggcagccaaagatagtttgcttccttatgctccttggtctttctgcaagtgttgctaccgcaccattttcccacaatgctcacaagctcctatagcttcccttcttcccccatacctctcaccagcggtgtcttcaatgtgtgaaaacccaattgttcaaccctacaggatccaacaggcaatcgcaacaggcatcttaccattatcacccttgttcctccaacaaccgtcagccctattacagcagttacctttggtccatttggtggcacaaaacatcagggcacaacaactacaacaacttgtgcta

SEQ ID NO: 24602 - DNA, 358 bp, Zea mays
  Clone ID: LIB3152-056-P1-K1-B2
gcgtccggaacatagaaagtggaatccagtttcattaatagagcaacaatggagaccaagataggttccctccttatgctccttgctctttctacatgtgttgctaacgcgaaattttccctcaatgctcacaagctcctatagcttccctttttcccccataccttccatcaattatagcttcagatgtgaaaacccagctcttcaaccatataggcttcaacaagcaatcgcagcaagcaacatacctttatcgcccttgttgtgtcaacaatcgccagccctatctttggtgcagtcattggtacaaaccatcagggcacaacagctgcagcaactcgtgctacctgtgatcaac

SEQ ID NO: 24603 - DNA, 348 bp, Zea mays
  Clone ID: LIB3152-056-P1-K1-B3
aggactcgtgggcaactagcaacatatattgcacaatagtgtaccaacaatggggggcgaaatattatggctccttatgctccttggtctttctgcaagtgctgctcgacgaccattatcccacaatgctgacaagctcctatagcttcccttcttcccccgtacctttcaccagcggtgcttcgttatgtgaaaacccaattcttcaaccctataggatccaacaggcaatcgcagctggcatcttacctttatcacccttgttcctccaacaatcatcagccctattacagcagttacctttggtgcatttattggcacaaaacatcagggtacaacaactacaac

SEQ ID NO: 24604 - DNA, 348 bp, Zea mays
  Clone ID: LIB3152-056-P1-K1-B4
gggcagtgcgtagagaggatcgtttaatagaacagcatgaagatggtcatcgggcgggtcgtgtgcctggctctgtcagctgccagcgcctctgcaatgcagatccctgcccctgcgcggggctgcagggcttgtacggcgctggcgccggcctgacgacgatgatgggcgccggcggctgtacccctacgcggagtacctgaggcagccgcagtgcagcccgctggcggcggcgccctactacgccgggtgtgggcagacgagcgccatgtaccagccgctccggcaacagtgctgccagcagcagatgaggatgatggacgtgcagtccgtcgcgcagcagctgca

SEQ ID NO: 24605 - DNA, 348 bp, Zea mays
  unsure at all n locations
  Clone ID: LIB3152-056-P1-K1-B5
cacgcgntccggcagatctctatcagtaaaatttatctttgtatctcgagngattattacagtcacaaaggncgttgacatcattgtaatgttgagtggcgatcagctttatcggatgaatacatggaacttgtgcagaaacatgtcgaggacgatgctgatatcactatatcatgtgctcctgttgatgagagccgagcttctaaaaatgggctagtgaagattgatcatactggacgtgtacttgaattctttgaaaaaccaaatggtgctgatttgaattatatgaaagttgggaccaacttgctgagctatactatagatgatgcacaggaatagccatacctc

SEQ ID NO: 24606 - DNA, 354 bp, Zea mays
  Clone ID: LIB3152-056-P1-K1-B6
aatattttgagcattcagaaacacaccattcgaagcgcactagcaacaacctaacagcgaatggctaccaagatattatccctccttgcgcttcttgcgctttttgcagcgcaacaaatgcgtccattattccacaatgctcacttgctcctagttccattattccacagttcctcccaccgttacttcaatggccttcgaacacccagctgtgcaagcctataggctacaacaagcgattgcggcgagcgtcttacaacaaccaattgcccaattgcaacaacaatccttggcacatctaacaatacaaaccatcgcaacgcaacagcaacaacagttcctaccagcactgag

SEQ ID NO: 24607 - DNA, 350 bp, Zea mays
  Clone ID: LIB3152-056-P1-K1-B7
agcattcagaaacacaccaagcgattcgcactagcaacaacctaacaacgatgggtaccaagatattagccctccttgcgcttcttgcccttttagtgagcgcacaaatgcgttcattattccacagtgctcacttgctcctagtgccattattccacagttcctcccaccagttactcaatgggcttcgaacatccagccgtgcaagcctacaggctacaactagcgcttgcggcgagcgtcttacaacaaccaattgcccaattgcaacaacaatccttggcacatctaaacctacaaaccatcgcaacgcaacagcaacaacagtttctgccatcactgagccacct

SEQ ID NO: 24608 - DNA, 351 bp, Zea mays
  Clone ID: LIB3152-056-P1-K1-B8
ggagcgcacacacacacaactagatttcccccaaatccacccgtcggcaggtggggttcaagatgcagatctttgtgaaaaccctgaccggcaagactatcacctcgaggtggagtcgtctgacaccattgacaacgttaaggccaagatccaggacaaggagggcatccccccagaccagcagcggctcatcttcgctggcaaacagcttgaggacgggcgcacgcttgctgactacaacatccagaaggagagcaccctccaccttgtgctccgcctcaggggaggcatgcagatctttgtgaaaaccctgaccggcaagactatcaccctcgaggtggagtcctctga

SEQ ID NO: 24609 - DNA, 350 bp, Zea mays
  Clone ID: LIB3152-056-P1-K1-B9
aaaatattttgcctccttattctctttggtctttctgcaagtgctgctacggggaccattttcccgcaatgctcgcaagctcctatagcttcccttcttccccgtacctctcaccagcggtgtcttcggtatgtgaaaacccaattcttcaaccctacaggatccaacaggcaatcgagctggcatcttacctttatcacccttgttcctccaacaatcatcagccctattacaacagttacctttggtgcatttattggcacaaaacatcagggcacaacaactacaacaacttgtgctagcaaaccttgctgcctactctcagcaacagcagtttcttccattcaacc

SEQ ID NO: 24610 - DNA, 352 bp, Zea mays
  Clone ID: LIB3152-056-P1-K1-C1
cccacgcgtccggcaacataaaatgtactttagtgtaccaacaatggcagccaggatgttttgcctccttatgctccttggtctttctgcaagtgctgctacggcgccattttcccgcaatgctcgcaagctcctatagcttcccttcttcccccgtacctctcaccagcggtgtcttcgtatgtgaaaacccaattcttcaaccctacaggatccaacaggcaatcgcagctggcatcttacctttatcacccttgttcctccaacaatcatcagccctattacaacagttacctttggtgcatttattggcacaaaacatcagggcacaacaactacaacaacttgtgct

SEQ ID NO: 24611 - DNA, 342 bp, Zea mays
  Clone ID: LIB3152-056-P1-K1-C10
ggtaaaagccatattgctacacgagttatgggtacctttggctatgttgcaccggaatatgctaacagtggacttctaaatgaaaagagtgatgtctatagcttggggttgttctgttggaagctattacaggtagagatccaattgattatgatcgccctacaaatgaggtaaacctggttgactggcttaaaatgatggttgccaacagacgttctgaacaagtggtggacccaaaccttgagagaaggccttcgacaaaggagctgaaacgtgcccttttgactgctctgaggtgtatcgatttgaatgctgagaagaggcctagcatggaccaggtgg

SEQ ID NO: 24612 - DNA, 333 bp, Zea mays
  Clone ID: LIB3152-056-P1-K1-C11
gaaagaaccatactaaaccaacatttttagccaaaatataacaactactgatgcgactatatttttcttcatgggcctctacggccaccatgtgagcgcaacctcacaagcatcatatagacaatcgctcactcgctgctcctgccaccattgcacagttccttataccaaaacctaaatgttgaaccctacacgtaccaacacacgctaacatgtaacatcaaacctttatcacccgcgtttcacaaccactaattagccaaattacacaacaaaccttggcagattttacatgtcacagaatatcagcgcacacacaactacacacaactt

SEQ ID NO: 24613 - DNA, 340 bp, Zea mays
  Clone ID: LIB3152-056-P1-K1-C12
gatcagcaaagcggcagtgcgtatttaggatcgtcgaacagaacagcatgaagggggtcatcgttctcgtcgtgtgcctggctctgtcagctgccagcgccttgcaatgcagatgccctgcccctgcgcggggctgcagggcttgtacggcgctggcgccggcctgacgacgatgagggcgccggcgggctgtacccctacgcggagtacctgaggcagccgcagtgcagcccgctggcggcggcgccctactacgccgggtgtgggcagacgagcgccatgtaccagccgctccggcaacagtgctgccagcagcagatgaggatgatggacgtgcagt

SEQ ID NO: 24614 - DNA, 350 bp, Zea mays
  Clone ID: LIB3152-056-P1-K1-C2
caggatccaacaggcaatcgcaacttgctttttaccattatcacccttgttcctgcagcaaccgtcagccctattacagcagttacctttggtccatttggtggcacaaaacatcagggcacaacaactacaacaacttgtgctagcaaaccttgctgcatactctcagcaacatcagtttttccattcaaccaactggctgcattgaactctgctgcttatttgcaacaacaattaccattcagccagctagttgctgcctacccccagcaatttcttccattcaaccaactagcagcattgaactctgctgcttatttacagcagcaacaactactaccattcagcca

SEQ ID NO: 24615 - DNA, 348 bp, Zea mays
  Clone ID: LIB3152-056-P1-K1-C3
atcgtacataccttgaaggctgcatttattttgctgatggatctgaacaggtgtgggcggttacacaaatgcctgaagagccaactggatggttccagggtacagagactctattagaaaatttatctgggtactcgaggattattacagtcacaaattcattgacaacattgtaatcttagtggcgatcagctttatcggatgaattacatggaacttgtgcagaaacatgtctaggacgatgctgatatcactatatcatgtgctcctgttgatgagagccgagcttctaaaaatggtctagtgaagattgaacatactgtacgagtacttcaattatttgaaaaa

SEQ ID NO: 24616 - DNA, 253 bp, Zea mays
  Clone ID: LIB3152-056-P1-K1-C4
agtccctctcctctcgaggtattattatttgaccgggtcctcgcagcacgatgaggggggttgctgcctacctgcttgctgtcctcgctgggaacgccagcccctcgctgacgatttgactgccattctggagtcagttggctgtgaagctgacaatgaaaagatggaactcctgctgtccaactgatcggaaaggacatcaccgagctcattgacgcgggcagggagaagtttgtttcacacccatgtggtt

SEQ ID NO: 24617 - DNA, 363 bp, Zea mays
  Clone ID: LIB3152-056-P1-K1-C5
cccacgcgtccgcaactagcaacatagaaagcacaatagttgtaccaacaatggcagccaaaatatggtgcgtccttatgctccttggtctttctacaagaagctgctactgcgaccatttcccgcaatgctcgcaagctcctatagcttgccttcttcccccgtacctctcaccagcggtgtcttcggtatggaaaacccaattcttcaaccctacaggatccaacaggcaatcgcagctggcatcttacctttatcacccttgttcctccaacaatcatcagccctattacaacagttacctttggtgcatttattggcacaaaacatcagggcacaacaactacaacaacttgtgctagc

SEQ ID NO: 24618 - DNA, 356 bp, Zea mays
  Clone ID: LIB3152-056-P1-K1-C6
acacgtccgcacattttgcaaatggaatggtattttttgtggcaaacattgctgctttcttgagcaacaacatttgttgccattttacccacaggttgtgggaaacattaagccttcttgcaacagcaacaattgctaccattctacccacagaatgtggcaaacattgttgccttcttacaacacaacaattgttgccatttagccaacatgctttgacgaatcctaccaccttattgcaaccgcccaccattggtggtgccatcttctagattttttatgatttatactgtaataataaagttctcatgctgatatgtgcgacctctcagtaataaagtattagagatctatat

SEQ ID NO: 24619 - DNA, 349 bp, Zea mays
  Clone ID: LIB3152-056-P1-K1-C8
attttgagcattcagaaacacacttttcgaagcacattagcaacaacctggcggcgaatggctaccaagatattatccctccttgcgcttcttgcgctttttgcagcgcaacaaatgcgttcattattccacaatgctcacttgctccaagttccattattacacagttcctcccaccattacttcaatgggcttcgaacacccagctgtgcaagcctataggctacaacaagcaattgcggcgagcgtcttacaacaaccaatttcccagttgcaacaacaatccttggcacatctaacaatacaaaccatcgcaacgcaacagcaacaacaattcctaccagcactg

SEQ ID NO: 24620 - DNA, 350 bp, Zea mays
  Clone ID: LIB3152-056-P1-K1-C9
aattgcccaattgcaacaacattctttgccacatctaacaatacaagccagcgcgacgcaacagcaacaacagttcctaccagcactgagccacctagccatgtgaaccctgccgcctacttgcaagagcagctgcttgcatccaacccacttgctctggcgaacgtagttgcaaaccgcaacaacaacagctacaacagtttcttccaacgctcagacaactagccatggtgaaccctgccgtctacgtacaacaacaacaactgctttcatctagcccgctcgctgtgggcaatgcacctacatacctgcaacaacaattgttgcaacagattgtaccagctctgact

SEQ ID NO: 24621 - DNA, 348 bp, Zea mays
  Clone ID: LIB3152-056-P1-K1-D10
cccacgcgtccggagaccaacttgtaacatagaaagtggaatccagtagcggcggtagagcaacaatggcgaccaagatattttccctccttatgctccttgtctttctgcatgtgttgctaacgcgacaattttccctcaatgctcacaagctcctatagcttcccttcttccccctaccttccatcaatgatagcttcagtatgtgaaaacccagctcttcaaccctataggctccaacaagcaatcgcagcaagcaacatacctttatcacccttgtttcaacaatcgccagccctatctttggtgcagtcattggtacaaaccatcagggcacagcagctgcag

SEQ ID NO: 24622 - DNA, 350 bp, Zea mays
  Clone ID: LIB3152-056-P1-K1-D11
gaccaactagcaacatagaatgcataatagtgtaccaacaatggcagccgaaagagttttgcctccttatgctccttggtctttctgcaagtgctgctacggcaccattttcccgcaatgctcgcaagctcctatagcttcccttcttcccccgtacctctcaccagcggtgtcttcgtatgtgaaaacccaattcttcaaccctacaggatccaacaggcaatcgcagctggcatcttacctttatcacccttgttcctccaacaatcatcagccctattacaacagttacctttggtgcatttattggcacaaaacatcagggcacaacaactacaacaacttgtgct

SEQ ID NO: 24623 - DNA, 348 bp, Zea mays
  Clone ID: LIB3152-056-P1-K1-D12
atcaccgcctcgtgtgcagtttgttctctcacctcctctgtcgacgcacgaccgcgaagaccccccgccgggctcgcagggtgttcgacccttcgcccgcgcccctcacgacatggccgcctccgtctccgccgccgccaaggccgccgcggcgttcgcgcacaaggtccagaaggactggccgcgccggcgcagcgccgcgcgggcttgacccgccggaccaagccgtgcagcgtgcgcgccgtcgcttcgtccgcgcgcgccccccgcgccccgtcgttcaccggctcggtgaagagcgcgatgacgatgacggagaagatactggcgcgggcgttggagcgcgcg

SEQ ID NO: 24624 - DNA, 351 bp, Zea mays
  Clone ID: LIB3152-056-P1-K1-D4
atttagaccaactagcaacatagattgttcaatagtgtaccaacaatggcaggcgaagtattttgcctccttatgctccttggtatttctgcaagtgctgctacgggaccattttcccgcaatgctcacaagctcctatagcttcccttcttcccccgtacctctcaccagcggtgtctcggtatgtgaaaacccaattcttcaaccctacaggatccaacaggcaatcgcagctggcatcttacctttatcacccttgttcctccaacaatcatcagccctattacagcagttacctttggtgcatttattggcacaaaacatcagggcacaacaactacaacaacttgt

SEQ ID NO: 24625 - DNA, 353 bp, Zea mays
  Clone ID: LIB3152-056-P1-K1-D5
attttcagcattcagaaacacaccttgttaagcgcactagcaacaacctaacaggcaggggctaccaagatattagccctccttgcgcttcttgcccttttagtgaggcaacaaatgcgttcattattccacagtgctcacttgctcctagtgccattattccacagttcctcccaccagtacttcaatgggcttcgaacatccagccgtgcaagcctacaggctacaactagcgcttgcggcgagcgtcttacaacaaccaattgcccaattgcaacaacaatccttggcacatctaaacctacaaaccatcgcaacgcaacagcaacaacagtttctgccatcactgagct

SEQ ID NO: 24626 - DNA, 350 bp, Zea mays
  Clone ID: LIB3152-056-P1-K1-D6
caacaagcaacatagaaagtggaattcatttgcaacaatagagcaacaatggcggccgagatattttccctgcttatgctccttgctctttctgcatgtgttgctacgcgacaattttccctcaatgctcacaagctcctatagcttcccttcttcccccataccttccatcaatgatagcttcagtatgtgaaaacccagctcttcaaccctataggctccaacaagcaatcgcagcaagcaacatacctttatcacccttgtttcaacaatcgccagccctatctttggtgcagtcattggtacaaaccatcagggcacagcagctgcagcaactcgtgctacctgtg

SEQ ID NO: 24627 - DNA, 330 bp, Zea mays
  Clone ID: LIB3152-056-P1-K1-D7
atccttcaccattcctagcatttctcagtcccaacaatatagcaacaatggcgggcattatattttccattcctatcctcctttctctttctgcatttttttcaactctaccatttttccttaatacttacaattcttctattgcatcttcttctactctattcctatcatttttgactttttcttttttttataaccctttcttattacctatcttcttttatctatcttttcttatcaatctacttatcttttattactcctgtttttttaacattctatatttttatttttttttccactttatttttttttcttatttttttttta

SEQ ID NO: 24628 - DNA, 348 bp, Zea mays
  Clone ID: LIB3152-056-P1-K1-D8
gtttaattttctactaggagctagtatcgagcgggttatttgcaacgacggcggggtcttggcgttggcgggcgtgtttggcaccatgggcgaccgctgccctgcgagaagcagtgcgagggccaccacgaccgggaaagcaggcagcagtgcgtccaggcttgcgagcgccggcgaaggagcgcggcggcagccgtgactccgacgtcgacgaggactacagcgaccggcggtgccagatgaaatgccggcgccacagcgatcggcaggcgaggcagtggtgcgtgcagcgctgctagcgtaagcaacaggtggacgccgtctccgacgacgagaatagcgaccggt

SEQ ID NO: 24629 - DNA, 349 bp, Zea mays
  Clone ID: LIB3152-056-P1-K1-D9
agcaacatacatagtgaagttcactttcaacatcttagcaccaatgggagccaggatttttgccctccttgccctccttgctctttcagcaagcgctgctacccgacttttattccacaatgctcacaacaatacctctctccggcgacagccgtgggatttcaatacccaactatacatcctacatggtacaagaggccatccaagcaagcatcttacggtcattagcattaaccctccaacaaccatatgctctattgcaacagccatccttagtgcatctgtatctccaaagaatcgcggcacaacaactacaacaacagttgctaccaacaatcaatcaagtagt

SEQ ID NO: 24630 - DNA, 347 bp, Zea mays
  Clone ID: LIB3152-056-P1-K1-E10
tacagcaccttttggacaagcaaccacattctttttgtgttactatcggggtggaacattacttttcagatttctgttatcatttgcaatcttagcaagcaggaaagcataaataaactcgataagagcaaaggagcttagaaggaaagagtaatgtagtgaatgtgggcgactttatttaagtagcatataaatctagatgaagacatggagtgattagtcaaacctggctgacctccaaccggtctccaggttctactttcttaagtgcatatggcaactcttctatttctccttctggcatctgaattacagtttgccagctgcattgacaatagtagaggtta

SEQ ID NO: 24631 - DNA, 353 bp, Zea mays
  Clone ID: LIB3152-056-P1-K1-E2
gtcttcagaccattagctttatctactccagagcgcagaagaacccgatcgacgccaggagggtgttgctcgttgccctcgctctcctggctctcgctgcgagcgcacctccacgcatacaagcggcggctgcggctgccagccaccgccgccggttcatctaccgccgccggtgcatctgcacctccggttcacctgccacctccggtgcatctcccaccgccggtccacctgccgccgccggtccacctgccaccgccggtccatgtgccgccgccggttcatctgccgccgccaccatgccactaccctactcaaccgccccggcctcagcctcatccccagccacaccc

SEQ ID NO: 24632 - DNA, 290 bp, Zea mays
  unsure at all n locations
  Clone ID: LIB3152-056-P1-K1-E3
agttatcgagccacgagtatttcgtccatccctagtggtaggccggcaaggtcggctggtggagacctcgagtcgagtcgaccatggtggcgcgcgggcagggcgggacagggcggaggaggaggccgtggctcgttgggagagctagaaggatgcgtagatcgtcttcgtgttcaaggnttttgtttttttttttttttctctgatctaatttatttttttattttatcttatcttttatttttttttaatatgttactttcttttttatttttattattatctatttt

SEQ ID NO: 24633 - DNA, 361 bp, Zea mays
  Clone ID: LIB3152-056-P1-K1-E4
cccacgcgtccggaaagtggaatccagtagcaacatttgttcaacaatggagaccaagatatttgcccgccttatgctccttgctctttctacatgtgttgctaacgcgacaatttccctcaatgctcacaagctcctatagcttccctttttcccccataccttccatcaattatagcttcagtatgtgaaacccagctcttcaaccatataggcttcaacaagcaatcgcagcaagcaacatacctttatcgcccttgttgtgtcaacaatcgccagccctatctttggtgcagtcattggtacaaaccatcagggcacaacagctgcagcaactcgtgctacctgtgatcaaccaagt

SEQ ID NO: 24634 - DNA, 351 bp, Zea mays
  Clone ID: LIB3152-056-P1-K1-E5
attgagaccaacaagcaacatagtttgtttaatccagtagcaacaatagagcaggaggggcgaccaagatattttccctccttatgctccttgctctttctgcatggttgctaacgcgacaattttccctcaatgctcacaagctcctatagcttcccttcttcccccataccttccataatgatagcttcagtatgtgaaaacccagctcttcaaccctataggctccaacaagcaatcgcagcaagcaacatacctttatcacccttgtttcaacaatcgccagccctatctttggtgcagtcattggtacaaaccatcagggcacagtagctgcagcaactcgtgcta

SEQ ID NO: 24635 - DNA, 339 bp, Zea mays
  Clone ID: LIB3152-056-P1-K1-E6
aattagctcatcgactccagattggagaactcgacaccatgaaggtgctgatcggtggccttgctctcctggcgctcgctgcgagcgccgcctccagtacaagcgcggctgtggctgccagacaccaccgtttcatctaccgcctccgttctatatgccgcctccgttctatctgccgcgcagcagcagccgcagccatggcaataccccactcaaccaccgcagctaagcccgtgccagcagttcggatcctgcggcgtctgcagcgtctgcagcccgttcctgggccagtgcgttaagttcctgaggcaccagtgcagcccggcggtgacgccttac

SEQ ID NO: 24636 - DNA, 349 bp, Zea mays
  Clone ID: LIB3152-056-P1-K1-E7
gcctagcaattagctcatcgactccagattggagaactcgacaccatgaaggtgctgatcgttgcccttgctctcctggcgctcgctgcgagcgccgcctccatacaagcggcggctgtggctgccagacaccaccgtttcatctaccgcctccgttctatatgccgcctccgttcttctgccgccgcagcagcagccgcagccatggcaataccccactcaaccaccgcagctaagcccgtgccagcagttcggatcctgcggcgtcggcagcgtcggcagcccgttcctgggccagtgcgtcgagttcctgaggcaccagtgcagcccggcggcgacgccctacggc

SEQ ID NO: 24637 - DNA, 175 bp, Zea mays
  Clone ID: LIB3152-056-P1-K1-E8
agcggcagtgcgtagagaggatcgtctaacagaacagcatgaagatgggcgtgggtctcgtcgtgtgcctggctctgtcagctgccagcgcctctgcaatgcaatgccctgcccctgcgcggggctgcagggcttgtacggcgctggcgcctgcctgacgactatgatgggcgcc

SEQ ID NO: 24638 - DNA, 349 bp, Zea mays
  Clone ID: LIB3152-056-P1-K1-E9
gaccaactagcaacatagaatgcacaatagtgtaccaacaatggcagccgagaggttttgcttccttatgctccttggtctttctgcaagtgctgctaccgcaccattttcccacaatgctcacaagctcctatagcttcctttcttcccccatacctctcaccagcggtgtcttcagatgtgaaaacccaattcttcaaccctacaggatccaacaggcaatcgcagcaggcatcttacctttatcacccttgttcctccaacaaccgtcagccctattacagcagttacctttggtgcatttgttggcacaaaacatcaaggcacaacaactacaacaacttgtgct

SEQ ID NO: 24639 - DNA, 353 bp, Zea mays
  unsure at all n locations
  Clone ID: LIB3152-056-P1-K1-F1
attagctttatctactccagagcgcagaagaacccgatcgacaccatgagggtggtgcgcgttgccctcgctctcctggctctcgctgcgagcgccacctccacgctacaagcggcggctgcggctgccagccaccgccgccggttcatctaccgccgccggtgcatctgccacctccggtcacctgccacctccggtgcatctcccaccgccggtccacctgccgccgccggtccacctgccaccgncggtccatgtgccgccgccggttcatctgccgccgccaccatgccactaccctactcaaccagtgcgtcgagttcctgaggcatcagtgcagcccgacggcgacg

SEQ ID NO: 24640 - DNA, 349 bp, Zea mays
  Clone ID: LIB3152-056-P1-K1-F10
attttgagcattcagaaacacaccttgcgaagcacattagcaacaacctaacagcaatggctaccaagatattatccctccttgcgcttcttgcgctttttggagcgcaacaaatgcgttcattattccacaatgctcacttgctccaagttccattattacacagttcctcccacagttacttcaatgggcttcgaacacccagctgtgcaagcctataggctacaacaagcaattgcggcgagcgtcttacaacaaccaatttcccagttgcaacaacaatccttggcacatctaacaatacaaaccatcgcaacgcaacagcaacaacaattcctaccagcactgg

SEQ ID NO: 24641 - DNA, 348 bp, Zea mays
  Clone ID: LIB3152-056-P1-K1-F11
attttcagcattcagaaacacacctagcgaagcgcactagcaacaaccggacagcaatggctaccaagatattagccctccttgcgcttcttgcccttttaggagcgcaacaaatgcgttcattattccacagtgctcacttgctcctagtgccattattccacagttcctcccacagttacttcaatgggcttcgaacatccagccgtgcaagcctacaggctacaactagcgcttgcggcgagcgtcttacaacaaccaattgcccaattgcaacaacaatccttggcacatctaaacctacaaaccatcgcaacgcaacagcaacaacagtttctgccatcactg

SEQ ID NO: 24642 - DNA, 348 bp, Zea mays
  Clone ID: LIB3152-056-P1-K1-F12
ctagcaacatagaaagcacattagtgtaccaacaatggcagctaaaatagttgggctccttatgctccttggtctttctgcaagtgctgctacggcgaccatttcccacaatgctcacaagctcctatagcttcccttcttcccccgtacctctcaccaacggtgtcttcggtatggaaaacccaattcttcaaccctacaggatccaacaggcaatcgcagctggcatcttacctttatcacccttgttcctccaacaatcatcagccctattacagcagttacctttggtgcatttattggcacaaaacatcagggcacaacaactacaacaacttgtgctagcaa

SEQ ID NO: 24643 - DNA, 344 bp, Zea mays
  Clone ID: LIB3152-056-P1-K1-F2
gaaacttcttggagagagagagagtgagttagacggccccgcagcggcggaggcggaggtgggggcgtcggatctagaccggcagatcgagcagctgaagcggtgcagccgctcacggaggcggaggtcaaggcactgtgcctcaaggccatggagatcctcatcgaggagagtaacgtgatcgcgtctacgcccccgtcaccatttgtggagacatacatggacagttctatgacatgaaggagctgttcaaagttggaggtgactgcccaaagacaaactatttgttccttggggattttgttgaccgaggattttatttctgtgaaacttttttgcttttt

SEQ ID NO: 24644 - DNA, 354 bp, Zea mays
  Clone ID: LIB3152-056-P1-K1-F3
tcagcattcagaaacacaccaagcttagttcactagcaacaacctaacaacaatggctgccaagatattagccctccttgcgcttcttgcccttttagtgagcgcacaaatgcgttcattattccacagtgctcacttgctcctagtgccattattccacagttcctcccaccagttacttaatgggcttcgaacatccagccgtgcaagcctacaggctacaactagcgcttgcggcgagcgtcttacaacaaccaattgcccaattgcaacaacaatccttggcacatctaaacctacaaaccatcgcaacgcaacagcaacaacagtttctgccatcactgagccacctag

SEQ ID NO: 24645 - DNA, 351 bp, Zea mays
  Clone ID: LIB3152-056-P1-K1-F4
cagaccattagctttatctactccatagttcagaagaacccgatcgacaccatgagggggttgctcgttgccctcgctctcctggctctcgctgcgagcgccaccccacgcatacaagcggcggctgcggctgccagccaccgccgccggttcatctaccgccgccggtgcatctgccactccggttcacctgccacctccggtgcatctcccaccgccggtccacctgccgccgccggtccacctgccaccgccggtccatgtgccgccgccggttcatctgccgccgtcaccatgccactaccctactcaaccgccccggccttagcctcatccccagccacacccatg

SEQ ID NO: 24646 - DNA, 350 bp, Zea mays
  Clone ID: LIB3152-056-P1-K1-F5
cccacgcgtccgattgataccaacttgcatcatacatagtgaagtacactagcgacaggttagcaccaatgggagccaagatttttgccctccttgccctccttgtctttcagcaagcgctgctacctcgacttttattccacaatgctcacaacaatacctctctccggcgacagccggggatttcaatacccaactatacaatcctacatggtacaagaggccatccaagcaagcatcttacggtcattagcattaaccctccaacaaccatatgctctattgcaacagccatccttagtgcatctgtatctccaaagaatcgcggcacaacaactacaacaacagtt

SEQ ID NO: 24647 - DNA, 51 bp, Zea mays
  Clone ID: LIB3152-056-P1-K1-F6
accactcgtaccatcaatctaacttttttttcctcaaccgtcacctctcaa

SEQ ID NO: 24648 - DNA, 349 bp, Zea mays
  Clone ID: LIB3152-056-P1-K1-F7
gtcgcacatatctactatactatactctaggaagcaaggacaccaccgccatgggagccaagatgcttgcattgttcgctctcctagctctttgtgcaagcgcactagtgcgacccatattccagggcacttgccaccagtcatgccattgggtaccatgaacccatgcatgcagtactgcatgatgcaacaggggcttgccagcttgatggcgtgtccgtccctgatgctgcagcaactgttggccttaccgcttcagacgatgccagtgatgatgccacagatgatgacgcctaacatgatgtcaccattgatgatgccgagcatgatgtcaccaatggtcttgccg

SEQ ID NO: 24649 - DNA, 241 bp, Zea mays
  Clone ID: LIB3152-056-P1-K1-F8
caacaatagagcaacaatggctacctatatattttccctccttattctccttgcgctttcttcatgtgttgctaaccccacaattttccctcaatgctcacatcttctatagcttccctgcgaaccccacacctcccatcatatttattttttttttttttaaactcatctctttaatttttttttttcttacaatcaaacccaacatgtaacatactctaattaccctttttataacaat

SEQ ID NO: 24650 - DNA, 348 bp, Zea mays
  Clone ID: LIB3152-056-P1-K1-F9
acagtttctgccagcgctcatttttttagccatggtgaaccctgccgcctggggcaacagcaacaactgctttcatctagccctctcgttgtgggtaatgcactacatacctgcaacaacaattgctgcaacagattgtaccagctctgactcagctagctgtggcaaaccctgctgctacttgcaacagctgcttccattcaaccaactgactgtgtcgaactctgctgcgtacctacaacagcgacaacagttacttaatccactagcagtgcctaacccattggtcactgccttcctacagcagcaacaattgctaccatacagccagttctctttgatgaaccc

SEQ ID NO: 24651 - DNA, 347 bp, Zea mays
  Clone ID: LIB3152-056-P1-K1-G10
caccaagcgaagcgcactagcaactacctaacaacaatggctaccaagatattggccctccttgcgcttcttgccctttttgtgagcgcaacaaatgcgttattattccacaatgctcacttgctcctagtgccattattccacagttcctcccaccagttacttcaatgggcttcaacacctagctgtgcaagccaacatgcaacaacaagcgcttgcggcgagcgtcttacaacaaccaattgcccaattgcaacaacaatccttgccacatctaacaatacaagccatcacaacgcaacagcaacaacagttcctaccagcactgagccacctagccatggtga

SEQ ID NO: 24652 - DNA, 347 bp, Zea mays
  Clone ID: LIB3152-056-P1-K1-G11
tagcaacatagaaagcacaatagtgtaccaacaatggcagccaaaataggttggctccttatgctccttggtctttctgcaagtgctgctacggcgaccatttcccacaatgctcacaagctcctatagcttcccttcttcccccgtacctctcaccagcggtgtcttcggtatgtaaaacccaattcttcaaccctataggatccaacaggcaatcgcagctggcatcttacctttatcacccttgttcctccaacaatcatcagccctattacagcagttacctttggtgcatttattggcacaaaacatcagggcacaacaactacaacaacttgtgctagcaa

SEQ ID NO: 24653 - DNA, 348 bp, Zea mays
  Clone ID: LIB3152-056-P1-K1-G12
ggaggttcttttaagttacagtggtgaacatgtttatctgttcgatgttgaccgagatggtatgagttctagatacacagcagactatgtaagggaacaatatttgtacctccttttcacaaagtatcagcaaaaggacatgcaaaacaaaagaaggcttcagtaaatacaacttaagaagtttgtctagggtagatatgtgcaagaaatttatgcaagtcgcaacaagatctctggagacaggtaagaacttaatgcttgggattgaagcatgcagtgaagtccttgaatcaatggaacctgatattgacgatgacacgaggcacgagtttttgtgtactcgagcag

SEQ ID NO: 24654 - DNA, 354 bp, Zea mays
  Clone ID: LIB3152-056-P1-K1-G2
gtgaaggggcaccacttctaccactactatttgtgttggttaacatgggattcaggagagtcattactaaacctactaaagatctcctcagcagtcatatcttccttgcttctacattctcagttccgctgtccatctacgctttcactctgccactgccgtatatcggtgcggcgtcatctctgccacctggctttgttgcgggtgcagcggtactcaccaccggcttactactatacagcctaccacaggcacaacattatgggaattctttccacaacaagaatgatgactagtcagcattcatttcttcattggtttataatcacccttcactccaagatggtgcgccat

SEQ ID NO: 24655 - DNA, 322 bp, Zea mays
  Clone ID: LIB3152-056-P1-K1-G4
gttgcaaataagaacaactaccatttagtcagctacctgctgcctacccccagggaggggttccattcaaccaactagcagcattgaactctcctgcttatttacacagcaacaactactaccattcagccagctagctggtgtgagccctgctaccttcttgacacaaccacagttgtgccgttctaccagcacgttgcgcctaacgctggcaccctcttacaactgcaacaattgctgccattcaaccaacttgctttgacaaacccagcagtgttctaccaacaacccatcattggtggtgccctcttttagatttctt

SEQ ID NO: 24656 - DNA, 350 bp, Zea mays
  Clone ID: LIB3152-056-P1-K1-G5
gcgctcctttccctttcagtgagctcaacaactgcattcattattccacaatggtcacgttgctcctaatgccattattccacagttcctcccatcagttacatcatgggcatcgaacaccctattgtgcaagcctataggctacaacaagcgcttgcggcgagcgtcttacaacaaccgttgcccaattacaacaacaatccttggcacatctaaccatacaaaccatcgcaacacaactagagcaacagtttgtgcccgcattgagccaactagccgcagtgaaccctgtctcctacttgcaacagcaactgcttgcatccaacccacttgctctggcgaacacagcc

SEQ ID NO: 24657 - DNA, 350 bp, Zea mays
  Clone ID: LIB3152-056-P1-K1-G7
gaaagcacaatagtgtaccaacaatggcagccaaaatattttgcctccttatgcgccttggtctttctgcaagtgctgctacggcgaccattttcccgaaatgtcgcaagctcctatagcttcccttcttcccccgtacctctcaccagcggtgtcttcggtatgtgaaaacccaatcttcaaccctacaggatccaacaggcaatcacagctggcatcttacctttatcacccttgttcctccaacaatcatcagccctattacatcagttacctttggtgcatttattggcacaaaacatcagggcacaacaactacaacaacttgtgctagcaaaccttgctgccta

SEQ ID NO: 24658 - DNA, 350 bp, Zea mays
  Clone ID: LIB3152-056-P1-K1-G9
agccgatcgaagcgtcatcggcagctgcggcaatggcggggctgtcgctgcggggcggcgactgcggcgcgcagctgcggagtgtggaggaggcgcaggcgccgctgagtccaccaaccacgccaacttcgtcgagtccactgaggccgtcctcaaccttgtctgctccaactgcggaagccatgccgctcccataccgaggtggacctgcacacgaagcgcacgggccatacggagttcgcggacaagaccgcggaggcggccaaacccatcgacctcgaggcgccgcttaagccggcctccgatgatgccacggacgtcgatgcgtcggcctcggcgactgaggagac

SEQ ID NO: 24659 - DNA, 363 bp, Zea mays
  Clone ID: LIB3152-056-P1-K1-H1
ccacccgtccgattatggagaccacctggcaccatttaaggcacaatagtgtcccaacaatggcggcggaaatattttgcttccttatgctccttggtctttctgcaagtgttgctccgcaaccattttcccacaatgctcacaagctcctatagcttcccttcttcccccatacctctcaccagcggtgcttcaatgtgtgaaaacccaattgttcaaccctacaggatccaacaggcaatcgcaacaggcatcttaccattatcacccttgttcctccaacaaccgtcagccctattacagcagttacctttggtccatttggtggcacaaaacatcagggcacaacaactacaacaactt

SEQ ID NO: 24660 - DNA, 348 bp, Zea mays
  Clone ID: LIB3152-056-P1-K1-H10
acggcagcccgacggcgacagccctacttctttttttatgtgccagtagataaaagggggtcggtatattgattatttgtaggaaacacatgccggtatgagggcaccatatcgattacatctcatatgtaatctaaaagatggcaccttcaacgatgggttgctgtcacgacaaggcagggttatcaaagagaactggctgtatggtagcaattgttgctgctgtaggaaggcagtgaccaatgggttaggcactgctagtggattaagtaactgttgtcgctgttgtaggtacgcagcatatttcgactcagtcaggttggttgaatggaagcagctgtttgtaag

SEQ ID NO: 24661 - DNA, 347 bp, Zea mays
  Clone ID: LIB3152-056-P1-K1-H11
gcattcagaaacacaccaagcgaatcgcactagcaacaacctaacaacgatggggaccaagatattagccctccttgcgcttcttgcccttttagtgagcgcacaaatgcgttcattattccacagtgctcacttgctcctagtgccattattccacagttcctcccaccagttactcaatgggcttcgaacatccagccgtgcaagcctacaggctacaactagcgcttgcggcgagcgtcttacaacaaccaattgcccaattgcaacaacaatccttggcacatctaaacctacaaaccatcgcaacgcaacagcaacaacagtttctgccatcactgagccac

SEQ ID NO: 24662 - DNA, 379 bp, Zea mays
  Clone ID: LIB3152-056-P1-K1-H12
accgtacggaatccggggccagccacgcgtgcggtgaaaacccaattcttcaaccctacaggatccaacaggcaatcgcagctggcgtcttacctttatcacccttgttcctccaacaatcatcagccctattacacagttacctttggtgcatttattggcacaaaacatcagggcacaacaactacaacaacttgtgctagcaaacctgctgcctactctcagcaacagcagtttcttccattcaaccaactaggttcattgaactctgcttcttatttgcaacaacaacaactaccattcagccagctacctgctgcctacccccagcaatttcttccattcaaccaactagcagcattgaactctcctgcttatt

SEQ ID NO: 24663 - DNA, 325 bp, Zea mays
  Clone ID: LIB3152-056-P1-K1-H2
cagcagtgaggatgaagatgacagttgttaggaaagttcggatgatgagccaacgaaagttgaagaaaagaaggctccaaaagtatcagaaaacagtggatcggagatgaatcttctgaagacgagagtgataaagacagtgaagagcctgctaatactccaaagaaggctgctgtgcacctctctgaaaagaaaactgctaccaaagaacctaagacgcctactggctcccaaagtgaatcaacggaggtgaatacactttttatgggaaatgtcccctggaaagctgaatttgatgatgtgaaagaattttttgaggacgttg

SEQ ID NO: 24664 - DNA, 352 bp, Zea mays
  Clone ID: LIB3152-056-P1-K1-H3
gtggaatccagtagcaacaatagatcattaatggagaccaagatattttccctggtggtgctccttgctctttctacatgtgttgctaacgcgacaattttccctaatgctcacaagctcctatagcttccctttttcccccataccttccatcaattatagcttcagtatgtgaaaaccagctcttcaaccatataggcttcaacaagcaatcgcagcaagcaacatacctttatcgcccttgttgtgtcaacaatcgccagccctatctttggtgcagtcattggtacaaaccatcagggcacaacagctgcagcaactcgtgctacctgtgatcaaccaagtagctctg

SEQ ID NO: 24665 - DNA, 350 bp, Zea mays
  Clone ID: LIB3152-056-P1-K1-H4
gcagcccgacggcgacgccctactgctcgcctcagtgccagtcgttgcggcaggagtgttgccagcagctcaggcaggtggagccgcagcaccggtaccaggcgacttcggcttggtcctccagtccatcctgcagcagcagccgcaaagcggccaggtcgcggggctgttggcggcgcaatagcgcagcaactgacggcgatgtgcggcctgcagcagccgactccatgcccctacgctgctgccggcggtgtcccccactgaagaaactatgtgctgtagtatagccgctggctagctagctagttgagtcatttagcggcgatgattgagtaataatgtgtcacgca

SEQ ID NO: 24666 - DNA, 363 bp, Zea mays
  unsure at all n locations
  Clone ID: LIB3152-056-P1-K1-H5
cctgcttcgttcgatcctgtccagcagtacttgaggttcncgaggcggccggaaaccagcggcgaaacgtcggcatggncgctcgtattgcattcntggggnctggaaacaaaaatgccttcaaggcancttattgctgcagaatacagtggggtcaaggttgagttgaccaaggattttgagatgggtgttccaacaagacccctgagtttctaaagatgaacccccttgggaaggttcctgttctggagactcctgatggccctgtttttgagagtaatgctattgcgcgctatgttgctcgcttgaaggatgacaaccctcttttcgggtcttcccgtattgaacaagcccacgttgagc

SEQ ID NO: 24667 - DNA, 370 bp, Zea mays
  Clone ID: LIB3152-056-P1-K1-H6
taccgaacggaagggcgggccagagccaccggcggcagtgagtccagaggatcgtctaacataacagcatgaagatggtcatcggtctgggcgtgtgcctggctctgtcagctgccagcgcctctgcaatgcagatgcctgcccctgcgcggggctgcagggcttgtacggcgctggcgccggcctgacgacgatgatgggcgccggcgggtgtacccctacgcggagtacctgaggcagccgcagtgcagcccgctggcggaggcgccctactacgccgggtgtgggcagacgagcgccatgtaccagccgttccggcagcagagctgccagcattagatgcagttgaccaactagcagcattgaactc

SEQ ID NO: 24668 - DNA, 101 bp, Zea mays
  Clone ID: LIB3152-056-P1-K1-H7
aagaacccgatcgacaccatgtggttgttgctcgatgccctcgctctccgggcgctctttttaagcgctggctccacgcatacaagcggtgtttttttatt

SEQ ID NO: 24669 - DNA, 170 bp, Zea mays
  Clone ID: LIB3152-056-P1-K1-H8
gcttccggaatccggagagcttgctacgcgcgtgcgcgggcgtgggtgcggggggcgtttaagcaccagcaccaccctctcgcgtcgcgcgcgcgtctcgatgccgacggcgagccttccctcacgcgctggaccttcgaggagacaggctggcctctgcgagcgctctc

SEQ ID NO: 24670 - DNA, 159 bp, Zea mays
  Clone ID: LIB3152-056-P1-K1-H9
aaaaaaaaaaaaataaaaaattttttttaaacacaaaaaaaaaaaaaacacggcggtttatataaaatattaagtctctccccacaccacttccaatacataaaaataaataaaaacacttctcccccccccccacgataaccaactttaaccccctct

SEQ ID NO: 24671 - DNA, 143 bp, Zea mays
  Clone ID: LIB3152-057-P1-K1-A1
gaacaagcaacatagaacgtggaatttagtagcaacaatagctcaacaaaggcggccaggatatattccctgcggatgctccttgctcgtgctgcatgcgatgctaacgcgacaatgatccctaaatgctaacaagcacctat

SEQ ID NO: 24672 - DNA, 409 bp, Zea mays
  Clone ID: LIB3152-057-P1-K1-A10
aggaaggccggggcgacccacgcgtacgatttgcactcatgcatcacaatacattcttctatcagtaccatcaatcatgatggatcttagtagtatgggcaccaaatcaaatctgcaacatcaattatctaactccaaaaaccatgaagctggtgcttgtggttcttgctttcattgctttagtatcaagtgtttcttgtacacagacaggcggctgcagctgtggtcaacaacaaagccatgagcagcaacatcatccacaacaacatcatccacaaaaacaacaacatcaaccaccaccacaacatcaccagcagcagcaacaccaacaacaacaagttcacatgcaaccacaaaaacatcagcaacaacaagaagttcatgttcaacaacaacaacaacaaccgga

SEQ ID NO: 24673 - DNA, 296 bp, Zea mays
  Clone ID: LIB3152-057-P1-K1-A11
gacccacacatccgttttttttttttttttttttttttttttttttttttttttttttttttttgtgggtattttaaattgtgggtctttttaattttttttttttttttttttttttttaaaaaaccccggccccccctttaaaaaaacccaaactaacccccccctccatccaaacaaaaacctttttaaaagtccccccaaaattaaaataaccccccctcctttaacaaccgcgaaaccggaaaacaccccgcctaccccaacaaaaattccttaaaaaaaatccccctttc

SEQ ID NO: 24674 - DNA, 360 bp, Zea mays
  Clone ID: LIB3152-057-P1-K1-A2
gttttgagcattcagaaacacacttttcgcagctacctaacaacgactgaacaggaatggctaccaagatattatccctccttgcgcttcttgccctttttgcgagcacaacatatgtcaacattattacacaatgctcacttgcttctagtgccattataccacatttactgcgaccagatacttcaatggccttcgaacacatagctgtgcaagcctacaggctacaacaagcgcttgcagagagtgttttacaacaaccaaataatcaattgcaccaacaatggcttggcacattgaaccatacaaaccatgcgcacacaacagcaacaacagttcctaccagcactgagccaacta

SEQ ID NO: 24675 - DNA, 274 bp, Zea mays
  Clone ID: LIB3152-057-P1-K1-A3
ggggcgcgccacgcgtacgcctacctacttacttacttacccgtcactgttcaacgcgagtgcggcgacaggggggggcacacttccactggcttgaccgctctcggccctcggccccgcacgcgtggccgcaaggcgaggaggcaaaggcggcggacgggaatggagccagcagggacaccaaggaggcctttgcgcggatctacaagacgctcaacgaggagctgctcaccgacccgagctttgagttcaccgcggagtgacgccacaggat

SEQ ID NO: 24676 - DNA, 402 bp, Zea mays
  unsure at all n locations
  Clone ID: LIB3152-057-P1-K1-A4
agggcggggcgacccacgcgtaactagcaacatacatagtgaagttcatttgcaacatcttagcaccaatgggggccgggatttttgccctgcttgccctccttgctctttcagcaagcgctgttaccttgacttttattccacaatgctcacaacaatacctctctccggcgacagccgtgggatttcaatacccaactatacaatcctacatggtacaagaggccatccaagcaagcatcttacggncattagcattaaccctccaacaaccatatgctctattgcaacagccatccttagtgcatctgtatctccaaagaatcgcggtacaacaactacaacaacaggtgctaccaacaatcaatcaagtagttgcagcgaaccttgctgcttacctcc

SEQ ID NO: 24677 - DNA, 397 bp, Zea mays
  unsure at all n locations
  Clone ID: LIB3152-057-P1-K1-A5
ccgacccaaaccgatcgtcgtgtgcctggctctgtcatttgtcagcgcctctgcaatgcanatgccgtggcgcctgcgcgggggtggagggcttgtacggcgctggcgccggcctgacgacgatgatgggcgccggcgggctgtacccctacgcggagtacctgaggcagccgcagtgcagcccgctggcggcggcgccctactacgccgggtgtgggcagacgagcgccatgtaccagccgctccggcaacagtgctgccagcagcagatgaggatgatggacgtgcagtccgtcgcgcagcagctgcagatgatgatgcagcttgagcgtgccgctgccgccagcagcaacctgtacgagccagctctgatgcagcagcagcagcagctgctggc

SEQ ID NO: 24678 - DNA, 316 bp, Zea mays
  Clone ID: LIB3152-057-P1-K1-A6
aaaaaacgggccgacccacacgtccgaaccaagcaacataaaacgtcaaatttattttcaccaatacaacaacaacgacggccaggatattaaccctcctgaagctcctcactatttctgcatgacaacactaacgcgacaattttccctaaatgctaacaagctcctatagcttccattattcccacataccttccatcaattatttctacagtatacgaaaacccagctcttcaaccctatacgctacaacacgcaatcgcaccaagcaacatacatttatcacccttgtttcaacaattgccagacctatctt

SEQ ID NO: 24679 - DNA, 335 bp, Zea mays
  Clone ID: LIB3152-057-P1-K1-A7
attttgagcattcagaaacacaccatgcgaagctacctagcaacgacttaacagcaatggctaccaagatattagccctccttgcgcttcttgccctttttgtgagcgcaacaaatgcgttcattattccacaatgctcacttgctcctagtgccattataccacagttcctccgaccagttacttcaatgggcttcgaacacctagctgtgcaagcctacaggctacaacaagcgcttgcggcgagcgtcttacaacaaccaattaaccaattgcaacaacaatccttggcacatctaaccatacaaaccatcgcaacacaacagcaacaacag

SEQ ID NO: 24680 - DNA, 226 bp, Zea mays
  Clone ID: LIB3152-057-P1-K1-A8
acgtattattactcactaaccagttaactttcaaaggacagactggcaccaacggggggcacaaaaatactatgttcacttatgttgatagctcttaccgcaagtgttgccacaaggacaatattgacacaatgctcacatgcatggatcgtttcgatacatcaacgataactataagcatcgttgcaataaactgaaggaacccctgcttatcaaccctgcctta

SEQ ID NO: 24681 - DNA, 385 bp, Zea mays
  Clone ID: LIB3152-057-P1-K1-A9
gctccttggtctttctgcaagtgtttctaccgcaaccattttcccacagtgctggcaagctcctatagcttcccttcttcccccatacctctcaccagcggtgtcttcaatgtgtgaaaacccaattgttcaaccctacaggatccaacaggcaatcgcaacaggcatcttaccattatcacccttgttcctccaacaaccgtcagccctattacagcagttacctttggtccatttggtggcacaaaacatcagggcacaacaactacaacaacttgtgctagcaaaccttgctgcatactctcagcaacatcagtttcttccattcaaccaactggctgcattgaactctgctgcttatttgcaacaacaattaccattcagc

SEQ ID NO: 24682 - DNA, 390 bp, Zea mays
  Clone ID: LIB3152-057-P1-K1-B1
cacccgatcagcaacatggaaagcacaattttgtttcaacaaacacaacaaaaagaaggggctgatttatcttgcagggtgcctccctatcacatcttccagaacctttgcaatacaaatgccatacccctgcatagcgttctatgttttgtactacccttgaccacgcctgactacaataatggaaaccccaagtcttgacccctacacgatgcacctggcacaggcataacgcatcctacatttatgagcaccctacatcaaccaacctcaacttcaacaacctcagctacccaaaccttgctgaatactcttaacaacatcaagttcttccattcaaccaacttgctgtattgaactctgctgcttatttgcaacaacaattaccat

SEQ ID NO: 24683 - DNA, 446 bp, Zea mays
  unsure at all n locations
  Clone ID: LIB3152-057-P1-K1-B10
cgacgccacgaccgtccgcaaccaagggcaacgatatgaaagttggtaatctctatgtagcacacaaatatgacgcaaccaagtggcggagcgcaacgatattattcgcctgcgcttatcgcatccattcgcttcttttcatgcaatgatgttcgcttaacccgcgaccaannttttcccttcaatctgctcaccaacgcgtcctatacgcttaccctttacttccctccataccccttctcatcaatgatacgcttttcacgtatgtgaaaaaccccacgctctttcaacccctatatggctccaacccaagcaatcgcagcaatgcaaccaatacctttatcancccttgtttcaacacatctgccagctctatctttggtgcagtcattggtacaaaccatcagggcacaagagctgcagcaactcgtgctacctgtgatcaa

SEQ ID NO: 24684 - DNA, 382 bp, Zea mays
  Clone ID: LIB3152-057-P1-K1-B11
gaaacacaccaagcgaagcacattatcaacaacctaacaacaatggctaccaggggattatccctccttgcgcttcttgcgctttttgcgagcgcaacaaatgcgttcattattccacaatgctcacttgctccaagttccattattacacagttcctcccaccagttacttcaatgggcttcgaacacccagctgtgcaagcctataggctacaacaagcaattgcggcgagcgtcttacaacaaccaatttcccagttgcaacaacaatccttggcacatctaacaatacaaaccatcgcaacgcaacagcaacaacaattcctaccagcactgagccacctagccatggtgaaccctgccgcctacctacaacagcaac

SEQ ID NO: 24685 - DNA, 380 bp, Zea mays
  Clone ID: LIB3152-057-P1-K1-B12
gcgacatcgcgcgccagcttggcgccgccgttcccgggcagcaggccgcctgggaggcggaggaagaggcagcgaagaggaggaagcagaagggcggcggcagcaagaagcagcagcagctgggcgatctgagcctgaggaaggtcagggtcaagatcgccaacccgcacctgcggcgcctggttagcggcgccatcgccggcgccgtgtccaggacgtttgtggcgccgctggagacgatccggacgcacttgatggtcggcagcatcggcgtcgactccatggccggggtgttccagtggatcaccacctgccaccgccggtccatgtgccgccgccggttcatctgccgccgccaccatgccactaccctactcaac

SEQ ID NO: 24686 - DNA, 255 bp, Zea mays
  Clone ID: LIB3152-057-P1-K1-B2
caacaagcaacataaaacgtccaatttattttcaacaatagaacaacaacggcggccaggatatattaccgcctgagcctccttcctctttccccatgcaacactaacgcgacaattctcactcaatgctaacaatctcctatagctcccattcttcccccataccttccatcaattattgcttcactatatgaaaacccagctctttaaccctatagccttcaacacgcaatttcaccaagcaacataccttta

SEQ ID NO: 24687 - DNA, 409 bp, Zea mays
  Clone ID: LIB3152-057-P1-K1-B3
aaagaaagggggggccagagcgaccggttcagacttcaaaaacacaccagttatattcactaccaacaacctaacaacgggcggggccaaaatattagggggactcgctctacttgaccttaaagtgagcgcaacaaattcgttcattattccacagggctcacttgctcctacagccattattccacaccatctaccaccagttacttgaatgtgctgacatcattcaaccgtgcaagcctacaggctacaactagcgcttgcggcgagcgtcttacaacaaccaattgcccaattgcaacaacaatccttggcacatctaaacctacaaaccatcgtaacgcaacagcaacaacagtgtctgccatcactgagccacctagccgtggtgaaccctgtcgcctacttg

SEQ ID NO: 24688 - DNA, 408 bp, Zea mays
  unsure at all n locations
  Clone ID: LIB3152-057-P1-K1-B4
aaggggcgggccacgcgtacgccattatcacccttgttcctccaacatccttcagccctattacagcagntacctggggggcatttggtggcgcagaacatcagggcacaacaactacaacaacttgtgctagcaaaccttgctgcatactctcagcaacatcagtttcttccattcaaccaactggctgcattgaactctgctgcttatttgcaacaacaattaccattcagccagctagttgctgcctacccccagcaatttcttccattcaaccaactagcagcattgaactctgctgcttatttacagcagcaacaactactaccattcagccagctagctgatgtgagccctgctgccttcttgacacaacaacagttgttgccgttctacctgcacgctatg

SEQ ID NO: 24689 - DNA, 349 bp, Zea mays
  unsure at all n locations
  Clone ID: LIB3152-057-P1-K1-B5
gggaaaaaaccgggccgaccgcacccatccgaaccaagcaacatcaaacgtacaatttattttcaccaataaaccaccaacgccggcggggatattttaactcctgatgctcctnactctttctgcatgaaaccctaacgcgacaatttttactcaatgctcacaagctcctatagcttccctacttaccccataccttccatcaatgatagctacagtatgtgaaaacccagctcttcaaccctatatgctccaacaagcaatcgcagcaagcaacatacctttatcacccttgttacaacaatcgccagccctatctttggtgcatacatttctactcaccatcaac

SEQ ID NO: 24690 - DNA, 233 bp, Zea mays
  Clone ID: LIB3152-057-P1-K1-B6
aaaaacggggcggccgacgcgtacggaaccaacaacaacaacaacaacagttttttcaacaacatcaatgtgaaggccgggagcgttattaccaacggtggcacggccatgtgcaacaacacgaacagagccatgagcaacaccaaggacagagccatgagcaacaacatcaacaacaattcctggccctgatccgaacatttagtgcctggttagtggaaccatcacctgtg

SEQ ID NO: 24691 - DNA, 313 bp, Zea mays
  unsure at all n locations
  Clone ID: LIB3152-057-P1-K1-B7
agtaggaaaggttcgggcgacccacacgtccggcaacatagaaagcacaattttgtttcaacaatcgcaaccaaaanaagggggtggcttatattccggggtgtctctgcaagggctgctaccacaaccattttaccacaatgctcacaagcttctatagctttctttgttttgcaatacctttgaccagcgctgtctacaatatgtgaaaacccaattcttgaaccctacaggatgcaacaggcgaacgcagcatgcatcttacctttatcagccttgttcttccaacaaccgtgggcccacatacaccatg

SEQ ID NO: 24692 - DNA, 385 bp, Zea mays
  Clone ID: LIB3152-057-P1-K1-B8
ccgggggcgacccacgacgtccggaccggcgatgtcgccggcctgtatcatttcgacttccatgcaccctacgctgcggggcgggggtgttccccactggggaaactatgtgctgtagtatagccgctggctagctagctagttgagtcatttagcggcgatgattgagtaataatgtgtcacgcatcaccatgggtggcagtgtcagtgtgagcaatgacctgaatgaacaattgaaatgaaatgcaacaaaaaaaaatagaaaaaaacatactaataacaaccaatcgtctaacattaacaacacaccatttggggggctggacttagaaccacatccctttatgtcacaacaacaacacttaggggcggcccctttggggga

SEQ ID NO: 24693 - DNA, 384 bp, Zea mays
  Clone ID: LIB3152-057-P1-K1-C10
gttctgattctgatagtgaatttgtttctgacgatgaggatagcaatgcgtggggcagtaccacctggcggggctgctgctattaaaaagaagggagattctagtgagagctcagaaactgactcacagtcagattcagaagattcagaacctgaaaaacctactgtccctgcgaaaaggcctctagcaacaaataaaaagaatgaacaatccagcgagaaatctgatgacagctctgatgagagttctgatgaaagtgacgaggaacctccacaaaagaaaactaagaattctgcaccttctggtgctgcaaaggttgccactaatgtttcaaagaaaaaaagcagcagtgatgaagatgatgaaaattcagaagaaagctct

SEQ ID NO: 24694 - DNA, 414 bp, Zea mays
  Clone ID: LIB3152-057-P1-K1-C12
cgacgccacgacgtacccgatcatcagtgtcatcttagtacgtttatgtgcaccaacatcaaatctgcaacatcgggtgggctaactcacaaaagcgcggtgaagctggtgcttgtggttcttgctttcattgctttagtatcaagtgtttcttgtacacagacaggcggctgcagctgtggtcaacaacaaagccatgagcagcaacatcatccacaacaacatcatccacaaaaacaacaacatcaaccaccaccacaacatcaccagcagcagcaacaccaacaacaacaagttcacatgcaaccacaaaaacatcagcaacaacaagaagttcatgttcaacaacaacaacaacaaccgcagcaccaacaacaacaacaacaacagcaccaacaacaacatcaatgtgaa

SEQ ID NO: 24695 - DNA, 389 bp, Zea mays
  Clone ID: LIB3152-057-P1-K1-C2
caacaagcaacataaaacgtggaattcagtttcaacaatagagcaacaacggcggccgggatatatttgcgtgtgatgctccttgctctttctgcatgtcattgctaacgcgacaatgtttcctcaatgctcacaagctcctatagcttcccttcttcccccataccttccatcaatgattgctacagtatgcgaaaacccagctctgcaaccctataggctccaacacgcaatctcagccagcaacataccgttatcacccttgttccaacaattgccagccctatctttggagcagtcattggttcaaaccatcatggcacagtagcatgagtaactcgtgctacctgtgatcaaccaagtagctatggcaaacctttctacctact

SEQ ID NO: 24696 - DNA, 172 bp, Zea mays
  unsure at all n locations
  Clone ID: LIB3152-057-P1-K1-C3
gaaggaaaaaaagggccggccaaagaacaaacacattacaatacaccataaaatttttttgtaccacaacaaacaaaaaaacgggccggtactattataatccaggacctctccccaaantacccacccaataactcgcacaacattcttcttaaactatcacaacctcctc

SEQ ID NO: 24697 - DNA, 238 bp, Zea mays
  Clone ID: LIB3152-057-P1-K1-C4
tttccctcaatcgctaacaagctccttatagattcccaattcttcccccataccttgccatcaatgaattgctacagtataacgaaaacccacctcttcaaccctatacgctacaacacgcaatcgcacccagcatcatacctttatcacccttgtttcaacaatacccaaccctatcttttgttcagacattggttcaaaccatcatggcacactatctttaccaactcttgctacc

SEQ ID NO: 24698 - DNA, 406 bp, Zea mays
  Clone ID: LIB3152-057-P1-K1-C5
aaaaaggggcgggccgagcggaccaaaacacaccaggcgaaccgcactattactatccaaccaccattggctaccaaggggtgatccttccttgcgctggtggccctttttgcgagcgcaacaaatgcgtccattattccacaatgctcacttgctcctagttccattattccacagttcctcccaccagttacttcaatggccttcgaacacccagctgtgcaagcctataggctacaacaagcgattgcggcgagcgtcttacaacaaccaattgcccaattgcaacaacaatccttggcacatctaacaatacaaaccatcgcaacgcaacagcaacaacagtttctaccagcactgagccacctagccatggtgaaccctgtcgcctacttgcaacagcagc

SEQ ID NO: 24699 - DNA, 338 bp, Zea mays
  Clone ID: LIB3152-057-P1-K1-C6
aaaaacggggcgacccacgcgtacgcaacaagcaacatcaaacgtacaatttattatcaacaataaaccaacaacaacggcggggatattataaatcctgatgctccttactcaatctgcatgcaacgctaaagctacaattattactcaatgctgacaacctcctatagcttacattatttcacaataccttccatcaatgactgctaaagtatacgaaaacccagctcttcaaccctatacgctacaacaagcaatctcagccagcaacatacatttatcacccttcgatcaacaatagccagccttatctttggtgccatcacagactcaaacca

SEQ ID NO: 24700 - DNA, 287 bp, Zea mays
  Clone ID: LIB3152-057-P1-K1-C7
catcaatcaacatcaaacgtttatttctatagcaacaacaaaccaacagcggcggctaatataaaagcccgcctcacccacctcaatctattttcatgaaacactaacaatacaattattattcaatactcacaacctcctataaattccattattacaccataccttccatcaattactgcaatagactatgaaaacccaccttttcaaccctataggctccaacatgcaatctcagaaagcatcatacaattaccacccttcgtaatacaataaccatccttatc

SEQ ID NO: 24701 - DNA, 425 bp, Zea mays
  unsure at all n locations
  Clone ID: LIB3152-057-P1-K1-C8
gaaanggaaggggccggggcgagcccacgcggtccgtgaacctctgctcgcttaatatttctgttttctaacaactacctaccatatcagcccggctagcgtgactgactacgccccggcaatcttcttccattcaaccaactcggcagcattgaacatctcatgcttatgtacaacaacaacaactactaccattcagccagctagctgctgtgagccctgctgccttcttgacacagcaacatttgttgccgttctacctgcacactgcgcctaacgttggcaccctcttacaactgcaacaattgctgccattcgaccaacttgctttgacaaacccagcaatgttctaccaacaacccatcattggtggtgccctcttttagattgcttatgagttatagttcaataataaaggttttttt

SEQ ID NO: 24702 - DNA, 338 bp, Zea mays
  Clone ID: LIB3152-057-P1-K1-C9
gatcagcaaagcggcagtgcgtagagaggatcgtcgaacagaacagcatgaagggggtcatcgttctcgtcgtgtgcctggctctgtcagctgccagcgcctctgcaatgcagatgccctgcccctgcgcggggctgcagggcttgtacggcgctggcgccggcctgacgacgatgatgggcgccggcgggctgtacccctacgcggagtacctgaggcagccgcagtgcagcccgctggcggcggcgccctactacgccgggtgtgggcagacgagcgccatgtaccagccgctccggcaacagtgctgccagcagcagatgaagatgatggacgtg

SEQ ID NO: 24703 - DNA, 292 bp, Zea mays
  Clone ID: LIB3152-057-P1-K1-D1
caacaagcaacataaaaagtggaatttagtttcaacaatagaacaacaacgggggccgggatatattcgctgcggatgctcctcgctctttctgcatgcaacgctaacgcgacaatgctccctcaacgctcacaagctcctataggttccattctttcctcgataccttccatcaacgattgcttaagtctgtgaaaacccacctctgcaaccctatacgctccaacacgcaatcgtagcaagcaacatacctttatcacccttgttgcaacaatcgccagccctatctttg

SEQ ID NO: 24704 - DNA, 415 bp, Zea mays
  Clone ID: LIB3152-057-P1-K1-D10
gaacggaaacgggcggggcgacccacacgtccgccagaaataagaaatgtccttttttttttgtggcaagccacaaaacatcgggggggaccaaatacaggggggggagctatcaaaccttgctgtctactctaagcaacaccagttacctatggggcatttgatgacacaaaacatcagggcacaccacctacaacaactggagctagcaaaccttgctgtctactctaacaaacaacagcatctgacattcaaccaactagctgcattgaactctgttgcttatttgcacaaccaacaactactaccattcaggcagctagctactgcctaccatcggtaatatcttacattcaaccaactggcaacattgaactttaatgcttatagccaccaacaccaactactaccattc

SEQ ID NO: 24705 - DNA, 385 bp, Zea mays
  Clone ID: LIB3152-057-P1-K1-D11
gcgcacccggttccgcgtgccttttcccacctactctcgcggctctcgccagccagtctagggtttcggtcccggcgtgcttatccgcccccgccggccatgtcgaagcaaggagggaaggccaagccgctgaaggcgcccaaggccgacaagaaggagtacgacgagacggatcttgcatatctgcagaagaagaaagatgaggaaaaagcactgaaggagcttaaggccaaggcacagaagggcgcgattgggggctcgggtctgaagaaaagtggaaagaaatgagactggtcacccgtctccaatacctagaggatgataaggcagctgtctatctgtgttgcgcttcactaagtgtgattgtaacagtggtacctcttgt

SEQ ID NO: 24706 - DNA, 385 bp, Zea mays
  Clone ID: LIB3152-057-P1-K1-D12
tgagaccaactagcaacatagaaagcacaatagtgtaccaacaatggcaggcaggatattttgcctccttatgctccttggtctttctgcaagtgctgctacggcgaccattttcccgcaatgctcgcaagctcctatagcttcccttcttcccccgtacctctcaccagcggtgtcttcggtatgtgaaaacccaattcttcaaccctacaggatccaacaggcaatcgcagctggcatcttacctttatcacccttgttcctccaacaatcatcagccctattacaacagttacctttggtgcatttattggcacaaaacatcagggcacaacaactacaacaacttgtgctagcaaaccttgctgcctactctcagcaacag

SEQ ID NO: 24707 - DNA, 385 bp, Zea mays
  Clone ID: LIB3152-057-P1-K1-D2
gaacaagcaacatagaaagtggaatttttttgcaacaatagagcaacaatggcggccaggatattttccctgcttatgctccttgctctttctgcatgcgttgataacgcgacaattttgcctcaatgctcacaagctcctatagcttcccttcttcccccataccttccatcaatgatagcttcagtatgtgaaaacccagctcttcaaccctataggctccaacacgcaatcgcagcaagcaacatacctttatcacccttgtttcaacaattgccagccctatctttggtgcaggcattggtacaaaccatcagggcacagcagctgcagcaactcgtgctacctgtgatcaaccaagtagctctggcaaacctttctccct

SEQ ID NO: 24708 - DNA, 407 bp, Zea mays
  Clone ID: LIB3152-057-P1-K1-D3
taggaaaacccggggcgcgccacgcgtccgcaacaagcaacatataaagtggaatttagttgcaacaatagagcaacaatggcgggcgggatattttccctccttatgctccttgctctttctgcatgtgttgctaacgcgacaattttccctcaatgctcacaagctcctatagcttcccttcttcccccataccttccatcaatgatagcttcagtatgtgaaaacccagctcttcaaccctataggctccaacaagcaatcgcagcaagcaacatacctttatcacccttgtttcaacaatcgccagccctatctttggtgcagtcattggtacaaaccatcagggcacagcagctgcagcaactcgtgctacctgtgatcaaccaagtagctctggcaaacct

SEQ ID NO: 24709 - DNA, 407 bp, Zea mays
  Clone ID: LIB3152-057-P1-K1-D4
aaaaaacccgggcggcccacacgtacggaacaagcaacataaaacgtggaattttttatcaacaatagaccaacaacggcggccaggatattatacctgcggatgctccttgctctttctgcatgtgtcgctaacgcgacaattttccctcaatgctcacaagctcctatagcttcccttcttcccccataccttccatcaatgatagcttcagtatgtgaaaacccagctcttcaaccctataggctacaacaagcaatcgcagcaagcaacatacctttatcacccttgtttcaacaatcgccagccctatctttggtgcagtcattggtacaaaccatcaaggcacagcagctgcagcaactcgtgctacctgtgatcaaccaagtagctctggcaaacctttc

SEQ ID NO: 24710 - DNA, 206 bp, Zea mays
  unsure at all n locations
  Clone ID: LIB3152-057-P1-K1-D5
gaaaggacggggcgggccgacccatacgtagaccacaaggcattataaaaaggttttttccatngccaccaaagaagcaacaggggggaccaaaaaatttgcggtcctaatgctctttgttctttttacatgtgtggctaacgcgccaattttccttaaatgctcacacgctcctttagctcccatttttccccaataccttccat

SEQ ID NO: 24711 - DNA, 405 bp, Zea mays
  unsure at all n locations
  Clone ID: LIB3152-057-P1-K1-D6
gaaaaaccggggcggcccacacgtacggcggcagtgcgtatagaggatcgttttacttgaacagcatgaagatggncatcgtgcggcgtttgtgcctggcgtcggtcagctgccagcgcctctgcaatgcagatgccctgcccctgcgcggggctgcagggcttgtacggcgctggcgccggcctgacgacgatgatgggcgccggcgggctgtacccctacgcggagtacctgaggcagccgcagtgcagcccgctggcggcggcgccctactacgccgggtgtgggcagacgagcgccatgtaccagccgctccggcaacagtgctgccagcagcagatgaggacgatggacgtgcaatccgtcgcgcagcagctgcaaatgatgatgcagcttgagcgtgcc

SEQ ID NO: 24712 - DNA, 373 bp, Zea mays
  Clone ID: LIB3152-057-P1-K1-D7
cttgcaacagctgcttccattcaattaactgactgtgtcgaactctgctgcgtgcctacaacagcgacaacagttacttaatccactagcagtgcctaacccattggtcactgccttcctacagcagcaacaattgctaccatacagccagttctctttgatgaaccctgccttgtcgtggcagcaacccatcgttggaggtgccatcttttagattacatatgagatgtaatcgataatggtgccctcataccggcatgtgtttcctagaaataatcaatatattgattgacatttatctcgccataaaatatttttattttttattatttacattctaatttttttttaataattactttttattattttt

SEQ ID NO: 24713 - DNA, 359 bp, Zea mays
  Clone ID: LIB3152-057-P1-K1-D8
attttcagcattcagaaacattccattcgaagcgcactagcaacaacctggcaggaatggataccaagatggtagccctacttgcgcttcttgcccttttagtgagcgcaacaaatgcgttcattattccacagtgctcacttgctcctagtgccattattccacagttcctcccaccagttacttcaatgggcttcgaacatccagccgtgcaagcctacaggctacaactagcgcttgcggcgagcgtcttacaacaaccaattgcccaattgcaacaacaatccttggcacatctaaacctacaaaccatcgtaacgcaacagcaacaacaggtttttgccataactgagccacct

SEQ ID NO: 24714 - DNA, 381 bp, Zea mays
  Clone ID: LIB3152-057-P1-K1-D9
agcattcagaaacacaccaagttattcgcactagcaacaacctaacaacagggggtaccaagatattatccgtccttgcgcttcttgcgctttttgcgagcgcaacaaatgcgtccattattccacaatgctcacttgctcctagttccattattccacagttcctcccaccagttacttcaatggccttcgaacacccagctgtgcaagcctataggctacaacaagcgattgcggcgagcgtcttacaacaaccaattgcccaattgcaacaacaatccttggcacatctaacaatacaaaccatcgcaacgcaacagcaacaacagttcctaccagcactgagccacctagccatggtgaaccctgtcgcctacttgc

SEQ ID NO: 24715 - DNA, 325 bp, Zea mays
  Clone ID: LIB3152-057-P1-K1-E1
gaaaagaacgggccggccgacccatacgtaccaagcaacataaaaacaccaattttttaccaccaatagcacaccaacaacggcggggacttaatatcttcggatgctccgcaatctttcctaccgcaaccctaaacccacaatgctcacaaactgctatcaatctcctattgctcccatacttctcaccaaccttgcatcaaagatactcaaaaccctcattaaaccccacttctggaaccctctagccttcaacacatcattgtccatagcaacatatctttatcacctttcctccaacaatcgccagatttatcctacttgc

SEQ ID NO: 24716 - DNA, 298 bp, Zea mays
  unsure at all n locations
  Clone ID: LIB3152-057-P1-K1-E10
ggaaggaacgaaaacccgggcgacccacacgtccgacaatgcatcatataacatttatttctataccaacaaaacactaacacgcggcggacaatataaaagggtggtgtaatctaaccaagtaagtanctccaatccaactacatacacttatcattaaatgctcacacattactctccatctattacttaactcattccttcaaaccttattggcaactttctacaaactaccaacattttaaccactatctcttacaacatataatctctacctgcaacatacaatactcactct

SEQ ID NO: 24717 - DNA, 383 bp, Zea mays
  Clone ID: LIB3152-057-P1-K1-E11
aacagtttctgccagcgcttattcaactagccatggtgaaccctgccgcgtacgctacaacagcaacaactgctttcatctagcccgctcgctgtggccaatgcacctacatacctgcaacaagaattgttgcaacagattgtaccagctctaactcagctagctgtggcaaaccctgttgcctacttgcaacagctgcttccattcaaccaactaactatgtcgaactctgttgcgtacctacaacagcgacaacagttacttaatccattggcagtggctaacccattggtcgctgccttcctacagcagcaacaattgctgccatacaaccggttctctttgatgaatcctgtcttgtcgaggcagcaacccatcgttgg

SEQ ID NO: 24718 - DNA, 209 bp, Zea mays
  unsure at all n locations
  Clone ID: LIB3152-057-P1-K1-E12
gcattcataaacacaccaagctattctttttcaacaacttcacaacaatggctggaaaataaaaagctggttgcacttattacactttatgngagcgcaacaaatacattcattattccacaatgcttactttctcctaaatccattataacacagttccttccaccaattactttaattactttcaaacacttatctcatcaaaccta

SEQ ID NO: 24719 - DNA, 357 bp, Zea mays
  Clone ID: LIB3152-057-P1-K1-E2
ctcatcgactccagattggagaactttacaccatgaaggtgctgatcgatgcccgtgggctcctggcgctcgctgcgagcgccgcctccagtacaagcggcggctgtggctgccagacaccaccgtttcatctaccgcctccgttctatatgccgcctccgttctatctgccgccgcagcagcagccgcagccatggcaataccccactcaaccaccgcagctaagcccgtgccagcagttcggatcctgcggcgtcggcagcgtcggcagaccgttcctgggccagtgcgtcgagttcctgaggcaccagtgcagcccggcggcgacgccctacggctcgccacagtgccaggcgc

SEQ ID NO: 24720 - DNA, 292 bp, Zea mays
  Clone ID: LIB3152-057-P1-K1-E3
ggaaaaaacggggcgggccacacgtacgcaacaagcaacatagaaagtacaattttgttccaacaatagcacaacaaagacggcggggatatatacactccgtgcgctccccaatttttgttcatgtaacgcttacgccacaattatccctcaatgctaacacgctcctatatcttccattcttcccccataccttccatcaaatatatcttaaccctatgaatacccacctcttcatccctctcggcttcaacacgcaattcacgattccaacatacctttattaccctcc

SEQ ID NO: 24721 - DNA, 299 bp, Zea mays
  Clone ID: LIB3152-057-P1-K1-E4
ccacgcgtccggaccatgcaacatttaacgtgaaattttttttcaccaatagaccaccaacggcggcgaggatatttaccctgcggatgctcctcactctttctgcatgaaacgataacgcgacaatgatcactcaatgctgacaagctcctatagcttccattcttccaccataccttccatcaatgattgctacagtctgtgaaaacccagctcttcaaccctataggctacaacacgcaatcgcagcaagcaacatacctttatcacccttcgtttaacaatagccagccctatct

SEQ ID NO: 24722 - DNA, 311 bp, Zea mays
  Clone ID: LIB3152-057-P1-K1-E5
tttttaccaacaaccaaacaacaagggcgggcaaattataaagcctgcttgcccttcttgcgctttaagcgagcgcaacaaatacattcattattcacacaatgataacttgctacaagttccattattacacaatacctcccaccaattactgcaataggcttcgaacacccagctgtgcaagcctataggctacaacaagcaattgcggcgagcgtcatacaacaaccaactttcgagttgcaacaacaatccttgtcacatgtgacaatacaaaccctcgcaactcagcagcaacaacatgtcctacc

SEQ ID NO: 24723 - DNA, 356 bp, Zea mays
  Clone ID: LIB3152-057-P1-K1-E6
aggggcgcgccacgcgtacggagcattcagaaacacaccaagcgttgctttttagcaacaacttaacaacaatggctggcaagatattatccctgcttgcgcttcttgcgctttttgcgagcgcaacaaatgcgttcattattccacaatgctcacttgctccaagtgccattattccacagttcctcccaccagttacttcaatgggcttcgaacacccagctgtgcaagcctataggctacaacaagcaattgcggcgagcgtcttacaacaaccaatttaccaattgcaacaacaatccttggcacatgtaaccatacaaaccatcgcaacgcaacagcaacaacaagttcta

SEQ ID NO: 24724 - DNA, 337 bp, Zea mays
  unsure at all n locations
  Clone ID: LIB3152-057-P1-K1-E7
aaaaaacggnnggggnngaaaaaaaaaaanaanaaanaaaaaaaaaataanaatttttattttaataaaaaaaaaaaaaaaaaaaaagacggggggggtaaaaaaaaaggggggggggggaaaaaaaaaaaaaaaaaaaaaaaaaaaataaaaaaataaaaaaaaaaataaaaaaaaaaaataaaaaaataataaaaaaaaaaaaaatattaatataaaaataaaattatatataaaaaaaaaatatttaaaaaatttataataaataataaaataatataataagataaaaaaaaaatattatataaataaaaataaaaaaaaatatattaataaa

SEQ ID NO: 24725 - DNA, 376 bp, Zea mays
  Clone ID: LIB3152-057-P1-K1-E8
tgcagcccggcggcgacgccctactgttcgccacagtgccaggcgctgcagcaggggtgctgccaccagatcaggcaggtggagccgctgcaccggtaccaggcgacatacggtgtggtcctgcagtccttcctgcagcagcagccgcagggcgagctcgcggcgctgatggcggcccaggtagcgcagcagctgacggcgatgtgcggcctgcagctgcagcagccaggtccctgcccttgcaacgcagctgccggcggtgtctactactgaggaaactatgtactgtagtaataatgtaatggagccgctgactagctacctagctcgctaggttactcatttagcggcgatgagtaacgtagtgtcacccatc

SEQ ID NO: 24726 - DNA, 279 bp, Zea mays
  Clone ID: LIB3152-057-P1-K1-E9
gcggcggcggcggccttcacgtactatgccttcgccgcctatacttgcgctgggtcgagcccatgaatggtggtctaaacacaccaaggaaggatctttctccacacttcgcaattttggaccacgagatgcacttccttgcatcatttcatgtccctacaggttttgtgttatctggtttgtcgggatggatgccaaaaagttcctgcagctgttcgaagagaagaaaaggaggatcctcgcgaagaaagaagcccccctaaaatggcagcaagaagc

SEQ ID NO: 24727 - DNA, 341 bp, Zea mays
  Clone ID: LIB3152-057-P1-K1-F1
gcgtccgaacaagcaacataaaaagcacaattttttaccaacaatccaacacaaacaacggcggggatttataatcttcggccgctccgcaagagttcctaccgcaaccattaaaccacaatgctcacaagctcatataaatctcctacttccctcatacctctaaccaacctaccatcaaatgtttcaaaacccaattactcaaccgttcagcatcccactagccaacagcacatcatttaccactgcgtcatatagttaccacctaccctccaacaatcgttacacttatcccactagcaacatttgactctgctgctgattcaccacatcaacaacta

SEQ ID NO: 24728 - DNA, 252 bp, Zea mays
  Clone ID: LIB3152-057-P1-K1-F11
tgccttctgcgcctccatttttgcttctgtcccttgcaagttcaatctcgcctgcgaccatgggtaaagggaagtcccacatcaacattgtggttattggccatgtcgactctggcatgtcgaccaccacaggacaccttatctacaagctttgatgcattgacatgcgtgtgatcgtaatgttcttgtaggattttctttttatgaacttttttgtctataatatacttcttttttttatattttattttt

SEQ ID NO: 24729 - DNA, 382 bp, Zea mays
  Clone ID: LIB3152-057-P1-K1-F12
attgagaccaactagcaacatagattgcacaatagtgtaccaacaatggcggccggaatattttgcttgcgtatgctccttggactttctgcaagtgctgctaccgcaaccattttcccacaatgctcacaagctcctatagcttcctttcttcccccatacctctcaccagcggtgtcttcagtatgtgaaaacccaattcttcaaccctacaggatccaacaggcaatcgcagcaggcatcttacctttatcacccttgttcctccaacaaccgtcagccctattacagcagttacctttggtgcatttgttggcacaaaacatcaaggcacaacaactacaacaacttgtgctaggaaaccttgctgcctactctcagc

SEQ ID NO: 24730 - DNA, 388 bp, Zea mays
  Clone ID: LIB3152-057-P1-K1-F2
aaacccggggcggcccacgcgtccgcaactagcaacatagaaagcacaattgtgtaccaacaatggcagacaaaatatggggggtacttatgctcgttggactctctgcaagtgttgctaccgcaaccattttcccacaatgctcacaagctcctatagctttccttcttcccccatacctctcaccagcggtgtattcaatgtgtgaaaacccaattgttcaaccctacaggatccaacaggcaatcgcaacaacaattaccattcagccagctagttgctgcctacccccagcaatttcttccattcaaccaactagcagcattgaactctgctgcttatttacagcagcaacaactactaccattcagccagctagctgatgtga

SEQ ID NO: 24731 - DNA, 334 bp, Zea mays
  Clone ID: LIB3152-057-P1-K1-F3
caactagcaacatagaaagcacaattttgttccaacaatggcagaccaaatatgggggggacttatgctcggcggacgctccgcaagtgttgttaccgcaaccattatcccacaatgctcacaagatgctatcaatttcctacttcccccatacctctcaccaaccttgcatcaaatgtgtgaaaaccctattgataaacccttctggatccatctggccttcaacacaccaatgaccattgcgacatatagttactacctaccctcaaacatttgttacatttaaccaactagcagcattgaactctgatgattatttacacaaagaacaact

SEQ ID NO: 24732 - DNA, 391 bp, Zea mays
  Clone ID: LIB3152-057-P1-K1-F4
gacccacgacgtcccggaacattgcaacatacacacgacagaatttttgtatttaaccaacagcactaacaacaatcggggacggacaaaatcaccgcctgcttcgtccttaatgttgttttaaccgcaacgctacaaaccacaatgattactccatactgataacttcctacatcttccattcttacaccataccttccatcaattacttcaaaaccctatgaacacccagttctgcaaccctataggctacaacacgcaattgccgctagcgacatacatttaccaacttcccagaaacaataacaatatttatctcatttgccattataaactctaaccatgattcaccatcaacactacttatcacatctaagctgcttacatcatg

SEQ ID NO: 24733 - DNA, 374 bp, Zea mays
  Clone ID: LIB3152-057-P1-K1-F5
ccggtcgctccccttcccatctccatcttgatttcgattctctggtggctgggaaagcctgcgagagcgcgataaccggaaagatctgagctgctgcaaccgatctccggcgccatggggttcctcgaggacttccaagccagtgttgaagcattgccatctatgctgcatcggaactattcattaatgcgagagttggataaaagtttgcatggtgtgcaactagaaaatgagcagcgctgtcaacaagaaatagaggacattaagcatggacttgaatctggaagtattacatatgacccagcaaaattgaaattttccgaagaagcaatggaggagcagaaacattgtgttagaattgctgacgagaaggt

SEQ ID NO: 24734 - DNA, 386 bp, Zea mays
  Clone ID: LIB3152-057-P1-K1-F6
gagcattcagaaacacaccaagcgatttttattagcaacaacctaacaacaatgggctcggaagatattatcccggcttgcgcttcttgcgctttttgcgagcgcaacaaatgcgttcattattccacaatgctcacttgctccaagttccattattacacagttcctcccaccagttacttcaatgggcttcgaacacccagctgtgcaagcctataggctacaacaagcaattgcggcgagcgtcttacaacaaccaatttcccagttgcaacaacaatccttggcacatctaacaatacaaaccatcgcaacgcaacagcaacaacaattcctaccagcactgagccacctagccatggtgaaccctgccgcctacttgcaac

SEQ ID NO: 24735 - DNA, 310 bp, Zea mays
  Clone ID: LIB3152-057-P1-K1-F7
gaccatacataaacacaccatgttttttacataagcaacatcctaacaacgggggctaccatacatattatcgcctcctcgcgcttactcctcttttctcgacacgcaacaaatgcgttcattattcacacaatgatcacttgctccatatccattattacacagacactctcaccagttacttcaacgcgctccaaacacccacctgcgcaagcctatagtttacatcaagcatttgcgcccagctttttacaacaaccaatttcccaggtgcaacaacaatgcttggcacatctaacaatacaaacca

SEQ ID NO: 24736 - DNA, 236 bp, Zea mays
  Clone ID: LIB3152-057-P1-K1-F8
gagcatccaaaaacacaccactcgatgtacattaccaacaacctaacaacggtggctaccaaaatattatggctcctaacactattgcgctatctccaaacacaacaaattcattcaatattccacaatgcttacttgcttcatttttcattattacacagtaccttccaccaaatactttaatatgctcctaacactcattttttgctaacctataagctttaactatctaattt

SEQ ID NO: 24737 - DNA, 334 bp, Zea mays
  Clone ID: LIB3152-057-P1-K1-F9
aaaggaaaggaaaggggggggcgacacacgcgtccggccgccggttcatctaccgttttttttatgccactaccctactcaaccgggccgggcttatactcagggggggccacacccatgcccgtgccaacagccgcatccaagcccgtgccagctgcagggaacctgcggcgttggcagcaccccgatcctgggccagtgcgtcgagtttctgaggcatcagtgcagcccgacggcgacgccctactgctcgccttagtgccagtcgttgcggcagcagtgttgccagcagcttatgcaggtggagccgcagcaccggtaccaggcgatcttc

SEQ ID NO: 24738 - DNA, 366 bp, Zea mays
  Clone ID: LIB3152-057-P1-K1-G1
gaaaaaacgggccggccacgcgaccgattgagaccaactagcaacatagattttttaatagtgtaccaacaatggcagccgggggattttgattccttatgctccttggactttctgcaagtgttgctaccgcaaccattttcccacaatgctcacaagctcctatagcttcccttcttcccccatacctctcaccagcggtgtcttcaatgtgtgaaaacccaattgttcaaccctacaggatccaacaggcaatcgcaacaggcatcttaccattatcacccttgttcctccaacaaccgtcagccctattacagcagttacctttggtccatttggtggcacaaaacatcatggcacaacaac

SEQ ID NO: 24739 - DNA, 380 bp, Zea mays
  Clone ID: LIB3152-057-P1-K1-G10
gaaggaaaagccggggcgacccacacgtccgattcagaaacacaccaagcgtttctttctagcaacaacctaacaacaatgggtggcaagatattatccctggttgcgcttcttgcgctttttgcgagcgcaacaaatgcgtccattattccacaatgctcacttgctcctagttccattattccacagttcctcccaccagttacttcaatggccttcgaacacccagctgtgcaagcctataggctacaacaagcgattgcggcgagcgtcttacaacaaccaattgcccaattgcaacaacaatccttggcacatctaacaatacaaaccatcgcaacgcaacagcaacaacagttcctaccagcactgagccacct

SEQ ID NO: 24740 - DNA, 380 bp, Zea mays
  Clone ID: LIB3152-057-P1-K1-G11
tgcatttattggcacaaaacatcagtgcacaacaactacaacaacttgggctgggaaaccttgctgcctggtctcagcaacagcagtttcttccattcaaccaactagctgcattgaactctgcttcttatttgcaacaacaacaactaccattcagccagctacctgctgcctacccccagcaatttcttccattcaaccaactggcagcattgaactctcctgcttatttacagcagcaacaactactaccattcagccagctagctggtgtgagccctgctaccttcttgatacaaccacagttgttgccgttctaccagcacgctgcgcctaacgctggcaccctcttacaactgcaacaattgctgccattcaac

SEQ ID NO: 24741 - DNA, 410 bp, Zea mays
  Clone ID: LIB3152-057-P1-K1-G12
aggaagggccggggcgacccacacgtccgcaacaagcaacatagaaagtttaattcagtagcaacaatagagcaacaggggcgggcaagatattttccatgcttatgctccttgctctttctgcatgtgttgctaacgcgaccatttttcctcaatactcacaagctcctatagctgcccttcttcccccataccttccatcaatgaccgcttcagtatgtgaaaacccagcccttcaaccctacaggctccaacaagcaatcgcaacaagcaacttacctttatcacccctgttctttcaacaatcgccagccctatctttggtgcagtcattggtacaaaccatcagggcacaacagctgcagcaactcgtgctaccagtgatcagccaagtagctctggcaaacctt

SEQ ID NO: 24742 - DNA, 309 bp, Zea mays
  Clone ID: LIB3152-057-P1-K1-G2
gggaaaaaaaggggccgacccacacgtccgaaccttgcaacataaaaagaacaattttttatcaacaatccaacaccaacaacggcggggatttatacacttctgccgctccacaattcttcataccccaacactataaccacaatgctcacaaaatcatatcaatttcctatttcccccatacctccaacctacctaccatcaaatatttcaataccctattaacaaacacttctgcaaccctatagcctacaacacatcatttcccacagcgtcatacatttaccacctatcctccaacaaccgtta

SEQ ID NO: 24743 - DNA, 348 bp, Zea mays
  Clone ID: LIB3152-057-P1-K1-G3
gcaacattgcaacatacaaaagacacaatttttgtatcaacaatagcaccaccaacaatgcgcggggatttatacatcgtcggcctctcctcaattgttgctaccgcaaccattaaaccacaatgctcacaagataatattaatttcctacttcccccatacctacaaccaaccttccatcaaatatttgaaaaccctattaacaaacacttcagcaaccatctaggcttcaacacaccatttaccattgagtcatatagttactacctacccacaaacaataattacatttaacccacttgcagcaatgaactctgatgattatttacacacaacacaactactacc

SEQ ID NO: 24744 - DNA, 362 bp, Zea mays
  Clone ID: LIB3152-057-P1-K1-G4
gaaggaaaaaaggggcccgccacgcgtccgcaacattcaacatcacaccaacaattcttttttaacaacaacctaacaacaatggccccgacaatttcaaccctgcttgccctaattgctctttacccaaaccctacaaccacaattattactccataatattcacttcctacaacttccattcttacacccttccttccatcaaatacttcaatacccttttaacacccacttctgcaaccctataggctacaacacaccatttcccctagcgtcatacaacaaccaacttcccatatgcaacaacaatacttatcccatttgacaatacaaaccactctaactattcaccaacaacactt

SEQ ID NO: 24745 - DNA, 393 bp, Zea mays
  unsure at all n locations
  Clone ID: LIB3152-057-P1-K1-G5
gaaaaaaggggcgagccacgcgtacggagcattcanaaacacaccaagcttttttttttaacaacaacctaacaacaacggctggcaatatattatccctggttgcgcttcttgcgctttttgcgagcgcaacaaatgcgttcattattccacaatgctcacttgctccaagttccattattacacagttcctcccaccagttacttcaatgcgcttcgaacacccagctgtgcaagcctataggctacaacaagcaattgcggcgagcgtcttacaacaaccaatttcccagttgcaacaacaatccttggcacatttaacaatacaaaccattgcaacgcaacagcaacaacaattcctaccagcacttagccacctagtcatggtgaacc

SEQ ID NO: 24746 - DNA, 86 bp, Zea mays
  unsure at all n locations
  Clone ID: LIB3152-057-P1-K1-G6
cggaaggaaaaanggggcgggcacgcgtacaaagctttcataaacacaccaacctttttttattaacaacaacctaacaacaatgg

SEQ ID NO: 24747 - DNA, 331 bp, Zea mays
  Clone ID: LIB3152-057-P1-K1-G7
gagcattcagaaacacaccattcgattcacattagcaacaacctaacaacggtggctaccaagatattatgcctccttgcgcttcttgcgctttttgcgagcgcaacaaatgcgttcattattccacaatgctcacttgctccaagttccattattacacagttcctcccaccagttacttcaatgggcttcgaacacccagctgtgcaagcctataggctacaacaagcaattgcggcgagcgtcttacaacaaccaatttcccagttgcaacaacaatccttggcacatgtaacaatacaaaccattggaacgcaacagcaacaacaat

SEQ ID NO: 24748 - DNA, 347 bp, Zea mays
  Clone ID: LIB3152-057-P1-K1-G8
aactagcaacatacaaagcacttttttgtaccaacaatggcagccaaaagggtgggcttccttatgctccgggggctttctgcaagtgctgctaccgcaaccattttcccacaatgctcacaagctcctatagcttcctttcttcccccatacctctcaccagcggtgtcttcagtatgtgaaaacccaattcttcaaccctacaggatccaacatgcaatcgcaccaggcatcttacctttatcacccttgttcctccaacaaccgtcagccctattacagcagttacctttgctgcatttgttggcacaaaacatcaaggcacaacaactacaacaacttgtgct

SEQ ID NO: 24749 - DNA, 488 bp, Zea mays
  unsure at all n locations
  Clone ID: LIB3152-057-P1-K1-G9
aacggaattcgccggggtcgagcccacgacagtccgcaccacaccaacctacgatctccctttaatattcacnnccgtcggcaccctccgcattcaaggatgcgagatcatttgatgagaagcggcctgacnncggacaagactttatcannccctcnngaggttggaagtcgtcttgacaaccatttgaccacacgttatagtgcctaagaatccagtgacaatggatgggcattcctccccagaccctagcagcggcttcaatcttcgcttggctaaacacgctttgaggacccgggcgcactgcttttgctgacttaccccacatccagaagggagatgcaccccttccaacctttgtgcttccgccttcagtgggacggcaatgctagattcttttgtgaaaaacccttgactcggcaatgacttattcaccctcgagtgtggagtccctctgacaaccattgacaacgttaaaggccaaagat

SEQ ID NO: 24750 - DNA, 397 bp, Zea mays
  Clone ID: LIB3152-057-P1-K1-H1
gaaaaacggggcggcccacgcgtccgggtcttcagaccattagctttatctactctagagcgcagaagaacccgatcgacgccgtgagggtgttgctcgtggccctcgctctcctggctctcgctgcgagcgccacctccacgcatacaagcggcggctgcggctgccagccaccgccgccggttcatctaccgccgccggtgcatctgccacctccggttcacctgccacctccggtgcatctcccaccgccggtccacctgccgccgccggtccacctgccaccgccggtccatgtgccgccgccggttcatctgccgccgccaccatgccactaccctactcaaccgccccggccttagcctcatccccagccacacccatgcccgtgccaaca

SEQ ID NO: 24751 - DNA, 198 bp, Zea mays
  Clone ID: LIB3152-057-P1-K1-H10
caactagcaacatagaaagcacaattgtgtaccaacaatggcagccaaaggatgttgcctcctaatgctcgtgggccttcctcaaagtcctgttccgccaccaattttccaccattcctaccagcttccatataccttcctttttaccccgtaccttttaccaaccgtgtgttttggatttgaaaacccaatttttta

SEQ ID NO: 24752 - DNA, 383 bp, Zea mays
  Clone ID: LIB3152-057-P1-K1-H11
cagtagcaacaatagagcaacaatggagaccaagatattttccctccttatgcggcttgctctttctacatgtgttgctaacgcgacaattttccctcaatgctcacaagctcctatagcttccctttttcccccataccttccatcaattatagcttcagtatgtgaaaacccagctcttcaaccatataggcttcaacaagcaatcgcagcaagcaacatacctttatcgcccttgttgtgtcaacaatcgccagccctatctttggtgcagtcattggtacaaaccatcagggcacaacagctgcagcaactcgtgctacctgtgatcaaccaagtagctctggcaaacctttctccctactctccgcaacaacaatttc

SEQ ID NO: 24753 - DNA, 213 bp, Zea mays
  Clone ID: LIB3152-057-P1-K1-H12
caagcaacatagaaagtggaatccagtagcaacaatagagcaacaatggcgaccgagatattttccctccttatgctccttgctctttctgcatgtgttgctaacgcgacaattttccctcaatgctcacaagctcctatagcttcccttcttcccccataccttccatcaatgatagcttcagtatgtgaaaacccaactcttcaaccctat

SEQ ID NO: 24754 - DNA, 314 bp, Zea mays
  Clone ID: LIB3152-057-P1-K1-H2
aaaccgggccgcccaccgccgacctgcacatagaagacattttttaccacatggacacaaacaggggggtgatttgctctgggttctccgcaattgttgctaccgacgctttagccacaatgctaccacatgctataatttcctcattcccatacctctaaccaaccgcgataaatgtttaatacgcaatgaacaaacagttcggatccatctaggctacaacacgacatttacgatagctccagaagttaccacctaccctaaacaatcgaagatttaccaagtagcagcattgaactctgatgatgatttac

SEQ ID NO: 24755 - DNA, 301 bp, Zea mays
  Clone ID: LIB3152-057-P1-K1-H3
gtagtaaaaaaacggttcggcccacccgtccggaccttgcaacatataacgaaaaattttttaccaacaacaccacaccaacacacggcggaggagttttgcagctgcggccgctccgcaatacttgataccgcaacgctacccccacaatgctaacaagatgctaacaatttcctacttcccccattcttatatcaaaccttgcatcaaatgcttcaatacgctatgaatacacagttcatcaaccctctaggcaacaacacaccaatgcccatagcgtcatacagttaccacctaccct

SEQ ID NO: 24756 - DNA, 160 bp, Zea mays
  Clone ID: LIB3152-057-P1-K1-H5
gtaaggaatgggcgggccgaccgaccagagaagactccatccagcagctcatttttttatcacttgacatgccaccctagctgctgccgtgtctttctttctgaataaatacatgccactcacatggtgctcctccatcttccaagtcaccaacgcaaat

SEQ ID NO: 24757 - DNA, 387 bp, Zea mays
  Clone ID: LIB3152-057-P1-K1-H6
acgaacgcaccttgtaaagtgcactaccttcatcttagcaccaatgggagccgggatgtttgccctacttgcggggcttgctctttcaacaagcgctgctacctcgacttttattccacaatgctcacaacaatacctctctccggcgacagccgtgggatttcaatacccaactatacaatcctacatggtacaagaggccatccaagcaagcatcttacggtcattagcattaaccctccaacaaccatatgctctattgcaacagccatccttagtgcatctgtatctccaaagaatcgcggcacaacaactacaacaacagttgctaccaacaatcaatcaagtaggtgcagcgaaccttgctgcttacctccagcaacaaca

SEQ ID NO: 24758 - DNA, 361 bp, Zea mays
  Clone ID: LIB3152-057-P1-K1-H7
aatattttgagcattcagaaacacaccaagcgaagcgcactagcaacgacctaacaacaatggctaccaagatattagccctccttgcgcttcttgccctttttgtgagcgcaacaaatgcgttcattattccacaatgctcacttgctcctagtgccattattccacagttcctcccaccagttacttcaatgggcttcgaacacctagctgtgcaagccaacatgcaacaacaagcgcttgcggcgagcgtcttacaacaaccaattgcccaattgcaacaacaatccttgccacatctaacaatacaagccatcacaacgcaacagcaacaacagttcctaccagcactgagccacct

SEQ ID NO: 24759 - DNA, 381 bp, Zea mays
  Clone ID: LIB3152-057-P1-K1-H8
cccacgcgtccgcaactagcattatttaaagcacaatagtgtaccaacaatggcggccaaaatattttgcttccttatgctccttggtctttctgcaagtgctgctaccgcaaccattttcccacaatgctcacaagctcctatagcttcctttcttcccccatacctctcaccagcggtgtcttcagtatgtgaaaacccaattcttcaaccctacaggatccaacaggcaatcgcagcaggcatcttacctttatcacccttgttcctccaacaaccgtcagccctattacagcagttacctttggtgcatttgttggcacaaaacattaaggcacaacaactacaacaacttgtgctaggaaaccttgctgcctactc

SEQ ID NO: 24760 - DNA, 391 bp, Zea mays
  Clone ID: LIB3152-057-P1-K1-H9
ggaaatcctcgggcgacccacacgtccggaccattagctttatctactccagtttgcagaagaacccgatcgacaccatgggggtgttgctcgatgccctcgctctcctggctctcgctgcgagcgccacctccacgcatacaagcggcggctgcggctgccagccaccgccgccggttcatctaccgccgccggtgcatctgccacctccggttcacctgccacctccggtgcatctcccaccgccggaccacctgccgccgccggtccacctgccaccgacggtccatgtgccgacgccggttcatctgccgccgccaccatgccactaccctactcaaccgccccggcctcagcctaattcacagccacacccatgctcgtgccaaca

SEQ ID NO: 24761 - DNA, 536 bp, Zea mays
  Clone ID: LIB3152-001-Q1-K1-B2-F2A
aggcgtggcggcacctttaaataggctggccccaagaactagagaacatgtcaatactgtttaccctgtgcttagacgtttcccacctaccacctatgagctatcatatactatatgcttctggaaacactactaatgacatgcaaagggggggaagccactccaagacatactggatcactccatctaattcaactgccccttctaccgactcttgctgctgtgccatcaataacgcaactattagttgctcatgctccaatgacactaaaacaactacgaaggtcttgctcatgcacaaagcggaaactgttgtttagcataccagagcgccattaagcattgttaccactgcgaaaactgcaacgtgtcagaaaactgatgataccatatagaaggcaccctctgggggaagcatagattccaactgcaagatcaacccaaccgactcagagatgaataatatcaaggcaaacgggctactaatgtccaagaagagagaggtttgaggcataaaacgtaatgagatataataa

SEQ ID NO: 24762 - DNA, 495 bp, Zea mays
  Clone ID: LIB3152-001-Q1-K1-B2-R2A
gggtttggggtttttatcttcaaagcagatccatatggccactcaaatcactggatgcacgcatagtgaagtctgaatatcgagatgagtcaactactggggatagcctaaggaactaatgggcaaggatgacatgcatactacagagaaggaggcgagaataatcaatgcattgctgcagctcaacaattagcgacccaccaaagggccatatatatagcatagctaccaacacgcaggaaagctggaaccagcaaaacgtgcagtctgtcacagatgcacagcggcagatatgaacacggacaggttcagatgcgtgcccactatcaaacatgcatgtaaacgatcccaaagacaactcaggaactttgggggcacttttgaaaccgctacagatcatcttgggggtcaaacctcaactggaaggtagcaaataccactataccctagcttctcacgcagaaaggacccaatgaagcacacacgtaagctcct

SEQ ID NO: 24763 - DNA, 348 bp, Zea mays
  Clone ID: LIB3152-003-P1-K1-D1
gggggaaaacttccatcaaaatttctcattcatgtggccggaaagtgacccaacactgggtacaatgtacataagcagatctcattgtttttcaccaaggtatcttttattcatctcgaatcaagacggttcttccatattgcgccattcgtcattattagtttattacattgataataaaccttatggccaatatattacgcaaaaggttaggatttcaaccagcattaatcattcttggccttgataaacttcttaatgatgcccatcatcttgcttcctgggaatcgtccaaggcagccccttgcagcggcgatctcgttgaactcacacacactgtcgccactg

SEQ ID NO: 24764 - DNA, 237 bp, Zea mays
  Clone ID: LIB3152-003-P1-K1-D2
gccgttctacctgcacgctgcgcctaacgctggcaccctcttacaactgcaacaattgctgccattcaaccaacttgctttgacaaacccaacagcgttctaccaacaacccatcattggtggtgccctcttttagattgcttatgagttatagttcaataatgaagttttttggatgatgtttgtggcttcccagaaataagaaagtacatttctaagataaaaaaagcaataaaa

SEQ ID NO: 24765 - DNA, 79 bp, Zea mays
  Clone ID: LIB3152-006-P1-K1-A1
aaaaaaaaaaaaaaaaaaaaaaaatttttatttaaaaaaaaaaaaaaaaaaaaaaaaaaaaaaaaaaaaaaaaaaagaa

SEQ ID NO: 24766 - DNA, 298 bp, Zea mays
  Clone ID: LIB3152-006-P1-K1-C7
atcagctagctggctgatgtgagctctgctgccttcttgacacaacaacaggtgttgccgttctacctgcacgctatgcctaacgctggcaccctcttacaactgcaacaattgctgccattcaaccaacttgctttgacaaactcaacagtgttctaccaacaacccatcattggtggtgccctcttttagattgcttatgagttatagttcaataatgaagttttttggatgatgtttgtggcgtcccagaaataagaaagtacatttctagaaaaataaattataaaattaaaat

SEQ ID NO: 24767 - DNA, 79 bp, Zea mays
  Clone ID: LIB3152-007-P1-K1-C3
aaaaaaaaaaaaaaaaaaaaaaaatttttttaaaaaaaaaaaaaaaaaaaaaaaaaaaaaaaaaaaaaaaaaaaaaaaa

SEQ ID NO: 24768 - DNA, 238 bp, Zea mays
  Clone ID: LIB3152-007-P1-K1-D2
cgctgatgtgagccctgttgccttcttgacacaacaacagttgttgccgttctacctgcacgctgcgcctaacgctggcaccctcttacaactgcaacaattgctgccattcaaccaacttgctttgacaaacccaacagcgttctaccaacaacccatcattggtggtgcccttttttagattgcttatgagcaatagaccaattttgaggactattgcttgtaaacaatataaaag

SEQ ID NO: 24769 - DNA, 188 bp, Zea mays
  Clone ID: LIB3152-007-P1-K1-F6
aaaaaaaaaaaaaaaaaaaaaaattttattttaaaaaaaaaaaaaaataaaaatagaaggaataaataaaaataataaaaaaataaaaaaaaaaaaaaaaaaaaaaaaaaaaaaaaaaaaggggggggccgttttaagggttccatgttttcttccccgtgcttgcaacgaaaaagtttttttttggg

SEQ ID NO: 24770 - DNA, 272 bp, Zea mays
  Clone ID: LIB3152-012-P1-K1-A1
ctagaaatgtactttcttatttattggcacaaaacatcagggcacaacaactacaacaacttgtgctagcaaaccttgctgcctactctcagcaacaacagtttcttccattcaaccaactagctgcattgaactctgcttcttatttgcaacaacaacaactaccattcagccagctatctgctgcctacccccagcaatttcttccattcaaccaactgacagctttgaactctcctgcttatttacagcagcaacaactactaccattc

SEQ ID NO: 24771 - DNA, 95 bp, Zea mays
  unsure at all n locations
  Clone ID: LIB3152-012-P1-K1-E12
attaaaanattaataaaaatataaaaaaataatttttttttttatatgttaaaaattatattataaatataattaatttaatatttaatatttta

SEQ ID NO: 24772 - DNA, 481 bp, Zea mays
  Clone ID: LIB3152-014-D8-F1A
tgggttttttttggagatgtacatgaaaaagtttgcatgcaacacaaagtacacaatctgcaatgtcctcaatgcaacatgtgacaacagtttgtaatgtacaagggtttattggcattgctttattgagacatagcagcacacccgcaaaatgctggcatagggggagattatgggtttgtttagacgctacacagcatttgaaatgtgtccctcaccctgtcacccatgagatggtgggggtggcattggatagggcatcggagcaatgtttactggagcaccaggtactacggctcctggaaccggggcacgcatgccataggccagatgaggtggagcggaaacaggtagtgtaacgggagttccaacagctgagacaagggggcaccaactggctgtccaattgttgtgccataagcatcgacgcctggaggtgtattcgctggctgcggggattgcttagatggttttccaggat

SEQ ID NO: 24773 - DNA, 225 bp, Zea mays
  Clone ID: LIB3152-014-D8-F2A
ggagatgtacatttaaaagtttgcatgcaacacaaagtacacaatctgcagcgtccttaatgcaacctgtgacaacagtttgtaatgtacaagggtttattggcattgctttattgagacataccagcacacctgcaaaatgctggcatagggggagattatgggtttgtttagacgctacacagcatttgaaatgtgtccctcaccctgtcacccatgagatgg

SEQ ID NO: 24774 - DNA, 363 bp, Zea mays
  Clone ID: LIB3152-014-D8-R2A
acgcggacgcgtgggctcgaccagcagcagggagctttcatgccaggggaccacggctccaagggcgacatctccttcgccggacgcttcacggccagcgccatcgcagcatgcttcgcagagatatgtaccatcccgctcgacacggccaaggtcaggcggcactacgagctgctggtggaggacgtcgacggcatcgagtcgggccgcgtcccgcttacggcgtacgcggctgacggcgctgacgaggaagggggcggtggcggtaagaagggtagaggcgcaagagggacccatggggacaaggggtcggcgtagtctgccgcacaagatcgtacgaagggcatctccctgtacagagga

SEQ ID NO: 24775 - DNA, 243 bp, Zea mays
  Clone ID: LIB3152-014-P1-K1-B5
atcgagataaatctcaatcaatatattgattatttctaggaaacacacgtcggtatgagggcaccattatcgagtacatctcatatgtaatctaaaagatggcacctccaacgatgggttgctgcctcgacaagacaggattcatcaaagagaactggttgtatggcagcaattgttgctgctgtaggaaggcggcgaccaatgggttagccactaccaatggattaagtcactgttgtcgct

SEQ ID NO: 24776 - DNA, 328 bp, Zea mays
  unsure at all n locations
  Clone ID: LIB3152-014-P1-K1-H6
atcagnggtcagcatttgggcgagctcaaataagttacatggttaagttacatggttacggtagcaatcacacttaagttacatggtgatctattcataatgttatatgctagtatgttcttctttgcatttcccattaccgggaaattgagaaggaaaagtttgatgttaatagcccttcatgatacctctttgcaaataacatggaatcacaactgcttcttagccaactttctgttatgctccagagcagggtaaactctttgatactgcaagatagcccaaacaaggtgcctaaaagagaactcgggccacaaaggatctggat

SEQ ID NO: 24777 - DNA, 69 bp, Zea mays
  Clone ID: LIB3152-015-P1-K1-E10
aaaaaaaaaaaaaaaaaaaaaaaaataaaaaaaaaaaaaaaaaaaaaggacaggggaaaataaaagata

SEQ ID NO: 24778 - DNA, 522 bp, Zea mays
  unsure at all n locations
  Clone ID: LIB3152-016-P1-K1-B2-F2A
gcgctacttgccctagaaccctcgccgccgcccctctttaggattcccatgtccctggtcgccccctgacacgcccgccccggatcctgcacccgaattccgcgtggaattccgggccgaaccgcctctctgcgtgcgcctccgggggggaactctctctctcacacgcgcgcgcgcgcgcacgtctgaggcggtttgattctccggtgggggttccttggtctcgaactctcgatttgctgctgatgggggtgccgaagcagcgctggacgccggaggaagaggccgcgctcaaggccggtgtcgccaagcacgggcccggcaagtggcgcaccatcctccgggactcggacttcagcgcgctcctgcgcctccgctccaatgttgacctcaaggacaagtggcgcaacttgagcgtcaccgnaagaggttacgggtctagagagaacgcaaggatggcgttgaaaaaaaggaggcgcgtggtgcctaagcttactgctgcccacatggtgtagatgagaa

SEQ ID NO: 24779 - DNA, 360 bp, Zea mays
  unsure at all n locations
  Clone ID: LIB3152-016-P1-K1-B2-R2A
ggggggggggnnnagaaaannnnnnnnaanagcacagcaagnngcattaaccaaggcggcnnnccgacannnncaacncacnacagnngcncnannagacgacancacnncancaacnaaagaagggaaaaggcganagnnnaannacaagacgagggaangggaaacaaaaaaaaangaagacnacnnncncgancanncnngnnancaagaaggcgaagggcggcacagcacaggacaacagcaagcngnngaaaacccgccangaacgaaaaggccanacaagaaacncancganccagaaaancnnngcagcagaacaacggngngcngcangggngaaggaccagcaagcncgaa

SEQ ID NO: 24780 - DNA, 353 bp, Zea mays
  Clone ID: LIB3152-016-P1-K1-B3
ttttttttttttttttttttttttttttggggttgggtgtttttttttttttatttttttttttttttttttttttttttttttttttttattatattttttaaaaaaaaaaaaaaaaaaataaaaatgattaaaaaaaaaaaaaaaaaaaattaaaaaaaaaccctttttttattggggacacccaacaaacccaataaaaaaaagaagggcgcctcaataaaaaaaacaaaagataaaaaacaaatatacacacaaaataataaatttaaatagagacaaaaaaaaaaaaaaaaaaacggacgcgcaaaaataaaaaaaaaacacatataaaaaaaaaaaaccgtgtggcc

SEQ ID NO: 24781 - DNA, 70 bp, Zea mays
  Clone ID: LIB3152-017-P1-K1-E2
acccgtccggttttttggatgatgtttgtggcgtcccagaaataagaaagtacatttctaaaaaagaaaa

SEQ ID NO: 24782 - DNA, 55 bp, Zea mays
  Clone ID: LIB3152-017-P1-K1-E6
tttttcttttttttttttttttttggtggggtttttttttagttctagatcgcga

SEQ ID NO: 24783 - DNA, 269 bp, Zea mays
  Clone ID: LIB3152-018-P1-K1-F1
tggggccctttccaaattaaaacctgtttattttttttttaaaaaaaaacattgcttttttccctgtaaaaaatgggccgggcccattttacaccggttaaaatgggttattgctttccctaggtcttttacggcatgggccccaattttacatggcttttgctcacaaaaaaaaaagccgggctccctattcctaagcatttaaaggggagggggccccaaaaaaacttgggggggcttttgttggggccctttgcgaacattttttt

SEQ ID NO: 24784 - DNA, 77 bp, Zea mays
  Clone ID: LIB3152-019-P1-K1-F8
attatttgtcattcaataatttttttttttggctgatgtacacctcctccggagaataataaattatattcccacac

SEQ ID NO: 24785 - DNA, 269 bp, Zea mays
  Clone ID: LIB3152-020-P1-K1-F8
tttttttttttttttttttttttttttttttttttttttttttttttttttttttttttttttttttttttttttttttttttttttttttttattttttttttttttttttttttttttttttttttttaaaaaaaaaaaaaaaatttttttttttggggggaggaaaaattttaaaaaaaaaattttttttttaaattttatttttaaaaaaatttaaaaagggggccccaaaattgtggtttttggaaaaaaaatttttttttttt

SEQ ID NO: 24786 - DNA, 100 bp, Zea mays
  Clone ID: LIB3152-022-P1-K1-A9
gacacgggacgcgccctgtcatgaagcactaagcgcggggggggtgctggctacgcgcacggtgaactttacagttgccaagggcctagtgcccgcgctt

SEQ ID NO: 24787 - DNA, 212 bp, Zea mays
  Clone ID: LIB3152-022-P1-K1-B10
atgcgcttgcatgcgaccttgtagttctggtattgggtgaccgaaattcatttaactgaccgggggtttacagctgccagactggaaaaacccaggcaccgcctaacttaaatatgtcgcatcacatctatctgtcgccagatgacgtaatagcgacaaggcccgaaccgactgaactacccaacataagcccaggctgaatggccaatggc

SEQ ID NO: 24788 - DNA, 56 bp, Zea mays
  Clone ID: LIB3152-026-P1-K1-A8
gggaagacccacgcttacgtatagatcgcgagcggcttttctttatgaccaacgcc

SEQ ID NO: 24789 - DNA, 332 bp, Zea mays
  Clone ID: LIB3152-026-P1-K1-C7
ggaacaatacttttttcttgtcagttcaattgttcattcaggtcattgctcacactgacactgccacccatggtgatgcgtgacacattattactcatacatcgccgttaaatgactcaactagctagctagccagcggctatactacagcacatagtttcttcagtgggggacaccgtcggcagcagcgtaggggcatggagtcagctgctgcaggccgtacattcgccgtcagttgcttcgcttatctgctcccggtggctcccacttatcctacacctctcaagtcattttacaaagtcggtctagagtcaagcttaacagggtctttt

SEQ ID NO: 24790 - DNA, 349 bp, Zea mays
  Clone ID: LIB3152-026-P1-K1-C8
ggaacaatacttttttcttttcatttcaattgttcattcaggtcattgctcacactgacactgccacccatggtgatgcgtgacacattatttctctactattgtcgttaaattgactcatctagctagttagccagcggttttactacatcacatagtttctttagttgttgtctcctttatcttttagtttttttttgttgtcattttatttttttctatttaatctttattttattttttattttttccttttttttttatttcttctttttttttttttttttttattatatttcttttttttttttatttactttttattctttaattatttttttttttttta

SEQ ID NO: 24791 - DNA, 104 bp, Zea mays
  Clone ID: LIB3152-026-P1-K1-G7
aaaaaaaaaaaaaaaaaaaaaaaaaaaaaaaaaaaaaaaaaaaaaaaaaaaaaaaaaaaaaaaaaaaaaaataaaaaaaaaaaaaaaaaaaaaaaaaaaaaaaa

SEQ ID NO: 24792 - DNA, 81 bp, Zea mays
  Clone ID: LIB3152-028-P1-K1-D12
aaaaaaaaaaaaaaaaaaaaaatattaaaaaaaaaaaaaaaaaaaaaaaaaaaaaaaaaaaaaaaaaaaaaaaaaaaaaaa

SEQ ID NO: 24793 - DNA, 86 bp, Zea mays
  Clone ID: LIB3152-030-P1-K1-B3
atgagaatctagaaatgtactttcttatttctgggaagccacaaacatcatccaaaaaacttcattattgaactataactcataag

SEQ ID NO: 24794 - DNA, 317 bp, Zea mays
  Clone ID: LIB3152-030-P1-K1-E8
agaaatgtactttcttatttctgggaagccacaaacatcagacaaaaaactttattattgaactataactcataagaaatctaaaagagggcaccaccaatgatgggttgttggtagaacgctgctgggtttgtcaaagcaagttggttgaatggcagcaattgttgcagttgtaagagggtgccagcgttaggcgcagcgtgctggtagaacggcaacaactgtggttgtatcaagaaggtagcagggctcacaccagctagctggctgaatggtagtagttggtgctgctgtaaataagcaggagagttcaatgc

SEQ ID NO: 24795 - DNA, 227 bp, Zea mays
  Clone ID: LIB3152-030-P1-K1-G7
ttttctttattttgctcgacggggggtgggtttgtgttgttgctgttccttttttggcacattgttcacgcgccccttttgcttattttttttctgggtgctgttgactaacagcgtcttcggtttttgagggaaaaaagtgcatctgttaaggaaacaaaggtgacacctgggggggttttaccctgacagcccacctgccggggggggcaacaaccctattacag

SEQ ID NO: 24796 - DNA, 134 bp, Zea mays
  Clone ID: LIB3152-031-P1-K1-F8
aaaaaaaaaaaaaaaaaaaaaaaatttaaaaaaaaaaaaaaaaaaaaaaaaaaaaaaaaaaataaaaaaaaaaaaaaaaaaaaaaaataaaaaaaaaaaaaaaaaaaaaaaaaaaaaaaaggggggggcctttt

SEQ ID NO: 24797 - DNA, 253 bp, Zea mays
  Clone ID: LIB3152-031-P1-K1-H3
tttctttgtctttttttttctgtttaacttttttgtcaaatgctttgttttttccttcttctttttcaagaactcgcaaagggaacttcttatttttgggtggccccctccattattcaaaaaactttttttttgaattcccactcctaagcgacttaaaaggggggcccccccactatcttgtgaggcgcgggacccgccggttcttccaaatgatctacgccctaaagcaccaattcctgtgaagccaaaa

SEQ ID NO: 24798 - DNA, 226 bp, Zea mays
  Clone ID: LIB3152-032-P1-K1-E11
atgagttatagttcaataagaaaggtttttgactgatgtttgtggcttcccacaattatgaaagcacatttctagattctcaaaataaaaaatatcaaaaattctaaaaatactaaaatataatttaaatattataaattttattctttttcatattccttattaatttataaatacattatcttattattaccttcctaataattaattaattaacttaatatta

SEQ ID NO: 24799 - DNA, 120 bp, Zea mays
  Clone ID: LIB3152-033-P1-K1-E4
agaatctggaaatgtaacttcttatttctggttggccacatacattattcaaaaaactttatttttgaattacaactaattagcaatttaaaatagggttccaccaatgattttgttgtt

SEQ ID NO: 24800 - DNA, 70 bp, Zea mays
  Clone ID: LIB3152-034-P1-K1-E10
attcaataataaagatttttggatgatgtatgtgtccaaccagaaataagaagttacatgggcagattct

SEQ ID NO: 24801 - DNA, 78 bp, Zea mays
  Clone ID: LIB3152-039-P1-K1-B12
aaaaaaaaaaaaataaaaaaaaaatttaaaaaaaaaaaaaaaaaaaaaaaaaaagagaaaaattaaaaaaaaaaaaaa

SEQ ID NO: 24802 - DNA, 83 bp, Zea mays
  Clone ID: LIB3152-039-P1-K1-E8
aaaaaaaaaaaaaaaaaaaaatttattaaaaaaaaaataaaaaaaaaaaaaaaggggaaaattaaaaaaaaaaaaaaaaaaaa

SEQ ID NO: 24803 - DNA, 102 bp, Zea mays
  Clone ID: LIB3152-043-P1-K1-E5
aaaaaaaaaaaaaaaaaaaaaaaaatttttaaaaaaaaaaaaaaaaaaaaaaaaaaagagaaaaaaaaaaaaaaaaaaaaaaaaaaaaaaaaaaaaaaaaaa

SEQ ID NO: 24804 - DNA, 59 bp, Zea mays
  Clone ID: LIB3152-043-P1-K1-F3
aagacaaaaaactttattattgaactataactcataagaaatctaaaaaagggcccccc

SEQ ID NO: 24805 - DNA, 336 bp, Zea mays
  Clone ID: LIB3152-043-P1-K1-F6
gggcgacgaattctgttccattttactacgtacattcatgtatcgcttccactttacatagagctgactagattcagacaagattcaatgatgggttctgacgtctcaccaaacaaaacatgcataatactgtggacccactacagttcaaacttcaatcagctaagcacagcagcagctacagctggagtacacagacacagcagcacacaacacgcgcgcccaaaaagggagaagaacacgaccaccagcttcttccgatcctatcctccaattttctcttccaaagctccaatcccaaagaacaagacagttgttgccggtgagatcgactgg

SEQ ID NO: 24806 - DNA, 324 bp, Zea mays
  unsure at all n locations
  Clone ID: LIB3152-043-P1-K1-H12
cccacgcgtcccatcaactactaccattcatccaggtagctggggtgagccctgctaccttcttgacacaaccacagttgttgccgttctaccagcacgctgcgcctaacgctggcaccctnttacaactgcaacaattgctgccattcaaccaacttgctttgacaaacccagcagcattctaccaacaacccatcattggtggtgccctcttttagatttcttatgagttatagttcaataataaagttttttgtctgatgtttgtggcttcccagaaataagaaagtacatttctaaaaaaaaaaaataaatttaaaatat

SEQ ID NO: 24807 - DNA, 70 bp, Zea mays
  Clone ID: LIB3152-044-P1-K1-H1
agccttccggccacacattataatgtgtggtatgtccaataatatatgcatcataataaagttttggttt

SEQ ID NO: 24808 - DNA, 130 bp, Zea mays
  unsure at all n locations
  Clone ID: LIB3152-045-P1-K1-B6
aaaaaaaaaaaaaataaacacaacattttttttaaaaaaaaaaaacaacataacatcggtgggtttccaaaatattatggcctcctccagcttcttgcgactttccgcgagcgcaacaaangcggggccc

SEQ ID NO: 24809 - DNA, 340 bp, Zea mays
  Clone ID: LIB3152-045-P1-K1-B7
gaactcggaacaaccctgaagtgattaactgagtgaatgctgccaagttatatcagcaagcgcaaggctaggcatccacttgcaagttacaacagcatttagattataacacaagatggtgaaaaaaaatacaacaatggacactctcctaacgaacaacaccaaatctcaggtattcagcagcagcagcagcatcaggcagttgttagctggagtctatacccgaaacattaagcagcagcaacatgaaattgttaacaggagcctatacccacatcttctttgtggcttccatccgctcgagcaagccctggatttcggtctgcatccgcagcttcat

SEQ ID NO: 24810 - DNA, 348 bp, Zea mays
  Clone ID: LIB3152-045-P1-K1-C6
caattgttcattcaggtcattgctcacactgacactgccacccatggtgatgcgtgacacattattactcaatcatcgccgctaaatgactcaactagctagctagccagcggctatactacagcacatagtttcttcagtgggcttcgaacacccagctgtgcaagcctataggctacaacaagcaattgcggcgagcgtcttacaacaaccaatttcccagttgcaacaacaatccttggcacatctaacaatacaaaccatcgcaacgcaacagcaacaacaattcctaccagcactgagccacctagccatggtgaaccctgccgcctacttgcaacagcagtt

SEQ ID NO: 24811 - DNA, 63 bp, Zea mays
  Clone ID: LIB3152-047-P1-K1-G2
aaaaaaaaaaaaaatataaaaaaatttattttaaaaaaaaaaaaaaaaaaaaaagagaggaaa

SEQ ID NO: 24812 - DNA, 103 bp, Zea mays
  Clone ID: LIB3152-048-P1-K1-D4
tttttttttttagaatctggaaatgtaactttttatttctggtgccctcataccggcatgtgtttcctagaaataatcaatatattgattgagatttatcttg

SEQ ID NO: 24813 - DNA, 58 bp, Zea mays
  Clone ID: LIB3152-049-P1-K1-B11
tataaggaaaaaagatgattggaattaaaaaaaaaaaaaaaaaaaaaaaaaaaaggaa

SEQ ID NO: 24814 - DNA, 63 bp, Zea mays
  Clone ID: LIB3152-049-P1-K1-E10
aaaaaaaaaaaaaaaaaaaaattttttaaaaaaaaaaaaaaaaaaaaaaaaaaaaaaaaaaaa

SEQ ID NO: 24815 - DNA, 332 bp, Zea mays
  Clone ID: LIB3152-049-P1-K1-F1
agaaatgtactttcttatttctgggaagccacaaacatcagacaaaaaactttattattgaactataactcataagaaatctaaaagagggcacaacaactacaacaacttgtgctagcaaaccttgctgcctactctcagcaacagcagtttcttccattcaaccaactagctgcattgaactctgcttcttatttgcaacaacaacaactaccattcagccagctatctgctgcctacccccagcaatttcttccattcaaccaactgacagcattgaactctcctgcttatttacagcagcaacaactactaccattcagtcagctagc

SEQ ID NO: 24816 - DNA, 340 bp, Zea mays
  Clone ID: LIB3152-053-P1-K1-H9
attcaacaactggcagcattttactctcctgcttatttacagcagcaacaactactaccattcagccagctagctggtgtgagccctgctaccttcttgatacaaccacagttgttgccgttctaccagcacgctgcgcctaacgctggcaccctcttacaactgcaacaattgctgccattcaaccaacttgctttgacaaacccagcagcgttctaccaacaacccatcattggtggtgccctcttttagatttcttatgagttatagttcaataataaagttttttgtctgatgtttgtggcttcccagaaataagaaagtacatttttagattctt

SEQ ID NO: 24817 - DNA, 130 bp, Zea mays
  Clone ID: LIB3152-054-P1-K1-C7
attattatatttttggtttttttttataatttttatcttcatatttcacttatactacaattttaataaaattatacaaacaaatatattatatctttttaaaaaattaattataatacaaatataaaat

SEQ ID NO: 24818 - DNA, 245 bp, Zea mays
  Clone ID: LIB3152-054-P1-K1-H2
tttatttttttcatttcaatggttcattcaggccaatggtcatgacgattccacccatgttcttacagcaaccctttgttggtgctgcattctagatagaaatatttgtgtgtgtccgaataatgagttgacatgccatcgcgtgtgactcattattaacaataaaacaagtttcctcttattatcttctaaaggaaaaagaccatatttagaggctttgaaactgaagtagcttgggttactaa

SEQ ID NO: 24819 - DNA, 54 bp, Zea mays
  Clone ID: LIB3152-056-P1-K1-C7
gtctgatgtttgtggcttcctagttataagaaagtacatttctaaaaaaagagg

SEQ ID NO: 24820 - DNA, 117 bp, Zea mays
  Clone ID: LIB3152-056-P1-K1-E12
aaaaaaaaaaaaaaaaaaaattatattaaaaaaaaaaaaaaaaaaaaaaagaaaagaaaaattaaaaaaaagaaaaaaaaaaaaaaaaaaaaaaaaaaaaaaaaaaaaaaaaaaaaa

SEQ ID NO: 24821 - DNA, 440 bp, Zea mays
  Clone ID: LIB3152-014-D8-F3A
ctctctctcctcttcgttcacactttcgttcctccttctcctttatacttctccctctcgcttccgcccttccatcttcccttacttctccttcttcacctcctcctactcatgttcctagccattccctttcttactttctccttctctccctcttccacacttcattccctccctcttctttacttgtcatccccactctccccaatctacctccttcctctcctctttttcctttctctcaccaccctcttcttcttccttcaacctctcgttccccctcttttcttcccctctcccctctttactcctccctgcttccttgcttatcgctcttccacttcccctctccctcgactccccccttttctccgctcttctacctcccgtttcactacctctttcctctcctcctcttctgtcctcttccatgccttccc

SEQ ID NO: 24822 - DNA, 508 bp, Zea mays
  Clone ID: LIB3152-014-D8-R3A
ggaactctaaaagggtgctgcaggcgtcggagcctgaatattgcatagcgctgtgatcgtaccgtggccgactcatggatctagatattccctgatggacattatatgcctgcacgaactccacacataatggtggctagaagatatacatgaaatgaccggcggggacagagtagatccatctactgaacagtgttgaaaccacagactacacaattgatgctgctgcaaatcctttagcaatactttataagtccacggagcaacgcgactgcgcttgcactcttgcaagctgatggcataacaactgtcctgctcggtggatttcccctagccttagttctcatgactccctcttcactaactgacttcgttccagctaacgtgccctacatagtgagagccgacagcccagtaccccgcatgcgtgacgctgccctaaacaatgccaccaacccctatcacaagcagctcgtagcgtctcatgaccttcaccgtgacgaacaca

SEQ ID NO: 24823 - DNA, 687 bp, Zea mays
  Clone ID: LIB3152-014-D8-R3B
acccgcagacaattgtgtgacctctaactatagccttgcatgtggacttcactggctcttgcagattgcttatatggttttccaggatttgcagcctgaccatttgtttggcctgtgattggacggtgtgcattaaatggatctccattgttcacactggtgatgtcatgtctacttgatcgccgcctttctctgtttattgtattcagacacctaaagtccttcagtgcatcactagctacttgagtcggagtgcttgagatcacaaagttccgcgagatgctccgccagtcacctttgccatacttttcaagtccaaggaggaacaatctgtgctcgtcctctgtccaggcgatgcccttcctacgctcctgctcggcggacttcgccgaccccttgtccccatgggtccctcctccgccactttccttcttcccgccaccgtccccttcctcggcagcgccgtcagccgcgtacgccggaagcgggacgcggcccgactcgatgccgtcgacgtccttcaccagcagctcgtagtgccgcctgaccttggccgtgtcgagcgggatggtacatatctctgcgaagcatgctgcgatggcgctggccgtgaagcgtccggcgaaggagatgtcgcccttggagccctggtcccctggcatggctgctccctgctgctgggcgagc

SEQ ID NO: 24824 - DNA, 377 bp, Zea mays
  Clone ID: LIB3152-048-P1-K1-H4.F1
ggaacaatacttttttcttttcatttcaattgttcattcaggtcattgctcacactgacactgccacccatggtgatgcgtgacacattattactcaatcatcgccgctaaatgactcaactagctagctagccagcggcattactacagcacatagtttcttcattgggggacaccgccggcagcagcgtaggggcatggagtcggctgctgaggccgcacatcgccgtcaattgcggcgctatctgcgcgccaaaagccccgaaaccttgccgctttgtggcaatgctgcaggatggaatggaggaccaagccgaagatcgcctggtaccggtgctgcggctccacctgcctgagctgctggcaacaatgcttcc

SEQ ID NO: 24825 - DNA, 462 bp, Zea mays
  Clone ID: LIB3152-048-P1-K1-H4.F2
ggaacaatacttatttcttttcatttcaattggtcattcagggcattgctcacactgacactgccacccatggggatgcgcgacacattattactcaatcatcgccgctcaatgactcaactagcaagctagccagcgggtatactacaggacacagtttcttcaggggggaacaccgccggctgctgcctcggggcatggagtcggctgctgcaggccgcacatcgccggcacttgctgcgctatctgcgccggcaacaagcccgcaacctggccgctttgcggctggtgctgccggatggtctgggggaccaagccgaaaatcgcctggtcccggagctgtggttccaccagcctgagctggtggcaacactgctgccggaacgactggccctgaggcaagcagtagggcctcgccgtccggcctgaactgaaccctcagaaacttggcacactggccca

SEQ ID NO: 24826 - DNA, 396 bp, Zea mays
  Clone ID: LIB3152-048-P1-K1-H4.R1
cctgccgccgccggtccacctgccaccgccgccgggcgatctgccacctccggttcacctgccacctccgggcgatctcccaccgccggtccacctgccgccaccatgccactaccctactcaaccgccccggcctcagcctcatccccagccacacccatgcccgtgccaaagccgcatccaagcccgtgccagctgcagggaacgcgtagtcggcagcaccccgatcctgggccagtgcgtcgagtttctgaggcatcagtgcagcccgacggcgacgccgtactgctcgcctcagtgccactcgttgcggcacagtgttgccagcagctcaggcaggtggagcgcagcaccggtaccaggcgatcttcggcttggtcctccagtccatcctgc

SEQ ID NO: 24827 - DNA, 138 bp, Zea mays
  Clone ID: LIB3152-053-P1-K1-D6.F2
tacctttttttggattcttttatacgggccccctttttctttttttttttcccttcctttttcctgatgaatccggtttccagacttttcaagactacggtgactacttcctacacaagagaggggttaagttcagtt

SEQ ID NO: 24828 - DNA, 414 bp, Zea mays
  Clone ID: LIB3152-054-P1-K1-E5.F2
tagtggacccactcgtccgagtacgagttcatgttggtggcgaggaaatgttacattgcgataacagaccatgctacttgaggaagatgagaaagataagcgtgaagaagaagagcgcagggataggaggatatcataggaaacatgagaggagagtagacgagtagcagaggctgaaaggaaaagacacgcataaagaaaaaatattgtgcccgggaagaaaacaggactgtcaacattttcttcgagcagcctagcagcaccaagtagtattgactgtgaggacgttctagacttgatatattcagatagcgactaggaagacaatgttgtggtcggggaacactattctgattcttcagctgatcaattttcaagcatggatgctgatgaacgatgcaatgagcatgaatg

SEQ ID NO: 24829 - DNA, 538 bp, Zea mays
  Clone ID: LIB3152-057-P1-K1-B8.F1
cctcgcctgcgatctccgtagcctccgtcgcgtcgacatcgatcatgtcggcctactgcggaaagtacaaggatgagctcatcaagaatgctgcctacattggcacccctggcaaggtgatccttctgactgatgagtccactggcaccattggcaagcgcctttccagcatcaatgtcgagaacgttgaggagaaccgccgtgccctccgtgagctcctattctgctgccctggtgctctccagtacatcagcggtgtgatcctcttcgagagaccctgtaccagaagaccaaggatggcaagccttttgttgatgtcctcaaggagggaggcgtcctcctgggcatcaaggttgacaagggcacagttgaggttgttggcactgataaggagaccaccacccaaggccatgacgaccttggcaagcgctggccaagtactacgaggccggtgccgctttgccaagtggcgcgctgttctcaagattggccccaatgaggcatcacagcttgccatcgacctgaacgctcagggtct

SEQ ID NO: 24830 - DNA, 434 bp, Zea mays
  Clone ID: LIB3152-057-P1-K1-B8.F2
tagtggacccactcgttcgccttcgctgcgatctccgtagcctgcgtggcgtcgagtctggacatgtcgacctactgcggagagtacaaggatgagctcatcaagaatgctgactacattggcacccctggcatgggtatccttgctgctgatgagtccattggcaccgttggcaggcgcctttccagcatcaatgtcgagaacgttgaggagaaccgccgtgccctgcgagagctcctattatgatgccctggtgctctccagtacatgaagcggagggagcctcttccaggagaccctgtaccagaagaccaaggatggcaatgccttttgttggtgtactaaacgagggaggcgtcctccctggcttcaaggttgacaagggcaccactgaggttggtgggtctgagcaggacaccaccacacaaggccat

SEQ ID NO: 24831 - DNA, 549 bp, Zea mays
  Clone ID: LIB3152-057-P1-K1-H5.F1
cctcgcctgcgatctccgtagcctccgtcgcgtcgacatcgatcatgtcggcctactgcggaaagtacaaggatgagctcatcaagaatgctgcctacattggcacccctggcaaggtcatccttcgtgactcgatgagtccactggcaccattggcaagcgcctttccagcatcaatgtcgagaacgttgaggagaaccgccgtgccctccgtgagctcctattctgctgccctggtgctctccagtacatcagcggtgtgatcctcttcgagagaccctgtaccagaagaccaaggatggcaagccttttgttgatgtcctcaaggagggaggcgtcctccctggcatcaaggttgacaagggcaccattgaggttgttggcactgataaggagaccaccacccaaggccatgacgaccttggcaagcgctgcgccaagtactacgaggccggtgcccgctttgccaagtggcgcgctcgttctcaagattggccccaatgagccatcacagcttgccatcgagctgaacgctcagggtctggctcg

SEQ ID NO: 24832 - DNA, 389 bp, Zea mays
  Clone ID: LIB3152-057-P1-K1-H5.F2
ctacatgtgatcaccccgtggcacaggagtgatcctatgactggctgaatgagtaccgactggcaaccgattggcagagacgccttcaccagacatcaatgtacgagaacgttgaggagaaccagcatgccctccgtcagctcctattctgatgccctggtgctctccagtacatgagcggagggagcctcatactggagaccctgtaccagaggaccaggagacctggccttgtcgtgatgcactatccgagggaggcgtccgccctgtcatcaaggttggctacggcaccaccaaggatgtagcctctgtgcaggggaccaccaccctttgccatgacgaacttggacagctctgccccatgtgatgcagaggccggcgcccgcttt

SEQ ID NO: 24833 - DNA, 137 bp, Zea mays
  Clone ID: LIB3152-057-P1-K1-H5.R1
tatcttcccaaaatactccatctatcagctcatacttatatcacttcccataccagcctagcatcttcccattctttctttctcaataaatacataccactcacatattactcctccatctttcaattcaccaacac

SEQ ID NO: 24834 - DNA, 301 bp, Zea mays
  Clone ID: LIB3152-057-P1-K1-H5.R2
gcggccgccctttttttttttttttttttttttttttttttcgttttttactcgccatgccagacttattaatttcgggcctttcttactcaataaatacaagcgtttttcatggatgacatatccatctttcaagtcaacatcgcaaatcgcaccaaagagggccatcgagaggctgttgacaggggaccaacttggcgtagatttataacagcagacaccgttgactgatcctcgtaaacgatagccctgctctcagagatggaggatgccatttcgatcgccgagaccaactgctagc

SEQ ID NO: 24835 - DNA, 560 bp, Zea mays
  unsure at all n locations
  Clone ID: LIB3152-001-C1.A11.P1+
gtaattttccacgnaaacttctcgtttgaatctaccccaattgactgcagtccaccaatgaattcctgacgagtaaattcacacattgtggcggctttcatgtgccatgatatgacaagcatgacaatatcctgaggatcaacctgtagatcattgcaaaattgagatattccttccaccattatcatatcagcatcaggttctttatatctgttgaaaatatcttcaagatgccgagtattgaccacagaaacctgaggttggctatagaagaagtcaaaagctccttccaagtgccaatcactagctttcagtgcctgaagggcaaccttctcactggcgccggtaatggtcatgaactgctgcaccttgtcgcggtttcctctccccagcttatacatcttggatcggagagcgtgcgaggacgacgccgcggaggggaaaggggcggcgcgaggtctggggtttcgcggcgaagcctcagctcttgcgctcggctacctgtcctcctcgcccttcctttttgttcccctctctctcgctcgctacggacgcgtggg

SEQ ID NO: 24836 - DNA, 598 bp, Zea mays
  Clone ID: LIB3152-001-C1.A11.P1-
tgaaacattacgagctgagctaaaagagacattaaattccgtgatatatacaactttgcattcacttgggcaaggggaaaagggtcaaaagtctctctcactggagactgctattggaatgtggcagttgctatttgctgaaaggaactggcctcttctggatcattggtgtcagtttttacaggtcaggcacaataaagccatatctagagacacatggtcccagctgctggaatttgtgaagacgaccgatccacagttatccaactacgacgacgaaggtgcctggccctacctcatagacgaatttgtggaatatctgactgagaacggactcgtccagcgtaaaagatgaacaacggggagatgcatctccaaacaatggttgggctgtacaaacatgatttatctcggtcagctcgacgcccagggcctgatattggcactcctgctcaattcattcaccaaactgttggcatatcattgaatttgcttataaacgtggggaaacataacttgcctgggaagtggtggctgtcagcctgcgatcgtgaactgtaacttatcgaaaatgcaacggagtttgggactctactaa

SEQ ID NO: 24837 - DNA, 211 bp, Zea mays
  Clone ID: LIB3152-001-C1.B11.P1+
aggggaggcccaaactccggtgccttttcggtaagttcccgttcacgatcgcggggtggccgccacccctttccaggcaagttttttttccccaccttttttagccaattcaatgatttgccaacagtttggggaatgaattgggccggagtgcccattttaggccctgggcgtttagctgccccagataaattatttttggacaacccaa

SEQ ID NO: 24838 - DNA, 589 bp, Zea mays
  Clone ID: LIB3152-001-C1.B12.P1+
ccagttcctttcagcaaatagcaactgccacattccaatagcagtctccagtgagagagacttttgacccttttcccttgcccaagtgaatgcaaagttgtatatatcacggaatttattgtcatcttttagctcagctcgtaatgatggtaattttccacgaaacttctcgattgaatctaccccaattgactgcagtccaccaatgaattcctgacgagtaaattcacacattgtggcggctttcatgtgccatgatatgacaagcatgacaatatcctgaggatcaacctgtagatcattgcaaaattgagatattccttccaccattatcatatcagcatcaggttctttatatctgttgaaaatatcttcaagatgccgagtattgaccacagaaacctgaggttggctatagaagaagtcaaaagctccttccaagtgccaatcactagctttcagtgcctgaagggcaaccttctcactggcgccggtaatggtcatgaactgctgcaccttgtcgcggtttcctctccccagcttatacatcttggatcggagagcgtgcgaggacgacgccgcggagggg

SEQ ID NO: 24839 - DNA, 476 bp, Zea mays
  unsure at all n locations
  Clone ID: LIB3152-001-C1.B12.P1-
tgaaatcttctggatcttggtgtcagtttttacaggtcaggcacaataaagccatatctagagaccatggtcccagctgctggaatttgtgaagacgaccgatccacagttatccaactacgacgacgaaggtgcctggccctacctcatagacgaatttgtggaatatctgactgagaacggactcgtccagcgtaaaagatgaacaacggggagatgcatctccaaacaatggttgggctgtacaaacatgatttatctcggtcagctcgacgcccagggcctgatattggcactcctgctcaattcattcaccaaactgttggcatatcattgaatttgcttataaacgtggggaaacataacttgcctgggaagtggtggctgtcagcctgcgatcgtgaactgtaacttatcgaaaatgcaacggagtttgggactctactaannnnnnnnnnnnnnnnnnnnntnnntnt

SEQ ID NO: 24840 - DNA, 429 bp, Zea mays
  Clone ID: LIB3152-001-C1.C10.P1-
cccacgcgtccgtagcgagcgagagagaggggaacaaaaaggaagggcgaggaggacagggagccgagcgcaagagctgaggcttcgccagcgaaaccccagacctcgcgccgtccctttcccctccgcggcgtcgtcctcgcacgctctccgatccaagatgtataagctggggagaggaaaccgcgacaaggtgcagcagttcatgaccattaccggcgccagtgagaaggttgcccttcaggcactgaaagctagtgattggcacttggaaggagcttttgacttcttctatagccaacctcaggtttctgtggtcaatactcggcatcttgaagatattttcaacagatataaagaacctgatgctgatatgataatgggggaaggaatatctcaattttgcaatgatctacaggttgatcctaa

SEQ ID NO: 24841 - DNA, 275 bp, Zea mays
  Clone ID: LIB3152-001-C1.C9.P1+
ccttccaagtgccaatcactagctttcagtgcctgaagggcaaccttctcactggcgccggtaatggtcatgaactgctgcaccttgtcgcggtttcctctccccagcttatacatcttggatcggagagcgtgcgaggacgacgccgcggaggggaaaggggcggcgcgaggtctggggtttcgcggcgaagcctcagctcttgcgctcggctccctgtcctcctcgcccttcctttttgttcccctctctctcgctcgctacggacgcgtggg

SEQ ID NO: 24842 - DNA, 579 bp, Zea mays
  Clone ID: LIB3152-001-C1.C9.P1-
ttttgacttcttctatagccaacctcaggtttctgtggtcaatactcggcatcttgaagatattttcaacagatataaagaacctgatgctgatatgataatggtggaaggaatatctcaattttgcaatgatctacaggttgatcctcaggatattgtcatgcttgtcatatcatggcacatgaaagccgccacaatgtgtgaatttactcgtcaggaattcattggtggactgcagtcaattggggtagattcaatcgagaagtttcgtggaaaattaccatcattacgagctgagctaaaagatgacaataaattccgtgatatatacaactttgcattcacttgggcaagggaaaagggtcaaaagtctctctcactggagactgctattggaatgtggcagttgctatttgctgaaaggaactggcctcttctggatcattggtgtcagtttttacaggtcaggcacaataaagccatatctagagacacatggtcccagctgctggaatttgtgaagacgaccgatccacagttatccaactacgacgacgaaggtgcctggccctacctcat

SEQ ID NO: 24843 - DNA, 313 bp, Zea mays
  Clone ID: LIB3152-001-C1.D10.P1-
cccacgcgtccgtagcgagcgagagagaggggaacaaaaaggaagggcgaggaggacagggagccgagcgcaagagctgaggcttcgccgcgaaaccccagacctcgcgccgtccctttcccctccgcggcgtcgtcctcgcacgctctccgatccaagatgtataagctggggagaggaaaccgcgacaaggtgcagcagttcatgaccattaccggcgccagtgagaaggttgcccttcaggcactgaaagctagtgattggcacttggaaggagcttttgacttcttctatagccaacctcaggtttctg

SEQ ID NO: 24844 - DNA, 60 bp, Zea mays
  unsure at all n locations
  Clone ID: LIB3152-001-C1.D11.P1+
ccgttcagtcccgtcccggctgctgcnncttatccggttttcttatcggtcttggaggtc

SEQ ID NO: 24845 - DNA, 242 bp, Zea mays
  Clone ID: LIB3152-001-C1.E10.P1+
aggggaggcccaaactccgttgcattttcgataagttacagttcacgatcgcaggctgacagccaccactttccaggcaagttatgtttccccacgttttttagcaaattcaatgatttgccaacagtttggggaatgaattgagcaggagtgccaatatcaggccctgggcgtcgagctgacccaaataaatcatgtttgtacagcccaaccattgtttggagatgcatttccccgttggt

SEQ ID NO: 24846 - DNA, 441 bp, Zea mays
  unsure at all n locations
  Clone ID: LIB3152-001-C1.E11.P1+
aacttctggntcattggtgtcagtttttacaggtcagcacataaagcctatctagagaccatggtcccagctgctggaatttgtgaagacgaccgatccacagttatccaactacgacgacgaaggtgcctggccctacctcatagacgaatttgtggaatatctgactgagaacggactcgtccagcgtaaaagatgaacaacggggagatgcatctccaaacaatggttgggctgtacaaacatgatttatctcggtcagctcgacgcccagggcctgatattggcactcctgctcaattcattcaccaaactgttggcatatcattgaatttgcttataaacgtggggaaacataacttgcctgggaagtggtggctgtcagcctgcgatcgtgaactgtaacttatcgaaaatgcaacggagtttgggactctacta

SEQ ID NO: 24847 - DNA, 537 bp, Zea mays
  Clone ID: LIB3152-001-C1.E11.P1-
cctttcctttcagcaaatagcaactgccacattccaatagcagtctccagtgagagagacttttgacccttttcccttgcccaagtgaatgcaaagttgtttatatcacggaatttattgtcatcttttagctcagctcgtaatgatggtaattttccacgaaacttctcgattgaatctaccccaattgactgcagtccaccaatgaattcctgacgagtaaattcacacattgtggcggctttcatgtgccatgatatgacaagcatgacaatatcctgaggatcaacctgtagatcattgcaaaattgagatattccttccaccattatcatatcagcatcaggttctttatgtctgttgaaaatatcttcaagatgccgtgtattgaccacagaaacctgaggttggctatagaagaagtcaaaagctccttccaagtgccaatcactagctttcagtgcctgaagggcaaccttctcactggcgccggtaatggtcatgaactgctgcaccttgtcgcggtttcctctcccc

SEQ ID NO: 24848 - DNA, 294 bp, Zea mays
  Clone ID: LIB3152-001-C1.E12.P1-
cccacgcgtccgtagcgagcgagagagaggggaacaaaaaggaagggcgaggaggacagggagccgagcgcaagagctgaggcttcgccgcgaaaccccagacctcgcgccgtccctttcccctccgcggcgtcgtcctcgcacgctctccgatccaagatgtataagctggggagaggaaaccgcgacaaggtgcagcagttcatgaccattaccggcgccagtgagaaggttgcccttcaggcactgaaagctagtgattggcacttggaaggagcttttgacttcttctat

SEQ ID NO: 24849 - DNA, 592 bp, Zea mays
  unsure at all n locations
  Clone ID: LIB3152-001-C1.E9.P1+
ttgtcatgcttgtcattatcatggcacatngaaagccgccacaatgtgtgaatttactcgtcaggaattcattggtggactgcagtcaattggggtagattcaatcgagaagtttcgtgngaaaattaccatcattacgagctgagctaaaagatgacaataaattccgtgatatatacaactttgcattcacttgggcaagggaaaagggtcaaaagtctctctcactggagactgctattggaatgtggcagttgctatttgctgaaaggaactggcctcttctggatcattggtgtcagtttttacaggtcaggcacaataaagccatatctagagacacatggtcccagctgctggaatttgtgaagacgaccgatccacagttatccaactacgacgacgaaggtgcctggccctacctcatagacgaatttgtggaatatctgactgagaacggactcgtccagcgtaaaagatgaacaacggggagatgcatctccaaacaatggttgggctgtacaaacatgatttatctcggtcagctcgacgcccagggcctgatattggcactcctgctcaattcattcac

SEQ ID NO: 24850 - DNA, 422 bp, Zea mays
  Clone ID: LIB3152-001-C1.E9.P1-
atcaacctgtagagattgcaaaattgagatattccttccaccattatcatatcagcatcaggttctttatatctgttgaaaatatcttcaagatgccgagtattgaccacagaaacctgaggttggctatagaagaagtcaaaagctccttccaagtgccaatcactagctttcagtgcctgaagggcaaccttctcactggcgccggtaatggtcatgaactgctgcaccttgtcgcggtttcctctccccagcttatacatcttggatcggagagcgtgcgaggacgacgccgcggaggggaaaggggcggcgcgaggtctggggtttcgcggcgaagcctcagctcttgcgctcggctccctgtcctcctcgcccttcctttttgttcccctctctctcgctcgctacggacgcgtggg

SEQ ID NO: 24851 - DNA, 488 bp, Zea mays
  Clone ID: LIB3152-001-C1.F10.P1+
ttattgataccgtcgacctcgagaaacatgtgccatgatatgacaagcatgacaatatcctgaggatcaacctgtagatcattgcaaaattgagatattccttccaccattatcatatcagcatcaggttctttatatctgttgaaaatatcttcaagatgccgagtattgaccacagaaacctgaggttggctatagaagaagtcaaaagctccttccaagtgccaatcactagctttcagtgcctgaagggcaaccttctcactggcgccggtaatggtcatgaactgctgcaccttgtcgcggtttcctctccccagcttatacatcttggatcggagagcgtgcgaggacgacgccgcggaggggaaaggggcggcgcgaggtctggggtttcgcggcgaagcctcagctcttgcgctcggctccctgtcctcctcgcccttcctttttgttcccctctctctcgctcgctacggacgcgtggg

SEQ ID NO: 24852 - DNA, 189 bp, Zea mays
  unsure at all n locations
  Clone ID: LIB3152-001-C1.F10.P1-
acaacatgnnaaagccgccacaatgtgttgaatttactgcgtcagggaattcagttggtcgggactgcagttcagattgggtgtagtattcaatgcgagtaagtgttcgtggtaaaattaccactcattacgaggtctgagctaatagcatgacaattaaattgccgtggatatattacatagctttgc

SEQ ID NO: 24853 - DNA, 344 bp, Zea mays
  Clone ID: LIB3152-001-C1.F11.P1+
caaaatatcttcaagagccgagtattgaccacagaaacctgaggttggctatagaagaagtcaaaagctccttccaagtgccaatcactagctttcagtgcctgaagggcaaccttctcactggcgccggtaatggtcatgaactgctgcaccttgtcgcggtttcctctccccagcttatacatcttggatcggagagcgtgcgaggacgacgccgcggaggggaaaggggcggcgcgaggtctggggtttcgcggcgaagcctcagctcttgcgctcggctccctgtcctcctcgcccttcctttttgttcccctctctctcgctcgctacggacgcgtggg

SEQ ID NO: 24854 - DNA, 603 bp, Zea mays
  Clone ID: LIB3152-001-C1.F11.P1-
tttcaacagtaataaagaacctgatgctgatatgataatggtggaaggaatatctcaattttgcaatgatctacaggttgatcctcaggatattgtcatgcttgtcatatcatggcacatgaaagccgccacaatgtgtgaatttactcgtcaggaattcattggtggactgcagtcaattggggtagattcaatcgagaagtttcgtggaaaattaccatcattacgagctgagctaaaagatgacaataaattccgtgatatatacaactttgcattcacttgggcaagggaaaagggtcaaaagtctctctcactggagactgctattggaatgtggcagttgctatttgctgaaaggaactggcctcttctggatcattggtgtcagtttttacaggtcaggcacaataaagccatatctagagacacatggtcccagctgctggaatttgtgaagacgaccgatccacagttatccaactacgacgacgaaggtgcctggccctacctcatagacgaatttgtggaatatctgactgagaacggactcgtccagcgtaaaagatgaacaacggggagatgcatctccaaacaatggtt

SEQ ID NO: 24855 - DNA, 586 bp, Zea mays
  Clone ID: LIB3152-001-C1.F12.P1-
ggaacaaaagggagggcgagggaggacagggtagccgagcgcaagagctgaggcttcgccgcgaaaccccagacctcgcgccgcccctttcccctccgcggcgtcgtcctcgcacgctctccgatccaagatgtataagctggggagaggaaaccgcgacaaggtgcagcagttcatgaccattaccggcgccagtgagaaggttgcccttcaggcactgaaagctagtgattggcacttggaaggagcttttgacttcttctatagccaacctcaggtttctgtggtcaatactcggcatcttgaagatattttcaacagatataaagaacctgatgctgatatgataatggtggaaggaatatctcaattttgcaatgatctacaggttgatcctcaggatattgtcatgcttgtcatatcatggcacatgaaagccgccacaatgtgtgaatttactcgtcaggaattcattggtggactgcagtcaattggggtagattcaatcgagaagtttcgtggaaaattaccatcattacgagctgagctaaaagatgacaataaattccgtgatatatacaacttt

SEQ ID NO: 24856 - DNA, 494 bp, Zea mays
  Clone ID: LIB3152-001-C1.F9.P1-
aggggagccccaaactccgttgctttttcgataagttacagttcacgatcggaggctgacagccaccacttcccaggcaagttttgttcccccacgtttataagcaaattcaatggtttgccaacagtttggtgaatgaattgagcaggagtgccaatatcaggccctgggcgttgagctgaccgaaataaattatgtttgtccagcccaaccattggttggagatgcatctccccgttgtttattttttacgctggacgagtccgttctcagtcagatattccacaaattcttttatgagggagggccaggcaccttcgtcgtcgtagttggataactggggatcggtcgtcttaacaaattccagcagctgggaccatgtgtctttagatatggttttattgggcctggcctgtaaaaactgacaccaatgatccaaaagaggccattttctttaaacaaatagcaactgccacattccaatagcagtctcc

SEQ ID NO: 24857 - DNA, 492 bp, Zea mays
  Clone ID: LIB3152-001-C1.G10.P1+
cccacgcgtccgtagcgagcgagagagaggggaacaaaaaggaagggcgaggaggacagggagccgagcgcaagagctgaggcttcgccgcgaaaccccagacctcgcgccgcccctttcccctccgcggcgtcgtcctcgcacgctctccgatccaagatgtataagctggggagaggaaaccgcgacaaggtgcagcagttcatgaccattaccggcgccagtgagaaggttgcccttcaggcactgaaagctagtgattggcacttggaaggagcttttgacttcttctatagccaacctcaggtttctgtggtcaatactcggcatcttgaagatattttcaacagatataaagaacctgatgctgatatgataatggtggaaggaatatctcaattttgcaatgatctacaggttgatcctcaggatattgtcatgcttgtcatatcatggcacatgaaagccgccacaatgtgtgaatttactcgt

SEQ ID NO: 24858 - DNA, 601 bp, Zea mays
  Clone ID: LIB3152-001-C1.G12.P1+
attaccatcattacgagctgagctaaaagatgacaataaattccgtgatatatacaactttgcattcacttgggcaagggaaaagggtcaaaagtctctctcactggagactgctattggaatgtggcagttgctatttgctgaaaggaactggcctcttctggatcattggtgtcagtttttacaggtcaggcacaataaagccatatctagagacacatggtcccagctgctggaatttgtgaagacgaccgatccacagttatccaactacgacgacgaaggtgcctggccctacctcatagacgaatttgtggaatatctgactgagaacggactcgtccagcgtaaaagatgaacaacggggagatgcatctccaaacaatggttgggctgtacaaacatgatttatctcggtcagctcgacgcccagggcctgatattggcactcctgctcaattcattcaccaaactgttggcatatcattgaatttgcttataaacgtggggaaacataacttgcctgggaagtggtggctgtcagcctgcgatcgtgaactgtaacttatcgaaaatgcaacggagtttgggactctactaa

SEQ ID NO: 24859 - DNA, 566 bp, Zea mays
  unsure at all n locations
  Clone ID: LIB3152-001-C1.G12.P1-
ccggtgatcaaattttccacgaacttctcgattgaatctaccccaattgactgcagtccaccaatgaattcctgacgagtaaattcacacattgtggcggctttcatgtgccatgatatgacaagcatgacattatcctgaggatcaacctgtagatcattgcaaaattgagatattccttccaccattatcatatcagcatcaggttctttatatctgttgaaaatatcttcaagatgccgtgtcttgaccacagaaacctgaggttggctntagaagaagtcaaaagctccttccaagtgccaatcactagctttcagtgcctgaagggcaaccttctcactggcgccggtaatggtcatgaactgctgcaccttgtcgcggtttcctctccccagcttatacatcttggatcggagagcgtgcgaggacgacgccgcggaggggaaaggggcggcgcgaggtctggggtttcgcggcgaagcctcagctcttgcgctcggctccctgtcctcctcgcccttcctttttgttcccctctctctcgctcgctacggacgcgtggg

SEQ ID NO: 24860 - DNA, 483 bp, Zea mays
  Clone ID: LIB3152-001-C1.H10.P1-
tgatatttattatgttttgttcgcccccacttgctggtgtcgtgccttccgctttttcattctcctacccggggcgatttcgttgtctttgcttttttccgcgggttcaactatctggccgggcaggcggcgtctgtcagcctgcggtcgtgctcgtggttctggtcgtctttgcaactgccggcggtgctctcctgtgtctctagatatggctttattgtgcctggcctgttaaaactgacaccaatgatgggggggcggtctgttccttccaggctttcgcacccgtcccttcccagtagtagttttcagtgagagagacttttgtcccttttccgtcgcgccgttgaactgcgtgttgtctgtgtcacccctttcattgccctctttaatctcctcgcgtcacgttggtctttcgccacgtggcttcttggttgaatggcccctactggtctgccttccaccaatgtgttcctgtcgagt

SEQ ID NO: 24861 - DNA, 606 bp, Zea mays
  Clone ID: LIB3152-001-C1.H11.P1+
tttataagcaaattcaatgatatgccaacagtttggtgaatgaattgagcaggagtgccaatatcaggccctgggcgtcgagctgaccgagataaatcatgtttgtacagcccaaccattgtttggagatgcatctccccgttgttcatcttttacgctggacgagtccgttctcagtcagatattccacaaattcgtctatgaggtagggccaggcaccttcgtcgtcgtagttggataactgtggatcggtcgtcttcacaaattccagcagctgggaccatgtgtctctagatatggctttattgtgcctgacctgtaaaaactgacaccaatgatccagaagaggccagttcctttcagcaaatagcaactgccacattccaatagcagtctccagtgagagagacttttgacccttttcccttgcccaagtgaatgcaaagttgtatatatcacggaatttattgtcatcttttagctcagctcgtaatgatggtaattttccacgaaacttctcgattgaatctaccccaattgactgcagtccaccaatgaattcctgacgagtaaattcacacattgtggcggctttcatgtgccatg

SEQ ID NO: 24862 - DNA, 102 bp, Zea mays
  Clone ID: LIB3152-001-C1.H11.P1-
aataaacgtggggtaaaataacttgcctgggaagtggtggctgtcagcctgcgatcgtgaactgtaacttatcgaaaatgcaacggagtttgggactctact

SEQ ID NO: 24863 - DNA, 155 bp, Zea mays
  unsure at all n locations
  Clone ID: LIB3152-001-C1.H12.P1+
gcacccccgctcaacccanncaccaaaccgccggcatatcattgaatttgcttataaacgtgggtgaacataacttgcctgggaagtggtggctgtcagcctgcgatcgtgaactgtaacttatcgaaaatgcaacggagtttgggactctactt

SEQ ID NO: 24864 - DNA, 533 bp, Zea mays
  unsure at all n locations
  Clone ID: LIB3152-001-C1.H12.P1-
cggccctgtgcgtcgcgctgtccgngntctctctgtttgtgcagcccccccttgtttggngctgcctctccccgttgttcatcttttncgctggncgcgtccgttctccgtctgctcttcccctccttcgtctttgaggtcgggcccggccccttcgtcgtcgtngttggctttctgtgggtcggtggtcttgcccttttccagcggctgggaccgtgtgtctcttgctctggctttcttgtgcctgtcctgttnngcctgccnccattgctccgggcgaggcctgttcctttctgcngntcgccgctgccactttccacttgctgtctcccgtgcgcgagacttccgacccttttcccttgccgcttgtgttgcccggttgtttctctcccggggttttttgtcttctttttgctctgctcttgttggtggttttctttccccgnnccttctcgtttggctctccccctttttgctgtcgcccccccttggtttcctgtcgggttcctcctctctttgtggcggtttttatg

SEQ ID NO: 24865 - DNA, 596 bp, Zea mays
  Clone ID: LIB3152-001-C1.H9.P1+
gccgcccctttcccctccgcggcgtcgtcctcgcacgctctccgatccaagatgtataagctggggagaggaaaccgcgacaaggtgcagcagttcatgaccattaccggcgccagtgagaaggttgcccttcaggcactgaaagctagtgattggcacttggaaggagcttttgacttcttctatagccaacctcaggtttctgtggtcaatactcggcatcttgaagatattttcaacagatataaagaacctgatgctgatatgataatggtggaaggaatatctcaattttgcaatgatctacaggttgatcctcaggatattgtcatgcttgtcatatcatggcacatgaaagccgccacaatgtgtgaatttactcgtcaggaattcattggtggactgcagtcaattggggtagattcaatcgagaagtttcgtggaaaattaccatcattacgagctgagctaaaagatgacaataaattccgtgatatatacaactttgcattcacttgggcaagggaaaagggtcaaaagtctctctcactggagactgctattggaatgtggcagttgctatttgctgaaaggaa

SEQ ID NO: 24866 - DNA, 101 bp, Zea mays
  Clone ID: LIB3152-001-C1.H9.P1-
ctggggtttcgcggcgaagcctcagctcttgcgctcggctccctgtcctcctcgcccttcctttttgttcccctctctctcgctcgctacggacgcgtggg

SEQ ID NO: 24867 - DNA, 615 bp, Zea mays
  Clone ID: LIB3152-001-C2.A4.P1+
gaacacctagctgtgcaagcctacaggctacaacaagcgcttgcggcgagcgtcttacaacaaccaattaaccaattgcaacaacaatccttggcacatctaaccatacaaaccatcgcaacacaacagcaacaacagttcctaccagcactgagccaactagatgtggtgaaccctgtcgcctacttgcaacagcaggtgcttgcatccaacccacttgctctggcaaacgtagctgcataccaacaacaacaacaattgcaacagtttctgccagcgctcagtcaactagccatggtgaaccctgccgcctacctacaacagcaacaactgctttcatctagccctctcgttgtgggtaatgcacctacatacctgcaacaacaattgctgcaacagattgtaccagctctgactcagctagctgtggcaaaccctgctgcctacttgcaacagctgcttccattcaaccaactgactgtgtcgaactctgctgcgttcctacaacagcgacaacagttacttaatgcactagcagtgcctaacccattggtcactgccttcctacagcagcaacaattgctgccatacagtcaggtagtctttgatgaaccc

SEQ ID NO: 24868 - DNA, 207 bp, Zea mays
  unsure at all n locations
  Clone ID: LIB3152-001-C2.A4.P1-
ggtgaacagttcgaagcccattgaatanctggtcggaggaactgtggtgtactggcactaggagcaagtgagcattgtggaataatgaacgcatttgttgcgctcacaggggggcaggaagcgcagggagggctaatatcttggtagccattgttgttaagtcgttgctaggtagcttcgcttggtgtgtttctgggtgctcaaaat

SEQ ID NO: 24869 - DNA, 98 bp, Zea mays
  Clone ID: LIB3152-001-C2.B1.P1-
cttatcgagatgaatgtcaatcaatgttttgattatttgtaggaaacacatgccggtctgagggcaccttgttcgattacatcttattatgtgatcta

SEQ ID NO: 24870 - DNA, 288 bp, Zea mays
  Clone ID: LIB3152-001-C2.B2.P1+
cattcaaccaactgactgtgtcgaactctgctgcgtacctacaacagcgacaacagttacttaatccactagcagtgcctaacccattggtcactgccttcctacagcagcaacaattgctaccatacagccagttctctttgatgaaccctgccttgtcgtggcagcaacccatcgttggaggtgccatcttttagattacatatgagatgtaatcgataatggtgccctcataccggcatgtgtttcctagaaataatcaatatattgattgacatttatctcgat

SEQ ID NO: 24871 - DNA, 439 bp, Zea mays
  unsure at all n locations
  Clone ID: LIB3152-001-C2.B2.P1-
tgcaggtnggcagctgggtttgcctcagcttgctgagtctggcctggtcccttctgttgcagcttttgttgttgctggtgtgtcggtgccttccccncggcgggtgggcttgatgaaagctgttgttgctgttgtgggtgggcggctgggttctccctggctcgttgcctgagcgctggcgggggctgttgcttttgttgttgttgttggtttgctgcttcgtttgcccgtgcgtgtgggttggttgcctgctcctgctgttgcgggtcggcggctagggttctcctcttcttgttggctctgtgctggttggaactgttgttgctgttgtgttgcgttggtttgtttggtttgctgtgccttggtttgttgttgcctttggttaattggtttgtgtncgacgctcgcctcttgcgcttgttgttgcctgtttgcttgc

SEQ ID NO: 24872 - DNA, 308 bp, Zea mays
  unsure at all n locations
  Clone ID: LIB3152-001-C2.B4.P1+
tctctcctttttgancctgtggtggtccgtctacgtgcgctggttctggtggtcctgtttccagggtgctgttgtctgtgtttttgtgttgtgtttttctcgttttgttcttttttcgttttgtttttgttttgggggttgtgttttttttcgttcgttggtttttttttctctgtttttcttttttttgtttcttctttctctttttctgtgtttttcttttttgttttgtgtttttttttggtttttttttttttttggtttggttgttttggttttctgtggggttgggctcaagcgcgtgcatg

SEQ ID NO: 24873 - DNA, 404 bp, Zea mays
  Clone ID: LIB3152-001-C2.C2.P1+
acctgacatacctgcaacaccaattgctgcaacagattgtaccagctctgactcagctagctgtggcaaaccctgctgcctacttgcaacagctgcttccattcaaccaactgactgtgtcgaactctgctgcgtgcctactacagcgacaacaggtacttaatccactagcagtgcctaacccattggtcactgccttcctacagcagcaacaattgctaccatacaggcagttctctttgatgaaccctgccttgtcgcggcagcaacccatcggtggaggtgccatccttgagatcgcatgtgagatgagatcgataatggtgccctcataccggcgtgtgtttgctagtaataatcaatctttctgtattgtcatgttctcccggcgctaaaaaataaaa

SEQ ID NO: 24874 - DNA, 517 bp, Zea mays
  Clone ID: LIB3152-001-C2.D1.P1+
atgggttaggcactgctagtggattaagtaactgttgtcgctgttgtaggtacgcagcagagttcgacacagtcagttggttgaatggaagcagctgttgcaagtaggcagcagggtttgccacagctagctgagtcagagctggtacaatctgttgcagcaattgttgttgcaggtatgtaggtgcattacccacaacgagagggctagatgaaagcagttgttgctgttgtaggtaggcggcagggttcaccatggctagttgactgagcgctggcagaaactgttgcaattgttgttgttgttggtatgcagctacgtttgccagagcaagtgggttggatgcaagcacctgctgttgcaagtaggcgacagggttcaccacatctagttggctcagtgctggtaggaactgttgatgctgttgtgttgcgatggttcgcatggttagatgtgccaaggtattgttgctgcaattggctaattggttgttgtcagactctcgtcgaaagcgctt

SEQ ID NO: 24875 - DNA, 208 bp, Zea mays
  unsure at all n locations
  Clone ID: LIB3152-001-C2.D1.P1-
aacacattggncactgccttcctacagcagcaacaattgctaccatacagccagttctctttgatgaaccctgccttgtcgtggcagcaacccatcggtggaggtgccatcttttagattacatatgagatgtaatcgataatggtgccctcataccggcatgtgtttcctagaaataatcaatatattgattgacatttatctcgat

SEQ ID NO: 24876 - DNA, 435 bp, Zea mays
  unsure at all n locations
  Clone ID: LIB3152-001-C2.D2.P1-
gtcgagatgcatgtcattcaatatattgattatttctaggaaacacatgccggtgtgagggcacctttttcgcttccatctcatttgtcatctaaaggatggcccctccaacggtgggttgctgccccggcaaggccgggttcatcaaagagaactggctgtgtggttgcttttgttgctgctgtgggatggccgtgccctttgggttcggcactgctagtggnttaagtctctgttgtcgttgttgttggtccgcagcagagttcgacacagtctgttggttgtttggaagctgctgttgcttgtcggcagctgggtttgcctctgcttgctgagtctgcgctggtcccttctgttgctgcttttgttgttgctggtttgtcggtgccttcccctcatcgagagggctttcttgaaagcattttgttgctgctg

SEQ ID NO: 24877 - DNA, 349 bp, Zea mays
  unsure at all n locations
  Clone ID: LIB3152-001-C2.D3.P1+
atcgagataaatgtcaatcaatatattgattatttctaggaaacacatgccggtntgagggcaccattatcgattacatctcatatgtaatctaaaagatggcacctccaacgatgggttgctgccacgacaaggcagggttcatcaaagagaactggctgtatggtagcaattgttgctgctgtaggaaggcagtgaccaatgggttaggcactgctagtggattaagtaactgttgtcgctgttgtaggtacgcagcagagttcgacacagtcagttggttgaatggaagcagctgttgcaagtaggcagcagggtttgccacagctagctgagtcagagctggtac

SEQ ID NO: 24878 - DNA, 640 bp, Zea mays
  unsure at all n locations
  Clone ID: LIB3152-001-C2.D4.P1+
ggggggggggggggggggggggggggggggggggggggggggggnggggggggggggggggggnggggggggggggggggggnggggggggggggggggnggggggggggggnggggggggggggggggggggngggnnnnnnnnnnnnggggggnggngnggggggggggggggggggggggggggggggggggggggggggggggggnngngggggggggggggggggggggggggggggggggggggggnggggggggggggggggggggggggggggggggggggggggggggggggggggggggggggnnggggggggggggggggggggggggggggggggggggggggggggggggggggggggggggggggggggggggggggggggggggggggggggggggggggggggggggggggggggggggggggggggggggggggggggggggggggggggnggngnggggggggggggggggggggggggggggggggggggggggnngnnnggggggggggggggggggggggggggggggggggggnggggggggggggggggggggggggggggggggggggnggggggggggggggggggggggggggggggggggggggggggggggg

SEQ ID NO: 24879 - DNA, 434 bp, Zea mays
  unsure at all n locations
  Clone ID: LIB3152-001-C2.E2.P1+
ggcggcagggnncaccatggctagntgactgagcgctggcagaaactgntgcaattgttgttgttgttggtatgcagctacgtttgccagagcaagtgggttggatgcaagcacctgctgttgcaagtaggcgacagggttcaccacatntagttggctcagtgctggtaggaactgttgttgctgttgtgttgcgatggtttgtatggttagatgtgccaaggattgctgccgcaattggttaattggttggtgcaagacgctcgccgcaagcgcttgttgtagcctgtaggctcgcacagttaggtgttcgaagcccattgaagttactggtttgaggaactgttgtttaatggcactaggtagctagtgagcatcgtgtaataatgaacgcatttgttgcgcttacatataggccttgaagcgtaaggagg

SEQ ID NO: 24880 - DNA, 341 bp, Zea mays
  Clone ID: LIB3152-001-C2.E4.P1+
gtagaactgttgttgctgttgtgttgcgatggtttgtatggttagatgtgccaaggattgttgttgcaattggttaattggttgttgtaagacgctcgccgcaagcgcttgttgtagcctgtaggcttgcacagctaggtgttcgaagcccattgaagtaactggtcggaggaactgtggtataatggcactaggagcaagtgagcattgtggaataatgaacgcatttgttgcgctcacaaaaagggcaagaagcgcaaggagggctaatatcttggtagccattgttgttaagtcgttgctaggtagcttcgcttggtgtgtttctgaatgctcaaaat

SEQ ID NO: 24881 - DNA, 185 bp, Zea mays
  unsure at all n locations
  Clone ID: LIB3152-001-C2.F2.P1+
atcgagataaatgtcaatcaatatattgattatttctaggaaacacatgccggtttgagggcaccattntcgatttcatctcatttgtgatctaaaagatggcccctccaacgatgggttgcttgccccgacaggccgggttcatcaaatagaactggctgtatggtagcaattgatgctaatga

SEQ ID NO: 24882 - DNA, 313 bp, Zea mays
  unsure at all n locations
  Clone ID: LIB3152-001-C2.F4.P1+
attttgagcattcagaaacacaccaagcgaagctacctagcaacgacttaacaacaatggctaccaagatattagccctccttgcgcttcttgccctttttgtgagcgcaacaaatgcgtncattattccacaatgctcacttgctcctagtgccattataccacagttnctncgaccagntacttcaatgggcttcgaacacctagctgtgcaagcctacaggctacaacaagcgcttgcggcgagcgttttacaacaaccaatnaaccaattgcaacaacaatncttggnacatgtaaccatacaaaccat

SEQ ID NO: 24883 - DNA, 544 bp, Zea mays
  unsure at all n locations
  Clone ID: LIB3152-001-C2.G3.P1+
attttgagcattcagaaacacaccaagcgaagctacctagcaacgacttaacaacaatggctaccaagatattagccctccttgcgcttcttgccctttttgtgagcgcaacaaatgcgttcattattccacaatgctcacttgctcctagtgccattataccacagttcctccgaccagttacttcaatgggcttcgaacacctagctgtgcaagcctacaggctacaacaagcgcttgcggcgagcgtcttacaacaaccaattaaccaattgcaacaacaatccttggcacatctaaccatacaaaccatcgcaacacaacagcaacaacagttcctaccagcactgagccaactagatgtggtgaaccctgtcgcctacttgcaacagcaggtgcttgcatccaacccacttgctctggcaaacgtagctgcataccaacaacaacaacaattgcaacagtttctgccagcgctcagtcaactagccatggntgaaccctgccgcctacctacaacagcaacaactgctttcatctagcc

SEQ ID NO: 24884 - DNA, 69 bp, Zea mays
  Clone ID: LIB3152-001-C2.G4.P1-
atcggggataaaggtcaatcaatatattgattttttgtaggaaacccatgccggtgtgagggccccatt

SEQ ID NO: 24885 - DNA, 137 bp, Zea mays
  Clone ID: LIB3152-001-C2.H2.P1-
gtttgggtacatcgcttagagctccgtgcacacccgaccgagtagagcgaggaacggagacccatcgcaaccttcggcgtgccgttaatgcatgcttcggcgcgagcacgtttactcacctgggcaaacttgggttg

SEQ ID NO: 24886 - DNA, 292 bp, Zea mays
  unsure at all n locations
  Clone ID: LIB3152-001-C2.H3.P1+
atcgagataaatgtcaatcaatatattgattatttctaggaaacacatgccggtntgagggcaccattatcgattacatctcatatgtaatctaaaagatggcacctncaacgatgggttgctgccacgacaaggcagggtncatnaaagagaactggctgtatggnagcaattggggctgctgtaggaagggagtgaccaatgggntaggtactgntagtggattaagtaactgttgtcgctgttgtaggtacgcagtagtatttcgacacagtcagttggttgaatggaa

SEQ ID NO: 24887 - DNA, 155 bp, Zea mays
  Clone ID: LIB3152-047-D2.H4.P1+
cattcagaaacacaccaagcgaagcacattagcaacaacctaacaacaatggctaccaagatattatccctccttgcgcttcttgcgctttttgcgagcgcaacaaatgcgttcattattccacaatgctcacttgctccaagttccattattac

SEQ ID NO: 24888 - DNA, 539 bp, Zea mays
  unsure at all n locations
  Clone ID: LIB3152-051-F5.A3.P1+
aaagcagttgttgctgttgtnggtaggcggcagggttcaccatggctagttgactgagcgctggcagaaactgttgcagctgttgttgtggctggtttgcatctacgtttgccagagcatgtgggtttgatgcaagcaactgctgttgcnngtnggcggcagggttcaccatggctaggtggctcagtgctggtgggaattgttgttgctgttgcgttgcgatggtttgttttgtttgatgtgccaaggtttgttgttgcaactgggaaattggttgttgtttgacgctcgccgcatttgcttgttgttgcctataggcttgcacaatctgggtgttcgaagcccattgtagttactggtgggaggtcctgtgttctaatggtacttggggctcgtgtgctttgtggtatattgaacgcatttgttgcgctcgcctttcgcgcttgaagcgcttggagggataatttcttggttgcctttgttgttaggttgttgctaatgtgcttcgcttggcgtgtttctgtctgctcaaaatccca

SEQ ID NO: 24889 - DNA, 427 bp, Zea mays
  unsure at all n locations
  Clone ID: LIB3152-051-F5.A3.P1-
cccgtttgctgtggnccttgcacctactccctgcacatctttgttgctcagattgtaccagctctgactcagctagttgtggcctaccctgctgcctacttgcaacagctgcttccattcaacctactgactntgtcgaactctgctgcgttcctcccccagcgccttcagtttcttaatccactagcggtggctcacccattggtcgctgccttcctcccgcagcatcaattgctgccctacaacctgttctctttgctcaaccctgtcttgtcgcggccgctccccttcgttggcggtgccctcttttctcttccatatgagatgtnctcggtgttggtgccctctttccggcttgtgtttccttgaactcctcaatntnttgattgagatttatctcactctcctctttttttttttttctttt

SEQ ID NO: 24890 - DNA, 210 bp, Zea mays
  Clone ID: LIB3152-051-F5.B1.P1-
tgtagcgtcggtcagtgttttgtttttgtgtggctctgtttatgatttgtgtcttttgcttgctcgcttttcgtttgtcttgtgttctgtggggcgggcgtcctttttttttttttgttttttttgtttgtgtttttgtttgttttgtttttgtttttttgtttttttttttttttccctgtttgcttttttgttttttttttttttttt

SEQ ID NO: 24891 - DNA, 623 bp, Zea mays
  Clone ID: LIB3152-051-F5.B3.P1+
caccctccttgcgcttcttgcgctttttgcgagcgcaacaaatgcgttcattattccacaatgctcacttgctccaagttccattattacacagttcctcccaccagttacttcaatgggcttcgaacacccagctgtgcaagcctataggctacaacaagcaattgcggcgagcgtcttacaacaaccaatttcccagttgcaacaacaatccttggcacatctaacaatacaaaccatcgcaacgcaacagcaacaacaattcctaccagcactgagccacctagccatggtgaaccctgccgcctacttgcaacagcagttgcttgcatcaaacccacttgctctggcaaacgtagttgcaaaccagccacaacaacagctgcaacagtttctgccagcgctcagtcaactagccatggtgaaccctgccgcctacctacaacagcaacaactgctttcatctagcccgctcgctgtggccaatgcacctacatacctgcaacaacaattgttgcaacagattgtaccagctctgactcagctagttgtggcaaaccctgctgcctacttgcaacagctgcttccattcaaccaactgactatgtcgaactctgctgcgt

SEQ ID NO: 24892 - DNA, 86 bp, Zea mays
  Clone ID: LIB3152-051-F5.B3.P1-
aatattcttggtagccattgttgttaggttgttgctaatgtgcttcgcttggtgtgtttctgaatgctcaaaatcccacgcgtccg

SEQ ID NO: 24893 - DNA, 589 bp, Zea mays
  Clone ID: LIB3152-051-F5.C1.P1-
gaaaatattatccctccttgcgcttcttgcgctttttgcgagcgcaacatatgcgttcattattccacaatgctcacttgctccaagttccattattacacagttcctcccaccagttacttgaatgggcttcgaacacccagctgtgcaagcctataggctacaacaagcaattgcggcgagcgtcttacaacaaccaatttcccagttgcaacaacattccttggctcatctaacaatacaaaccatcgcaacgcatcagcaacatcatttcctaccagcgctgagccacctagccatggtgaaccctgccgcctacttgcaacagcagttgcttgcatcaaacccacttgctctggcaaacgtagttgcaaaccagccacaacaacagctgcaacagtttctgcctgcgctcagtcaactagccatggtgaaccctgccgcctacctacaacagcaacaaactgcttttcatctagccccgctcgctggggccaatgcacctacctacctgcaacaacaattgttgcaacaagacggaccagctttggctcagttagttggtggcaaaccctgctgccttacttgc

SEQ ID NO: 24894 - DNA, 123 bp, Zea mays
  Clone ID: LIB3152-051-F5.C2.P1+
acatgtccggtaatgagggtcaccatttatcgagtccatcctcatatgctaatcctaaatagatggcatcctctcaactgatgggcttgcttcgccctctacaatgactagggttttatcaaa

SEQ ID NO: 24895 - DNA, 444 bp, Zea mays
  Clone ID: LIB3152-051-F5.C2.P1-
aaaaaaaaaagggccctcctttttttggtttccttttttccttccctttccttccccttttttttttttttttttttttccctttttttcttttccttgcccgtttttttcccccttcttgcctggcaaacccttgcctttcccctttttttttcctttgctcctcttccctttttccccggttttttttttgccggggggccccgccccgttcttctttcctttcttttccccctcttttttggcttttggcccccccctttttccttttttttttgcccggtggtttttttttttcccccctgtttttccctttcttttgccgtctcctttcccccctttctttttgtttttttccttttttttttcccccctttcgcttttttttccccgtttttttttaattcggcgcttttcttttttgttttcttttttttttttttc

SEQ ID NO: 24896 - DNA, 578 bp, Zea mays
  unsure at all n locations
  Clone ID: LIB3152-051-F5.C3.P1+
aacacatgccggtatgagggcaccattatcgagtacatctcatatgtaatctaaaagaggcacctccaacgatgggttgctgcctcgacaagacagggtttatcaaagagaactggttgtatggcagcaattgttgctgctgtaggaaggcagcgaccaatgggttagccactgctagtggattaagtaactgttgtcgctgttgtaggttcgcagcagagttcgacatagtcagttggttgaatggaagcagctgttgcaagtaggcagcagggtttgccacaactagctgagtcagagctggtacaatctgttgcaacaattgttgttgcaggtatgttggtgcattggccacagcgagcgggctagatgaaagcagttgttgctgttgtnggtaggcggcagggttcaccatggctagttgactgagcgctggcagaaactgttgcagctgttgttgtggctggtttgcaactacgtttgccagagcaagtgggtttgatgcaagcaactgctgttgcatgtaggcggctgggttcaccatggctaggtggctcagtgctggtaggaattgttgt

SEQ ID NO: 24897 - DNA, 208 bp, Zea mays
  Clone ID: LIB3152-051-F5.C3.P1-
aaccccccttttagcggtcctttaaccgcgggggttgtggtgtttacccccagggtgaccttttcatttgccagctccttagcccccgttcttttggtttttttcctttcttttcccgccccgttggccgtttttccccgtcaatttttaaatgggggcttccttttagggttcctattttttgttttacggcccctccccccaaaaa

SEQ ID NO: 24898 - DNA, 137 bp, Zea mays
  unsure at all n locations
  Clone ID: LIB3152-051-F5.C4.P1+
accgtcgacctccanacactcgcaaaaagcgcaagtaagcgcaaggagggataatatcttggtagccattgttgttaggttgttgctaatgtgcttcgcttggtgtgtttctgaatgctcaaaatcccacgcgtccg

SEQ ID NO: 24899 - DNA, 599 bp, Zea mays
  Clone ID: LIB3152-051-F5.C4.P1-
cgagcgcaacaaagcgttcattattccacaatgctcacttgctccaagttccattattacacagttcctcccaccagttacttcaatgggcttcgaacacccagctgtgcaagcctataggctacaacaagcaattgcggcgagcgtcttacaacaaccaatttcccagttgcaacaacaatccttggcacatctaacaatacaaaccatcgcaacgcaacagcaacaacaattcctaccagcactgagccacctagccatggtgaaccctgccgcctacttgcaacagcagttgcttgcatcaaacccacttgctctggcaaacgtagttgcaaaccagccacaacaacagctgcaacagtttctgccagcgctcagtcaactagccatggtgaaccctgccgcctacctacaacagcaacaactgctttcatctagcccgctcgctgtggccaatgcacctacatacctgcaacaacaattgttgcaacagattgtaccagctctgactcagctagttgaggcaaaccctgctgcctacttgcaacagctgcttccattcaaccaactgactatgtcgaactctggtgcgtacctac

SEQ ID NO: 24900 - DNA, 334 bp, Zea mays
  Clone ID: LIB3152-051-F5.D1.P1+
actctgctgcgtacctacaacagcgacaacagttacttaatccactagcagtggctaacccattggtcgctgccttcctacagcagcaacaattgctgccatacaaccagttctctttgataaaccctgtcttgtcgaggcagcaacccatcgttggaggtgccatcttttagattacatatgagatgtactcgataatggtgccctcattccggcatgtgtttcctagaaataatcaatatattgattgagatttatctcactttaataaaaatatcttgtaattaaaaaaacagaaaaaaccattaatatttatgtatatttattatagaat

SEQ ID NO: 24901 - DNA, 610 bp, Zea mays
  unsure at all n locations
  Clone ID: LIB3152-051-F5.D1.P1-
tcgctattctgttggttgaatggttgtgctgttgcaagtaggcagatggtttgcccatctagctgagtcagagctggtccattctgttgcaacaattgttgttgctggtatgtnggtgctttggccacagcgagcgggctagatgaaagcagttgttgctgttgttggtnggcggctgggttcaccatggcttgttgactgagcgctggctgaaactgttgcagctgttgttgtggctggtttgcaacttcgtttgccagagcaagtgggtttgatgcaagcaactgctgttgcatgtgggcggctgggttcaccatggctaggtggctcagtgctggtaggaattgttgttgctgttgcgttgcgatggtttgttttgttagatgtgccaaggattgttgttgtctctgggaaattggttgttgtaagacgctcgccgcatttgcttgttgtagcctataggcttgcacagctgggtgttcgaagcccattgaagtaactggtgggaggaactgtgttataatggaacttggagcaggtgatctttgtggaataatgaacgcatttgttgctcttgctcaaagcgcaagaagcgcaaggagggataata

SEQ ID NO: 24902 - DNA, 575 bp, Zea mays
  Clone ID: LIB3152-051-F5.D12.P1+
ttgctgctgtaggaaggcagcgaccaatgggttagccactgctagtggattaagtaactgttgtcgctgttgtaggtacgcagcagagttcgacatagtcagttggttgaatggaagcagctgttgcaagtaggcagcagggtttgccacaactagctgagtcagagctggtacaatctgttgcaacaattgttgttgcaggtatgtaggtgcattggccacagcgagcgggctagatgaaagcagttgttgctgttgtaggtaggcggcagggttcaccatggctagttgactgagcgctggcagaaactgttgcagctgttgttgtggctggtttgcaactacgtttgccagagcaagtgggtttgatgcaagcaactgctgttgcaagtaggcggcagggttcaccatggctaggtggctcagtgctggtaggaattgttgttgctgttgcgttgcgatggtttgtattgttagatgtgccaaggattgttgttgcaactgggaaattggttgttgtaagacgctcgccgcaattgcttgttgtagcctataggcttgcacagctgggtgtt

SEQ ID NO: 24903 - DNA, 304 bp, Zea mays
  Clone ID: LIB3152-051-F5.D12.P1-
gccaccgccggtgaaagcaacaattgtctgccatacaaccagttctctttgataaaccctgtcttgtcgaggcagcaacccatcgttggaggtgccatcttttagattacatatgagatgtactcgataatggtgccctcattccggcatgtgtttcctagaaataatcaatatattgattgagatttatctcaataaaaaaaaaaaaaaaaaaaaaaaaaaaaaaaaaaaaaaaaaaaaaaaaaaaaaaaaaaaaaaaaaaaaaaaaaaaaaaaaaaaaaaaaaagggggcggctggttttaa

SEQ ID NO: 24904 - DNA, 281 bp, Zea mays
  Clone ID: LIB3152-051-F5.E1.P1-
gaaggcatgtccttgggttagccctgctgtggataagtactgttgtgttgttgttggtcgcagttttgttcgtcttattttgttggttgattggaagctgctgttgtctgtaggctgcagggtttgctccatcttgctgtgtcagagctggttcattctgttgcttctgttgttgttgcttgtatttttgttcattggccacagcgagcggtcttgatgtatgcttttgttgttgttgtaggtaggcggctgggttccccgtgtgctgttgattgatctgc

SEQ ID NO: 24905 - DNA, 575 bp, Zea mays
  Clone ID: LIB3152-051-F5.E12.P1+
tatcgagtacatctcatatgtaatctaaaagaggcacctccaacgatgggttgctgcctcgacaagacagggtttatcaaagagaactggttgtatggcagcaattgttgctgctgtaggaaggcagcgaccaatgggttagccactgctagtggattaagtaactgttgtcgctgttgtaggtacgcagcagagttcgacatagtcagttggttgaatggaagcagctgttgcaagtaggcagcagggtttgccacaactagctgagtcagagctggtacaatctgttgcaacaattgttgttgcaggtatgtaggtgcattggccacagcgagcgggctagatgaaagcagttgttgctgttgtaggtaggcggcagggttcaccatggctagttgactgagcgctggcagaaactgttgcagctgttgttgtggctggtttgcaactacgtttgccagagcaagtgggtttgatgcaagcaactgctgttgcaagtaggcggcagggttcaccatggctaggtggctcagtgctggtaggaattgttgttgctgttgcgttgcgatggtttg

SEQ ID NO: 24906 - DNA, 424 bp, Zea mays
  unsure at all n locations
  Clone ID: LIB3152-051-F5.E12.P1-
ggtgaaacaataatggtgtccctcaattccggcatgtgtttcctagaaataatcaatatattgattgagatttatctcantaaaaaaaaaaaaaaaaaaaaaaaaaaaaaaaaaaaaaaaaaaaaaaaaaaaaaaaaaaaaaaaaaaaaaaaaaaaaaaaaaaaaaaaaaaaaggggcggcccgttttaaaagaacccaacctaacgtccccggccatccaacgcaataccttttttttggggcccccaaaattaaattcacgggccgtcgttaaacaacgtcgggacgggaaaaaacccgggcgtacccaaattaaatcgcctggaaaaaaatccccctttccccagcgggcgtaaaagcaaaaaggcccgaaccgaccgcccttccaaacagttgcccaccctgaatggcaaagggaacccc

SEQ ID NO: 24907 - DNA, 353 bp, Zea mays
  unsure at all n locations
  Clone ID: LIB3152-051-F5.E2.P1-
cgggcgcgtgggattttgagcattcagaaccacaccaagcgaagcacattagcatcaacctaacaacagtggctaccaagatattatccctccttgcgcttcttgcgctttttgcgagcgcaacaaatgcgttcattattccacantgctcacttgctccaagttccattattacacagtctcctcccaccagttacttcaatgggcttcgaacacccagctgtgcaagcctataggctacaacaagcttttgcggcgagcgtcttacaacaaccaatttcccagttgcaacaccattccttggctcatctaacaatacaaaccatcgtaaccgctcagcaacaacaattcct

SEQ ID NO: 24908 - DNA, 513 bp, Zea mays
  Clone ID: LIB3152-051-F5.E3.P1-
caaaccagccacacaacagctgcaacagtttctgccagcgctcagtcaactagccatggtgaaccctgccgcctacctacaacagcaacaactgctttcatctagcccgctcgctgtggccaatgcacctacatacctgcaacaacaattgttgcaacagattgtaccagctctgactcagctagttgtggcaaaccctgctgcctacttgcaacagctgcttccattcaaccaactgactatgtcgaactctgctgcgtacctacaacagcgacaacagttacttaatccactagcagtggctaacccattggtcgctgccttcctacagcagcaacaattgctgccatacaaccagttctctttgataaaccctgtcttgtcgaggcagcaacccatcggtggaggtgccatcttttagattacatatgagatgtactcgataatggtgccctcattccggcatgtgtttcctagaaataatcaatatattgattgagatttatctcaata

SEQ ID NO: 24909 - DNA, 223 bp, Zea mays
  Clone ID: LIB3152-051-F5.F12.P1+
ccactagcagtggctaacccattggtcgctgccttcctacagcagcaacaattgctgccatacaaccagttctctttgataaaccctgtcttgtcgaggcagcaacccatcgttggaggtgccatcttttagattacatatgagatgtactcgataatggtgccctcattccggcatgtgtttcctagaaataatcaatatattgattgagatttatctcaat

SEQ ID NO: 24910 - DNA, 573 bp, Zea mays
  Clone ID: LIB3152-051-F5.F12.P1-
ggtgaacaagtggataagtaactgttgtcgctgttgtaggtacgcagcagagttcgacatagtcagttggttgaatggaagcagctgttgcaagtaggcagcagggtttgccacaactagctgagtcagagctggtacaatctgttgcaacaattgttgttgcaggtatgtaggtgcattggccacagcgagcgggctagatgaaagcagttgttgctgttgtaggtaggcggcagggttcaccatggctagttgactgagcgctggcagaaactgttgcagctgttgttgtggctggtttgcaactacgtttgccagagcaagtgggtttgatgcaagcaactgctgttgcaagtaggcggcagggttcaccatggctaggtggctcagtgctggtaggaattgttgttgctgttgcgttgcgatggtttgtattgttagatgtgccaaggattgttgttgcaactgggaaattggttgttgtaagacgctcgccgcaattgcttgttgtagcctataggcttgcacagctgggtgttcgaagcccattgaagtaactggtgggaggaactg

SEQ ID NO: 24911 - DNA, 352 bp, Zea mays
  unsure at all n locations
  Clone ID: LIB3152-051-F5.F2.P1+
ggtaaaagcttttaacagngctgtttccctttggcgctcctggngtattcgggccgttcccgtttgctccgttcttcgctctcgctccccttggtggttgtttcgcgtttcttcctgcgtggttgtcgttgtgtttggtcgcttgctcgttttgtctcccggtggtgctttccgtttgttgttttgggggggggggttgggtgggctttctctggtttttcctggctctctgttgttgcttttcgtgcgtgccgtctgtcctgcttgctgggtcctcttgtttttgtgcggtcgtctccgctgtgttcngctcccttgctgttttccctgcttgcgcttcttgcgctttttg

SEQ ID NO: 24912 - DNA, 319 bp, Zea mays
  unsure at all n locations
  Clone ID: LIB3152-051-F5.F2.P1-
gtttctgttgccattgttgtttgcgtgttgcgctgttgtgcttggggggcgctcttggtgttcttcttgcgcctggtcctcggtgccgttccgttttttcccggccgctccctgctggtgctccagtgggctttgtcccccgtgctgtgcgtgcctgtcggcttcntcgtgctggcgcggtgcggggtgggcggcgtccccttttccagttgcccccgccttgccttgccgcgtctgtcggtccggtcgtctggggcgcgccngcggcggcgctgcctgcctgggctggcggccgcgggcgcgtggccgcgcccggccg

SEQ ID NO: 24913 - DNA, 89 bp, Zea mays
  Clone ID: LIB3152-051-F5.G12.P1+
tattgattgagatttatctcactaaaaaaaaaaaaaaaaaaaaaaaaaaaaaaaaaaaaaaaaaaaaaaaaaaaaaaaaaaaaggggcg

SEQ ID NO: 24914 - DNA, 540 bp, Zea mays
  Clone ID: LIB3152-051-F5.G12.P1-
tgaacactagaaacacatgccgggatgagggcaccattatcgagtacatctcatatgtaatctaaaagaggcacctccaacgatgggttgctgcctcgacaagacagggtttatcaaagagaactggttgtatggcagcaattgttgctgctgtaggaaggcagcgaccaatgggttagccactgctagtggattaagtaactgttgtcgctgttgtaggtacgcagcagagttcgacatagtcagttggttgaatggaagcagctgttgcaagtaggcagcagggtttgccacaactagctgagtcagagctggtacaatctgttgcaacaattgttgttgcaggtatgtaggtgcattggccacagcgagcgggctagatgaaagcagttgttgctgttgtaggtaggcggcagggttcaccatggctagttgactgagcgctggcagaaactgttgcagctgttgttgtggctggtttgcaactacgtttgccagagcaagtgggtttgatgcaagcaactgctgttgcaagtaggc

SEQ ID NO: 24915 - DNA, 606 bp, Zea mays
  unsure at all n locations
  Clone ID: LIB3152-051-F5.G2.P1+
tacacagttcctcttcaccagttacttcatatgggcttcgaacacccagctgtgcaagcctataggctacaacangcaattgcggcgagcgtcttacancatccaatttcccagttgcaacatcattccttggcacatctaacatttcaaaccatcgcaacgcatcagcttcaacagttcctaccagcactgagccacctagccatggtgaaccctgccgcctacttgcaacagcagttgcttgcatcaaacccacttgctctggcnaacgtngttgcnaaccagcctcaacatcagctgcttcagtttctgccagcgctcagtctactagccttggtgaaccctgccgcctacctacaacagtctcaactgctttcatctagcccgctcgctgtggcctttgcacctacatacctgcttcaccttttgttgcttcagattgtnccagctcttgactcagctagttgtggcaaaccctgctgcctacttgcttcagctgcttccattcaaccaactgactatgtcgaactctgctgcgttcctacaacagcgacaacagttacttaatccactagcagtggcttacccattggtcgctggcttcct

SEQ ID NO: 24916 - DNA, 179 bp, Zea mays
  unsure at all n locations
  Clone ID: LIB3152-051-F5.G2.P1-
tgttcagtnntaatggaacttgngagcagtgaagcttgtggaataatgaacgcatttgttgcgctcgcctaagcgcatgaagcgcaggagggattttttcttggtagccattgttgttaggttgttgctcttgtgcttcgcttggtgtgtttctgcttgctcataatcccacgcgtccg

SEQ ID NO: 24917 - DNA, 238 bp, Zea mays
  Clone ID: LIB3152-051-F5.G3.P1+
cctgtagctatttgaaaaggagagtatttaacattcggccttttcccttttttgggttgctcgttgtcacccacgctgaaagtaagtcgaacggggccgtgggttctcgcgtcacagcggaagatcctggagttcgcggacgttcatggagcactttagtctgcttggcggtttcgtgcgccgcgagcctgcgcgtcctttctaagctgtgtctccccgaacttcgtggctgacgaga

SEQ ID NO: 24918 - DNA, 60 bp, Zea mays
  Clone ID: LIB3152-051-F5.H1.P1+
gggggggggatggggccgccccctgttcgggcgctttaagcgcgtgggttgtggtgttta

SEQ ID NO: 24919 - DNA, 403 bp, Zea mays
  Clone ID: LIB3152-051-F5.H1.P1-
tttgcccatcttgctgagtcagagctggttcaatctgttgcatcatttgttgttgcaggtttgtaggtgctttggccacagcgggcgggctagatgaaagcagttgttgctgttgtgggtaggcggctgggttcaccatggctagttgactgagcgctggctgtaactgttgcagctgttgttgtggctggtttgctccttcgtttgccagagcaggtgggtttgatgcaagcaactgctgttgcaggttggcggctgggttcaccatggcttggtggctcattgctggtcggaattgttgttgctgtcgcgttgcgatggttcgttttgtttgttgtgccttggattgttcgtgcttctggcaaattgtttgttgtctgactcttcgtcgcttttgtttgtt

SEQ ID NO: 24920 - DNA, 664 bp, Zea mays
  unsure at all n locations
  Clone ID: LIB3152-001-C1.F1A
cgaagatcatgtatgagaccctcaaggtcactgtccgatttccccagttgtgacacgtcattgctacctagctaactggcacgaggtgagacgcgtattgaaagactggcctcgaagtagccgtagactgcgggttgcgcgcaaaggcggagttctgtataaggttatataatagatcacttccaactagaaacgcgaaacttgccccgcttgaagcacgcactgaatgtataggaaggctcggctctgtatgctttctgggttacgtcccaaattgcgtcgcttactgctaggaagcaagtccttaatctctccccacacctccgggctcgaggccctctgtggttctggttgtctgtatgcatgtctgctctgtccgtcggtcctgctcctcactccgagtactgtatgtaaacctccgaagatccggagttatacaagtaccccagaatctaccaaacaatagcgcactaaaaccttactaaaaccttaccaattcgaaaaaccttctcggctgcctcgggggttagacctgttcntttttgcatcactagtataaaaagtcatctgtaacgtacaccgcctcaaatttcataccatgagaaacagattacctcgggtttttgccaactgtttgtcgctctgtgttgcggttcatttgctt

SEQ ID NO: 24921 - DNA, 449 bp, Zea mays
  Clone ID: LIB3152-001-C1.F2A
tttttcgccctttgtgctttgacctactttgacgtatgttggtatgattgtttttgtttttttttttgcagaaaaatcccaaactccgttgttttttagaaaagtcacagttaacgatcggagggtgagagccaccattttccaggcaaggtatgtttccccacgtttataagccaattcaatgatgtgccaacagtttggtgaatgaattgagcaggagtgccaatatcaggccctgggcgtcgagctgaccgagataaattatgtttgtccagcccaaccattggttggagatgcatctccccgttgttcatcttttacgctggacaagtccgttttcagacagaaattccacaaattttgatatgagggagggccaggccccttccccgccgtaattggataactggggatggggcgattttacaaattccagcaggtgggaccat

SEQ ID NO: 24922 - DNA, 623 bp, Zea mays
  unsure at all n locations
  Clone ID: LIB3152-001-C1.R2A
ctcacgcgtccgtagcgagcgagagagaggggaacaaaaaggaagggcgaggaggacagggagccgagcgcaagagctgaggcttcgccgcgaaaccccagacctcgcgccgcccctttcccctccgcggcgtcgtcctcgcacgctctccgatccaagatgtataagctggggagaggaaaccgcgacaaggtgcagcagttcatgaccattaccggcgccagtgagaaggttgcccttcaggcactgaaagctagtgattggcacttggaaggagcttttgacttcttctatagccaacctcaggtttctgtggtcaatactcggcatcttgaagatattttcaacagatataaagaacctgatgctgatatgataatggtggaaggaatatctcaattttgcaatgatctacaggttgatcctcaggatattgtcatgcttgtcatatcatggcacatgaaagccgccacaatgtgtgaatttactcgtcaggaattcattggtggactgcagtcaattggggtagattcaatcgagaagtttcgtggaaattaccatcattacgagctgagctaaaagatgacaatanattccgtgatatatacaacttttgcattcac

SEQ ID NO: 24923 - DNA, 238 bp, Zea mays
  Clone ID: LIB3152-001-C2.F1A
aagttatatgtattatagttgagttaattttggttgtgcacgaaatgtgggttataatgagtttggtttatggtagaattgttttgtgtagtagagtgttttgggttaggtattgtatggattagtactttttgttgttgtaggtacgtagagatttcgaacattcagtttgttaatggtgtagtgttgttgtaggtatatggttttcacatctgcttagtcagagtggttaatttgt

SEQ ID NO: 24924 - DNA, 426 bp, Zea mays
  Clone ID: LIB3152-001-C2.F2A
cccccccccccccccccccccccccatcaaatgggaaagcggtcctgaccccggtacaaatccagaatccgagtaccgctgagttgtctatgaatggagggaggccgggagttgaaatccaactcccggggagttcccacaatgaaaccgaactacactggaagatcccttttaactaacctatgattatctggaacacgattgggctttttcgtatgctaggtataaaaacgactccctcaaatgggaaggacctcccttataatgacgcggggtcctccgaagcccaagtgcttagtatcggtccgcgaatgatacaccggaaaaacccgtcgcaactattcattttggaattgaggcccgtcggtcgttaaaccttaaaaggctcttacgttttgtcgccgaaaaaccggatgatgctttagg

SEQ ID NO: 24925 - DNA, 590 bp, Zea mays
  Clone ID: LIB3152-001-C2.R1A
gtgagatcatgtatgagacccaaactgccgatcttgctaccgattccgttccaaggaaggtttcccgtcatcactgtatgacgtcctccttctttgggggggggggggggggggctacagaatgttctcgaggtggagggggaatggcgctaggaactaaagcaacgacttacagggagtaggataataaataaataaagccagcattaaaagaagcggcgcacccaacggctaactaaggggagcgataaagagtcaacgagaaacagaataaaagaatttcgtcggcggcgacggtaagtatgggtcgacgtggtagtagtgttaaaccgaaaaatacaactagtgctacttagccttggaaatgtatgggtgcgctgccctattgtcacatgccatatgcgggggttggtaatcggacggtggcctgtatgactagcatcaaggcctcgacactgtggcgggtttaaccaaatggcggtgcggctagcgcagaaagggctaagggtagggcaaatgtgctggcaggtccacatgtgccgcgtagggggaatgggggtaatgctggcgacaccgctggggccggctgg

SEQ ID NO: 24926 - DNA, 554 bp, Zea mays
  unsure at all n locations
  Clone ID: LIB3152-001-C2.R2A
atgcttcgtggctgattcaggttcggttaaccgggtttcgtagggagtgtcggtgggagtgtcggtcatgtatgatatatatattttaagaaaaacttaantcttgtacttagttagaattctatggatatgtgaaatatgcctattgccgtggtgtaaaggggataggcgtgtggtggggcccggggcggtgttgtcgtcggcgtgagtgcgcggtacggaatactcacaatgcttttatattaaaggtgtagaattctgatgatccgactaggaccaggttgtggatctataattcctgggccgattgagctaaatgcatctaccttgagccttaattatgcccctagccgccgcacaaggaaggcgattcccgctcttcgaacagcgttgacgccttatacaccccgaagatacacaaataaggctactgctacactacaacttcttaattaacacgtgaacccctgaactacgcagatttctacggcgattacaccttgaactgccccgacacgacttgagactaaatggttggagaactctctaaccca

SEQ ID NO: 24927 - DNA, 535 bp, Zea mays
  Clone ID: LIB3152-047-D2.F2A
gctaccaccgcactgacacctggcgcgtgagacctatacgcgcgatcttttggtgctggcctggtggcacagaatggtgatgcgaacggccagaaatgcaaggaggatttcttgaacgccgacctaactgagctctgttacattccgaaccgtggcacaccgtaccagatggttcacaagctcaagcatggctgtcttatccgcgcgacagagattaccgggactgattccgaccttacggggcggatcaccacatcaggtgagccagatcgtgtacgaatcagcgaccggacatctgctagtgatcccgcagacaacggagctggttggccattatgacaacacagtgcctgtatcggccagaagatcgtccttggctttgaagagacatcgtgctcccgaacggcttcactctcaagagggggggcatggccgggacggacccgcaggaatacaccggatgccacgataggtcaatcgcaactggctccagacgtttggtttggtcatgcttattgcggtgatcggctcgggg

SEQ ID NO: 24928 - DNA, 74 bp, Zea mays
  Clone ID: LIB3152-047-D2.R1A
caactgccgatctgctccgattccgttccaggtttcccgtcatttactcgctcagtgtgatacgaaacaagatt

SEQ ID NO: 24929 - DNA, 676 bp, Zea mays
  Clone ID: LIB3152-051-F5.F2A
ccatcctggatccaacaacaatcctggccgcgctggcggccaggaccgagcagatcgggctggttgcggcggtgaacgtttatacggctctgccttatgattttgcacgccgtctggcgtctcttgatcacctctcgagtggacgggcaggctggaagccatattcgactgccgatgagcctgaagaagcccggatcgcggagttcgtgcatgccgtcagccacctcctggacagctgggatgacgatgccgccctttacgacaaggagagtggaatttatgtcgacatcagcaaggttcatcggctcgatcacatcggggaatattatagggtagctggcccgctcgatataccacgcgcccctcaaggtcgaccggtcctggttcgagaggtcctcgctgccgatcttgccgaaggcgcatggcccacggcggacatcattgaaatcgttccggtccccggtcagagcacgaacaagcccctcgcacctcgtgccgagggaaataccacccttctaagtatcgttgcagacactaacgatctcgcgtcgatgcatgcactgcttaacgatggggacgttgatggagcaactgaacgtgtagcgccacgggatcggatgccgtcgcgcgggccagcgagagatattgggttatggtcaaagccccgcggaagcaa

SEQ ID NO: 24930 - DNA, 274 bp, Zea mays
  Clone ID: LIB3152-051-F5.R2A
tggggaacacacgtgcagagaacactgacgcgcaacgactctaatgatgtgcgtcgggggcgcatgacgccttcagaaagatcggtttgttgggacctatagaaccaggtaccgaccgaggcttaaggtggctgcgaggcatatgcgagcggaccagctaccctatacatattcactcgatgtgattgagccgattaaccttgctgatgtcgacacaaatgcgaatcttattggagaaaggtgagtcgttgtaatcccaattgttcaacaggtg

SEQ ID NO: 24931 - DNA, 193 bp, Zea mays
  Clone ID: LIB3153-001-Q1-K1-A6
cggacgcgtgggcggacgcgtgggaaaaaaatataagtcatgaatagcaacaagaacactggcggggcgacagctaccgttgcggtgttgttactagtagcggagacgctgctcacaacggtggctattgcacggtcttgcttgaacgggatgctgccttcgtcgacgacgtcacatggcatggttggggatc

SEQ ID NO: 24932 - DNA, 305 bp, Zea mays
  Clone ID: LIB3153-001-Q1-K1-B1
gctctctctactctctcaagatgtagctctagtagtagttagtcttggtgggagctctgctaggagtctggagtagtcttcaagagtctgaattatctacatgagcataagaaatatcaacagaaagcaggccctaaaagataccaaacctatagttgactcgaaagcaatgtctttggaaaatgaaagcgcactacagacggtgcacgtaagaagaagtggaagaaaatgtcaatcctatgggagctatcttactggaaagacttaaaggtccaccacaacatcgatgtcattcacgtgaaaaa

SEQ ID NO: 24933 - DNA, 445 bp, Zea mays
  Clone ID: LIB3153-001-Q1-K1-B10
acggtgaatgctttgagtttggttttccaattcaatggcacaggcttgttaatccaaagatggtgcccgataataaacatgcactgtcaccatcagaaacaactgctagtgcaccaagtcattcagttgaatattacatagagaagttcttaagtgacagtttttccaattctaacagatattctttcatagagaatgattcttacacatctgtagtgtgtactggcagcacaaatggacttactacccaaacccttccaaacttaccagatgataatgcaagaaacataactgtatcttggggattatatggcctcaggatggacatgtctgggaaaccttggacaccacctggagaagtgtgtaataatagccaagaaagtgatcgacatgaaagtatgcaaatagatgcatgtaaacaagagttagttaatcgctccatgag

SEQ ID NO: 24934 - DNA, 383 bp, Zea mays
  Clone ID: LIB3153-001-Q1-K1-B12
cgagtctcgtccacccgtcgtcctcctagctcctctactcgccagtcgccatgggcaagattaagatcggaatcaacggcttcggaaggatcggcaggctcgtggccagggtcgccctacagagcgaggatgtcgagctcgtcgccgtcaacgaccccttcatcaccacggactacatgacctacatgtttaagtacgacaccgtgcacgggcactggaagcacagcgacatcacactcaaggactccaagacccttctcttcggtgacaagccggtcaccgtctttggcatcaggaaccctgaggaaatcccgtggcgtgaggctggcgctgagtatgtcggggagtccaccggcgtcttcactgacaaggacaaggctgct

SEQ ID NO: 24935 - DNA, 370 bp, Zea mays
  unsure at all n locations
  Clone ID: LIB3153-001-Q1-K1-B2
aagaatcttagttgtttttgtttattttttgcactggtgtctttcatttccagtagatgctaggatctggaaatcaagtgaagggtaggatctatactacctgaggtgaattttcttgagaggagtatggggaagacgaaggggtggagagatagagagagagagatgctagctagattgattcaatcctggatgaaagaacaaatgctcttgcgaacgagtgaagctgccagcatgatctagctctgatttggttggcaccatattagcaggcgtccacgcacagctagactagagtggcctcgcgcgctctcgtntggtctgtgtctcgctctgtacgtacctgcaaattcgtgttagatcatgcatg

SEQ ID NO: 24936 - DNA, 404 bp, Zea mays
  Clone ID: LIB3153-001-Q1-K1-B3
tgctcttcaactttcttacactcatttacattggtgtaatgctttatctgctggttccaccactctatgagaagtatcaggatcaggttgatgaaacggttggcgtagcgcacagtataatatcgaggcacataaataccattgttaccagggctgggcaatcagccaaggagaagaagactgaataaaagaattgttttgatgtattgtggaacatctatgggtagcaagcggagttgatagcgggcttttcatctttggactcttcatatgaacctccacttacattagatctcgatatgctgatctgaagttttgatgtgcgctgccgatttcaggaaatgagacggcttgtgtattattatgtttgtgaacatgatgtttactatgggcgcatatcttac

SEQ ID NO: 24937 - DNA, 204 bp, Zea mays
  Clone ID: LIB3153-001-Q1-K1-B4
tggacgccagcggagccggtagaaggcgaagaaggggcggctgggcgcaaggctggcggccccaggaagaagtccgtgtcgcggtccgtcaaggccgggctgcagttccccgtcggccggatcgggcgctacctcaagaaggggcggtacgcgcagcgcgtgggcaccggcgcccccgtctatctcgccgccgtgcttgagtac

SEQ ID NO: 24938 - DNA, 460 bp, Zea mays
  Clone ID: LIB3153-001-Q1-K1-C2
gcagcgccgccagacactccgtagtctgtaccccaagcaccggcgcggcggcggcggctaccgtggcagtcgggaagaacaagaggatctccaagggaaagaagggtggtaagaaaaagaccgtcgatcccttctctaagaaggactggtatgacatcaaggccccatcggtcttcagtgtgcgcaacattgggaagactctcgtgtgcaggacacagggtaccaggattgcctctgatggtctgaagcacagagtctttgaggtttgtctagctgatcttcagggtgacgaggatcaggcttacaggaaaatcaggctccgtgctgaagatgtgcaaggcaggaatgtgctcacaaacttctggggcatgaaatttaccaccgataagctcacatctctagtaaagaagtggcagacattgattgaagcccatgttgatgtcaagacaaccgacaacta

SEQ ID NO: 24939 - DNA, 313 bp, Zea mays
  Clone ID: LIB3153-001-Q1-K1-C3
cccacgcgtccgaagatctgcatcttgtgaagacgctgacagggaagaccatcaccctcgaggtcgagagcagcgacaccatcgacaatgtcaaggccaagatccaggacaaggaagggatcccgccggaccagcagcggctgatctttgccgggaagcagctggaggatggccgcacccttgcggactataacatccaaaaggagtctacgctccacctcgtgctcaggctccgcggtggcatcattgagccctcgctgcaggcgctcgctcgcaagtacaaccaagacaagatgatctgccgcaaatgcta

SEQ ID NO: 24940 - DNA, 465 bp, Zea mays
  Clone ID: LIB3153-001-Q1-K1-C5
ctcccatctcgcacttgagttgagactactgttgtgactattgtgtgcgtgagagagaaacagaagaagcaaaggcatccatggcggcgacgctggcgaagaaggcggggcgctccgcggcgacgactctatggtgcgcggcgaggggcttcgcatcggtagggttcgacatcgtctatgcagctaccggcgtgtcagtggagaaggcgcggtcctggggagggcgtatacaccaagttctctaccacgccttgtaaggacatcttctacgggaagaaggtggtcatcttcagcttgcccggagcatatacaggggtttgttcacaagcgcacgttcctagttacaagaagaatattgacaagttgaaagcaaaaggaatcgactctgttatctgtgtagctgggaatgatccgtatgtactggatggatgggcaaaaaagctagacgcttaagatacaattgag

SEQ ID NO: 24941 - DNA, 443 bp, Zea mays
  Clone ID: LIB3153-001-Q1-K1-C8
gggacaggtgatttcggctgcttccctcatggcgaccgcgctcaagtcgttcttgaacagccccgttggccccaagaccacccacttctggggccctgttgccaactggggcttcgtcgtcgcgggcttggttgacatgaacaagcctcctgaaatgatatctggcaacatgacagcagccatgtgcgtgtattctggactgttcatgaggtttgcatggatggtacagccccggaattatttgcttctagcatgccatgcttccaacgagagtgttcagctctatcagctgtctcgctgggctagggctcaggggtacctggagaagaaagagccagagacacaacagtaaagagggtgaggaagtagcagacttttgctgcttctgtactaaggtggttcccaagggagaacatcaagactgaagtgcgggaggactcggt

SEQ ID NO: 24942 - DNA, 92 bp, Zea mays
  Clone ID: LIB3153-002-Q1-K1-A1
cggacgcgtggacggtcgtcccggagacattctcgcgcaaccaggacctgaacgtgatccggtcccggtggtcaattctgggcgcgctctgc

SEQ ID NO: 24943 - DNA, 54 bp, Zea mays
  Clone ID: LIB3153-002-Q1-K1-A2
ccgacgcatagacagtcctcccgtatacattctcgcgcaaccaggatctgagac

SEQ ID NO: 24944 - DNA, 181 bp, Zea mays
  Clone ID: LIB3153-002-Q1-K1-A4
gggactcgcgagtggccctaacaaaggcattcaatccaaaccaaccaatccatgtcagcggggcctgttacccgatcccccttgcccgtagagggatagataccgagattactgccgaacacctgctcgcgttccacggtaccgttccgttcaaggccatctacgcctacgttctgggcaa

SEQ ID NO: 24945 - DNA, 51 bp, Zea mays
  Clone ID: LIB3153-002-Q1-K1-A6
cagaggcataatcagatcctcccggaagacagttctctcgcaaccagggag

SEQ ID NO: 24946 - DNA, 130 bp, Zea mays
  Clone ID: LIB3153-002-Q1-K1-B1
cgccaaccccgtcatcgatctcgtttcatatccatgggtcctcgtttctttcgtaccgaaggttctgtacccaatggtcaagagcaagatcggtatcaatgggttcggcaggatctgaaggctggtggcc

SEQ ID NO: 24947 - DNA, 381 bp, Zea mays
  Clone ID: LIB3153-002-Q1-K1-B2
gcgacttgcgagtggctccaacaaggcaacacaatccaccggcaccaacccagcgcggcgccaccggcgacccgtacccccttccccggagagcgatggcgacggagctgacggcggcgcatctgcgcgcgtacgacggcaccgacccgtccaagcccatctacgtctccgtccggggcaaggtctacgacgtcacctccggccgcggcttctacggtcccggcggcgcctacgccgtcttcgcgggccgcgaggccagccgcgccctcggcaagatgtccaatgacgaggccgacgtcttcggggacctctccgggctcaccgacaaggagctcggcgtgctcgccgactgggagaccaagttccaggccaagtaccccg

SEQ ID NO: 24948 - DNA, 58 bp, Zea mays
  Clone ID: LIB3153-002-Q1-K1-B3
gggaaaagccagtatctatatcaatgcaaattcattgatcggcgcctactcagggccg

SEQ ID NO: 24949 - DNA, 163 bp, Zea mays
  Clone ID: LIB3153-002-Q1-K1-B4
gtgaaactcgcgtgtccctcacgatgcaaatcaatggatcggctcctattcaatgcagggtgggctgtgagacataacccttgtccctaacagagataacgaatgctgtgacatgatgcacagatttgctcattatacagaaaaaaattggccaaaaccatct

SEQ ID NO: 24950 - DNA, 393 bp, Zea mays
  Clone ID: LIB3153-002-Q1-K1-B6
gcgttcggtacttgcgagtggctccatcaaggcaacacaattcaccggcacctacccagttcggcggggccggttacccataccccctttcccggagagcgatggagactgatctgacagcggcacagctgctcgcgtactaccgtaccgacccgtccaagcccatctacgtcttcgtccggggcaaggtctactacgtcacctcctgccgcggcttttacagtcccagcggcgcctacgccgtgttctcgggccgcgaggccagtcgcgccctctgcaaaatgttcaatgacgagggcgacgtgttcggggaccctttcgggctcaccgacaaggagcttcggctgtctctcccacttgggagaccaatttcctagccaagtaaccccgttt

SEQ ID NO: 24951 - DNA, 438 bp, Zea mays
  Clone ID: LIB3153-002-Q1-K1-C1
ctctaccgtccgagaccccaagcaccaacgcggcagcggtggcgggggcggcgtcgaccatggctgtcggaaagaacaagaggatctccaagggaaagaagggcggcaagaaaaagaccgtcgaccctttctctaagaaggattggcatgacatcaaggcaccgtcggagttcagtgtgcgcaacatccggaagactctcgtatccaggacacatggtaccaggattgcttctgagggtctgaagcacagagtctttgaggtttgcctagctgatctttagggcgacgaggatcaagcttacaggaaaatcacgctccgtgctgaagatgtgcaaggcaggaatgtgctcacaaactttcgtggcatgaattttaccactgatgaactcacatccctagcgaagaagtggcagacatttatcgaagcccatgttgatg

SEQ ID NO: 24952 - DNA, 367 bp, Zea mays
  Clone ID: LIB3153-002-Q1-K1-C2
ctcccactcgcggtagccggcggccgcggacgaggaggaaagcaggcaggccatggcgtctgcgtcttcgaccccagcggacgttcgcgagatgcaaaaagatctcgaggtacaagccaacgccctctgcatgatccaaagagacatctgccataaccaccacgtccgcatgcagtacaccatacatgtcggagagaacgagctcgtcctcaaagagctggagctgctcatcgatggggccaacgcgtacaagctcatcggaccggcgctggtcaagcaagacctagcggaggccaacgccaacgtcaagaagcgcatcgagtacatatgcgcagagctgaagctgatggatcgggctctcaaagac

SEQ ID NO: 24953 - DNA, 344 bp, Zea mays
  Clone ID: LIB3153-002-Q1-K1-C3
ctcttccttccgatacccctagcaccaactcgacggggatagcagggacggcatcgaccgggggtgtttgaaagaacaagacgatctccaaaggaaacaagggctgcaagaaaaagaccgtccaccctttatctaacaaggattggtatgacataaacgctccgtccgtgttcagtgtgcgctacatctggaagactctcgtatccagcacacagggcaccagcattgcttctgtgggtctgaagcacacattctttgaggtttgcctatctgatcttaagagcgacgaggatcaagcttacacgaaaatcacgcttcctgctgaatatgtgcaaggcaagaat

SEQ ID NO: 24954 - DNA, 304 bp, Zea mays
  Clone ID: LIB3153-002-Q1-K1-C4
ctcttccttgcgggaccccaagcaccagcgcggcgggggtagcagggacgccatcgaccatgggtgtttgaacgaacaagacgatctccaagggaaacaagggctgcaagaaaaagaccgccccccctttatctaacaaggataggtatgacatcaacgctccgtccgtgttcattttgcgctacatccggaagactctcgtatccagctcacagggctcctgcattgcttctgtggggctgaatcacacaatcttttagggtcggctatctgatctttagagcgacgaggatcaagcttacac

SEQ ID NO: 24955 - DNA, 326 bp, Zea mays
  Clone ID: LIB3153-002-Q1-K1-D1
gacagatcctccttgacctcaattctcttttcaagatcaccaacgacctctcctaggagggggccattaccctgcgcaaggaggttaccccgtacatgattgacggacaccttaaacgtttcaaccgtgtgtcgattgagaggctgaaggagactatgtgctacaagggcattcgtcacaagcttggactcccagttcgcgaccagaggacaaagaacaactgccggacacttaagggaaagagggcttaacctgccaagaagaagtcaccccacttccatgatgaataaatcgtattgccatgtattgaacctctctctctctct

SEQ ID NO: 24956 - DNA, 167 bp, Zea mays
  Clone ID: LIB3153-002-Q1-K1-D2
tgtcagatcctcactaaccttaatactcatatctaagatcaccaattacctcttctaataaaagaatattatccctatataacattagtctaccaaatactttatttttttattacctttaaacactataaactcttatattttaattcaataaattttaaaattat

SEQ ID NO: 24957 - DNA, 53 bp, Zea mays
  Clone ID: LIB3153-002-Q1-K1-D3
gacagatccttctttacctactattctctttacatatatcaccaaggtacctt

SEQ ID NO: 24958 - DNA, 125 bp, Zea mays
  Clone ID: LIB3153-002-Q1-K1-D4
gacagatcctcctttaccttaattcctttatcatgtatcaccaacgacctctccgtataggagttggttaccctccacaaggaggttacccactacatgattgacggacaccttaaactttccaa

SEQ ID NO: 24959 - DNA, 391 bp, Zea mays
  Clone ID: LIB3153-002-Q1-K1-E1
caaaatcgtcagcccctcggaaagccaagcctgtttaacccactcagagcaccgcataggtgtcgaagagcaaagcaaaacctgaggggcgaagatcaaatagtgacactctgaacaagctgggaactaagctcagtgtggttggatttagagggcgcagctcacgcaaatcagcacaatctgcataaggctttggtatattcttttattattgctatgctaaaaaggttcttggaggatttgcagcctgtaaatatctgagactacatttaatcatttatctttctccttgcaggattataagggaagaccacattctgagatatgaacgcatcactgttatgaaatattgactgcactcagcagaatgttggaagaatacctttcattc

SEQ ID NO: 24960 - DNA, 226 bp, Zea mays
  unsure at all n locations
  Clone ID: LIB3153-002-Q1-K1-E2
caaaatcgacagaccctcggaaagccaagcctgngtaattcactcagagcagcccaaaggtgggggagatcttatcaggaacctgggcgccattatcaaatagtgacactctgaacaagctgtgaactaagctcaatgtggatggatttagagggcgcatctaacgcaaatcaactcaatcttcataaggctttggaatcattcattattattggtatgcataaaa

SEQ ID NO: 24961 - DNA, 409 bp, Zea mays
  Clone ID: LIB3153-002-Q1-K1-E3
caaaatcgttagcccctcggaaagccaagccggtgtaacccactcagagcagcgcaaagggggcgaagagcaaagcagaacctgaggggcgaagatcaaagagtgacactctgaacaagctgggaactaagctcagtgtggttggatttagagggcgcagctcacgcaaatcagcacaatcttcataaggctttggtatctttcatttattattgctatgctaaaaaggttcttggaggatttgcagcctgtaaatatctgagactaactttaatcatttatctttctgcttgcgggtttataaatgaagaccacattgggagatttgaacgcactactgttatgtaatattgtactgctcttctctagaatgttggaagattactttttattaaaaaaaaaaaaataa

SEQ ID NO: 24962 - DNA, 322 bp, Zea mays
  Clone ID: LIB3153-002-Q1-K1-F1
cgggcgcgtgggttccgtgcctgcgcccgttgccaccttggccgacgttgtcaagtctgcggtcgctcagaacacggtcggccatgctaccgtgcctacttcgacggggaacgctggtgttgatttcgccgagctggagcgcgctatggatttactgatggacggaggttcatacgactctatcagcactctctagagctgtgatggatcccattactcggtcaggaacactcgcctttggagcgttgacgacatgcccatgtctgctggcttctactgagcgctgatgcccaacgactggtgcttgtgttcataggggggg

SEQ ID NO: 24963 - DNA, 327 bp, Zea mays
  Clone ID: LIB3153-002-Q1-K1-F2
cgggcgcgtgtgttccgtgcctgcgcccgtttccatcttggccgtcgttggcaagtctgcggtcgctcagaacacggccggccatgctgcgtcgcctcctgcgacggggtacgctggtgttgatctcgccgagtcggaggcgtctatggatttactgatggacggaggatcatacgactccaccagcactctctagagctgtgatggatcccattactcggtcaggaccacggccctttggagcgtttacgacccgcccatgtctgctggtttctactgacgttgaggcccagcgactggtgctggggttcattgggggggacaaag

SEQ ID NO: 24964 - DNA, 126 bp, Zea mays
  Clone ID: LIB3153-002-Q1-K1-G1
acgatgtatacgatacaacattacatgcgcatgcatgggacctattcgacattctatagagtgacccagtatatgattgacctggcgactgtcttgatcgtggtgcttgagaaaatgctggacgtg

SEQ ID NO: 24965 - DNA, 271 bp, Zea mays
  Clone ID: LIB3153-002-Q1-K1-G6
cacaaaagcacagcactctgctctgctcggcttgccttgtcctgttgcttgccatatgggtgccaagatggtcctgcgtcgcttcgtagccctcgcggctctcgcctgcctcctccgtcctggcgcgtgcgtcgagctccaccgcaagctctccgggtggtccgacgactcgcgcacgacatggtactgggcatccaccggcgcttggagcgacggtggtgcatgcaggtaccagaacgccgtcgaccatccgaccatctgatccatgatc

SEQ ID NO: 24966 - DNA, 432 bp, Zea mays
  Clone ID: LIB3153-002-Q1-K1-G7
gatttcctccggcgagagagaggaaccagtattaaaacacaagatacatagatgctgggactgtgctagtgagctgtgagatcgagagaacacactctccagcagcacggcaacatgtcttgcataggttcctcttgcaccgcaaccaacaagggaaaggagactgtggtggaggtgcatggagcggtggcggaggagaagcagcaggtgaggaacggagaggagactgcagcggaggacgactccggtgggtcggatccggattcggactctgaatcggatttagattcggagtcggactgggactcgtattcggaagatgaagaggagcgacagcagcagagaaagaaaaaggagaaacccaaaaacaagaagaagaagaagaagcagcggctgcggcaacagcagcagcagccggcatggctgatcaca

SEQ ID NO: 24967 - DNA, 440 bp, Zea mays
  Clone ID: LIB3153-002-Q1-K1-G8
cgacaagctcatcaaaaccgacgacgccgtcgtcgtcgactcaactcgctcctgctgcctgtgccttccctgcctctgaggatttgctagcggagagacttattatgagattcccgggttggtacctgatgatcgcgcgcgtaggggccttcattggcgccgccatggtgctcttcatgatccacactggcttctacgaaaaggtaactgtcttacgagtcagaaaaacgagcttgggaaagcattccataggcccaatccatgatagaagctttcaatccatggcgcatgcatgatgaacaagaccaacagaagttgtcaagatttatgtgtcttgtcgagtgtctattccccccatcctccgacccatgaatgaggtactattagtgtcaatcttctgcatttggtgaacaatctacatttttttatgtaccttccta

SEQ ID NO: 24968 - DNA, 356 bp, Zea mays
  Clone ID: LIB3153-002-Q1-K1-H1
ctgttgcccaatctgccctcaaggcgcttgctcgttccaggatgaaaatcggacgcattgagaacgtttccccggtccccacggacagcacatcacaaaaagggcggtaggatgggaaggaggctgtatgcgtctcttctgcgtgccatttgctggctcttgtagggtggccatcatgaaactagtcctctctgggtggtgttgctgctttctgtgtaaaccaagacgagctttaattttgctctatttgcataactgtttaccgttagacgaacctgtatgatgatgcatggataatgttttttggctcaagaattggctcgtcatatatctatatacattctcactcttttttt

SEQ ID NO: 24969 - DNA, 296 bp, Zea mays
  Clone ID: LIB3153-002-Q1-K1-H3
cgaccgacgcgtgcgctatagcccattctgccctcaatgctctttctctttacaggatgaaaatcggacgcattaagaacgtttccccggtccccacggacagcactctcttaatgggcggtatgatgagaaggaggctgtatgcatctcttctacttgccatttgctggctcttgtcggttggccatcatgaatctagtcctctctgggtggtatatgctgctttctgtgttagccaagacgagctttaattttgctctattttgatgactgtttacctttagatcaacccattt

SEQ ID NO: 24970 - DNA, 299 bp, Zea mays
  Clone ID: LIB3153-003-Q1-K1-A10
actcttgccacttcacatcttaccttattgccatgaaccacaccgatttcatcatcacggtggcattccaagaaatggcgggaagcatggacaccctggggcactactagtcccacatcgcgttcactcttcctgggctctaccgtgtcgtccatggcatcaatgttttcgatcccaagctcaacattgtctctcctggagcacacatgagtgtttactacccgtatacagaaaccgacaagagactcactgccttccatcctgaaatcgaagagctcatctacagcgacatacataac

SEQ ID NO: 24971 - DNA, 211 bp, Zea mays
  Clone ID: LIB3153-003-Q1-K1-A9
ttcaacctccaccttcttttctacgccaccctcaactatatacttaccctctaacttgcctattacacctactcttccacttacatactctttacacccatccgcacagatatcattatcctcgccactcccactcacaacttactttcctaaaacatccactatatacatgacctcacctccattcctccataaaaacttcaacttccct

SEQ ID NO: 24972 - DNA, 436 bp, Zea mays
  unsure at all n locations
  Clone ID: LIB3153-003-Q1-K1-B10
gaanncccggggggagccgcgcgtccggggcttcaaaccattanctttatctactctttagcgcagaagaacccgatcgacaccaggagggtgttgctcgttgccctcgctctcctggctctcgctgcgagcgccacctccacgcatacaagcggcggctgcggctgccagccaccgccgccggttcatctaccgccgccggtgcatctgccacctccggataacctgccacctccggtgcatctcccaccgccggtccacctgccgccgccggtccacctgccaccggcggtccatgtgccgccgccggttcatctgccgccgccaccatgccactaccctactcaaccgccccgggctcagtctcatccccagccacacccatgcccgtgccaacagccgcatccaagcccgtgccagctgcagggaacctgcg

SEQ ID NO: 24973 - DNA, 362 bp, Zea mays
  unsure at all n locations
  Clone ID: LIB3153-003-Q1-K1-B9
ttttcctttttttcctccctnngctaaaaaaaacaaagcgaggagcatattcaatttgaggggcgcctcctttaactatccaagctttcttacgcattcatgcctcatgtcaactattacctatgcttcattaaaaacaagtcctggtcaactactgatcaaagcctcaacgatgaaaacaccaaattctccaaccttactgaggcaaaggtggatcttgacaaatcttcatgacgttctcgtgaatagggctttacaacttttcattacaaacaagccattaacgatactattgaaggaaacaatccactgtacttcgacataaagaacatcactgttgattaaactcacccacaaacacc

SEQ ID NO: 24974 - DNA, 387 bp, Zea mays
  Clone ID: LIB3153-003-Q1-K1-C11
atccaaccatacacacttcgaccaccgctttcttatacacttgactttctctcaccccagtcttcctaaaataaattgtacttctcatacccatctacaacctatcactcccctattccaatccctcttattcttaaacctctaacggtccttctatttcaaaacttcctcctttttcccccacccaaaccaaaacttcaccactgcccaacctctactttatccaatcatacctactcatgcatcctacataacaactcttctatactctcacctaaaacactttccccttcccttactttacaccccctccaccactaaaactttgtaattacctaacttaaacccctatccctacattcccctttttccacattccttaacacc

SEQ ID NO: 24975 - DNA, 295 bp, Zea mays
  Clone ID: LIB3153-003-Q1-K1-D10
cgtccagcggctcctacatgcttgtgatctcaacctatattcgtgcctccgctccagtcacccgtcgctcctctcaaccatgtgggggaggaataccattgatcccaatgattataacgtctcccttggacccactgtccatgaatgagagtatgtctttggtgtctctcacatcttttcatccttcaatgacacctacattcatatcactgatttgtctggtatggaaactcttactcttatcaccactctcattaatgttaattgcttaccattaatatttctcaccttactc

SEQ ID NO: 24976 - DNA, 182 bp, Zea mays
  Clone ID: LIB3153-003-Q1-K1-D11
tgaaagcatgcaaagagtgatgaaagcatgcaaagagagttgtgtttcttccccggaggggcgttccgagaataaatttgtcttatctgattgtctaaaacctataacgggtgtatcgtagtggttgttatcgttaaacttttaacggtcattctatttcaaaagttttgcattttgcactc

SEQ ID NO: 24977 - DNA, 331 bp, Zea mays
  Clone ID: LIB3153-003-Q1-K1-E11
acgcctcctcctctacttatcctcctccagctaaacccctaaagcaaaccatcaacctccttctcaaggcggattctttaacataaacccaaacaattaattacataattcaaccccctcataccagaaatcacattctatctcaacaatctagccttatacaaacaaaacgactacaaatatctcacccacatatatcttctactaaccttcccatatattcaaaattttacaccaaaaaacccattcctgaccatcaatttccatttcaacacactctgccgacgccaattcctctattctcttcctgagatcaatcacttatccatct

SEQ ID NO: 24978 - DNA, 300 bp, Zea mays
  Clone ID: LIB3153-003-Q1-K1-E12
cctttcttatgcgttctttaaaaaaaatctttttcctctctacctcgccccctataaaacacgcgccatcctctatcacctcaccaaacaccaactcttctttaataccgatatggaaaaaaatcctgataagtatttccccatgaggaagtactctatcaaggcctatatcagtgaaagaacatttatcctgtcaagtttttctcacaagttactttaatttgatacaaatctatctccatccaaatactatgtagctgatcaactgcatgatgaaaaaccaatacttttttcttgttt

SEQ ID NO: 24979 - DNA, 394 bp, Zea mays
  Clone ID: LIB3153-003-Q1-K1-E9
cacacaatctctattttatctctaactctctatatttttaaaaatactttcaacctcttccttaagaggagttttataatctaaagactcccttcttaataataaatatttaacaacctcacataatttctcacattttattttacaatactacttataattacaaaaaaaaaccttcctataacccacccccatcttttatctactaaccctaccatctattctatgtttgccaccaccaaatcacatccctgtcctcttcttttgttagaacaccatcttcttcccacaaatcaaaattacttatcctattttttatcatataaccatacccttagtctaataaaaataaacttcccttccaattttacttcttttacttttctctccatat

SEQ ID NO: 24980 - DNA, 377 bp, Zea mays
  Clone ID: LIB3153-003-Q1-K1-F10
aataaaaatcttctccctctctacctgcactctattaaaatacttgccatccacaatcaccttaccaaacaccaactctccttgaacaccgataattaaaataaacctcataattatcttccccataatcaattacactatcaatgcctatatcaattaaccaacatttatcctgtcaattttttctcataaattactatcatcttatacaaatctatcttcatccaattactatttatcttatcaactacataatgaaaaactattactttttacttatttaaaaaaaaataaaaaaattccctcctttctatataatccaaccttacttactcgtccattcaacaatatacctccttctatattatcatcctaaa

SEQ ID NO: 24981 - DNA, 390 bp, Zea mays
  unsure at all n locations
  Clone ID: LIB3153-003-Q1-K1-F11
gaanaaccggcgggagccacgcgtccgcgccgcctccaccgacaccgactgcctttcttaactgtcgtcgccatggtcagaaggccgcctagattctatcggcagaggaagaacaanccntaccctaagtccaggtactgccgtggtgtccctgaccccaagatcaggatctacgatgtcgggatgaagaggaagggtgttgatcatttcccctactgcgtgcaccttgtctcttgggagaaagagaatgtctccactgaggcgctcaaggctaccctcattgtctgcaacaagtacatgaccaattctgcatgaaaggatgcttcccaccttacggtctcaagttcacccgctccatgtcctccgtatcaacaatatgctttcgtgtgc

SEQ ID NO: 24982 - DNA, 349 bp, Zea mays
  Clone ID: LIB3153-003-Q1-K1-G11
acgcctcctctgggatccctctccgaccccctctgattatccctcatactttgccgcctagccagcggggagaacattccagctagcggtaggaatgtcgataccgactaccagaaacctgtactctttgacaacttcaggaactctggcccggtctacacaggcactctggataaagttggctgtgaaattaacaatgctattatggaactccttgtcttataactcaacagtaaggacattaccgaacttattgccaacggcctcattaaagatgttccaataccacgtgtcaacccacagacttttatgactgcaactgacgatactgactaaaaggttgcttcat

SEQ ID NO: 24983 - DNA, 352 bp, Zea mays
  Clone ID: LIB3153-003-Q1-K1-G9
cctgccatgactcatcgacgcacgcgaggttctacgcgtaacacttttcaaaaactgctgggggtgccttctgaacggacggagcacttgcactaaaacaactcaaccacaaacacatacataatcttgatcaatgatctaaaggccctgctacaccaacaccaaagaaacttactgatgaatatagagcaacattccactgagcaacagaagctagacccatatagacagaccactctacacattctatccagctgcatcttctgaaaactccaaatgacaagtctgtaccatatttctaagataactgtcgctcacgttactcacacgatgttgagatcaacccaatacc

SEQ ID NO: 24984 - DNA, 362 bp, Zea mays
  Clone ID: LIB3153-003-Q1-K1-H10
ggagacatccttactaatccacaataccactggaaggagttcaggttcacattcggaggagcctgccaaagatgcgggggacttctgccgcatgctggttgggttagaggaagagggtttgcagaccgtgaagagctgcagcggttacggttgacaacccacttgcaaggttcacattcaaggaaccagccaaggatgctgagggactctgccgcatgctggttcgattagagggattttgcagcgcgtgaagagctatagcggtctaggtgacagctcacttgccacaaaaccagtgagaaactatatatccgttattttggaactttgaaatatggttttagattgctatgttttattcg

SEQ ID NO: 24985 - DNA, 445 bp, Zea mays
  Clone ID: LIB3153-003-Q1-K1-H12
cgggggggaggcacgcataacgccccaataacccttcaaaccctaatatcacattctcctcgtacccatgacccaccatcctcggatggtgagctacacaaataccgtggcctcccttctctctgaactagtcccttcgatgtcgggggcccctcgtccgtcgaccacaaccgtggaatgcttgcagaccgcccgcctctggccgattgcggcgttccgcgtacgccgtcttctgtctgcctctgtgggcagacggcgtattaccacactctttattccacgcggaatgcctcgtggaagaggccatgtctcgcacacttctacatgtgcgggcgccgggcgcctttcaccaacttgcctccgcctcgccggcgtggctgcgtggaagaagactgtcacttgattctcgtcacttctagcctgcactggacaccatgctttatca

SEQ ID NO: 24986 - DNA, 406 bp, Zea mays
  Clone ID: LIB3153-003-Q1-K1-H9
ccagtgtccgtcgtcttgcgctcgctacccctctccctcgaggccttttcccgcgaagaacgcccagtcgcccacgaggatgaagtttgttgctgcctacctgcttgctgtcctcgctgggaactccagcccctctgccgaggacttgacagccattcttgagtcagttggctgtgaagttgacaatgaaaagatggaactccttctgttccaactgatcggtaaggacattaccgagctcattgcctccggcagggagaagtttgcttcaatcccatgttgcggtggcggcgtggctgtcccggcagctgcccctgctgctggcggcgctcctgcagctgacgcgaagaaagaagagaaacgtggggagaaggaagaaagtgatgacgacatgggctttcacctc

SEQ ID NO: 24987 - DNA, 264 bp, Zea mays
  Clone ID: LIB3153-004-Q1-K1-A1
ctccttagaggaaggaagaaaatccttaacccttacttccttactttattgagaaccggcccttcttttttcatatgaacgaccgtcgggccccccccggccggatcgatatggatctatacgcccaccaagtgcgcaagaccgaccggaacttacttgcgctctgcacggacgagaaaggcgggggcaagtccgggcaggcagtccactacataggctggatcttccaccgagcgattcccccgttcatgtatcagggcgggg

SEQ ID NO: 24988 - DNA, 416 bp, Zea mays
  Clone ID: LIB3153-004-Q1-K1-A10
ggggtggcggcggctgccagctctcaaccgcggccgtgtccgtgctccgatggtgggggtgcgcccgagcccgggttcctttgggccggagctgcgaggcggtgccctgtgcctgcgtggctgtgctgcggctacgccgctctgtggctgtgctgcggctacgccgctctgcgcctgcgtgctcgtgccgtggctggtgcacacactgcaactttcaacagcacagtccttcaacttcgacacatgcagggcgacagccagtggccgtgcgcctgctcacggcggcggcgtgcaccatcgacaaggcccacacccatgtgttcgcatgctctggcgcggcggctatggctcataaaagttcacgatgtgtgaccctgctgcacacacatatgataatgaaatggatgacacagatg

SEQ ID NO: 24989 - DNA, 416 bp, Zea mays
  Clone ID: LIB3153-004-Q1-K1-A11
ccgccgctcccgctcccagctcgtgttccgcttcttgcagccgtcgccgcgaagggcggcagagaacttccgtcaacatggggaagacacgtggtatgggagccgggcgcaagctcaagacccaccgcaggaaccagcggtgggctgacaaggcatacaagaagagccatttgggcaatgagtggaagaaacccttcgctgggtcatcccatgccaagggcattgtcctggagaagattggtattgaggccaagcagcccaactccgctatccgtaagtgtgctcgtgttcagcttgttaagaatggcaagaagattgctgccttcgtgccaaatgacggttgtttgaactacattgaggaaaatgatgaggtcttgattgctggatttggtcgtaaggggcacgcttggggagat

SEQ ID NO: 24990 - DNA, 348 bp, Zea mays
  Clone ID: LIB3153-004-Q1-K1-A12
ggctgttccacgtcgaccttgcgcggaacgcgctcgccggcgcgctcccgccgctgccgcccacgctacggtacctgtccgtcgctggcaacaccatggagggcacgctggagggggccttctgctctggcgacggcggctctgccagcccgcccctacccgccgacctggcgttcctcgacctgtccatgaacaacttctcgggccaaatcccggcggcgctgttcgcgctgccgggcctctcgtcactgctcctgtcgcggaacaacttcacgggtgcgctggccgtgccgtcccagcaacaacaatgggccgtggtggacgtgagccacaacggcatctcgggcg

SEQ ID NO: 24991 - DNA, 322 bp, Zea mays
  Clone ID: LIB3153-004-Q1-K1-A2
aaacaataaaaataaaaaaaaaaaaaaaaaaaacaaataccccaaatccctcaaaaaacaacgggcttaatacacacctggctgtgacgcactcctatccaatagatgaccgtacctcttctcaccaataacatcgtcaacaatcctttcattcagttcatgatgccccatctagacctatattaatgccttaaacaaatctttctcaccccaaacttatttgctcccacctcaggacgaagttcaatggataccccttgatccccaacattggttactgctatgacacactaaccaggcactttttccccaataagttcaa

SEQ ID NO: 24992 - DNA, 185 bp, Zea mays
  Clone ID: LIB3153-004-Q1-K1-A6
atcccagcagttcgtccgctagggttttagcccggtaccccgaatcccgctcctccgccggctcgcgtccaccctggctcttggcgcgctccgatccaagagatggcggtgccgctgctgacaaagaagatcgtgaagaagcgggtcaagcagttcaagaggccccatctcgaccgctataagtg

SEQ ID NO: 24993 - DNA, 434 bp, Zea mays
  Clone ID: LIB3153-004-Q1-K1-A8
ctcaagagcatgggcatcgccgtcgccaagcaccgcctcgagatcctcaagctggccaggaagcaggacgccggcgcctcgtcgtccgcggcctcgcggctcgggcgcagggccaccaggtgcctgtcccggtgcgcgcgccggctggcaggaggcggcgcgtggagggccgcgtcgtcgtcggtcaccgtcgtcccgaggatctgcggcggcgaagacgccgtccgcgtcggagcagtgcagcggaagggcactggtagcggcaccaccaagaagatggtgctcatgatcaccgacggcggcgtcgccggaggagggtacggctacggcctcaaaggccgtggcggcgcgaggctgtcgtcggcgtcgtcgcagaaggcgagtctgatgtttcatgacgggtaccaagacgaggaggaggagatgggagacga

SEQ ID NO: 24994 - DNA, 391 bp, Zea mays
  Clone ID: LIB3153-004-Q1-K1-A9
aacccagtcgctcaaaaccctagagctctcgcctgctcgcctccgccgccggagggagctccccatcttcatccgtcaaccatggcgacccagatcagcaagaagaagaagttcgtcagcgacggtgttttctacgccgagctcaacgagatgctgacgcgggagctggcggaggacggctactctggcgtggaggtgcgcgtcacgccgatgcgcacggagatcatcatccgcgccacgcgcacgcagaacgtgctcggcgagaagggccgtaggatcagggagctcacctccgtcgtccagaagaggttcaacttccctgagaatggcgtagagctttacgccgagaaggtcgtcaaccgtggcctctgtgccatcgcgcaggccgagt

SEQ ID NO: 24995 - DNA, 297 bp, Zea mays
  Clone ID: LIB3153-004-Q1-K1-B1
gcctcagttcgcatccacgcgcgccgccgccgcctcgacgctcaccgcgcagccatggcggaacagactgagaaggctttcctcaagcagccaaaggttttcctcagctcaaagaaatccggcaagggtaagaagcctggcaagggcggcaaccgattctggaagagcattggccttggcttcaagactcccagggaagcaattgaagggacctacattgacaagaaatgcccattcactggaactgtttctatcagaggcagaattattgctgggacatgccacagtgctaaaatg

SEQ ID NO: 24996 - DNA, 302 bp, Zea mays
  unsure at all n locations
  Clone ID: LIB3153-004-Q1-K1-B10
ggcttctcctccccctccggttcgggttcgggttcgtgaggttctccggggttcggtgtcgtgggtgagcggatcgagatggcggcgtcngatgttgagtaccgctgcttcgtcggcggcctcgcctgggccacggacgaccactccctccacaacgccttcagcacctacggcgaggtcctcgagtccaagatcatcctcgatcgggagacgcagaggtcccgcggcttcggcttcgtcaccttctccacggaggaggcgatgcggaacgccatcgagggcatgaacggcaaggagctgga

SEQ ID NO: 24997 - DNA, 326 bp, Zea mays
  Clone ID: LIB3153-004-Q1-K1-B11
aggcgggcagaccaagtcgcctgcagagtgcagactgcagatacagtccgtgctctgagggagcaacaggagaagcagagcgagccgaggcggagtcgacaggcgagtggttccaccgaccgtctcccctgccgcaagcgaacgggtgagcggggcgccgtggatctgatgtccctttgagattctactctgcttctgttctccctacagcttggtgccttatcatggaggaagcggggaggggctgcggcttgctcaaggtggttgtgacgcacggccggaacctagccgtccgggatttcacgtccagcgacccctacgtcatc

SEQ ID NO: 24998 - DNA, 386 bp, Zea mays
  Clone ID: LIB3153-004-Q1-K1-B2
gcgcaccatggtcggatgaacgaagaagaaaaatctgttgcatggaatggatgtatgttggtagattaaaataacggggtttatgtatggatagaatcacaaatgaattctgaaacattttcttataacaatattaccccccagggtaaaaaaaaatttttgaaataaatttcaccttttttttaaaacttcccattaaaccaatattttgtgtttttaatataacaaaaaatggccaatcactggaactgtttgtatcataagcacatttttattcttaacgggggcgccctttttaaaggaaccaaatctttcttgggggggatgaacgattttgtctttgttaaagggtccccaaaattaatttaacgggccctgttttaaaa

SEQ ID NO: 24999 - DNA, 300 bp, Zea mays
  Clone ID: LIB3153-004-Q1-K1-B3
gcgctgtgtaggttcacttgcttgtatcacgacaacctcctccagtcggaatgcacgaggagaacgaccaggacttggcgtggctgctaatgctggtcatcctcgttcttgaccgacaacatattaataaacggcatgatggacagctcatggagattgtgcaccagtcggagcgtgttggccattctacctacgacgcgctgttctatgccgtgcccaagtacaagcaaatgacccgtctaatcttctccaagtggttgacgattaacagctcatttgcttcgagggccataacagact

SEQ ID NO: 25000 - DNA, 313 bp, Zea mays
  Clone ID: LIB3153-004-Q1-K1-B6
attctatctgagttctacatctgcttgtattgcttaacaaaaaataaaaaataatacgggggtcgctttaaacgatcctatcttacctcctcgtacctacaaatggatagctcctttattgacaaacactaacttaattaactggccgacgctttacaacatgccgaatgtcaaaacctctacgtgactcaactcaactggctcgcgccacatgctattgactccagctgcagtaataactaaaaggcatgcacctatctccctaacaaacagtaccgctctctcaatggaaacaggcactacctctgtaata

SEQ ID NO: 25001 - DNA, 380 bp, Zea mays
  Clone ID: LIB3153-004-Q1-K1-B7
ccgtcatcgatctcgtttcaaatccatccatcctcgtttcctccgtcccgcagcatctcgaccccatggccaagatcaagatcgggatcaatgggttcggcaggatcggaaggctggtggccagggtggccctgcagagtgacgatgtcgagctcgtcgccgtgaacgaccccttcatcagcaccgactacatgacctacatgttcaagtacgacactgtgcacggacagtggaagcaccatgaagtcaaggtgaaggactccaaaacccttctctttggtgagaaagaggttgctgtgtttggctgcacgaaccctgaggagatcccgtggggttcggttggtgctgaatatgttgttgagtctactggtgttttcact

SEQ ID NO: 25002 - DNA, 472 bp, Zea mays
  Clone ID: LIB3153-004-Q1-K1-C1
cccaaccctaaccttctctcccccactccgccgccgcattgagcacggggtcgcaaatcgcgcctccggtcctccgcgacacagggcggcgactctgcgtgcgcacctcccgcctccggtgggccgtcgcgcccagccccggcggctgcactgcacgccgcgggcgggcagcgggagccagcagccgctgctgctccacataggcagcctttccgctatgttagcgcttgtgccccaagcgaagcgttacccttacccaccgtttagcgcgtgcgcttagtgccgcattttggaaccctgagtgatagtacatgcagtatttcaatcttggtgtttggtcactgaccgtaacagtttgctttgtatgcatggcccttaagatcgcctcccttttgctatgtgggagcgtgtcgagtcatagccatgcaaaattaacgacgaggttctggagagtttttctctggaacttcct

SEQ ID NO: 25003 - DNA, 162 bp, Zea mays
  Clone ID: LIB3153-004-Q1-K1-C12
gcgggcgccgcgacgcccaccacggtcaccgcgcccgccgcgaccgaagccacggccgaacccgccgcgctctggaccacgctcgccgccgcgctccgccatggttaggtgagtgaagggcggggtggctggggcgcccctgagattgatgggggatgaggg

SEQ ID NO: 25004 - DNA, 403 bp, Zea mays
  Clone ID: LIB3153-004-Q1-K1-C2
gcgaaacctcgagcgctcgcgccggtgaccataacaaagaggaagccgcggtagcactgggagcggcagcagtaagggggagatgtcgtcggcgttcagcggcgatgagaccgcccctttcttcggcttccttggcgcctccgctgcgctcgtcttctcatgcatgggggcggcgtacgggacagccaagagtggcgtcggcgtggcgtccatgggtgtcatgcgcccagagctcgtcatgaagtccatcgtgcccgtggtcatggctggtgtgctcggtatctacggcctcatcatcgccgtcatcatcagcactgggatcaaccccaaagccaagccatactacctctttgacggctatgcccacctgtcgtctggccttgcctgtggtcttgctgggctt

SEQ ID NO: 25005 - DNA, 466 bp, Zea mays
  Clone ID: LIB3153-004-Q1-K1-C4
gcgtgccgcgtgcgtgaggcgatcggagcatcccgtcccgaggaggaagacaacccgcggggcggggtgaacatggggaagaccccgctgcggatgaaggcggtcgtgtacgcgctgtcgcccttgcagcacaaggtcatgccgaggctgcggaaggacatcaccacctagatccaccacacggtcaccgagaactggatctccggcacgctcctactcacccccgtcgtcagcgcctaccaatacgccatgtgctacaaggagcaggacaagctttcccacacatatttaatgcgctgcccttgacagacagcactcgtagttttcatgatgggcatcataatcctcccatgatgatttaacatttgtttgatcaatatcagcttatcgccttttcatcgttccatatgcatatatggagtccgcgtctggcgaacttattttgaggcttgctaaatatgtacct

SEQ ID NO: 25006 - DNA, 470 bp, Zea mays
  Clone ID: LIB3153-004-Q1-K1-C5
gcgagacacaccccatggcgtccttctgccgcgccgccgccgccggggcgaggtcagcggcgctccgctctaggtcgccgacggcgagaccgttcctggcggcgacgtctcctctcgcgccgccacgcttaaacaggcccctcgtggcggcggcggcggcgctggcgagtctggagtcgctcgtgccgctgcacagcgcggtggccgccgcgcggctgcggtcctgcatcgccgccggctccgcgtcctggagctgcctctcccaagattttgctctacctcggtaatgaaggttgaagaaggcgatcagttcagacggggctgccaagttcccatccgtctacacttgacgctcccagccccaagctccaaaagctcttggctgccagcagttctaagtgacgttagcgcttttggtgtgtgtgatgatggttctacgcgtggttcttgcagatttaaacatttgtttc

SEQ ID NO: 25007 - DNA, 465 bp, Zea mays
  unsure at all n locations
  Clone ID: LIB3153-004-Q1-K1-C7
ctccccgcgtccgctagccctagccgccgcccgccgacttcatcgttgccgtcgtctagggctcttcacgcactggaaaggttaaagtccgacatcaatggcgaagcatcatcctgatctcatcatgtgccggaagcagcctggcatcgcgattggccgcctttgcgagaaatgtgatggcaagtgtgttgtctgcgactcgtacgtgcgcccatgtacgcttgtccgggtctgcgacgagtgcaattatggttcgttccagggaaggtgtgtgatctgtggaggagtcggcatctcagacgcttactactgcaaggagtgcacccagcaggagaaggaccgggacggttgccccaagatcgtgaatcttggaagcgccaagacggatctcttctatgagcgcaagaagtatggttntaagaagagatgaccgagaagatggagctgtgtgtggttcactttggc

SEQ ID NO: 25008 - DNA, 117 bp, Zea mays
  Clone ID: LIB3153-004-Q1-K1-C8
ccgtcatgtcgaagcgaggtaagggaggttcggctgggaacaagttccgcatgtcactgggtctaccggtggccggcaccgttaaactccccgaccaaaccggcccccaaaaacttt

SEQ ID NO: 25009 - DNA, 465 bp, Zea mays
  Clone ID: LIB3153-004-Q1-K1-D1
cagagatcgaacaacttggtcctgcagctcaagaagagagttttgtgcatttgggcgcggggggcatgagagagagagagagagccatggcggctgaccagcagccgcagctgcaggaggagatgaacgacgctgccggcggcggcctcaggctgcctccagggttccgcttccacccgagcgacttcgagattgtcagcttctacctcaccaacaaggtgctcaacacgcgcttcacctgcaccgccatcacggaggccgacctaaacaagattgagccatgggacctcccgagcaaggcgaagatgggcgagaaagagtggtacttcttctaccagaaggaccgcaagtacccgacggggctgagggcgaaccgggccaccgaggccggttactgtaaggcgacgggcaaggacaatgaggtctacaacgccgcggaaggggtggcggtactggtcagcatga

SEQ ID NO: 25010 - DNA, 326 bp, Zea mays
  Clone ID: LIB3153-004-Q1-K1-D10
tcgaaaaaaaaaaatataaaaaaaaacaaacttacaaacacatacatacaaaaaaaataggtggaatataatataaaaaaaaaaaaaattaaataaacataaataaaaaaaaaaggggcctccgttataaagaatccaacttaacatacccttccttgcaacatattattttttttataggtgacctaaaattaaataaactggccccctttttacaacgcaacaattggaaaaaccttgtggttaccaaaataaatccttttgcagaacatcaccttttacccagttggtgtaataccaaaaaggcacgcactaattgtctttcc

SEQ ID NO: 25011 - DNA, 435 bp, Zea mays
  Clone ID: LIB3153-004-Q1-K1-D11
ttctccgcgtgacttggggcgtcgtcgccgagctttctccggccgagggcggcgcgaccggacaaccagggtgagcgcgaccggcgacatgactcgcggcaaccagcgtgaccgcgaccgtgagcgcgcggcggcgcggaagcccaacgccaagaactcccaggacgggctcaccccggagcagcgccgcgagagggacaagaaagctctggaggagaaggcggccaagaaggcgcagcaggcagcggccggcggcaccgggacctccacggacaacaacaagaacaaggcaggtggcaagaagtaggaggcagtggcgcgccgccacctctgtacgattaatcgatgccttgagcttgtaacttgttcgcatccttgtaggtgcgatgcttgttgggtcataaactctgatgatatcgagatttggtgatgaga

SEQ ID NO: 25012 - DNA, 368 bp, Zea mays
  Clone ID: LIB3153-004-Q1-K1-D12
ctccttcatgacgagctttctccagctctgagcgcgcggagggatcggagaggcgcggaggaacgggggagaaggagaaggaggaagagcgggaagcggggcggcagccggcggggccggggccgggacaccgcgggtgccgacgtggagggagcgcgagaacaaccggcggcgggagcgccggcgccgcgcgatcgcgtccaagatcttcaccggcctgcgcgcccacggcaactacgctctccgcaggcactgcgacaacaacgacgtgctcaaagcgctgtgcgaggagggccgttggacccgggagcccgacggcaccacctaccgcaagggatgcaagcctccgggcagcagagatccatata

SEQ ID NO: 25013 - DNA, 473 bp, Zea mays
  unsure at all n locations
  Clone ID: LIB3153-004-Q1-K1-D2
aaatatccttgtacctgcatctcgacctcaccggcgtccggcggtggtatcacgatgggggcgttgctgggccggcggatcggggtggctgcggcagctgccgcgttcatcgccctcgtggcgttcggatccgcctcatcctcgcccaagtccttcgtgaagtccaccgtctccgcccacgacgtcgtcatcttctccaagtcatactgcccgtactgcaaaagagcaaaggccgtgtttaaggagcttgagttgaagaaagagccatatgttgtggagcttgatcagcgagaggatggctcagagattcaggatgccttacttgagatagttggcaggcgtactgtccctcaagtttttgtccatggaaagcacctgngtggttctgacgatactgttgactcctacgaaagtggaaaactggctagacttctaaacatcggagtcaaggacgacctttgagtgacatgcta

SEQ ID NO: 25014 - DNA, 184 bp, Zea mays
  Clone ID: LIB3153-004-Q1-K1-D3
cctcgagcccgagcaaacaagggtggacgcggagccggcggcggagcggagatggcgggggggaagcgaggcgccggcactcgcaaggatgaggtggtgacacgcgagtacaccattaacctccacaaacgcctacacggatgcacctttaagaagaaggcaccaaatgccatcaaggagatca

SEQ ID NO: 25015 - DNA, 397 bp, Zea mays
  Clone ID: LIB3153-004-Q1-K1-D4
gccgtcgccacagcaacccttgcaccctcaatcccccacggcgaccatggccgcatcgcgggagtccctctccctggggggcacgatgccccgacataacggcaaggcgacggcgatcccgacctcgatcgacaactcgacttttatcgtttcatcctctcgtgacaagtccacactggcgtgctacctgaccaactgagtacactgcaccactgaatccggcgttaccgccgactacgggattaccttgcgccgtctcaccggccaatcgcactttgtccatgacgtcatgattagttccgacggtcagatcgcactctctgactcctgggacggtgagatccggctttgggacctttgcacctgtctaacgacctgacgattcgtcggtcacgag

SEQ ID NO: 25016 - DNA, 409 bp, Zea mays
  Clone ID: LIB3153-004-Q1-K1-D6
gttctcgcgcccacagccaaatttttctccactcaatcgcggcataagctgcactgcaggcatggacgccagcggagccggtagcaaggcgaagaagggggcggctgggcgcaaggctggcggccccaggaagaagtcggtgtcgcggtccgtcaaggccgggctgcagttccccgtcggccggatcgggcgctacctcaagaaggggcggtacgcgcaacgcgtgggcaccggcgcccccgtctatttcggcggcgggcttgagtacctcgccgccgaggtgctggagctggccgggaacgcggcgaaggacaacaagaagacgcgcatcgtcccgcgacacttgctcctggcgattcgtaacgacgttgagctcggcaagctgctgtctggcgtcaccatcgcgcac

SEQ ID NO: 25017 - DNA, 436 bp, Zea mays
  Clone ID: LIB3153-004-Q1-K1-D7
ccagccaccgccgctagaagaagagctcggcgattcccaggtcccgcgagaagatgccggagcagatccatgagattaaggacttcctcctcaccgcgaggaggaaggatgcccgctcagtgaagatcaagaggagcaaggatgttgtcaagttcaaggtgcgctgctccaagtacttgtacacgctctgcgtcttcgatgctgagaaggcaaacaagttgaagcaatctcttcccccaggtttgaccgtcgaggaggtctgattggatacatggcaacgtcgggttgaactaccaaagcttctttatcagtagcagagtatgctactctatgtacttttggaacctaagctattaaacctgtcagtgttggatgtgtggatcttgcatttttggagaaataccaatttacctcgttcaaggatgcacctttcagt

SEQ ID NO: 25018 - DNA, 472 bp, Zea mays
  Clone ID: LIB3153-004-Q1-K1-D8
gcacagtgcgggaagcctacggcactagaatgatggcatcagtgatgaattcagtactggttcaagcatcgctagaaaagataggtgtggagacacgagtccaaaccgcattgatgatgcaagaagttgcagaaccttacattaggcgtcgagccatacgccatcttgaaaaagggagagtggtcatctttggtgggattggtgtgggcattgggaatccattgttcacaacagatacagctgctgccttaagagcttcagagatcaacgcagatgttgtccttaaaggtattgttggtgatgatgagtatggctgtcctcctaggagcaacagtaatgcttcatttgagcacatctcctttagggagttagcagcaagaggaatcaccaaaatggacatgacagcagtaacatgttgtgaggagaacaacattcctgtcgtcatctataacatgttggagcctggtaacat

SEQ ID NO: 25019 - DNA, 409 bp, Zea mays
  Clone ID: LIB3153-004-Q1-K1-D9
atcttttaataacctttcaataggcgtcccccaagaactagtaaacatggcaaaagtggtgagcctgttcttagccctcttctttgtagcatctatgtttgccatacgctctcatgctgatggagactgtgagaatgacctccaaagcctgataagtgactgcaagacatacgtgatgttcccagctaatccaaaggtccctccttcggatgcttgctgtggtgtcatcaagaaggcacacgtttcttgcttgcgctccaaggtcaccaaaaaaactgaaaaggttgtgcgcatggagaaggttgtgtatgttgctgaacagtgtaagaggccatttgagcatggctttcagcgcggaagctacaaggttccagcacactgatgactccataagagggaagcgtttggc

SEQ ID NO: 25020 - DNA, 214 bp, Zea mays
  Clone ID: LIB3153-004-Q1-K1-E1
gtcgcagcaaggaagcagtgaagtatatcagcatgctgatcgaggccattttgtcgaaggattatagccgtagctcggttatgtaccttttcaggcagccttgcctctcgagacgtttccggcaccgatgttttaaatctggattatctatgttctgtactgaactactgtgttggactgtaagttcagctcgtaatacaatagctcttaagat

SEQ ID NO: 25021 - DNA, 323 bp, Zea mays
  Clone ID: LIB3153-004-Q1-K1-E10
gtcagcttggagcggtccaagcgccctgcgaagcaaactacgccgatggcttcggcgggggcgtgggagggtccgacggccgcggagctgaagacagcgggggcggaggtgattcccggcggcgtgcgagtgaaggggtgggtcatccagtcccacaaaggccctatcctcaacgccgcctctctgcaacgctttgaagatgaacttcaaacaacacatttacctgagatggtttttggagagagtttcttgtcacttcaacatacacaaactggcatcaaatttcattttaatgcgcttgatgcactcaaggcatggaagaa

SEQ ID NO: 25022 - DNA, 321 bp, Zea mays
  Clone ID: LIB3153-004-Q1-K1-E11
aaaaaaaaaaaaaaaaaaaaaaaacaataaaaaaaaaactacaaccgtcgctcctgggggggtttccaaacttaccgacggacgcataccacgacacagcttttgcatgatgtaatctaaattcaattcaatggacggggtttttcatccttttgaatgaaaaaactatgcttaaccccacctctttgcacctctttgaaaatgaacttttcaccagctatttacataaaatagatgttggacacaatcccttttccctacaatatcccaaaactaatgtcaaatggcactttccttctctcgatgcattcaacgcatgga

SEQ ID NO: 25023 - DNA, 311 bp, Zea mays
  Clone ID: LIB3153-004-Q1-K1-E12
cagaagtcggcgctgcgtgaggcgtacaagaagaagaagctgctcccgctcgacctgggccccaagaagacccgcgccatccgcaggcgcctcaccaagcaccagctctccttgaagaccgagagggaaaagaagcgtgagaagtatttccccatgaggaagtacgctatcaaggcctagatcagtgaaagaacatttatcctgtcaagttttgctcagaagttacttgaatttgagacaaatctatctccatccaagtactatgtagctgatcaactgcatgatgaaaaacgagtactttttgcttgttt

SEQ ID NO: 25024 - DNA, 469 bp, Zea mays
  Clone ID: LIB3153-004-Q1-K1-E2
ggtctcgctgccccgattcgccacgaagccgcactgtgagagagggacgcggcccgttgggcccggcttgtacgcagtccttccgtcgctgcgaagttgatccctcgtgttcgccatggcccccagcgtcgccgtggaaaacctcaaccccaaggtcttgaaatgtgagtatgcagtccgtggcgagattgtcatccatgctcagcgcttgcagcaacaactacaaacacaaccagggtctcttccttttgatgagatcctgttctgcaacattgggaatcctcaatcccttggtcagcaacctgtgacgttcttcagggaggttcttgctctttgtgatcatccatgcctcttggaaaaagaggaaaccaaatcattgttcagtgctgatgctatttctcgagcaaagcagattcttgcaactattcctggacgggcaacaggtgcatatagtcacagtcagggtatc

SEQ ID NO: 25025 - DNA, 155 bp, Zea mays
  unsure at all n locations
  Clone ID: LIB3153-004-Q1-K1-E3
acgcacagctctnttcattattacatcccagcggctttttctaccctcgactttcatctaacggtcacttatcaatatgggcgctatccaaactccttaactctccctttcctctgctcataatacagcacacagcatgttcatctccaacacca

SEQ ID NO: 25026 - DNA, 451 bp, Zea mays
  Clone ID: LIB3153-004-Q1-K1-E4
ggaggagcagcagcagcaggcggcgccgaggagcggcatcccactcagtgcttgcaaccggggctaggggattgaagaagcacttgaagaggctcaatgcgcccaagcattggatgctcgacaagcttggcggagcttttgctcccaagccatcttctggacctcacaagtccagggagtgccttactctgatcctcatcatcaggaacaggctcaagtatgctctgaactaccgtgaggtcatttctatcctgatgcaacgccatgtacttgttgatggcaaggtcaggactgacaagacctaccctgctgggttcatggatgtcatttccatccctaagacaatggagaactacaggctgctttatgacaccaagggccgctttcgtcttcacccaatcaaggatgacgatgccaagctcaagctctgcaaggtgaggtccgttcagtt

SEQ ID NO: 25027 - DNA, 386 bp, Zea mays
  Clone ID: LIB3153-004-Q1-K1-E5
gacggatgcatatactccagagcgcacaacaacccaatcgacaccatgagggagctgctcgcgggccactgtctgctggctcacgatgccagcaccaccaacacgcatacaagccgcagctgaagctgccagccaccgacgccggttcatctaccggcggcggtacatatgacacctgcagttgacgtgccacctaagatgcatgtaccaccgacggtccacgtgacgccgcctgtacacctgccacaggcggtccatgtggccgtcggcagttcatatggcgaccgctacatgcgactacgctacacaaccggctcggtctgagtcttatcctcagtcacacgcatgcccgtgccaacagccgcatacaagcctgagccagctgc

SEQ ID NO: 25028 - DNA, 465 bp, Zea mays
  unsure at all n locations
  Clone ID: LIB3153-004-Q1-K1-E7
cacggatcggagcagcagatgcaggaagggcttagcccaggcatcacgatagaccaaggggacaaagattacggcctcaactagacagacttgagaacctgagttggatgctctgatattccagcaacgagctcaggtctgtacaagtacaacacttcagagtgctccttagcctatgtttgtcaggcgttagctgccaaatgctaacatcacgttcgaggtgtacgagaccattccagagttgtgcagctgcagctaactgctggcgcgctcctgctccgttacttacgagggagtggaaaaaagcaattataaaatgtacggtttcaggtaaagtgaagatcggatgcaactaacaatggcgtgcatgttgtttaatatattattgctagaaattcatttattttccatgttcagtgaatngtgttcaatttgtgcgtctcgtggcgtatctgcatgcacaaa

SEQ ID NO: 25029 - DNA, 438 bp, Zea mays
  Clone ID: LIB3153-004-Q1-K1-E8
cagatgtacaacgagatggcctcgcgccaccgcgtgaggtccccctgcatccagatcatgaagacggcgacggtccacttcaagctgtgcaagagggacaacacgaagcagttccacaactcggcgatcaagttcccgctcgtgtaccgcaaggtgaggccgcccaccaggaagctcaggaccaccttcaaggcgtccaggcccaacctgttcatgtgatgggcctcggcgggcgggcgggctgttgcacctgtgttttgtgtcttagtgtccagagagataaaggtttttgcctctgcaagctttgctgccccgtggactgatgatttttttggatgatggtattgtattgcaaacccttgactttggtcctactagttatgagaaggctgctgtgttacttgccctgtctcgcgcattgtttgatgcctgggaatc

SEQ ID NO: 25030 - DNA, 427 bp, Zea mays
  Clone ID: LIB3153-004-Q1-K1-E9
ctactgagctggagcggtctatgcagcaaagcatccttccaacctcctgctgaaagtggaggtgaatcttcaaaatccttgctgatgaatgagaaattgcaaacaggctcacataagttcgcacattctattgcagaatgcgagttgaatgacaaaaagaggcctcgagataacccaccgccatcttggagctactaaccgtaccatggatgcgatgtttgccagcagcaaatctcgtgctgttgctcgtgttttggtagagcacctgctgctgccgacgatgcgaggttcctgatcctgtgttggatcatctaaccatgggctgagtggaattgagttattctccgtttcatttgtactttgtttccttttcacaagatatagattaattctaagttgatgcctgtcgaggtatcagtatcatttg

SEQ ID NO: 25031 - DNA, 388 bp, Zea mays
  Clone ID: LIB3153-004-Q1-K1-F1
tagcaacatagaaagcacaatagtgtaccaacaatggcagccaaaatattttgcctcctgatgctccttggtctttctgcaagtgctgctacggcgaccattttcccacaatgctcacaagctcctatagcttcccttctttccccgtacctatcaccagcggtgtcttccgtatgtgaaaacccaattcttcaaccctataggatccaacaggcaatcgcagctggcatcttacctttatcacccttgttcctccaacaatcatcagccctattacagcagttacctttggtgcatttattggcacaaaacatcagggcacaacaactacaacaacttgtgctagcaaaccttgctgcctactctcagcaacaacagtttcttccat

SEQ ID NO: 25032 - DNA, 407 bp, Zea mays
  Clone ID: LIB3153-004-Q1-K1-F10
cggacgcgtgggccaccaccaccggccaggaagcaagctcaaaccctaaccgccggcgacgccagcacgatggcccgctacgaccgcgcgatcaccgtcttctcccccgacggccacctcttccaggtcgagtacgccctggaggccgtccgcaagggcaacgccgccgtcggcgtccgcggcacggacaccgtcgtcctcggtgtggagaagaagtcaacccccaagctccaggactccaggtccgtgcgcaagatcgcgtgcctggacacccacatcgctctggcatgcgcggggctgaaggcggacgcacgcgtgctcatcaaccgcgcgcgggtcgagtgccagagccaccgactcaccgtcgaggaccccgtcaccgtcgagtacatcacccgctacatcgc

SEQ ID NO: 25033 - DNA, 352 bp, Zea mays
  Clone ID: LIB3153-004-Q1-K1-F11
gcacaatcgtcgcgcttctattggctgttgccattctgtcctcactgtctccatgctgggaagccggcggctgcatcgggaaacccaagaagtcaccgccaccgccgagaaggccatacttctcgtcctattccgaggaccaccagaaggaccaccagaattgccgcttgatctgtagctccaagggtttcaaggacggtggctggtgtgacgaaagcgtggagcacaaagtgtgctgctgctcccattagaattgccgcttgatctgtagctcccattagaaatataatagcgtatatatgcatcgtccatctacctctggggtgcaaaattctgaataaaatcttttttt

SEQ ID NO: 25034 - DNA, 427 bp, Zea mays
  Clone ID: LIB3153-004-Q1-K1-F2
gttctcgcgcccacagccaaatttttctccactcaatcgcggcataagctgcactgcagcgatggacgccagcggagccggtagcaaggcgaagaagggggcggctgggcgcaaggctggcggccccaggaagaagtcggtgtcgcggtccgtcaaggccgggctgcagttccccgtcggccggatcgggcgctacctcaagaaggggcggtacgcgcagcgcgtgggcaccggcgcccccgtctatctcgccgccgtgcttgagtacctcgccgccgaggtgctggagctggccgggaacgcggcgaaggacaacaagaagacgcgcatcgtcccgcgacacttgctcctggcgattcgtaacgacgttgagctcggcaagctgctgtctggcgtcaccatcgcgcacggcggtgtcctccccaac

SEQ ID NO: 25035 - DNA, 435 bp, Zea mays
  Clone ID: LIB3153-004-Q1-K1-F6
gtgcgtgcgtggtgcgcaggcggacgtggacaacaacggcacgatcgactacggcgagtgcatcgcggccacgctgcacctgaacaaggtggagcgggaggaccacctgttcgcggcgttccagtacttcgacaaggacggcagcggctacatcaccgccgacgagctgcaggtggcgtgcgaggagttcggcctgggcgacgtccagctggaggacttgatcggggaagtggaccaggacaacgtcagcaccccctcctcctcgttccttcttctcttctcttctctgcgtctgaattgttctggacctgctgctgcaggacgggcgcatagactacaacgagttcgtggcgatgatgcagaagccgacggtgggggggctcccgaagaaggccgacctgcagaacagcttcagtatcgggttcagggaggcgc

SEQ ID NO: 25036 - DNA, 454 bp, Zea mays
  Clone ID: LIB3153-004-Q1-K1-F7
gtcgctctctccgcccgggcggaggaggagcccgccgccgcggcggagggcgaggccgtgctcaccctcgacgtcgacagcttcgacgaggccgtcgccaagcaccccttcatggtcgtcgagttctacgccccctggtgtgggcactgcaagaaacttgctccagagtatgagaatgcggccaaggcacttagcaagcatgacccaccgattgttctcgctaaggttgatgctaacgaggagaagaacaggccgcttgctaccaagtacgagatccaagggttcccaaccatcaagatcttcagggaccaggggaagaacattcaggaatacaagggccctatggaggctgatggcattgtggattacttgaagaagcaggttggccctgcgtccaaggagatcaagtcaccagaagatgcgacggcccttatcgatgacaagaagatctaca

SEQ ID NO: 25037 - DNA, 468 bp, Zea mays
  Clone ID: LIB3153-004-Q1-K1-F8
gaccaactagcaacatagaaagcacaatagtgtaccaacaatggcagccaaaatattttggctccttatgctccttggtctttctgcaagtgctgctacggcgaccattttcccgcaatgctcgcaagctcctatagcttcccttcttcccccgtacctctcaccagcggtgtcttcggtatgtgaaaacccaattcttcaaccctacaggatccaacaggcaatcgcagctggcatcttacctttatcacccttgttcctccaacaatcatcagccctattacaacagttacctttggtgcatttattggcacaaaacatcagggcacaacaactacaacaacttgtgctagcaaaccttgctgcctactctcagcaacagcagtttcttccattcaaccaactaggttcattgaactctgcttcttatttgcaacaacaacaactaccattcagccagctacctgc

SEQ ID NO: 25038 - DNA, 424 bp, Zea mays
  Clone ID: LIB3153-004-Q1-K1-F9
ctaatccagcccatttcgaactctctctagacgcttcctcggtctctctgttcacgggggccccgtaccgtactcctcttcgcgccgtataaatggcgctgccgaatcagcagggcgtggattaccccagcttcaagctcgtcatcgttggcgacggtggaactggtaaaaccacatttgtgaaaaggcatcttactggcgagtttgagaagaaatatgagcccaccattggtgttgaagttcaccctctggattttagcactaactgtggcaaaattcgcttttattgctgggacactgcttggcaagaaaagttcggggccttagggatggctactacattccatgtcagtgtgccatcattatgtttgatgtcacttctaggctgacatacaagaatgttccgacatggcacagggacctg

SEQ ID NO: 25039 - DNA, 460 bp, Zea mays
  Clone ID: LIB3153-004-Q1-K1-G1
acggtcgttccctcgctgggctgacctgccgacggatttcctctgctggatcggagaccggcgcgagctcaagtggtacgccagcgcgcggggcgtctgcacgtcgtggcgccgcgcgctcgtgccgccgtcgcccgcgctcctcgtgatcgcgaagagcgacagctgttacccctacgccgacgcatccctgcccacggggaggtccttcgagctcaccgccttcatctcaggatggcgctgcgtcagatccagcaacggctggctcgcgttctccgtccacgagaccgtctacgtgctcctcaaccccatcgccgcggtgcaaatcatcctcccaccgcttaactacggggacgagtacaatagccactgggactggtgggtttccaagatcgtcttcaccccgagcaccgccaaggatgacttcgctgccgccgcgatctgcggcatcgacaggatc

SEQ ID NO: 25040 - DNA, 339 bp, Zea mays
  Clone ID: LIB3153-004-Q1-K1-G11
ccagtgtccgccgtcgtgcgctcgctacccctctccctcgaggcctttgccggcgaagagcgcccagtcgcccaccaggatgaagtttgttgctgcctacctgcttgctgtcctcgctgggaactccagcccctctgccgaggacttgacagccattctggagtcagttggctgtgaagttgacaatgaaaagatggaactccttctgtcccaactgagcggtaaggacattaccgagctcattgccgccggcagggagaagtttgcttcagtcccatgtggcggtggcggtgtggctgtcgcggcagctgcccctgctgctggcggcgctcctgcagc

SEQ ID NO: 25041 - DNA, 403 bp, Zea mays
  unsure at all n locations
  Clone ID: LIB3153-004-Q1-K1-G12
cgnntccgggagaccatnnncttactaanntccacaatacncnnactggaaggggagttcnnaggttcnnacattcaaggggaaccntngccaaagatgcggtgaggacnnttctgccgcatgccctggttgggtnntagaggaagaggnngtttgcagactcgtgananngagctgcagcggttaccggttgacaactccacttgcaaggttcacattcaaggaaccagccaaggatgctgagggactctgccgcatgctggttcgattagagggattttgcagcgcgtgaagagctatagcggtctaggtgacagctcacttgccacaaaaccagtgagaaactatatatccgttattttggaactttgaaatatggttttagattgctatgttttattcg

SEQ ID NO: 25042 - DNA, 317 bp, Zea mays
  Clone ID: LIB3153-004-Q1-K1-G4
cccaggacctggtgcccagtctgccctcagggcgcttgctcgttccgggatgaaaatcgggcgcattgaggacgttaccccggtccccacggacagcactcgcagaaagggcggtaggaggggaaggaggctgtaggcgtctctgctgcgtgccatttgctggctcttggcgggtggccatcatgaagctagtcctctctgggtggtgttgctgttttctgtgtttgtcaagacgagctttaattttgctctatgtggatgaccgtttaccgttagtcgaacctgtatgatgttgcatggataatgttttttggctg

SEQ ID NO: 25043 - DNA, 468 bp, Zea mays
  Clone ID: LIB3153-004-Q1-K1-G8
caacaagcaacatagaaagtggaatccagtagcaacaatagagcaacaatggcgaccaagatattttccctccttatgctccttgctctttctgcatgtgttgctaacgcgacaattttccctcaatgctcacaagctcctatagcttcccttcttcccccataccttccatcaatgatagcttcagtatgtgaaaacccagctcttcaaccctataggctccaacaagcaatcgcagcaagcaacatacctttatcacccttgtttcaacaatcgccagccctatctttggtgcagtcattggtacaaaccatcagggcacagcagctgcagcaactcgtgctacctgtgatcaaccaagtagctctggcaaacctttctccctactctcagcaacaacaatttcttccattcaaccaactgtctacattgaaccgtgcctgctatttgcagcaacaactattacca

SEQ ID NO: 25044 - DNA, 423 bp, Zea mays
  unsure at all n locations
  Clone ID: LIB3153-004-Q1-K1-G9
cggacgcgtgggcggacgcgtgggcggacgcgtgggcttcgtaaaaaactgcagggggcccattctgaagggttggagcaggttgtactaaaactacggaacgacatgcacaagtctgaacttgagcgtgatcgattggccatggaacttgaagacgaaagaaagttacggatgactctagagcaacatttgactgagcaacagaagctagaggccatatcgtcagaccactttacagattcaatccagctggatcttctgaaaactccagattcgaagtctgtaccagatggctttgttgcctgtcgctcacgttactcacaagatgttgagttcagcccaatacctgaaaatttggataatattgctgaagaagatctatggacacgtctgaacaaggctgtngtaccgatcttgatatgc

SEQ ID NO: 25045 - DNA, 67 bp, Zea mays
  Clone ID: LIB3153-004-Q1-K1-H1
caccttgaagggggatgggaaccccccttgaaccgggcaataaaccccggcgggggggttgataccc

SEQ ID NO: 25046 - DNA, 377 bp, Zea mays
  unsure at all n locations
  Clone ID: LIB3153-004-Q1-K1-H10
cgacccaattctcctcaatcaaagaaagtccccacgcagagcaagccaagatctgcgccgcggccaggccaggcgaagcaaaacaccggctggctcccatggccggggacctgatggggtgctacgccccgggccgggccaaccaccaactcgccatccaagaagcggcggccgcggggctccgcagcctggaactccttgtgtcgtcgctgtccacgcaagccgccgcgccgcacagggcccgggctcaccagctgcagaagccgccttcgcagccgccgatcggcgagatcgccgaccaggccgtctccaggttccgcaaggtcatctccatcctggaccgcaccggccacgcccgcttncgccgcgggcccgtc

SEQ ID NO: 25047 - DNA, 357 bp, Zea mays
  Clone ID: LIB3153-004-Q1-K1-H11
cgacccaattctcctcaatcaaagaaagtccccacgcagagcaagccaagatctgcgccgcggcgaggcgaggcgaagcaaagcaccggctggctcccatggccgtggacctgatggggtgctacgccccgcgccgtgccaacgaccagctctccatccatgaggcggcggcggcggggctccgcagtctggagctgctcaggtcgtcagatgacacgcatgccgccgcgccgcacagggccgagggtcaccagctgcagaagccgacttcgcaggcgccgatcggcgagatcggcgaccaggccgtctgcaggttccgcaaggacatctccatgctggaccgcaccggacacgccc

SEQ ID NO: 25048 - DNA, 412 bp, Zea mays
  Clone ID: LIB3153-004-Q1-K1-H12
ccccaatgccctccaaaccctagtccacagctcctgtaccctggcggccatgccggatgtgagcaccagctacctgcctcccttccctgaactgtccctcgatgcgggggccctcgccgtcgaccacgcggggaatgctgcagccgccgcctcggccgatgcggcgtccgcgtacgcgtcttcgtctgcctctgtgggcagcggcgtagacgacctcgttattccagcggaatgccggtggaagggccatgtccgcaccttcgacatggcgggcgcgggcgctgtcaccacttgccccgccgcgcggcgtggcggcgggaagaagctgtcactgattccgtcactcgagccggcacggacgcaggcttcagcatcggctccgacgctcgaggaacgcgtgagcgagtgggcg

SEQ ID NO: 25049 - DNA, 473 bp, Zea mays
  Clone ID: LIB3153-004-Q1-K1-H5
aatattttcagcattcagaaacacaccaagcgaagcgcactagcaacaacctaacaacagtggctaccaagatattagccctccttgcgcttcttgcccttttagtgagcgcaacaaatgcgttcattattccacagtgctcacttgctcctagtgccattattccacagttcctcccaccagttacttcaatgggcttcgaacatccagccgtgcaagcctacaggctacaactagcgcttgcggcgagcgtcttacaacaaccaattgcccaattgcaacaacaatccttggcacatctaaacctacaaaccatcgcaacgcaacagcaacaacagtttctgccatcactgagccacctagccgtggtgaaccctgtcgcctacttgcaacagcagctacttgcatccaacccacttgctctggcgaacgtagctgcataccagcaacaacaacgtctgcaacagtttatg

SEQ ID NO: 25050 - DNA, 359 bp, Zea mays
  Clone ID: LIB3153-004-Q1-K1-H6
cgcgtgcgaaccaagcagaccacaacaagaagaagcgtattcgtcgccggaaggaaaggcgcggagcaagatgtcggggcaggcgtacgtccacgagcacctgatgtgcgagatcgaaggacagcatctcagcgccgccgccatcgttggtcacgaccgcagcgtttgggcgcagtccgagagctatctcgagttaaagcctgacgaggttgctggtatcataaaggactttgatgaacctggtactcttgcaccaactggtcttttcgttggaggtacaaactacatggtgatccaaagtgaacctggagttgtcatccgaggaaagaaggacactggcggcattactatctagaaaa

SEQ ID NO: 25051 - DNA, 233 bp, Zea mays
  Clone ID: LIB3153-004-Q1-K1-H7
tacaatttactgtccaaaatcaaatgaatgcaccgatcccatgactaggctacacatcagtgccctgacgaccgatgggttgcaggagtttcttctagtatcggaaacgctactgtcaccggactggaaaggacggcattgatttgactgcccggctcattcaatcccaagatcacattgcataccttgggatctgatgtggcacaacaccataccatcctctgctcccagcc

SEQ ID NO: 25052 - DNA, 469 bp, Zea mays
  Clone ID: LIB3153-004-Q1-K1-H8
ctaaagtctaccaccacccgcctcctctcgagttcgatctgtttgctcccccagacatggggggccgcggcaagggaggcaagggcctgggtaagggcggcgcgaaacgccaccgcaaggtgctccgcgacaacatccagggcatcacgaagccggccatccggaggctggcgcgcaggggcggcgtgaagcgcatctccgggctcatctacgaggagacccgcggcgtgctcaagatctttctcgagaacgtcatccgcgacgccgtcacctacacggagcacgcccggcgcaagaccgtcacagccatggacgtcgtctacgcgctcaagcgccagggccgcaccctttacggcttcggcggctagggcgctaggctaggccatgctcgacccgccccccactctccgctctggcgtcgtcactggttccttgacccctgtgcgggtcggtcggtggtgctagggtc

SEQ ID NO: 25053 - DNA, 291 bp, Zea mays
  Clone ID: LIB3153-004-Q1-K1-H9
gcagctcccatcctctcgctcgccaggagaagcagccgccgttgctgctgccgcgtccacagaatggggggtttcgtgaagactcataagaccaatgcgtatttcaaacgtttccaagtgaaattcaagagaaggcgggctggcaagacagactacagggccaggataaggctgattaaccaagacaaaaacaagtacaacacacccaaatacagatttgttgtgcgatttaccaacaaggacatcactgcccaaatcatatctgctagtatagcgggtgatatggttctt

SEQ ID NO: 25054 - DNA, 436 bp, Zea mays
  Clone ID: LIB3153-005-Q1-K1-A1
aagaaagaaaaacagacacacgtcactgttcgccttgtccggtcgtttctgctccattccgcctgctgcaagccgcaaaggaatcaggcggagtggcgcgatgggagagcaggtcgtgacggagcagatccagcggaagctggaggaggtcaacgctaccgtccaacagcacctcgcgggtgtccaggaccacatcaacttcaccatgcagcaagcatacttcaagtgcgcatatggttgctttgatcggcgccatactcaggaagcgatcagcaactgtgtggagaattgtagtgtgcctgtccttgctgccaacaatatttttgagagtgagatggccaagtttcagggaatgttgaaccggtcattgagggtctgtcaagataagtttgaagctgccaatctccagaagttgaaatcagatgcaactcgggaa

SEQ ID NO: 25055 - DNA, 478 bp, Zea mays
  Clone ID: LIB3153-005-Q1-K1-A10
cccacgcgtccggaggaaccccctaaaagccaggccgacgctggtgctcatcagccttcgtctgatggcggacctggcaaccgttggctacggccgaagagttgcagagctgcgtgtcttagcggtcagcgacggcgaaggcggtggcggtgggtcgccgccgggcaaaggctgctgcttgcccaaccagtcatcttcttcagcgtcagggcgacacctcggtgacgattgttgcaagcaaatgcgtattgtgtccaagaggctggtgccccaggggccaaaccctctgcacaactgaccagctccgggctccaggtctgcacttgcatgcatcgagagataggcagaggcttttttttttcttttttcttttgtaacgcagccatgcagagtgattagtgaagctgcaggtcttcctcttccatgaggtcatgtaaattataggcctacggcttagtttgccgctagctcatacgct

SEQ ID NO: 25056 - DNA, 412 bp, Zea mays
  Clone ID: LIB3153-005-Q1-K1-A11
gcggcgccggcgtgctcatgatctcaacccaaggcgtgccttcgttccggtcacccgtggggtggcgcaaccatgtcgaggaggaagaccagggagcccaaggaggagaacgtcacccttggacccactgtccgtgaaggagagtatgtctttggtgtcgctcacatatttgcatccttcaatgacaccttcattcatatcactgatttgtctgggagggaaactctggttcggatcaccggtggcatgaagggtaaagcttgaccgtgacgagtcgtcaccttacgctgctatgcttgctgctcaagacgtcgcacagtgctgtaaggagcttggcattactgcactgcacattaagcttcgcgccaccggaggcaacaagaccaagacccctggacctggtgcccagtct

SEQ ID NO: 25057 - DNA, 53 bp, Zea mays
  Clone ID: LIB3153-005-Q1-K1-A5
ctccgcctcctacgacttcattactctattatggtgcctcctgggtggggttt

SEQ ID NO: 25058 - DNA, 377 bp, Zea mays
  unsure at all n locations
  Clone ID: LIB3153-005-Q1-K1-A6
gccactccaaacacttgcgccgccactgcctcacaggtaaggccgccatggtctccggtgggggcgtgtgcgcgaagcgcatcgtggtggacgcgcgccaccacatgctgggccgtctctcctcgatcatagccaaggagctgctcaatgggcagaaggtggtcgtcgtccgctgcgaggagatctgcatgtcgggcggcctcgtccgtcagaagatgaagtacctccgcttcctccgcaagcggatgaacaccaagccgtnccacgggcccatccacttccgcgcccccgccaagatcctgtggcgcaccatccgcgggatgattccgcacaagaccaagaggggggaggcggctctggcgaggctcaagacgtac

SEQ ID NO: 25059 - DNA, 55 bp, Zea mays
  Clone ID: LIB3153-005-Q1-K1-A9
aaaaaaaaaaaaaaaaaaaaaaaaaaaaaaaaattaaataaaaaaaaaacataca

SEQ ID NO: 25060 - DNA, 476 bp, Zea mays
  Clone ID: LIB3153-005-Q1-K1-B10
gtcgtgacggagcgtatccagcggaagctggaggaggccaacgctaccgtccaacagcgggtggccggcatccaggaccacgtcaacttcaccatgcagcaagcatacttcaagtgcgcatatgattgcttcgatcggcgccgtactcaggaagcgatcaacaattgtgtggagaattgtggtatgcctgtccttgctgtcaacaatgtttttgagagtgagatggccaagtttcaggaacggttgaaccggtcattgatggtctgtcaagataagtttgaagctgccaagctccagaagatgaaaacagatgcaactcatgaactggaatcctgtgtcaacagatctatcgatgacagcatcagggccctcccatatgtggtgcagcagatgaagtccaccctcaatatcaattagaggcattattacctttagcatatgaaccagatatagtttggatatgtttcatattcaca

SEQ ID NO: 25061 - DNA, 448 bp, Zea mays
  Clone ID: LIB3153-005-Q1-K1-B12
aactagcaacataaaaagcacaatagtgtaccaacaatggcagccaaaatattttgcttgctgatgctccttggtctttctgcaagtgctgctaccgcaaccattttcccacaatgctcacaagctcctatagctttctttcttcccccatacctatcaccagcggtgtcttcagtatgtgaaaacccaattcttcaaccctacaggatccaacaggcaatcgcagcaggcatcttacctttatcacccttgttactacaacaaaccgctagccctattacagcagttacctttggtgcatttgttggcacaaaacatcaaggcacaacaactacaacaacttgtgctaggaaaccttgctgcctactctcagcaacagcagtttcttccattcaaccaactggctgcattgaactctgctgcttatttgcaacaacaactaccattc

SEQ ID NO: 25062 - DNA, 397 bp, Zea mays
  unsure at all n locations
  Clone ID: LIB3153-005-Q1-K1-B2
cctgcgcgccgttcgccgccgctcctcggcctccgcccccggcctcgtggacgtcaagggcgggggtctgggtctcggcgcgcgcggcggatactaggtcgtcgccctggcggccctggctgaggaggccaggagcctgcacgccatccgcgccgcgctggaggacctcgaggaccagttcgagtgttttctcgccgtgcagacacagcaacaggccgaacgagatttcgcgatggcgaggctggagcanagccgcatcatgctcgcgataaggctcaaagagcatcacgggagaaaccacaaggtcatagacgaggcgtctgccttcgtccgcgatgtctaccaggacgtctggccttccctgtcagctaccaaggccgagagacgcgccgacagt

SEQ ID NO: 25063 - DNA, 212 bp, Zea mays
  Clone ID: LIB3153-005-Q1-K1-B4
tgcgagccgctgctacagtatatccaccgcaacacctcatctcaagcgcaagacctcctggcggctatagctaaacgtctgatcccctcactaaaccgggttctggtggagaagctgctgaagcccagcaagagcgccggcggcatcctcctcccggagaccaccaaccagctgaacgccgctaaagtcgttgctgtcggccctgtgatcgt

SEQ ID NO: 25064 - DNA, 348 bp, Zea mays
  unsure at all n locations
  Clone ID: LIB3153-005-Q1-K1-B5
ccatcgcacaaatcctcttcctcgagttctcctcaaccaaattcaaagtcacagcggcgagactctcggcgatgtctggccgcggcaagggcgggaagggtctgggcaagggcggcgccaagcgccaccgcaaggtgctgcgtgacaacatccagggcatcaccaagccggcgatccgcaggttggcgaggaggggcggcgtcaagcgcatctccgggctcatctacgaggagacccgcggcgtgctcaagatcttcctcgagaacgtcatccgcgacgccgtcacctacaccgagcacgcccgccgcaagactgtgaccgccatggacgtngtctacgctctcaagc

SEQ ID NO: 25065 - DNA, 131 bp, Zea mays
  Clone ID: LIB3153-005-Q1-K1-B6
ccgattcttctcctgcactactactacttgtaccatttcatctattgattgaatgaatgggcacgattatgacgatgattcaaaaaaaaaaaaaaaaatctataaaaaaagataataaaaaacaccaaaaa

SEQ ID NO: 25066 - DNA, 182 bp, Zea mays
  Clone ID: LIB3153-005-Q1-K1-B8
atcccatcccatcccattacaatacaactcatcttgtcttacgtcgattcgattctgtcagcccaacccaagggcagggatcgctaagaagagtagcctcgccaccctaggcgaatctgatctgaaagaaaataatgttttcctccgacctgaacttaacgctccactatgcgatgcccata

SEQ ID NO: 25067 - DNA, 469 bp, Zea mays
  Clone ID: LIB3153-005-Q1-K1-C11
gtcgcatcccatcccactaccacccatctcgtcttccgccgattcgatccggttcttccggccgagctgatggcgacgaagaggagcgtggccaccctccgctaggcggatctgaacgggaagaaggtgttcgtgcgcgccgacctcaacgtcccgctcgacgatgcccagaagatcaccgacgacacccgcatccgctcctccgttcccaccatcaagttcctcctcgagaagggcgccaaggtcatgctagccaggcaacctgggtcgtccaaaaggtgtcaccccaaagtacagctcgaagcctattgttccacgcttgtctgagctccttggagttgaagtcgtgatggccaatgattgcattggtgaagaagttgagaagttggctgccgctttgccagaacgtggagttctgctcctagagaaatgtagattctacacggaggaagagaagaacgaacctgag

SEQ ID NO: 25068 - DNA, 477 bp, Zea mays
  unsure at all n locations
  Clone ID: LIB3153-005-Q1-K1-C12
gcccgcccctgccccctcgccccccgccaccgtctcagcgggagaagcagcagtgccctgcacggcctctgcttccgccgaagaagcancagtacccgccaccgcctctgctcccgccgaagaagcagctgtacccgccaccgcttcccctcccgccgaagaagcagcagcaccatcacccgccaccgcctctgcccacacttccgccgaagaagcggctggcgtcaccgcctctgctgcctggaagcgagaagcagtgggtcatctcctccccgtcggagccgcggttcgtgccgctgccggtgtgggctctgatgtccggctccgggaagcgcaagaagcggtcaggctgcggcgggcgtgtccccgccctacacaccccagccgccgccgaagagaccgggcgcgcctgagaggctgagacgatagtcgacaccctccctgttactggtatccatcccctgctccttgatcatg

SEQ ID NO: 25069 - DNA, 431 bp, Zea mays
  Clone ID: LIB3153-005-Q1-K1-C3
gcaccatccaaacagataagatagtctcattggacaaacaggagggcaaatttaccaatgtacgagcactggataaagtgaaacaaggtgctgaagtctctgaatcaagaaagagtgagccttctaataacgattatcatgaagttaatgaacagaagaacaaggatgaacgaatgggcttgcatagccttgaaatgttgaaggtaagagcaaaccttgaggaaaggttaaagaaaaaagggctctataatttgacacgcttgaagccagagaagtcaaaaaccaggacaactagtgataaaagtggcctgcagacattggatgattttgatgatgaagtgctgaagaataaccaaatgatgaagcctagcatgctttgtgcagcagctgctaaatcaaataaaagcatgttcgtttctggtgatgatgac

SEQ ID NO: 25070 - DNA, 219 bp, Zea mays
  Clone ID: LIB3153-005-Q1-K1-C4
agcattcctgccatatgatcgacagtggataaagcataagttgtttcaacacctgaaaaatgtgctatcgtagcacaactgttgtttgttctgatgccttttatccaacaagcaacattcgtgaaatacgtgccaatcatggtattgggagttgtttcttgtaactttgaatgttcatgtcagaatgctcccttgattctggattgtgactcggattca

SEQ ID NO: 25071 - DNA, 163 bp, Zea mays
  Clone ID: LIB3153-005-Q1-K1-C5
tcgagacgatcgcgcgcatagtgacagacccggtagaatcaactgttggggacaagatggggcgggggttgacctaccggaagcgcatatctactccaccaaatctaaccatacccacctcaataagacacctggtgggaaacttgtgtaccagtacaccaat

SEQ ID NO: 25072 - DNA, 247 bp, Zea mays
  Clone ID: LIB3153-005-Q1-K1-C6
tgtggccgtcgtctcccgttcggaacgccaagccccccctccggcgaaatggcccccaagggaggtggcagggcgccggtgccggccaagaagaagacggataaagtgacgaaccctctattcgagaagaggccgaagcagttcggcatcggcggcgcgttgccgcccaagaaggacctgcaccggttcgtcaagtggcccaaggtcgtgcgtatccagcggcagcgccgcatcctcaagcagcgcc

SEQ ID NO: 25073 - DNA, 382 bp, Zea mays
  unsure at all n locations
  Clone ID: LIB3153-005-Q1-K1-C7
gccatttangataactgcaacaggatgggttcaagaattcaacaatactgccagaattggcaagaagataaagctcacaggcacaccatgcaagatatttaagaagactgcactaatcaagggaatgttcacatccgatttataagttgctaggtttgaaggtgctgccattcggactgtaagtggaatccgaagacaggttaaaaaggcagcaaagattgagccaggagatatgttgaagagaaaatgggaaaatacagaacgaatcgcaagatgtacatttgangacagaattcttatgagtgacattgttttcctgcgtgcctgagtcaacgttgaagttactacgtactctaaccctgtgaccactgctctgcaacct

SEQ ID NO: 25074 - DNA, 346 bp, Zea mays
  unsure at all n locations
  Clone ID: LIB3153-005-Q1-K1-C8
cggacgcgtgggctcgcattttccttgcaaccgattgcctatccccctcccaaccaaagagcgatggcgcccaaggccgagaagaagcccgcggcgaagaagccggtggaggaggagcccgcggccgagaagacgaccgccgggaagaagcccaaggcggagaagcgggtccccgctggcaagtccgccggcaaggagggcggcgagggcaagcgtggcaagaagaagggcaagaagagcgtggagacgtacaagatctacatcttcaaggtgctgaagcangtgcacccggacatcggcatcttctccaaggccatgtccatcatgaactccttcatcaacgaca

SEQ ID NO: 25075 - DNA, 401 bp, Zea mays
  unsure at all n locations
  Clone ID: LIB3153-005-Q1-K1-D1
gctcccggctcccccacggtactccagccgctagcctgcgattccgccagtacgccaccggcagcgagcctggactaccgccgccgcccttcgccgatatcttcagcggcgaacagcgcccaccagatcccgcccctgcgatggagtccgtggtgaacccgaaggcatacccgctggctgatgcgcagctgacgatgggtatcctcgatatcatccagcaggccgccaactacaaacagcttaagaagggagcgaatgaagcgacgaagaccctgaataggggcatatcggagtttgtagtgatggcggcggacacagagcctctcgagatcctgcnntcacctcccttggtagctgaggataagaacgtgccatatgtgtttgttccatcgaagcaagct

SEQ ID NO: 25076 - DNA, 459 bp, Zea mays
  Clone ID: LIB3153-005-Q1-K1-D11
cattcctccccaaaacacatcctgcgatcctcgaagcctccgccgagcatcgatcatgtgggcgtactgcggcaagtacgcggatgagctcatcaagaatgctgcctacatcggcacccctggcaagggtatccttgctgctgatgagtcaactggcaccattggcaagcgcctttccagcatcaatgtcgagaacgtggaggagaaccggcgggctctccgtgagctcctgttctgctgccctggtgccctccagtacaataacggtggtgatcctcttcgaggagaccctctaccagaagaccaaggatggcaagccttttgtcgatgtcctcaaggagggaggcgtcctccctggcatcaaggtcgacaagggcaccattgaggttgttggcaccgacaaggagaccaccacccagggccacgatgacctcggcaagcgctgcgctaagtactacg

SEQ ID NO: 25077 - DNA, 182 bp, Zea mays
  Clone ID: LIB3153-005-Q1-K1-D12
attccctcccaaaacacatccttctatcccttaaacctccccccagcatccatcatttggatgatacttttacaaagacgcggactaacccatcaaaaattcttcctacatcggcaccccttgcaacggtatccttgcttcttattaatcaacttgcaccattggcaagcgccttttccaca

SEQ ID NO: 25078 - DNA, 418 bp, Zea mays
  unsure at all n locations
  Clone ID: LIB3153-005-Q1-K1-D2
ggtcttcacaccattacctttatctactccagagcgcataagaacccgatcgacaccatgagggtgttgctcgatgccctcgctctcctggctctcgctgcgagcgccacctacacgcatacaagcggcggctgcagctgccagccaccgacgccggttcatctaccgccgccggtgcatctgccacctncggttcacctgccacctacggtgcatctcccaccgccagtccacctgacgacgccggtccacctgccaccgccggtccatgtgccgtcgccggttcatctgccgccgtcaccatgccactaccctactcaaccgccccggactcagcctcatccccagccacacccatgcccgtgccaacagccgcatccaagcccgtgccagctgcagggaacctgccggcgttgca

SEQ ID NO: 25079 - DNA, 406 bp, Zea mays
  Clone ID: LIB3153-005-Q1-K1-D3
cccttcgacccggtaatgttcttccagaattacatccaaagcctcgtggagggaggcgccggcgtccaggtcctcttcgacgatgccagcgcgagcctcggctccggacccggcctagggcgcctcggcggggcaagcttcggggattacttcgtcggcccaggcttggaacaactcatcgagcagctcgccgagaacgaccccaaccgctatggcacgccgccggctgccaagtcggccctctcctcgctccccgacgtcgtcgtgactcacaaggcagtggctcgcaggatggtggcccacccagcagcaagaattgatcaaaaatcagctggaggttcaccttttggcgatctgttaagaagtctgcagtatatacgtgtcaccatgactatacacctacagg

SEQ ID NO: 25080 - DNA, 341 bp, Zea mays
  Clone ID: LIB3153-005-Q1-K1-D4
tgctcctgcggatgaagctgatgatgatgatgaccttgatctttttggtgatgaaactgaggaggacaagaacgcagctgatgagcctgccgacgcttccaatgcctcttctaaaaagaaagaaagtggtaaatcctccgtccttatggatgtcaaaccatgggacgatgacactgatatgaacaagctggaggaggctgtccgcactgttcagatggacggtctgacttcgagagcatcatagcttgtgcctgttgcataccgcatcaagaagatgactatcatgtcgacaattgtcgaccatcatgtgtccatcgacactctaattgaggaccacctta

SEQ ID NO: 25081 - DNA, 436 bp, Zea mays
  Clone ID: LIB3153-005-Q1-K1-D7
gcccggccgacgcgcgcgtccttcaacccactaatgttcttacacaattacatccaaaccctcatgcaaggaggcacgggcgttcatatactatttgacgatgccagctctagcctaccctccagacccagcctatggcgcctcggtggggcaagcttattggattacttagttggaccaagcttgtaacaactcatcaagcagctcgccgagaacgaccccaaccgctatagcacaccggcggctgacaagtctgccctatcctagctcccctacatcgtcgtgactcacacagcagtggctctcaagatggtgtcccacccaccatcaagaattgatcaacaatcagctggaggttaatcttttggcgatctgttaagaaatctgcacaatatacctgtcaccatgactatacacctacaggaatttacagtct

SEQ ID NO: 25082 - DNA, 205 bp, Zea mays
  Clone ID: LIB3153-005-Q1-K1-D8
ggccagcccaacctcggcagccaaggcgcggtgggagtggctcccctggcggcgcggtaggagcggttccacaggcggcgtgggcgctgcccgccccatccccccggcactgggcgcgaacgcggctgctgcggcggcccgatcccagcctcaacacgcgctgaaatgacttgactgacttgcatgcagacatcgacccggaagg

SEQ ID NO: 25083 - DNA, 459 bp, Zea mays
  Clone ID: LIB3153-005-Q1-K1-D9
gatgcattcatcctcaccggcgtctccatcgtaatttcctcagacagccgcaccacaacgtctgcctccgtagggtgcttgcttgaatcattacaatctggtagatttagtggtcgggctttacttcctactattcacaaacacactaccgagaagtctttaggtgcaatcaaagattgtgtcactgaacttacaaaagctccttgccgctagctacctcatgtgtaagaaaagcaaagtgttgcttgacctcaatgaagttagatacgacttgcatggcaaactccaaacagaatatccgcaagttggttaaggatggatttatcatcaagaagcctcataacatccactctacatcccatgcaagaaggacacatgacaccaatcaaaacgcacgccactcaggatatagcaagcgtatgcctaccagggaagctaggctacccaccaagttctatg

SEQ ID NO: 25084 - DNA, 137 bp, Zea mays
  unsure at all n locations
  Clone ID: LIB3153-005-Q1-K1-E1
acattaaatcaaaaaacccatctcaccataacattcttatccnacacccttcattcgccgtcgcttttttaaaacgataaactcacaacaaaatattcgccctctaaacacaactaattgactcgcaaaaccacctt

SEQ ID NO: 25085 - DNA, 233 bp, Zea mays
  unsure at all n locations
  Clone ID: LIB3153-005-Q1-K1-E10
tttccaattcactaaatttactaaaaatctaactcanctttttacacgacttaaatagaagagttttttccctataaatcctaaccaaaaaatattataatgctttcgtattcctccatcatctcactgatcctattacgcataaacaacgctatctttataaatcacactccacaaaataagtacttttctattacaacattcattccatcactttatcataaaaatcctaa

SEQ ID NO: 25086 - DNA, 475 bp, Zea mays
  Clone ID: LIB3153-005-Q1-K1-E11
aaaaaaaaaaaaaaaaaaaaaaaaaaaaaaaaattaaaaaaaaaaaaaaaaaaaaaaaaagggaagaaaaaaaaaaaaaaaaaaaaaaaaaaaaaaaaaaaaaaaaaaaaaaaaaaaaaaaaaaaaaggggcccccctttttaaaaaaccaaattttacttccccttccttccaacgtaaaactttttttttagggcccccaaattcaattcccttgccccctttttaacaccctcttaattgaaaaaacctttgctttcccaaaattaatcccctttaaacaaaatccccttttccccagttggcttattacaaaaaagcccccacccattcccctttccaaaaatttccccaccctaattgcaaaatgaaaccccccttttacccccccttaaaccccgggggtttttttttttacccccaatttaacctttaaatttgcaaaccccttaacccccgttcttttcgttttttt

SEQ ID NO: 25087 - DNA, 442 bp, Zea mays
  Clone ID: LIB3153-005-Q1-K1-E12
ataacgggtcgacgacgcgtacgcgcgtctgtcttccttctgaatcttccgaggctttttatgtagcggcggtctcaaccccagacgattctcactccggtcacccgtctatccacgcaaccatgtggaggaggaacaccagggaccccaatgaggataacgtaacccttggacccactgtccgtgaaggagagtttgtctttggtgtcgctcacatctttgcatacttcaatgacaccttcattcatgtcactgatttgtctgggaaggaaacttttgttccgatcactgttggcatgaaggttaacgctgatcgtgatgagtcatctccttatgctgctatgcttgctgctcaagatgtttcacagcgttgcaaggagctcggtatcaccgcgctgcacattaagcttcgtgcaactggatgcaacaagaccaatacccc

SEQ ID NO: 25088 - DNA, 357 bp, Zea mays
  Clone ID: LIB3153-005-Q1-K1-E4
gcgaggcaaaagcattgccaccacagacagcgcgcgcttcaaggccttttttttttgagaggacggggacgagaggaggagatggcggtcacgatcacgtgggtgaaggcgaggcagatcttcgacagccgcggctaccccaccgtcgaggtggacgtgggccttagcgacggcagctacgcgaggggggccgtacccagcggcgcatccactggaatatatgacgccttggagttgagggatggaggatctgattatcttggcaagggtgttcttaacgctgtcagcaatgtaaataacattattggaccagcaattgttggaaaggaccctactgagcaggttgagattgacaac

SEQ ID NO: 25089 - DNA, 346 bp, Zea mays
  Clone ID: LIB3153-005-Q1-K1-E6
tcaggatcgggctgcggcacaatcccgtggtgagggaccgcctcttctacggcgtcgtcgccggcgcattcgcccacggcgcctacctcatatcggaactgtatgatgtggagagcaaatgatggacatccctcgaaggatgaggggataagttttcaggtagcaaaatttgattccatcgggattccagattgatggatgagagctgacatggcaattcagactaactagtgtgctatgtacccttatgtattctctggtcttgctatcatgattggcaaaaggatggaatggttgagcaaataaagtaattccagattgagaaatatttccagcgacggtattc

SEQ ID NO: 25090 - DNA, 199 bp, Zea mays
  Clone ID: LIB3153-005-Q1-K1-E7
acgcttacctactcctactttctacataatatttcttctatagtttcccctacatacaggccggggatcttaaaatgacaacatcctctctgataaatactcttttatacacattacaacactgtcatacttcatgctctttcatctagctaaagatacaactatgaacccagtacttatcacattatcaaacaccatc

SEQ ID NO: 25091 - DNA, 277 bp, Zea mays
  Clone ID: LIB3153-005-Q1-K1-E8
ccaatctacaagcgcccctctccctctctctctctctcttcgccgtccgaagctcggccggccaatctaatcgacacctcgccgacatggtccgcaagttcttcgtcagtggcaactggaaatgcaatggaaccacaaatcaggtcgagaacattgtcaaaaccctgaatgaatgacaggttcccgcttcacatgtcgtggaggtcgttgtcagccctgcatacgtcttccttcctgagagcaagatccagctgctccaccagtccatgttcggctc

SEQ ID NO: 25092 - DNA, 221 bp, Zea mays
  unsure at all n locations
  Clone ID: LIB3153-005-Q1-K1-E9
actctctttcaaaacacatattcccatnacttctattccccccctccacatcacactgaggctgtttctttcatacacacctcacccccacccacacacactctaaaccatcctcctacaacgataccacctcaccaattatcaccacaccactcccaccctactcttaatcctcacccacatcaatcaccttcacatcatagaaaacaaacacatttaca

SEQ ID NO: 25093 - DNA, 474 bp, Zea mays
  unsure at all n locations
  Clone ID: LIB3153-005-Q1-K1-F1
caacgctctctaccgtccgagaccccaagcaccatcgcggcggccggggccggggcggcggcgggcatggctgtcggaaagaacaagatgatctccaagggaaagaagggtggcaagaaaaagaccgtcgaccctttctctaagaaggattgatatgacatcaaggcaccgtcggtgttcactgtgcgcaacatcgggaagactctcgtatacaggacacagggtaccaggattgcttttgagggtctgaagcacagagtctgtgaggttagcctagctgatcttcanggcgacgaggatcaagcttacaggaaaatcaggctccgtgctgaagatgtgcaggagcaggaatgtgctcacaaactttcggggcatgaatcttaccactgataaactcacatccctagtgaagaagtggcagacattaatcgaagcccatgttgatgtcaagccaaccgacaactacatgttgcg

SEQ ID NO: 25094 - DNA, 466 bp, Zea mays
  Clone ID: LIB3153-005-Q1-K1-F10
cggacgcgtgggcttgcgtgcgcggaggccgtgcagcaggagaacttctctgcggcggaggcgctggtgaagcagatccccgtgctggcctcgtcgcagggcggcgccatgcgcaaggtcgccgcctacttcggcgaggcgctcgcccggcgcgtgtatcgcctccgcccggcaccggacggctccctcctcgacgccgccttcgccgacctcctgcacgcgcacttctacgagtcctgcccctacctcaagttcgcccacttcaccgcgaaccaggccatcctcgaggctttcgccgggtgccgccgcgtccacgtcgtcgacttcggcatcaagcaggggatgcagtggccggctctcctccaggccctcgccctccgccccggtggccccccgtcgttccgtctcaccggcgtatgcccgccgcagcccgacgagaccgacgccctgcagcaggtgggctgga

SEQ ID NO: 25095 - DNA, 442 bp, Zea mays
  Clone ID: LIB3153-005-Q1-K1-F11
aatctgcccttgccgccgccactgcccgatccacgtgtgcagactgctccctcctcctatgcgctcctaatgcacagcacgaagcagacctcgcgcaagtcgaccggcatcaacgcgccgcgcaagcagttggccaccaaggcggcgcgcaagtcgtacccggtcacgggcggcgtgaacaagccgcaccgcttccgccccgtcaccgtcgcgctccgcgagatccgcaagtaccagaagagcacagatctgctcatccgcatgcatccctaccagcgcctcgttcgagagatcgcgcaggacttcaagacggacctgcggttacagtcctctgccgcggcggctctacaggacgcctctgatgcatacctggtggcgctcttcgaggacaccaacctctgcgccattcacgccaagagggtcaccatcatgcccaaagaca

SEQ ID NO: 25096 - DNA, 454 bp, Zea mays
  Clone ID: LIB3153-005-Q1-K1-F2
aaaaaaatcccccattttcttcgaggcgaggagagcgtgaaagacagggcaccggcagcgacgatgtcggggcgcggcaagggcggcaaaggtctgggcaagggcggagcaaagcgccaccgtaaggtgctccgtgacaacatccagggcatcaccaagcccgcgatccgtaggctggctcggaggggcggcgtgaagcgcatttcggggcttatctacgaggagacccgcggcgtcctcaagatcttcctcgagaacgtcatccgcgacgccgtcacctacaccgagcacgcacgccgcaagactgttaccgccatggacgtcgtctacgcgctcaagcgccagggccgaaccctctacggcttcggaggctaggctggatgcctcttctcttgctgtcgtggatgccctgtttgtgtaggggtatttcgtttagttccttgtctgtgacgtg

SEQ ID NO: 25097 - DNA, 238 bp, Zea mays
  Clone ID: LIB3153-005-Q1-K1-F3
gatgaaaagtgcctgagggatgccaacatggacaacatcaccgaccatgacgttgtactggtggggggctccactaggatccccagtgtacatcaactgctccaggacttcttcaacggcaaggagctgtgcaagaacatcaaccccgatgaggctgtcgcctatggtgctgctgtccatgctgacatcctgagcggcgagggcaatgaaaaagtgcacgagctgcttctgttgacgt

SEQ ID NO: 25098 - DNA, 272 bp, Zea mays
  Clone ID: LIB3153-005-Q1-K1-F5
ttgtagatgcaacaatactacctcctccttcctacgacataattcttctattatagcgcctactagctgcaatttactcgccgttgtacaacaacgtcactactaaaacaatcctgttaccacacaaattaatcttctagcacatcatccttttttcagctgctgtcataataacgaagacgccaccaatcatccttcttaacaacagctcagcatgcttgatgaataatacgacccgtgctgtagcgcatcattcaccgcggctgttgtgg

SEQ ID NO: 25099 - DNA, 224 bp, Zea mays
  Clone ID: LIB3153-005-Q1-K1-F6
acgcgtgcgaacgctatccaacattttcttgctcccatttaaattcaacctatcctcgcttccttcgacggggaggctctcaccctcatggccaacatcatgatcggaatcaatgggttccgaacgatctgaaggctggtggccaacatcttcctgcagatcgacgacttccaaactcgtacgctgaactaccccttcatcaccaccgattacatgacctacat

SEQ ID NO: 25100 - DNA, 140 bp, Zea mays
  Clone ID: LIB3153-005-Q1-K1-F8
caccttattattttttatttaaacctaaatacagggcagtgactttccttttacaacctcctaactaaaacaactctctccttacccaactaaattacctttcataacatacatcttacttcagctagcatactaactaa

SEQ ID NO: 25101 - DNA, 460 bp, Zea mays
  unsure at all n locations
  Clone ID: LIB3153-005-Q1-K1-F9
agttttcctgctctcccacccccagctcccaattcctcatcatcatgctctgcccccctctcgttttacctacatggcgctgcccaatcacgcgaccattgattaccccagcttcaagctcgtcatcttcttcgatagtggaactggtaaaactacatttgtgaagaggcatctcactgcagagttttagaagaaatatgaaccaaccatttgtgtggaagttcatccgttggattttaccactaactgttgtaagatcattttctactgctcaaatacctcatggcaatataattttggtgccctcagggatggatactatatccatggtcagtgtgcgatcatcatgtttgatgtaacctcaaggcttacttacaaaaatgttcctacattgcatattgacctgtgcacggtctttgaaaacatccncattgtactctgcagtaataaagttgatttt

SEQ ID NO: 25102 - DNA, 428 bp, Zea mays
  Clone ID: LIB3153-005-Q1-K1-G1
gcgaccggctaaccctagcttctgtttggctgttgccttgcgggtggcggctgctttggtgcgctgtcagtgcgctccgtccgtccgtcaaccggaaggccgtcccctggcccctgctcgtcgtcttcctcgggcgctcgtcttcctccgaacgcgcgcgggccgccgacctgcttgttctcctggaggagcgcgcccggcgggcaagcgacgcagtccagcggcgggttgaggaagaaagcgagcgaccggtggatccccgttcagccgtcccctgctcctcttcctcgggtcgggcgctcgtaatccactcttcctgcagccctccatctgatccccgtacgaccgtcccctgttcgtcttcctggtgctcggttgctccagtgctcggcccctgctgcagtgctgctcggtcgcgtcggcacctg

SEQ ID NO: 25103 - DNA, 190 bp, Zea mays
  unsure at all n locations
  Clone ID: LIB3153-005-Q1-K1-G11
ttataacctctaaaattncctttcattctccantcncancancacctatgaagtttttttctcaacatatcccctcccaaccccaattaattttcttcctttcccaaatcattcttccccattaataaatcattcactcaatccttcaattcctatcttcaattccccatcttctctatctttctctacc

SEQ ID NO: 25104 - DNA, 378 bp, Zea mays
  Clone ID: LIB3153-005-Q1-K1-G12
aactttatttttattccattttaaatcaattctttcttctttcccccctctaacaagattgttttcttataacccaaatcaaaatacctatcaaatgtttccacaatatctcaatactttttgccaaaatatcccttcataacttccacctctaactcctctcctttaaccaccccttcattaacacctattacattacctacattttcaaatattacacttttcaccctccatataaacaacatttatttcatttttattccctcaaaacacctttttttttttaaaaaaaattctatatttttcttttttaacccttaaaaataccaatagttttcttttttcccttaaatatttattaaattaactattttttta

SEQ ID NO: 25105 - DNA, 225 bp, Zea mays
  Clone ID: LIB3153-005-Q1-K1-G2
cggaacagagcgaggcgacgccgaggcacctcatcttccggcgaagggaaatggcgaccggtcggggggatctgatctggcagatggtaaggaaaaccacctctttcttgtgaagcaatttggcaacggcaatgccaaggtgcagttcaccaaggagcccaacaacctctacaatttacactcctacaagtactctggcttagcaaacaagaaaactgtaacgat

SEQ ID NO: 25106 - DNA, 201 bp, Zea mays
  Clone ID: LIB3153-005-Q1-K1-G3
aacgtctgaccctagctacttctgggctgctacattcctgatacaggaataatgaagttgcgtgtgcagatctcatctggcggatcgcaaccaaaaacaaatccttctgtgcgaagcactttggcaacatggggcgcctcctgtctataggatcaaagctcccaaccgcgtccatactatacactagctactagtactctg

SEQ ID NO: 25107 - DNA, 54 bp, Zea mays
  Clone ID: LIB3153-005-Q1-K1-G4
ccaagattggattgcttgttaaagctcaatattgttattgaagtggtattgctt

SEQ ID NO: 25108 - DNA, 130 bp, Zea mays
  Clone ID: LIB3153-005-Q1-K1-G5
cttaacaggacccaatctgagaatgaaggataaactgttgagtctaataaaccaacggtggcgaagtatctccttacccatgtgacttacctcatcgagcacaacacggttcaccttgttgtcatcggtc

SEQ ID NO: 25109 - DNA, 350 bp, Zea mays
  unsure at all n locations
  Clone ID: LIB3153-005-Q1-K1-G6
gccgccgcggagctgctccgcgcccccgacgccggtgattaggagcaggagcaagagggggtcggaatggccaagtctaagaaccacacggcgcataaccagtcgttcaaggcgcacaagaacggcatcaagaagcccaagcgccaccgccagacctccaccaaggggatggaccccaagtttctgaggaacttgaggtactcaaggaagggcaatangaagagttgtgaggctgagtcagaggagtgagatgatgcctgagtttgtggcgacaaatgcatctcttgtatcgttagggtcttagttgtgaacttaatttcacatctgtatgataaaagagatcatcaatg

SEQ ID NO: 25110 - DNA, 179 bp, Zea mays
  Clone ID: LIB3153-005-Q1-K1-G7
acggccgcatcgaacttgtttcaaacccatccatccttttttcctgagcacgaccacatgggggcctcattgcccagatcaagaacccactcaatgcattcccaagcatccaaaggctacaggaccgggttgccctacacaatgaccatccggcactcctccaccaggacgaccgactt

SEQ ID NO: 25111 - DNA, 333 bp, Zea mays
  Clone ID: LIB3153-005-Q1-K1-G8
aattatttggccttcgtcagagaggggagaaagacccgttcgaggcggcagcaatgggggggcgcattaagggcggcaagggtctacgcaaggctggagccaatcgccaccggaaggtgctccgcgacaacatacagggcatcaccaagccggcgatccggaggctggatcggaggggcggcgtgaagcgcatctcggtgctcatctacgacgagacccgcagcgtgctcaagatcttccttgagaacgtaatacgcgacgccgatacctacaccgagcacgcgcgccgtaagaccgtcaccgccatggatgtcagttacgcactcaagcgcc

SEQ ID NO: 25112 - DNA, 445 bp, Zea mays
  unsure at all n locations
  Clone ID: LIB3153-005-Q1-K1-G9
atcttttcgcgtttagaacctctaaaatttcccccactcgccagtcgcagcagcacctgtggcgatggacgccagcggagccggtagcaaggggaagaagggtgcggccgggcgcaaggcaggcggccccaggaagaagtcggtgacgcggtccgtcaaggccgggctgcagttccccgtcggccggatcgggcgctacctgaagaagggccggtacgcgcagcgcgtgggcactggcgcccccgtctacctcggccgncgttcttgaagtacctcgccgccgaggttctggagttggcagggaacgcggcgaaagacaacaagaagacgcgcatcatcccgcgccacgtgctcctggcgatccgcaacgacgaggagctcgggaagctgctggcaggcgtcaccatcgcgcacggcggcgtcctccccaacatccactccgtgc

SEQ ID NO: 25113 - DNA, 311 bp, Zea mays
  unsure at all n locations
  Clone ID: LIB3153-005-Q1-K1-H1
aatctgcccttgccgccgccactgcccgatccaggtgtgcagactgctccctcctcctctgcggtccgaatggcccgcacgaagcagacggcgcgcaagtcgaccggcggcaaggcgccgcggaagcagctggccaccaaggcggcgcgcaagtcggccccggccacgggcggcgtgaagaagccgcaccgcttccgccccggcaccgtcgcgctccgcgagatccgcaagtaccagaagagcacggagctgctcatccgcaagctcccctcccagcgcctcgtccgcgagatcgcgcangacttcaagac

SEQ ID NO: 25114 - DNA, 417 bp, Zea mays
  Clone ID: LIB3153-005-Q1-K1-H10
gcgcacgattggagtttcacctcggcagcccagccagccagtggttcctcggctcggaggaagaggggaacagcaagagcttctgaagatgaaggcgatccccgtggctctcctgctcctcgtcctggttgctgccgcctcctcgttcaagcatctcgccgaggcagcagacggcggcgcggtgccggacggcgtgtgcgacggcaagtgccgcagccggtgctcgctgaagaaggccgggcggtgcatgggcctgtgcattatgtgctgcggcaagtgccaaggctgcgtgccgtcggggccgtacgccagcaaggaccagtgcccctgctacagggacatgaagtcccccaagaaccagcgccccaagtgcccctaagccctaccgctctaagggagggaggatgacccaggatt

SEQ ID NO: 25115 - DNA, 473 bp, Zea mays
  unsure at all n locations
  Clone ID: LIB3153-005-Q1-K1-H2
gccgccaccaagtggcagaggtctttcgtcatcttttcttccgcgaagaacccccaatcggcgaccagatcacttgttaaactttgttgaggggtgatggcggtttctttcgcaaacctcaacaccgaggcagggcttaaaaagcttgatgagtaccttctcactcgcagctacatcactggctaccaagcttccaaggatgactnggctgtctacacttcgttttcgtctgctccctcgtccaagtatatcaacgtagcaaggtggtttaatcacattgatgcgctcgtgaggctgagcggaattactgcagagggccaaggtgtgaaggttgaatcctcagcagttccttcagccccaactccagatgttgctgaagcacaggccccagctgctgaggaggaggacgatgatgatgttgaccttttggtgaggagaccgaagatgagaagaaggctgctgaagagcgtgct

SEQ ID NO: 25116 - DNA, 185 bp, Zea mays
  Clone ID: LIB3153-005-Q1-K1-H3
gacagagccacgcccggacccttgaccgatccgttttgcagactagaacacaaccctggtgggcgcatgatgttccacactttgcagaggcatgattaaatttcctatgctagacctcaataactacgaacgcctctgcatgctcaagacgatcgtgtctaatctgatgtacctcgatcgcatcc

SEQ ID NO: 25117 - DNA, 465 bp, Zea mays
  unsure at all n locations
  Clone ID: LIB3153-005-Q1-K1-H4
gagaccaactagcaacatagaaagcacaatagtgtaccaacaatggcagccaaaatattgtgcttccttatgctccttggtctttctgcaagtgctgctaccgcaaccattttcccacaatgctcacaagctcctatagcttcctttcttcccccatacctctcaccagcggtgtcttcagtatgtgaaaacccaattcttcaaccctacaggatccaacaggcaatcgcagcaggcatcttacctttatcacccttgttcctccaacaaccgtcagccctattacagcagttacctttggtgcatttgttggcacanaacatcagggcacaacaactacaacaacttgtgctaggaaaccttgctgcctactctcagcaacagcagtttcttccattcaaccaactggctgcattgaactctgctgcttatttgcaacaacaactaccattcagtcagctagct

SEQ ID NO: 25118 - DNA, 221 bp, Zea mays
  Clone ID: LIB3153-005-Q1-K1-H5
acggagaccaactagcaacatagaaagcacaatattttaccaacaatggcagccaaaatggggggctaacttatgctccgaggtatttctgcaagtgctgctaccgcaaccattctcccacaatgctaacaagctcctatagcttccttacttcccccatacctctcaccagcggtgtatataacataccaaaacccaattctacaaccctacatgatcca

SEQ ID NO: 25119 - DNA, 339 bp, Zea mays
  unsure at all n locations
  Clone ID: LIB3153-005-Q1-K1-H6
cggaattaanggnncgggccgcgcgacgcgtacgccaacctgtgcctcgtaccatttcaatcctatggcgccgacgtagaagctgtcgaggcgggtatacgcgcttggcggtctcacgcgtaccatcttcgtgggctgtgggccatcaaggccaagaacggcggtgccttgcttaaggacgacaaggccgctgccgccgtggaacctaagttctaccctgccgacgacgtcaagcctcgcgttaccagcacccgcaagcctaagcctaccaagcttatgtagagcatcacgcctgtgacggagctgatcctcctcgcagggcgcttcatgaggaagaga

SEQ ID NO: 25120 - DNA, 113 bp, Zea mays
  Clone ID: LIB3153-005-Q1-K1-H7
ctcaaaaaaacactgtacactctgtcttgcatagcttctaaacatggactggtggagggagtctacagcgtttatgtgatgcctccaaaaaataaaaaaaaatatgctgccct

SEQ ID NO: 25121 - DNA, 178 bp, Zea mays
  Clone ID: LIB3153-005-Q1-K1-H8
gtcccggcccggcgacgcgaccgcaaatatctacctagatccatatctaccttaccaaccatgcaaggaaccatacagggcggggtaaatctccgagcaggatgcccaagtgctactaccggaaccatcctcccatattgcacagacactgctatagattactgtcttgcaccatacc

SEQ ID NO: 25122 - DNA, 401 bp, Zea mays
  Clone ID: LIB3153-005-Q1-K1-H9
gcgtccgaccagaccatcaaacaatgccagcgccctctctcttcgccgcatggagagcaccttggtggtatcattcctgacggcgccagaggtcctcattggtgagatcatcagccgttttgagaagaagggcttctacctcaaggccttgaacttgtgaacgtgagaggtcgtttgctgagaagcactacgccgatctcgcctcaagcccttcttcagggcctcgtggactacatcatctcttgcccttgtgtgggccatggtcttggatggcaagagcgttctcacaactgtccgcatgatcattggcgccaccaaccccctggcttctgagcccggcaccatccgtggcgactttgctgtcgacattggcaggaatgtcattcatggaagtgacagca

SEQ ID NO: 25123 - DNA, 370 bp, Zea mays
  Clone ID: LIB3153-006-Q1-K1-A1
acgatcaacgtgaagaatgtcgctgcgacggatctgaagcgtgggtatgtggcctccaactcggagggtgaccctgccaaggaggctgctagcttcacctcccaggtcatcatcatgaaccaccctggacagattggcaatggctatgccccagttctggactggcacacatgacacattgctgtcaagtttgctcatctcgctaccaagattgataggatagccaactgggagctgcataaggagcccaaattactcaagagcggtgatgctgatctcgcgaagatggctcccactaagcccatggcggaggagaccttatttcaggatcctcctcttggtcaattggctgttcgtgacatgatgcaaa

SEQ ID NO: 25124 - DNA, 441 bp, Zea mays
  Clone ID: LIB3153-006-Q1-K1-A10
ccatgccctcataattatcatctacatactctttaacacttccaacaagccatcggggtgttctcacttccagatgatgctatcttaactgataatctagatgatgaagctaaatatgaagctgatagtgacactgacttgactagacttatcgacaataaagaagattatgaacgctacaaatactatgtcgttcaattacctaatatcagctgtgtataaaaaaacagaagtaaatcacgagaaccgtgactaactccaccagaagtgtcttgaacatcacaatgctaataaaacaaatactgtcatccaaaggctcactattggtcatcctgagcaaacagaatcagcatatgaatatgactatgaatactacgacgacaatgaagatgattatgtaactcattttgaggaaggatcacataatgaatatgtaacttc

SEQ ID NO: 25125 - DNA, 427 bp, Zea mays
  Clone ID: LIB3153-006-Q1-K1-A11
ccaagcgctcagaataatgatgtacatactcttgaacacctccaacaagccatcgggggagactcacgtccagatgatgctatcttaaaggattttctagatgatgaagctgaggaagaggatgatagtgacaatgacatgactagatttaaggacaatgaagaagatgatggaagcgatgaaaatgaagtgttcaatgacctaatagcagctggttatgaagaaaaagaagtagatcacgagaagcgtaatgaacttccaccaaaagtggcttcaacaacaggatgctgctgaaacaaataatgttatccaaaggctgaagtttggtcatcgggagcaaaaagaatcagcatatgaagatgaagatgaagacgaagacgaagatgaagatgaatatgtagctgattgtgaggaacgatcacaaaat

SEQ ID NO: 25126 - DNA, 454 bp, Zea mays
  Clone ID: LIB3153-006-Q1-K1-A2
gccgcatccacaacctgcctctctcgtcccctggcggcgtccgcggcaggatggcggaatgtacggcgaggacggtgaaggatgtcaacccgcacgagttcgtcaaggcctactccgcccacctcaagcgctccggcaagatggagctccctgagtgggttgacattgtgaagactgcgaggttcaaggagcttcctccttatgatcctgactggtactacatcagggctgcatccattgcaaggaagatctacctaaggcaaggcatcggtgtgggtggctttcagaagatctacggtggccgccagaggaatggctcccgcccaccacacttctgcaagagcagtggtgctgttgcacgcaacatcctgcagcagctgcagattatgggcatcatcgatgtcgatcccaagggtggacgcctcatcaccaaccagggaaggcgtgatctgga

SEQ ID NO: 25127 - DNA, 382 bp, Zea mays
  Clone ID: LIB3153-006-Q1-K1-A3
ccggaccttattcccgggcgggcgttctaacgaaccaagaaaacaacccagtaacaagcaaagcattgatccgacatccgagagacggacgcggagatactggccctggagacgcacctgatggactcgctacaccacctgctggacgagcccgacggcgacgccgacactgccgacaacaagactggcgtaagaggcagcaccacgcgcacctatgtccttgacacgcgcgccatggccggcacgccgaacgacacgaacgatctgcccggctattacgcgttcgtggtggacatgccacgcctggacacacccgacatcttgccacaggtatagcaccagctgcttctggtttctaccgttcatcggtcccaggaggagc

SEQ ID NO: 25128 - DNA, 475 bp, Zea mays
  Clone ID: LIB3153-006-Q1-K1-A4
caagcctcgagtggagctcttccacggccgcggtggagatggcggcgaatctggaggacgtgcggtcactggatctgatgcacgagctgctccgccgcatgaagtgcagctccaagcccgacaagcgcctcatcctcatcggtccacctggctctggaaagggaactcagtctcctattatcaaggatgaatattgcttgtgccatttagccactggtgacatgctgagggctgctgtggcggccaagacacctctaggtatcaaagctaaagaagctatgaataagggagagcttgtttcagatgatttggttgtgggcattattgatgaagctatgaagaaaccctcatgccagaaaggtttcattcttgatggctttcctagaactgtgactcaagcacagaagcttgatgagatgttggcaaagcaaggtgccaatgttgacaaagtcctgaactttgcaattgatgatgc

SEQ ID NO: 25129 - DNA, 238 bp, Zea mays
  Clone ID: LIB3153-006-Q1-K1-A9
ccacgcgtccgcacaccatcaccacccatcacccatggcctgttacgaccgacgtgctccctccgggctgggtgtcttgatgttccccttcccgttctggagccacattaaccagatgctccacctcggtaagctcctccgtgcgcgacacctgttcgtcaccatgctccacaccgactttaacgcgcccgaccccgcactccacccagacatcaccttcgtgtccatccgcgagtcc

SEQ ID NO: 25130 - DNA, 421 bp, Zea mays
  Clone ID: LIB3153-006-Q1-K1-B1
gaagaacctgcacttcccttgtagaaaaaaactagatatttctccatcatgcattgctatgtaggtgtgctggatcaggattgacctgaagatccggcattattcacgattgcaaggcaatctgtacatattatacttgaaaacaacagatgaagctgtggaattaaagaaaagatatcaagtccaccgaatggttgtatttctggtggtgtcattgcttttttattcccatttggcagggtatcatgtcctcaattactgtatttatcgatatcgagggtttgacggtagagtggctagtgcatggcatgcctaccacgcctataaaagaatgaaaagtgaaagtgtctaggcgtctagctcctagttgagttttggtgatgaatagtcatataagattatggaagtataatgactaaag

SEQ ID NO: 25131 - DNA, 169 bp, Zea mays
  Clone ID: LIB3153-006-Q1-K1-B12
tacgatccaaacttacttactccttcattctacttcctacctcctctataatatcacctatattgcatggacttatccaaatttgacaacttcctgcctccaaaaaacctcctctcatacaaatctaaatctcctatcaatacatttcctctctctcacacctatcata

SEQ ID NO: 25132 - DNA, 478 bp, Zea mays
  unsure at all n locations
  Clone ID: LIB3153-006-Q1-K1-B2
cacaactcacaacccgagccccccaaacccgaagcagcaggagctcccctgaccttgctgggcctccgatcaaggaaaaggaagatgagctactacggccagcagccccccgtcggcgtcccgccgcagcaaggctacccggggaaggacggctacccgccagcggggtacccgccggccggctaccccccgccggcgcagggctacccgccgcagggctacccgcagcagggttacccacagcagggctacccgccgcagtacgcgcagccgcctccacagcagcagcagagcagcgggccttccttcatggaaggatgcttggctgccctctgctgctgctgcctcctggacgcctgcttctgacggaaccatccgtgccgggtccaacacggctgcaagtgaagcaaccagcttacggaagagctggaactgggccgtgctattctagctntgtcctgcgttatcgccctctttt

SEQ ID NO: 25133 - DNA, 478 bp, Zea mays
  Clone ID: LIB3153-006-Q1-K1-B5
acggaccattagctttatctactccagagcgcataagaacccgatcgacaccatgagggggtggctcgttgccctcgctctcctggctctcgctgcgagcgccacctacacgcatacaagcggcggctgcggctgccagccaccgccgccggttcatctaccgccgacggtgcatctgccacctccggttcacctgccacctccggtgcatctcccaccgccggaccacctgccgccgccggtccacctgccaccgccggtccatgtgccgccgccggttcatatgccgccgccaccatgccactaccctactcaaccgccccggactcagcctaatccccagacacacccatgcccgtgccaacagccgcatacaagcccgtgccagctgcagggaacctgcggcgttggcagcaccccgatcctgggccagtgcgtcgagtttctgaggcatcagagcagcccgacggcgacgccc

SEQ ID NO: 25134 - DNA, 494 bp, Zea mays
  Clone ID: LIB3153-006-Q1-K1-B6
gcggccgaccttttttttttatttttttttaaacagccataattattctcaataacccggtagcaatgcaggggaagtaacaactcttacaacatcaggtgttgtaaaccacacaatacttcagaacagacacacataacacgatagcaggagcaactctcggcagatcacgggataagggcagcacactggcctgatgctgcgtcatcagcaaacttctctagtactcgtcaccctcgtcgccatcctcgccctcatcgaactcagcaccgacctcctcgtagtccttctcgagcgccgccaggtcctcacgggcctcagagaactcaccttcctccataccctcaccgacgtaccagtgcacgaaggcacgcttggcgtacatgaggtcgaacttgtggtcgatgcgggagaacacctccacaacactggtggagttggagatcatgcacacggtacgctgcaccttggccaggtcgccaccaggcacaact

SEQ ID NO: 25135 - DNA, 424 bp, Zea mays
  Clone ID: LIB3153-006-Q1-K1-B7
acacaatcaaccactgatttcacaatgaaaagggagacaatgccttcatggctagagctggtgcttgcaacacaatcatatacgacttgtgctaaccatcttcttgctagtcgcaatgaatgtgacctattccgcacccagtgtgagaccaaaccagctgctttctgtaactattgccgttcaagtgatcattacacccaccgcgtaatccagataaggcgttcatcgtaccatgacgttgtgagggtgaccgagatcgaggatatccttgatgtcagcgatgtgcaaactcatgcaatcaatagtgcaaggattgtgttcctgaatgagcgggcacaactgcgtgcttctagtgtccccattcgtaaggcacccgcatcatcaacacatagctgtgagacatgtacccgtgtgctacttgatg

SEQ ID NO: 25136 - DNA, 442 bp, Zea mays
  Clone ID: LIB3153-006-Q1-K1-B8
caaaattgtaaacttcatcaagtttgatgttggcaacgttgtcatggagactggcggacgtaacactggccgtgtgggtgttatcaagaacatggacaatcacaagggcaccttttagaccattcacgttgaggactccctgggccaccatttcgccacccgtatggacaacatgttcaccatcggcaaaggtaataagccgtgagtgagcctgcccaacggcaatggaatcaagctgagcataatagaatagcaaaagaagcggtatgccgctgcccaggctgctgccaacgcataaatactatgaatgtgctgtgtttagagatttttctagttgctctgcaaggatatagaacaacgttctaagactaccatgtttttaagtctgcctgatgcttataattcatgaacgattcttgcagctagctttaatgtgactatt

SEQ ID NO: 25137 - DNA, 426 bp, Zea mays
  Clone ID: LIB3153-006-Q1-K1-B9
gtcgcatcccatcccactaccacccatcttgtcgtccgccgattcgatccggttgtgcgggcctattggcagtgatggccacgaatacgatcgtgggcaccctcttcgaggcggatctgaaggggaagaatgtgttcgtgcgcgccgaccttaacgtcccgctcgacgatgcccagaagatcaccgacgacaccctcatccgcgcctacgtccccaccatcaagttcctcctctagaagggcgccaaggtcatgcttcgcagcaccctgagtcgtccaaacggtgtcaccccaaagtacagcttgaagcctcttgtttcacgcttgtctgagctccttggagttgaaatcgtgatggccaatgattgcattggtgaagaagttgacaatttggctgccgcttttccataatgtggagctctgctcc

SEQ ID NO: 25138 - DNA, 126 bp, Zea mays
  Clone ID: LIB3153-006-Q1-K1-C1
tctacatctaatctccccttttcgacgccatcaataatctatcacgacatccaccatagtcgaggtgttatcactccctggcacaccatgcattatattaaataatactacaataatcaatacaac

SEQ ID NO: 25139 - DNA, 193 bp, Zea mays
  Clone ID: LIB3153-006-Q1-K1-C10
cttaaacttacaacaaatatatgtgtggttcattcactagtaaataaagcattttttagattatttatagcagtacagctagcactcatgtactcggttttgtctgatgaccgcataccagtaattgtcctctgtacctctctttctttaaaaaaaaaacaataaaaatctattaaattaacaacggctgtcc

SEQ ID NO: 25140 - DNA, 416 bp, Zea mays
  unsure at all n locations
  Clone ID: LIB3153-006-Q1-K1-C11
caaccattaacatgctgcgcagggtggagccatatgttgcgtacggataccccaaggtggagagcgttagggagttgatctacaaganaggttacggcaagctgaacaagcagaggattccacttagcaacaacagtgtcatcgacgagggcctcgggaagcacaatatcatctgcattgaggaccttgtccacgagatcatgacggtggtcccgtacttcaaggaggccaacaacttgctcttgccgttcaagctgaaggcacccctaggcggcctcaagaagaagaggaaccactacgtatagggcggtgacgccctaaaccgtgagaactacatcaacgagctcatcaagaggatgaactaggttctctcttgtatcctgtgagaatgcttttctgtgtcagcgtggttgttt

SEQ ID NO: 25141 - DNA, 401 bp, Zea mays
  Clone ID: LIB3153-006-Q1-K1-C12
atacactcttctaggatcaatcgtgaggagttcattaaattgtcttgcgagatggagtggagaaagagggtggatgcgctagtgtttttctcgttacttctcctcggatactttgctgctcatgcacatgggaagggtcatgtcacagatgatgtcggtgtttctactccagctaaagaaggaattatgcaaggaaacggagcacgatgcattgtacggtttcctccatgcaaagataacaagtgctactgcttgcatgggggagcgaactcatgctcgctactctacgatggctgagtgtagacatgcctgcttctaaacaaaaattaagatcgttgttattatatacattgtaatggtaggtaatgctattaataatatatgggaattttagttttggt

SEQ ID NO: 25142 - DNA, 126 bp, Zea mays
  Clone ID: LIB3153-006-Q1-K1-C2
tccattcacaatatctcattctcaattcctacaataatttaccactatttccacccttgggaaggggctaaagctcccgggcacaccctgcaccatacttaacaatactgcactcctctatgacat

SEQ ID NO: 25143 - DNA, 422 bp, Zea mays
  Clone ID: LIB3153-006-Q1-K1-C4
cgccctgccgacgcgtcagcccctagctacgagtagctcggtcacgcacctgcggcatgccagcgcatcctggacctctgtctgccgcgggccgcggcgtcatcgtcctccactccattggctgctgcttcacctggctagtagatagctagctgagctgacgacggccattatatatattgagcgcccgggaagcttcgtcgccgaacccatgtcgacgagcggcgcgaggtcgtggtcgccgccgccgcggccgagccggtacgagtcgcagaagcggcgggactggcagaccttcacgcggtacctgtgcgcgcaccgcccgccgctggagctgtgccgctgcagcggcgcgcacgtgctcgagttcctgcgctacctcgaccgcttcggcaagacgcgcgttcacgcgccgtcctgcc

SEQ ID NO: 25144 - DNA, 341 bp, Zea mays
  Clone ID: LIB3153-006-Q1-K1-C5
ggacttcgggctggcgcggcaggcagatcacggttagtcccccgacgcgacggcgggggggggcaccatggggtacctggcgcccgattacctactgacgggccgcgccacctagatcacctacgtgttcagcttcctcgtgctggcgctggaggtggcgtgcgggcggtgacctatcggcgccgccggcacggccgagggcggcaacctggtggagtgggtgtggagcctgcacggtgaggcccggctgctggacgcggtggacacccggctgggctgcgggttcgaggaaggctaggcgaggcgcgtgctgctgctggggctggcgtgctccagcccgg

SEQ ID NO: 25145 - DNA, 255 bp, Zea mays
  Clone ID: LIB3153-006-Q1-K1-C6
acgctaccttcacgtacgccattaaccaggaggaagattatcactcaccctcacgatgggagagctcctctacctctgtctggcgcacgccctctttttatcctcctgctctccatacattaccgcttgacccacttatgtaatagatacctgagcttacgactgccataaaatatatttaccccaccaacagataatatttctcaacccacctgactatacggatcgagagctaatgtcgctgaccccatgaac

SEQ ID NO: 25146 - DNA, 453 bp, Zea mays
  Clone ID: LIB3153-006-Q1-K1-C7
cggacgcgtgggcggagcaatgctgataatggcggtaatgacgcctttgcgagatttgagtctttccgcagcacttcagatcaaggcgggggcaacagcttcatgaggtacgattccatgaacagcagcagtgaccatgacagaacggatacatttgcgaggtttgattccatgaaaaacagtgactacaacaaccggagctactcatttgatgacgacgacccctttggaactgggccgttcaaatcaacagagaaatcgaacagcccgacgagacatgggacggatgcgtggagtgcattttgacaggtattgtattatagcggtcatgttcttgtgcaccttactgcagatatacatacacgtacaagggcaagacactttttttttttgcatgggcctctgctctgctccacaccttttggacgggacggggcttgcttgtgtgtttaa

SEQ ID NO: 25147 - DNA, 382 bp, Zea mays
  Clone ID: LIB3153-006-Q1-K1-C8
ctcccgcatgaactaatcaacactgctaatctgttgaacctctccttagccctatccgggggttcacgtatcactgccgaacactgtcatgccaacagctacttgaagaacgacctcctgagcctgatcagtgaccatgacacatccgttacattcccaaggaatgcatacatgactaacactgacgacagctgccgtatcatctcatatgctgacgacgatcgcttgtgctctagggccaccaaataaactgagaaatctgacagcctggacgagacatgcgactgatgcttgcagtgcattatgacatgtatagcatgatatccagcatgtaatctgccacgttactgcaaacttacgttcccatacgagggcagcacac

SEQ ID NO: 25148 - DNA, 243 bp, Zea mays
  Clone ID: LIB3153-006-Q1-K1-C9
cggccgacccacacgaccggtcccatcccatcccactaccatccatctttttttccacccaatccatccctttctgccgatccaattcaaattaacacaaacaaccccaccctcccttcaccaaatctaacttaaaataaaaaaatcattccctcccacctaaccctacttctcctttaaacctaccaaaacaattacctcacccacctctattcctacctccctaccataaattaatttctt

SEQ ID NO: 25149 - DNA, 226 bp, Zea mays
  Clone ID: LIB3153-006-Q1-K1-D10
ttttcaaacccattctaatccgacgctcttaacgaatgagcaccttctataatacacctcaacttctaccacaactattttaaaacttccaaaaaaccaatacctccttattacaataatcttcatcattcttaactcaatctttttcttcaatatacactaatactcaaccctaaactttttacaatccacccttcactaaacacaatctttaatacttcattta

SEQ ID NO: 25150 - DNA, 104 bp, Zea mays
  Clone ID: LIB3153-006-Q1-K1-D11
tcccgtcgacccacgcctccccttctaactcttttgatacaccttcgccccccctctaccggtgtgtgtctaataatcttaccatcacaacctcataatcatat

SEQ ID NO: 25151 - DNA, 324 bp, Zea mays
  Clone ID: LIB3153-006-Q1-K1-D12
cactccctctctttgccgttctctaccgttcgctacgccacgctccccaccgccggggtgaacctgaatcgaggcggctgcccaccaataccaaccaagaagaagacacataaactgacgaaccctctgttccataaaaggccgaaacagttcggcatttgcctcgcattacctaccaagaacgacctgcaccgattcgtaaagtggcccacattcatgcgcatccatcgctagcttagcatcctcaaacaatgcctcagggtgtcatcgactctaaaccagttcacccgaacaatctacatgaacctctgtaccaaactcttc

SEQ ID NO: 25152 - DNA, 225 bp, Zea mays
  Clone ID: LIB3153-006-Q1-K1-D2
acggcaatcacaaccatcaaaagctctcgatcttacctactccgatgaagaatagatcaatggggtgggaccaagcagtggtgatcgccttccacactaaggctgaatttgactcccacatgaccaaagcccatgaagccagcaagctggtggccattgacttcactgccgactggtgcggtccatgccgcgccattcacccactgttattctaacacgccaaaa

SEQ ID NO: 25153 - DNA, 407 bp, Zea mays
  Clone ID: LIB3153-006-Q1-K1-D3
gctgcctcctccttatcctcccatcgtgagaagtgattgcggtccatggcaaggctatcggcggtgtccccgcaaagaaggcaacgtccacgatctccaatgccgtactccagttccacgtcggcaggattgccagcttcctcatggcggtcaagtacgccaagcgcgtcagctccggctcccccgtttacctcaccaccgtcctcgagtacctagcggctgaggttctcgaacttgccgggaacgcctcgaggtacaacaagaagacccgcattgtgccgcgccacatccagcttgctgtgcgcaacgacgaggagctgaccaaactgtttgctgtgtccaccatcgcgagcggatgtgttatgcctaacatccatcagcatctgcttcccaataaagctgccttc

SEQ ID NO: 25154 - DNA, 328 bp, Zea mays
  Clone ID: LIB3153-006-Q1-K1-D4
cgcgaatttcgagttgatatcgcctgttcctcttgaaactgggcaaagatttgcgatgagggaaggagggaggacagttggtgccggggttgtctccaaagttattagctgatgagtttccactttcttgcccgtagcaatttagtaaagaaatgaatgctgacatgtttcttggaatgcatgggcaaaaaggcagagctggctggtctggccgccattcattctggacagtaccttgtgctttcttgttgaggtggctcatcataaagcatattttgtagccacttttccgagttgatattagtgggttcttaccaaatttaccgcg

SEQ ID NO: 25155 - DNA, 371 bp, Zea mays
  Clone ID: LIB3153-006-Q1-K1-D5
cgcgaatttcgagttgatatcgcctgttcctcttgaaactgggcaaagatttgcgatgagggaaggatggaggacagttggcgccgcggttgtctccaaagttattagctgatgagtttccactttcttgcccgtagcaatttagtaaagaaatgaatgctgacatgtttcttggaatgcatgggcaaaaaggcagagctggctggtctggccgccattcattctggacagtaccttgtgctttcttgttgaggtggctcatcataaagcatattttgtagccacttttccgagttgatattagtgggttcttaccaaatttaccgcgaaaaatattagcactctctacatcttgtgccctccatgaattg

SEQ ID NO: 25156 - DNA, 330 bp, Zea mays
  Clone ID: LIB3153-006-Q1-K1-D6
aactaatatttaatatctatcgcccctccctattctaaccaaacatatactatcaaggagggatggaggacagacagtgcctgccttttctccaaacatattaactaattaattaccactcacttgcccgccccaattaattaaagaaataaatgctgacatgtatcttgcaatgcatgcacgatcaatgcatacctagctgtttctgccgtcattcattcatcacagaacctcgctctttcttgttgaggtggctcattataaatcatatttattatccactctctctagctgatattaatgagttcttaccaactttaccgcccgcta

SEQ ID NO: 25157 - DNA, 377 bp, Zea mays
  Clone ID: LIB3153-006-Q1-K1-D7
ctcgcgcccccgctcgcttcacttctctaggtgcgcaccgatcagaagagatggcggtgcggctgctgacgaagaagatcgtgaagaagcgggtcaagcagttcaagaggccccacctcgaccgctacaagtgccttaagccaagctggcgcaggccaaagggtattgactcccgtgtcaggaggaagttcaagggatgcaccttgatgcccaacattggttatggttctgacaagtcgaccaggcactacctccccaacaagttcaagaagtttgtggtccacaacgtttctgagctggagttgctcatgatgcacaacaggacctactgcgctgaaattgctcacaacgtgtccactaagaagcgcaaggagatc

SEQ ID NO: 25158 - DNA, 393 bp, Zea mays
  Clone ID: LIB3153-006-Q1-K1-D8
gctacatgtccagatacaggaggtggtgcaggtgcagctcacgaggttcacgtgcggcggcgtcattgtggggttcaccgcgaaccatgccgtccccgacggtcatgccaccagcagcttactcgtcccatggcgccgcaccatgcgcggtttcccgatcggcctgccaccgccgtctctacaccaccacccagggctcttcccgccccgagacccgtcgttctttgagttctagcaccgccgtgtgtagtaccgtccgacgccgactgcatcatcatcatcgacatcccacctcgtcacagcccacggtcagacaacccaccgccactacatcttgatccactaagcgcacttcaccggggaattcatcaccgcgctcctagccaaggcatc

SEQ ID NO: 25159 - DNA, 221 bp, Zea mays
  Clone ID: LIB3153-006-Q1-K1-D9
acgcattcctccccaaaacacatcctgccatcctctaagcctccaccaagcatcaatcaggtgtgcctactgcagcaagtacgcgaactaactcatcaagaatgctgcctacatccgcacccctagcaaatatatccttgctgctaatcaatcaactcccaccattagcaaacgcctttccagcatcaatgtcaagaacatgaaagacaaccggctctctc

SEQ ID NO: 25160 - DNA, 258 bp, Zea mays
  Clone ID: LIB3153-006-Q1-K1-E1
acggtgctccccgacgagctcgccaagcacgccgtctctgatggcaccaaggccgccaccaaggtgagctcctcctaggcttgcacgctcgccctttgtaggcttctcttgtgttgatgttcgccttgtgttgtagttagatgttgctggtttctctgtcggcgctgctctgcttctgtaggaactgcgtcatgtaacccagcaaggacttgtttatttgtgaatcatcaacactttgttgttgatcacttatgttcc

SEQ ID NO: 25161 - DNA, 290 bp, Zea mays
  unsure at all n locations
  Clone ID: LIB3153-006-Q1-K1-E10
ggaatgtgatttttcaaagaagacaagggtgccattactagaacatctgagatgggagggttttatttctgagagatgatggaattaggatttaatgttggtacacttagaatttgagaagacaagttgcacaaatcaagaggaacactggaagggctaggaatagcatgtgtacaagccgactaggagaaaatgtattttatttgaacctctgaaaatatttagatactgcaattgtaagattttcgcatcaacccgatttttgaaatacactttttcttnnntaaaaa

SEQ ID NO: 25162 - DNA, 160 bp, Zea mays
  Clone ID: LIB3153-006-Q1-K1-E11
caacttcaatttttaaatcacaccaacctttccttccatagaacacataaccacttgggtggttatatttaagacatgacttccattaccatataacattaatacccttcctaatattttacactctgtccaatcttataaaaacaacctttcttccccc

SEQ ID NO: 25163 - DNA, 269 bp, Zea mays
  unsure at all n locations
  Clone ID: LIB3153-006-Q1-K1-E12
aaggaannacccgaccgacccacgcgtccactcattctctttcttactctcaagcacctcatcatgaaaacttctcttccgctggccgtctttttaatcagatccccctccctacctccacncaaggcagctccattcgcaaggtcgccccctacttccagcaggccctcaccccgcccctgtatcttctcccccctacaccggacggctccctcctctaccccgccttctccgacctcctgcacccccacttataccagtgcttcccc

SEQ ID NO: 25164 - DNA, 360 bp, Zea mays
  unsure at all n locations
  Clone ID: LIB3153-006-Q1-K1-E3
ataccaacaactatatctacttcatagcgcacacaaaccagctcgacaccatgagggaggggggcgctgccctcgctctcctggctctctctgccagcgccacctacacgcatacaaacagccggtgcgggtggcagccaccgacggcggttcatctaccgacggcggtgcatgtgtcagctacgtntgacctgccagctacggtgcatgtatcaccgacggtccacctacctgcggcggtccacctaccagcgacggtccatgtaccggcggcggttgatttgtcggcggcatccaagtaacttacttaatcagccgcgggctttgtaattattattcatagccacacacatgcacgtg

SEQ ID NO: 25165 - DNA, 345 bp, Zea mays
  Clone ID: LIB3153-006-Q1-K1-E5
acgctcgctccctgcccttccctgtacctctcttcctagggttactaccacgcgcccgcgtcggactagcagcgctagcgtcgcctaactccgaccgaggggacaacgagggttttgggacggacggcgtgagatttggaggaggcagcggaggtccggagaccacaccatgaggccggtgttctgcggcaacttcgaccacgagacccgacagtacgacctcgagcgcctcttctccaagtacggtcccatcagccggatcgacatgaagctaggctatgctttcatttactttgaagatgaacgtgatgcagaggatgctataagtccttacaatgcggcttt

SEQ ID NO: 25166 - DNA, 270 bp, Zea mays
  Clone ID: LIB3153-006-Q1-K1-E6
acgcaccattacctttatttactacacagcgcataataacccgatcgacaccattacggtgtggttcattgcccttggtgtcctggctcttgctgcgagcgccaccttcacgcatacaatcggccggtgtgacatccagccaccgccgccgggtcatctaccgaagacggtgcatctgccacctcctgttcacctgccacctgcgatgcatgtagaacagacggaccacctgtcgtcgccgttccacctgccacctgcggtccatgtgca

SEQ ID NO: 25167 - DNA, 291 bp, Zea mays
  Clone ID: LIB3153-006-Q1-K1-E7
ctctctcccaagcaccggcgcggcgcacgcggcctccatggcaggctgcaagaacaggaggatctaccaggaagagatgggtggtaagaaaaagaccgtcgatccctactctaagaacgactggtatgacatactggcctcatctgtcttcagtgtgcgcaacattggtacgactctcgtgtacaacacacatgttaccaacattgcctctgatggtctgaaccacagattttaagaggattttctaggttttcttggtggcgacgatcagggttctcagggaaaatcttg

SEQ ID NO: 25168 - DNA, 461 bp, Zea mays
  Clone ID: LIB3153-006-Q1-K1-E8
ctctctcccaagcacctgcccggcgcacgcggctaccatggcagtctgcaataacaggggggtctaccaggaagagatgggtggtaagaaaaagaccgtcgatcccttctctaagaacgacttgtatgacatactggcctcatctgtcttcagtgtgcgcaacattggtacgactcttttgtacaacacacatgttaccaacattgcctatgatggtctcatgcactgattctttgcagttagtctagctgatcttcatggttactatgatcaggctcacagaacaatcatgctccatgctcaagatgcgcactgcaggtatgcgctcacagacttctctggcatgaattttaccaccgattagctcaaatctctagttcagatgtgtcatacattgatggcagaccatgtttgtgtccacacaacctgcatctacatgctgcgtctgctctgtgttggtg

SEQ ID NO: 25169 - DNA, 467 bp, Zea mays
  unsure at all n locations
  Clone ID: LIB3153-006-Q1-K1-E9
cgcgttcaagtcgcgggtgccggtggcgtggagtccccggctgtacatcacgctggtgcggggcctcccgggcacgcggcgcctccaccgtcgcacgctcgaggccatgcgcctccgccgctgccaccgcaccgtcgagcaccgcaccacgccgtcgctgctcggaatgctcacccaggtgaagcgcctcgtcgccgtcgagaccgaggagatgtacaacgcgcgcaagcaagccgaggcggagaggcgcgcgcccaaaacccccgttcgtcgtctcccaccaccagccaccgccgccggctctgaagccggcagccgccgccgcggagggtgctgctgccactgcgccatagcctctgggcatcagaagactttcattacagttcagcaggataataattaaactgccctgtgttttgggtctgctggtctccactctccagacgatcngcatggatcctcttgct

SEQ ID NO: 25170 - DNA, 312 bp, Zea mays
  Clone ID: LIB3153-006-Q1-K1-F1
aaaaaaaaaaaaaaaataaatataactaaaaaaattaatatataaaaaaaaataaaaaaagggtggatattaaaaaataatgaacaacataataaaaaaaaaaaaaaaaaaaaaaaaacaaaatgggcccccccttttaaagaaccaaacttatcttccctttaattccaaattaatacttttttatttttttcccaaaaattaatttccctgcctgttttttaaaccttctttcttggaaaacccttgccttacccaatttaattcacttttaaaaaataccctttttccccttttgcttaataaccaaaa

SEQ ID NO: 25171 - DNA, 241 bp, Zea mays
  Clone ID: LIB3153-006-Q1-K1-F10
actctatagcctgtgtcctcctagctcgttcagtcatataacttctatgattgagtagtagtgtttaacccattaccattgctggcctcgtcacagggagcaaccacccgcatgaacaactgatactaaaacaaaaaactctcgctgcacatgtatcacctccgcccggcaccggacggctccctcctcgacgccgccttcgccgacctcctgcacgcgcacttctacgagtcctgcccct

SEQ ID NO: 25172 - DNA, 441 bp, Zea mays
  Clone ID: LIB3153-006-Q1-K1-F11
ctgatccacaagctgcctttccagctcctggtgtgtgagatcgcccatgatttcaagacgaaccttcactcacagagctccgccgtcgccacgctgcaagcggcgtcctacgcctaccttgtcgggctcttcaaggacaccaacctctgcgccattcacgccaagcgcgtcaccatcatgcccaaggacatccagctcgcccgccgcatccgtggggagagggcctaagcgtcgtcaccgtggacgttgaagtagttgctgcagtttcttgcatcactgtctggctataagttgtaaacatgtgccggtttatctagtttgcgctattgatcgaatcattatgtatttgggtcatcactgctgtcatttaactatgactatgcaatggcaatgaagttctcggatatcacttcccgaatatatgcgtctacaatttatatc

SEQ ID NO: 25173 - DNA, 354 bp, Zea mays
  Clone ID: LIB3153-006-Q1-K1-F12
ctcgaaaggacaactactctgtcctaatggtgaagtcaacttgctgacttggcatggtacatatatcatcttgctgaaatctttttaaaggaagtccttactgatctctgagataatgaactgtaaggctcattatatggcattgagtctggctgaccatattaaatgcacgcaacctctgcaccaatacagggtgcacatataaacgaacgtaagataccgaatccaacgttctagagaggaaaagtcttcacttctgaactaccctgcattctctttgcatcactgatggatcatctttgtcagacatctcatgaactcaaatcactgatgaaacaccattttcacaatgca

SEQ ID NO: 25174 - DNA, 475 bp, Zea mays
  Clone ID: LIB3153-006-Q1-K1-F2
ctgggtcttcaaaccattagctttatctactccagagcgcagaagaacccgatcgacacggttgtggtgttgctcgttgccctcgctctcctggctctcgctgcgagcgccacctccacgcatacaagcggcggctgcggctgccagccaccgccgccggttcatctaccgccgccggtgcatctgccacctccggttcacctgccacctccggtgcatctcccaccgccggtccacctgccgacgccggtccacctgccaccgccggtccatgtgccgccgccggttcatctgccgccgacaccatgccactaccctactcaaccgccccggcctcagcctcatccccagccacacccatgcccgtgccaacagccgcatccaagcccgtgccagctgcagggaacctgcggcgttggcagcaccccgatcctgggccagtgcgtcgagtttctgaggcatcagtgcagcccga

SEQ ID NO: 25175 - DNA, 468 bp, Zea mays
  Clone ID: LIB3153-006-Q1-K1-F4
gtttttctcgtggttaagccgttaagctcgtgcttgctcactgctgatccctcgactgtgtcggttcgctttggagctcgaggaagcttgccttgccatccgccacagcaggctcatccatcaggatctactaatttggtaaatgatggcagtcatcctgcctaggaccgtccgcagggcggcggaggcagcgttgtcactacactccgtaccgccgcgcgccgcctgtcactttgcgcggtctttgggcggcgtctcttctgcttgcagcatggagttcgtgtcgtggcaaaatggcgggggcatcctgcaccgggcggcctccgttgaccccactgctgtggtggaggctggagcggttgtgcactctggtgccgtcctcggcaaagaggtcgccgttggttctggggctgcggttgggccttcagtttccataggtcaatcaactagggtcgggtatgatgattc

SEQ ID NO: 25176 - DNA, 359 bp, Zea mays
  Clone ID: LIB3153-006-Q1-K1-F5
attcgttccaactcctgagcactttctcctcgtcccagacaagccaatcgaagccgggagacgaccatggactccaccggcaccggaacaaggggtaaggggaagaaaggagcggcccggcgcaaggtccgcgggccaaagaagaagtcggtgtcgaggtccgtgaaggccggtctccagttccccgtcggccgcatcgggcgctacttgaagaagggccgctacgcgcagcgtgtcggcaccggcgcccccgtctacctcgccgctgtcctcgaatacctcgccgctgaggttctggagctcgccgggaatgctgccagggacaacaagaagactcgcattattccgcgccacgtgct

SEQ ID NO: 25177 - DNA, 472 bp, Zea mays
  Clone ID: LIB3153-006-Q1-K1-F6
cttccgttctcaaaccaacctaggcaattcgccgcagcctctcaccctcgcgagtgccgagctcccgcagccgccgcacagatggcacccaaggcggagaagaagccggtggccaagaagcccgcggaggaggagcccgcgacagagaaggtggagaaggctccggcggcgaagaagcccaaggccgagaagcgcctcccggcgggcaagtccaaggagggcggcgagggcaagaaggggaaaaagaaggcgaagaagtccgtggagacctacaagatctacatcttcaaggtgctgaagcatgtgcaccccgacatcggcatctcgtccaaggccatgtccatcatgaactccttcatcaacgacatcttcgagaagctcgcggccgagtccgccaagctggcgcgctacaacaagaagcccaccatcacctcccgcgagatccagaccttggtgcgcctcgtactccccg

SEQ ID NO: 25178 - DNA, 91 bp, Zea mays
  Clone ID: LIB3153-006-Q1-K1-F7
attcctttctaaaaccaacctattcaatccttctctaaccataaccatccatagcggggtgctttcttaaacttcacacagacctcaccaa

SEQ ID NO: 25179 - DNA, 342 bp, Zea mays
  Clone ID: LIB3153-006-Q1-K1-F8
catcaagcatgttaatggccccatcatcattaatcttatccatgtccgtgtggagcatcgtctgtcttaccgttgggcataggatttccgcttgaggaaagccaataacgatcatctcaaggttgatgccaaggaccatagcgaggtgatcatcatcaatatgcaccctgtgagacccaaacctggcttcatggctgtcggtgctacacttgcgaccgttactcctattccctatgatgaggtaaatgatcttaatgcttgtttactacataaaattatttttcttgagcatttcaagcgacctgtcataaatacctatcttaatctttttgacaactgtct

SEQ ID NO: 25180 - DNA, 229 bp, Zea mays
  unsure at all n locations
  Clone ID: LIB3153-006-Q1-K1-F9
gacccacacgaacgaatcctcccttccttccttccccncccgatttatttaaacagaactctccttcctcgtagtctctattaaaacacatcaccaaacatacctcactcaattccacctccatccacacactcatcaactacttaaccaacaaactcgcactcaacttctatccactcacttccttcaacaaacaagtccattctctaccccccacttacctactctc

SEQ ID NO: 25181 - DNA, 170 bp, Zea mays
  Clone ID: LIB3153-006-Q1-K1-G1
attcattcggcgccgctccctgctctctgctgctttcttcatgggcagaaggcctgcgaggtggtattgccagatcaagagcacgccacaccccatgtccaggtactgacggggtgttcctgacccaaaaatcaggatctaccactttgccataaatagacaaggtgttt

SEQ ID NO: 25182 - DNA, 335 bp, Zea mays
  unsure at all n locations
  Clone ID: LIB3153-006-Q1-K1-G10
ctgacccattctntaaatacttctacttttctttatattagctaattcaaccgtataagactattcttctcaggatctactcttcaaccatattttttctctcttatctatcctgaattagttattccaaagatactaggctttttcccctaaaaaaaaaaaaataaaaaaaaaatttttctaaattattattaactaaaaaaattttttttttttttcattattcatacaaaaattactatttttctatataacaaatgtgggaaaagttcttgatcatctaaaaaattccaaatctttccttccccgtgctatgaaatttttttttttttttt

SEQ ID NO: 25183 - DNA, 482 bp, Zea mays
  Clone ID: LIB3153-006-Q1-K1-G2
agaaaatcaactcctccccaaatccacgctgccaccaactcgccgtcctccgcgccaagcaccgaagctccgatggcccgcactaaacagacggcgcgcaagtcgacgggcggcaaggcgccccgcaagcagctggcgaccaaggcggcgcgcaagtctgcgccggccaccggcggcgtgaagaagccccaccgcttccgccccggcaccgtcgcgctccgggagatccgcaagtaccagaagagcacggagctgctcatccgcaagttgcccttccagcgcctcgtccgtgagatcgcgcaggacttcaagaccgatctccgcttccagtcctccgccgtcgccgcgctgcaggaggccgccgaggcctacctcgtggggctctttgaggacactaacctctgcgccatccacgccaagcgcgtcaccatcatgcccaaggacatccagctcgcgcgccgcatcaggggagagagggcctg

SEQ ID NO: 25184 - DNA, 387 bp, Zea mays
  Clone ID: LIB3153-006-Q1-K1-G3
gcgaaggagaaagcagaccaacctcgccacccagggagaaagaggccaaacgggaagggggagggtcgtcatggcttccatgtgtcgcttccaggagggccgttcctctagtgcgcgctctggagaagctcatcgcagcgtcctccgctcccgggactggctccgccctcacgccggtggcagtcagcggcagcctccgcggctacaacaccggcgctccgctccgacgctacgagggggccgagtccgaagacgatcgcgctcgcgagtaccatgggcggcacggcggacgagactacgctgtgcccagcctgctctcagatattttccgtgatccgcttagtgcgccgcacagaagtggccgactgctgaaccttgtggacgact

SEQ ID NO: 25185 - DNA, 380 bp, Zea mays
  Clone ID: LIB3153-006-Q1-K1-G4
gtcatctatctcgtttcaaatacatacatcctcgttttctccgtgccgcagcatctcagggcgggggccaatatcaagagcgggatctatgtgttcggcaggatctcaaggctggtggccacagtggccctgcagagtgactatgtctagctcttctccgtgaacgaccccttcatcagcaccgactacatgacctacatgttcaagtacgacactgtgcacggacagtggaagcaccatgaagtcaaggtgaaagactccacaacccttctctttgttgagaaagaggttgctgtgtttggctgtacgaaccctgtggagataccgtggggttcggttggtgctgaatatgtggttgagtctactggtgttttcactga

SEQ ID NO: 25186 - DNA, 473 bp, Zea mays
  Clone ID: LIB3153-006-Q1-K1-G5
gccacttcagactcctctgcgctccatccctctgcactccggtccgcgcgagacgagcaggttctcccagacgctagacacgccaccgcatcgtctgcgccgcgagatcgagaatgtccatctctatgcggctcgcgatccctgctcctgccgtcaccgccgccgcgccgacgcggctgagggtgcgagcggcagcggcggggaaccgcggctctctctccgtcgcgcgcgccgccgtacgggcggagacgggcgcgctcaggggatgcgcctggctgccaccgaagccgctgggagcgggccagccgtaccggagcaggggggccgccgccgtgtgtcactcgtcggcgcacctcagcgcgcgcaccatccagtggatctccgccggagccagcgcagtgctattagttgctaaaggcactgccatacacaaatctttccttgtgccattttttgctcttcaggcaccttgc

SEQ ID NO: 25187 - DNA, 256 bp, Zea mays
  Clone ID: LIB3153-006-Q1-K1-G6
cccacttcaaactaatctgcactccatgcatgtgcattccgctcctgcccagacgcgccgggtgtctcagaccctgggcacaccaccacatcatcctcacctccatatccaaagtgtccatctatatccggcttatgaaccctgctcatgccgttaccgacgacatccttacgcagttcaacgttcgaacggccaatgactacaacctcgtctgtttcttcgagctgcgccccctcctactctcagatacgtgtca

SEQ ID NO: 25188 - DNA, 262 bp, Zea mays
  unsure at all n locations
  Clone ID: LIB3153-006-Q1-K1-G7
gntcgtcctcatggcgccgccgaagccgaagtcgggaantcatggagaacatcaacaggggggatgtattaaccaagcgcgagctgcctatgcgcccgtcccacgagggaggggaaagcaacaaaaagggtgtccatggacaggggccttatcagagaagttgctggctttgctccgtatgaaaagcgtatcaccgagcttttgaaggttggcaaggacaagcgctctctgaagcttgccaagagaaagcatggaactcaca

SEQ ID NO: 25189 - DNA, 142 bp, Zea mays
  Clone ID: LIB3153-006-Q1-K1-G8
gttcgccctaatgagcccgacacacccgaacttttacatcttcctggccttgaactggggccatgttacaaccaaacgcgagctatcaatgcgcccgtcccaccgcatggcgaaagcaacgaatagggcgtgcatagccatg

SEQ ID NO: 25190 - DNA, 199 bp, Zea mays
  Clone ID: LIB3153-006-Q1-K1-H1
agcgtcgtcctcttcgtctccagtccaagcaagcgaagagcacccctcgagatctctacggacgcgcgccgccatggacgcagttgactcggtagtcgacccgctccgggagttcgccaaggacagcatccgcctcgtcaagcgctgccacaagccggaccgcaaggagttcaccaaggtcgccgcgcggactgcgatc

SEQ ID NO: 25191 - DNA, 225 bp, Zea mays
  unsure at all n locations
  Clone ID: LIB3153-006-Q1-K1-H11
accctctaaaagccattccttctctagtgctcatcanccttctgctgatgtcttacctagcaaccgttccctaccaccaaanagtttcatatcttcttgtcttagctgtcatctaccactaattctttttcattttttcgcctcctgacaaattcttcttcttacccaaccactcatcttcttcatcttcattactacacctctattactattttttcaaacaaa

SEQ ID NO: 25192 - DNA, 377 bp, Zea mays
  Clone ID: LIB3153-006-Q1-K1-H2
aaccacgccatcttcctatccattccaaccgagcgagaagcacccgcggagatctatgcggaggggcgccatcatgggcgcatccaaaccggccttcgaccccctgctgcagctcgctaagtacagcatctgcctccacatgacctgacagatacctgaccatactgagacatccaacgacgataagaaggctgcaactcactccaagggccttacattcaagacattcttggtcaggctcatatgaatgcctaccaacaacattgttgtcatttttcatttgaaacgatcacctcaagcataagaactgacgaactacacacacgttttactaacctttttttgaaaagcctgtttaacccttttggtttcaccta

SEQ ID NO: 25193 - DNA, 248 bp, Zea mays
  Clone ID: LIB3153-006-Q1-K1-H3
aacatatctccaatctcttccaatttaaacacgagagaaggccatgacgagaaccctcgggtcgatgctcatcatcggcggcgcagatgtcggcctgtgctccctccctccctctgcatcagcccgcgaggagccactacagccgtatatcgtcggcgggcggaaaccgatcaagaacgtcaacgaccctcatgtctaagagatcggccgctgggcagtctcggagtacattaagacggccaacgact

SEQ ID NO: 25194 - DNA, 387 bp, Zea mays
  Clone ID: LIB3153-006-Q1-K1-H4
gaattaccgggctcgagcccacgccccgtccgcatcataacacagtgtcccagcgtccacttctcagcagctcgcgcagcaatgggagaagcacgctatcatcattgatcagggcgctgacggacgtgcagcaggggcgctctattggtgtagatcactcagcccgttttgagaaagaaggcgcttctactctcataggccttgaacgcttgtgaaccgtggagaggtcgttttgctgagaagcactacgccgatctcgcctccaagcccttcttccagggcctcgtggactacatcatctctggccctgtggtggccatggtctgggagggcaagagcgtcgtcacaactggccgcaagatcattggcgccaccaaccccctggct

SEQ ID NO: 25195 - DNA, 104 bp, Zea mays
  Clone ID: LIB3153-006-Q1-K1-H5
tagaccaacaagcatcatatacagtggaacacagaaccaccaatagaacctctatggggggcaacatacatggcatccttatgctccttgctctttccgcatgc

SEQ ID NO: 25196 - DNA, 464 bp, Zea mays
  Clone ID: LIB3153-006-Q1-K1-H6
gcaccatgtcctcctggagggtaccctcctgaagcccaacatggtgactccaggctgcgggtccaataaggtgactgctgaggtgattgctgagtacaccgtccgtaccctccagaggaccgtccctgctgctgcgcctgctgttgtcttcctctctggtggacagagcgaggaggaggccacccgcaacctcaatgccatgaacaagctcagcaccaagaagccgtggtccctgtctttctccttcggccgtgccctccaggcgagcaccctcaaggcctgtgctggcaaggtggagaactcggagaaggctagagctgccttcctcgccaggtgcaaggccaactctgatgctaccctcgggacctacaagggtgatgctgtcgccgacaccgagagccttcacgtgaaggactacaagtactgagttgcttctctgtgcgtgcccgttttggaactcctgc

SEQ ID NO: 25197 - DNA, 212 bp, Zea mays
  Clone ID: LIB3153-006-Q1-K1-H9
ggccgacccacgcgaacggtcaaatccaatcacgcatttccatttcctccttttacatagtcaactcaatttagtttgtcctctttcaaatccgacagtgctccttcccctatatcctctatctccttctttctcccttctctttgctctcatcttactattcctttttatacatcatatcgaccaatttctttattattacctacttctat

SEQ ID NO: 25198 - DNA, 51 bp, Zea mays
  Clone ID: LIB3153-007-Q1-K1-A1
aaagcttgtaatgcaccaatgcgtatgttttcaatacatgacaagtatgct

SEQ ID NO: 25199 - DNA, 239 bp, Zea mays
  Clone ID: LIB3153-007-Q1-K1-A11
gaaaccagatgtagttagtactataagagagtatgcttcatctggaactgagaataacaactttggcgatctggctaatgctttcttggagaaacatgttgatccatgatatgacaattttacaggggagactaaagcttacacatttcgagtacctgtggtgctgtcatattctgaatatgaactaaagaaactagagcttagatgtcactgtggagctcggcaattgcgtacaagtc

SEQ ID NO: 25200 - DNA, 402 bp, Zea mays
  Clone ID: LIB3153-007-Q1-K1-A12
gaaaatcttttcactcatcggatatttgaccttttcgatgtcaagaaaaggggtgccattgggtgtggtgactatgtccgagctctaaatgtgtttcatccaaatatcccaatggatgaaaaaattgatttctcgttcaagctatatgatatggatagcacagggtttatcgaacggaatgaggttaagcagatgttaattgctcttctatgagaatcagaaatgaggctatctgatgatatcattgagacaatcctggataaagatcttttaaacatttcttcataaatcaaatggttattgacttattgagttataaattgttcctgtgacctatactggaaataaaacttacaacaagttatgtggctaatgaccgacattctctggtgcttgtgctaa

SEQ ID NO: 25201 - DNA, 223 bp, Zea mays
  unsure at all n locations
  Clone ID: LIB3153-007-Q1-K1-A2
gccaccttcgactaatcacgcttcacgtacgccgacgccccagccgggatccaaattaaagaacttcttcttctattaattacagtatattgtaatttagctgctggtacggtggtggcatgatttgagatgtgcatgatgatccttgtgtaattttattaccaagtctcttcttatatttacatgttcatttgcttgcttcttgcnnannanaaannnnnaa

SEQ ID NO: 25202 - DNA, 338 bp, Zea mays
  unsure at all n locations
  Clone ID: LIB3153-007-Q1-K1-A3
gtggactgcacgcttgttccatgggttgggagcatccagcatgttctgatactggtttagaccttccattctctttccttgcgttgctgagcttctatcatcgtgtcttattgtgaagagggaactcttcactaatgttttgttatgtacttgttgtgttcaaaagttcttgtactgtaggctactgttatgatgcgcctagctcaatttgtcgatgcaattcgaaattttgtctaacatatgttcatgcaaaananaaaaaanaaaaataaaacgaccagtaaggggaatccacctctgattcttgtgaacctactatccaaaaaaataacaaaagg

SEQ ID NO: 25203 - DNA, 354 bp, Zea mays
  Clone ID: LIB3153-007-Q1-K1-A4
gaggaagctcgcgaccacaggctctcctccaccgcggccgccccttcctctctggcttctgcgccgcggcgctccgacgtaagcccctcggcgcccgcgcctccgccgccgccgccgccaccggcgagggccttgtgcggcagctcggcgtcctcgacctcgtgctgctcgggatcggtgcgttcatcggcgccggcatattcgtcgtcactggcaccgtcgcccgcgacgccggcccaggggtcacgatcagttttggtcttgctggagctgcgtgccggctcaatgccctgtgctatgctgaactggcgtctcgggtccctgctgggggtgggggagcatacctgtacacgt

SEQ ID NO: 25204 - DNA, 438 bp, Zea mays
  Clone ID: LIB3153-007-Q1-K1-A5
gccaaacaattgtcgacgtattgattcagctgtcggaatttgttgctcaaaggattaggtcagccgtttagtgaggaagatattattggtatctatagaacaccactgctagatcagcgagggcaagttcgttgtggtctcttccagaaggagatcgaagagaccaggagtcgtcgggggaatgcaaatgtacgttatgcttggcttccttgctcaagatataccatggagcagatggcaatgcggcgtgctctggaaatcgcgaagcctcataaggggtccatttgtggtgttgggacatgtcttgctcctgcaaactgtacaaattcatgcgccagatattctgattttcatgaagatggcatcatcagaatgatgttgtgccgtgtaataatgggtaatgttgaggttgttttgcctggatcaaagcaatttcag

SEQ ID NO: 25205 - DNA, 233 bp, Zea mays
  Clone ID: LIB3153-007-Q1-K1-A6
gacgaacgcaagctgtcctacttattcagcttgcgacaacgtttgttcatatgatatgggccatggtcttgttaagaatacactattggtgtctataccacaccactgatgaagcaactaggctgtgctcgatagactatatcacaccaggagactaaggactgcaccagttcaaaacagaatgcatgttgaccttatccttcgctacctggcacacaaaatacaacgaatta

SEQ ID NO: 25206 - DNA, 179 bp, Zea mays
  Clone ID: LIB3153-007-Q1-K1-A7
cggaaggaacgggtggacccacgcatgcgtgcgaccatacgcctgatgactgggagcgtttcgtacgccaacacgtgcttctgttttaggacgaacattccttttggctgcgatgttctcatgaatttagtacagaatagcgagagaacattaacttagcgcggtgggaatttgacacc

SEQ ID NO: 25207 - DNA, 148 bp, Zea mays
  Clone ID: LIB3153-007-Q1-K1-A8
gcgatgatctgctccacgccttctttctgcacctcggccatcacgtttgactaattgctcggggcacgcggtggttccacgcgcgtcctacggggacacctcctccagcgactctttcggccccaacgacaccgttgtgtgcaacctt

SEQ ID NO: 25208 - DNA, 307 bp, Zea mays
  Clone ID: LIB3153-007-Q1-K1-B1
ggagatcattattcttatgacttggagcatctggaaagccgaaacgagtggctgttttcaaacaaagatccctcggtgctccgttgtactcaggaatttagtagagaattgcgactgatcattcacagagcgcggggggaatttgacacctcaatcccgaattggctaagtttgtggcaaacataggaatagttctttctttttctttttctcttctttttattgattgtaaaagtaacatgttctaaccttttcttttcgctttctaataaaatgagcagtaggggttttccccttctgatccttc

SEQ ID NO: 25209 - DNA, 369 bp, Zea mays
  Clone ID: LIB3153-007-Q1-K1-B2
tgcgatgctatgccagcacacgatccttcaagacagtagttttctttcgtacttctccctaaccgagcattatagagaggacagcatgtaaaggatgtaaaaatgtacttgttctcgatcaaaaagtatgttgtttgttgaaattattactaatatgtattgcatcctcttttggatcatttcgtaggtgactatcattttgcttcaacatttttgtcgagttagatacatcaaggtatactttcttttccataacttaaactttcctataaaaataaccaaaagggggtttccccttctgaacctttaaaaaaaacttaaaaaaaaaaaaaaaaaaaaaaaaggccggcggtctaaaagaaccaaact

SEQ ID NO: 25210 - DNA, 238 bp, Zea mays
  Clone ID: LIB3153-007-Q1-K1-B3
ccagcaaatgagccaaaggaagatatgtatatgatgcgattgctccagaaaatgcgccctcgaaacctgagtatttggagattggtatcattgctggtgttcctgtttcaatcaatggccgagacctctcaccagcatccctcctcgcggagctcaatgaaatcggtggaaagcatgggattgggcgtatcgacatggtggaaaacaagctggtcggcatgaagtcacgtggggtcta

SEQ ID NO: 25211 - DNA, 385 bp, Zea mays
  Clone ID: LIB3153-007-Q1-K1-B4
cacgagtcaaccattttcctatggacaatacgacgccagcacaccaatatccaaagatgactgccggcacaagatagctttgactcgtctgccatctcattctcgctgtaaaaggatagtcgcagaatccaccagattaagcatgctagagaaatccgttgcttcggagcgctggaactcctcgtattcatgtttgcttttcttttctggctaatttgttccagaatggatgtgtcgaattttggagcaaaaatctttctggcttctccatgtactaccataacgatttgtcagttaattctgcagattggtgtggtgttaaaaaaaaaaaaaaaaataaaggccgccgctttaaaaaatccaaaccttcattcgacttcaatcc

SEQ ID NO: 25212 - DNA, 426 bp, Zea mays
  Clone ID: LIB3153-007-Q1-K1-B5
cgcgagcggccgccctatgacttgttttttttttattgccttatcgagtgtgaaggggcaacctaagctcattactcgcgaaaaattccaaagcatgttcccatacaatagcgatcgatcattgactgcgagcggcatgccaaacataattgaaagcgtgtatgggcacattcgtggctaatcgaattacaccagagttcaaagcttatttttggaattccaatgggggaacaaccgggaatttaataaccccctttcaaatctggggaaccaaattccccgaggggatttttggaatccccagacttcttgctttctgggacacatattaagtattttaaggcctgctcgggaaacattaacgccttttcctgggcgggggtcctgaactttttgattgcgagcgccgccctttttttttttttt

SEQ ID NO: 25213 - DNA, 98 bp, Zea mays
  Clone ID: LIB3153-007-Q1-K1-B6
agcgagccttcgccctatgaccagtatttcttgaacctccctatctactaagacgggggcaacaacaagacagctgtgattcgtctcccatagcattt

SEQ ID NO: 25214 - DNA, 326 bp, Zea mays
  Clone ID: LIB3153-007-Q1-K1-B7
ctccgtttgaaagagccagcagtattgttccgtgccggatggaagatcaccatcatgtggaatcagtactgcattcagcgaagcacgagtatgcatcaaaagcagatgtccatgaaccagagatatttgctgatcatgatgtatacctgccacctgccccaagccatcatgatgctcatggccaggttttgctcttggaggtatcgtgttggcttctcaagatgaaaaaatggtgtatgagaatcccctggccccaaaattggaagttgttttccccaaaaaatggcccaaaacccggaaccttttttcgggccaaactgaggcct

SEQ ID NO: 25215 - DNA, 365 bp, Zea mays
  Clone ID: LIB3153-007-Q1-K1-C1
gtggcaacgcggaagatctacgatccactggaggagacgccttgcgccccatccttcaccactacgacgggcccaagtttcggctcgagctctacgtcgtcgagaccctcgcccttctcgacatcttcgctgacaaggatgacgcctgagccttccttgccgtccgctcggcggcagtgcccattcattaatacacagaccataaaatgtggctggagggacaaaccacctttggttgatatgataaaggggtatgtattaaggaccccttccattatttttggttttattataagactaaacctcggttccgaagaaacatggtttaatattatattaaaaccaaccatctcttcttgggctgg

SEQ ID NO: 25216 - DNA, 347 bp, Zea mays
  Clone ID: LIB3153-007-Q1-K1-C10
gcgtccaaacgctacactcccggcagcggctcaagaactgaatcaccagcacccgtggatggctaagttggtcaagcccggcagggacattatcctactgcagggcactgttcggcggcatgaaggctagtgatcgtgcgcgtgttcgaagatggcacccacgaccgtccctacagccactgtctgatagccggccttaccgagtaccccaagaaggtggttcgcatggactcggccaagaagacggcgaagaagtcgcgcgtcaagtgcttcatcaagctcgtcaacttcacccacctcatgcccacccgctacaccctcgacgtcacttcaagacgtgccaccgc

SEQ ID NO: 25217 - DNA, 125 bp, Zea mays
  Clone ID: LIB3153-007-Q1-K1-C11
gcgttcgtcgatcatccatcgaccgactaatgcttgaattactatcccgcctgcctgcatggatcacgagggaggagctgctaacaccgaccggacatgagctaccaggctcctcctccgggcac

SEQ ID NO: 25218 - DNA, 331 bp, Zea mays
  Clone ID: LIB3153-007-Q1-K1-C12
ggcagatgtggtttgggaggcaatggttgaacgaatcattgccccagctacatgaataactatgctgctagtggctgatgctgacattgctggctgccagggacacacttttggcgcagatgatgacatagctgctagtgcggtcggtggatatgcatacatattgcctacgttgaacagcgattagatacctctatggatggatgaatacccgctcctgctggctatcgcagctggcatcttacctttatcacccttgttccttcaacaatcatcagccctattacagcagttacctttggtgcattaattggcacaaaacatcagggca

SEQ ID NO: 25219 - DNA, 240 bp, Zea mays
  unsure at all n locations
  Clone ID: LIB3153-007-Q1-K1-C2
ctcccttttgcgtgagcaaagaaagagagcgagagcagtcgccatgtctggcatcatccacaagatcgaggagaagctccacatggggggcgaccacaagaataaggaggaggagcaccacaagaaggccgaggagcaccacaagaaggaggagggggagcaccacaagaaggacggcggngagcacaaggaaggcatcgtggagaagatcaaggacaagatcaccggcgagcacggcga

SEQ ID NO: 25220 - DNA, 349 bp, Zea mays
  Clone ID: LIB3153-007-Q1-K1-C3
ccctgctgtagatgcagcagagaagactgagaaagtgaagataagagagaggaggaggcccctgctgtagatgcagcagagaagactggtgagaaagaggtggcccctgctgtagatgcaacagaggagacagaaaaaagcaccgaaggccaagcacagcctaattatgttgctgccccagaatctgagtataaaggaacgggaaggccagtggaatccgagcaacttcccttggatttggtggagaaaccacttcccatggtaataatggtgaaaaagaaaaagaaggaaattcctggaattgaaaccagccaggcagccgattttgccgggctttccttggattttt

SEQ ID NO: 25221 - DNA, 52 bp, Zea mays
  Clone ID: LIB3153-007-Q1-K1-C5
gttaaaggtgcagtacttaagactgagtgagtggagatcatatataagtggc

SEQ ID NO: 25222 - DNA, 246 bp, Zea mays
  Clone ID: LIB3153-007-Q1-K1-C6
cttatgggctctactcccatcatgtggtataagcgtttaacttatgagacgagataggagcctgtgttcttgtcccagtataagatctgcgatggcacgatgcttgtaccatctgtttacttatttttatcatgcagtgcatgtgacttgaaactgtgatggacttgtattgctttctgccttatggcacctgtagtagtgaactgatgaaggaagttcatgcggactctgaagctttgttggctt

SEQ ID NO: 25223 - DNA, 436 bp, Zea mays
  Clone ID: LIB3153-007-Q1-K1-D1
atcagcaacgctcccgccggtgttcctcctgaatcgaccgtgccctcagcggctcgtcgctgtttgggatgttcgctttgaaggaacgcccgaagtggatgaacatcacctcgcttgacgagctcaagacaaaagtggggcacgtcatcgtgatgattctacttgtgaagatgttcgagaagaagcagatggtcacgatagccacggggcttgacctcctcagctactcgatctggattttcttggcgtcaggttctttttatatcctgcaccatcttcacaagggcgaacattaagagtgaccagagtgccatgccgaatttgtagcctattcgagagagaattgattgtggtgtccaataaccaatactggatttttaagactctcttcaacggtgttctcttcataaaatatataatgagaaatgtatgatac

SEQ ID NO: 25224 - DNA, 484 bp, Zea mays
  Clone ID: LIB3153-007-Q1-K1-D11
aacttgcaacatacaaagcacaatagtgctccaacaatggcagctaaaatattatgcctccttatgcgtccttggtctacatgcaagtgctgctacagacaccatttttccacaatgctaacaagctcctatagcatcccttcttcccccgtacctctcaccaacagtgtcttcggtatgtgaaaacccaatatcttcaaccctacaggatccaacaagcgatcgcagctggcatcttacctatatcacccttgttcctccaacaatcatcagccctattacagcagttacctctggtgcatttattggcacaaaacatcagggcacaacaactacaacaacttgtgctagcaaaccttgctgcctactctcagcaacagcattttcttacattcaaccaactagcctgcattgactctgcatcttatttgcaacaacaacaactaccattcagccagctatctgcttgccacccccaacaatt

SEQ ID NO: 25225 - DNA, 239 bp, Zea mays
  Clone ID: LIB3153-007-Q1-K1-D12
cacggatctgtcgaattggcgggcgccggcggccggcactcgccgtcctgactcgagaaggaagatgctctacgaagttggtggcctggctagggacagcctgtgtaccgccgtgcgatcggtggaagagcgagaggcaagcatgtctgagctggcggcccgcacgggccgtctcctgcgtcgataccagatcggccatcgatttgtgggcgggtgcgtaccatccagatataggtata

SEQ ID NO: 25226 - DNA, 114 bp, Zea mays
  Clone ID: LIB3153-007-Q1-K1-D2
aacagaatcgctccctcctgcgttcctactttcccctccgtgccctcagagtttagtcggtgtgcgtgatgtgcgctcttaaagaacgcccgaacttgtttaacatcaccttgc

SEQ ID NO: 25227 - DNA, 366 bp, Zea mays
  Clone ID: LIB3153-007-Q1-K1-D3
gagagcgagcgcctcaccggtgtccgcgagctgaccgctcaccgtcgcacccacatgccgctcttgtttggacgaggtggtgcttgttcttgtacctcgttctgggtagacgccttggctggactgctggcaaaccccttccgggggtttaatcaaccccccaaaggagggcttcctgggcttgaagtccgcggcaaccggaaccctgcccaaccggttccccggcggggccaaggcgggggcaccaatccctgggccccgccggtggtcgccgcccttcaaggtgccccggcccttcaataccttgaccaaccgttgcaaccccaaggggtgcaccgggacctggagggcttcaacctgcttctg

SEQ ID NO: 25228 - DNA, 428 bp, Zea mays
  Clone ID: LIB3153-007-Q1-K1-D4
gatctactggctccttgatgccgtaagagaattactgaaatgccttctacttcattcgattcacatatattgggtgcacccataaggcgagggcatctatcacaaaagtctgtcatgaagcgaaagagatctttcaagagacaaaaagccaagttggtcatggaaagcttgaaattttattgcatgacaatgatgaagaggaggtagcattgcagagagttgcccaagctgaatgtgcggcaaaataggttgtacaaagagctattcgactgcgcaacaaggtccaattctcatgacgaacacagagctcgcaacatacaaatctatcatggctctcaggattgccgaagctgctagggtatcagactcgtcccaagatattatttgtattatcctcgactaaagaataatatgggttcattattttt

SEQ ID NO: 25229 - DNA, 439 bp, Zea mays
  Clone ID: LIB3153-007-Q1-K1-D5
gcggcggcggtgcccaagatacgggtgcgccgctgcggcgccgcgcggacgcgaccggcgaggagatcctccgcggcgtccacctcgacgtgccgcgcggggccgtcatgggcgtcatcggccccagcggcagcggcaagtccacgctgctccgcgcgctcaaccgcctctgggagcccgcgcccggcgccgtgctactcgacggcgccgacatctgcgccctcgacgtcctcgccctgcgccgcaaggtcggcatgctctttcagctccccgccctgttcggccgaaccgtggctgacaacgtacgatacgggccgcaattgcgcggcaaggagctaaccgaggccgaagtgaagagcctgctgcacctggccgacctggaccctgctctgtgctccaagccggcgtccgagctgtcggtcgggcaggcacagcgcgt

SEQ ID NO: 25230 - DNA, 204 bp, Zea mays
  Clone ID: LIB3153-007-Q1-K1-D8
gatctactggctacttgctgccgaaagacaatacactgaaatgcctcatactcgattcgggggatatatattgggggcacgcataaagcgaagccatctatcacaaaggcctgtcatcaagcgaaagatatcttacaagagacataaaggcaagtcggccatggaacgcttgaaatattattgcctgactataaagaagacgat

SEQ ID NO: 25231 - DNA, 323 bp, Zea mays
  Clone ID: LIB3153-007-Q1-K1-D9
acgtaccgatctacagagtagactcagcgcccccaccctggactctacgacctgacgccagaatgtgcatgctgtacgaagtgcaagtcctgctacgcaaccactgttccacaacgctgactagctgctagagcatgaggttcttcctgccgtgacctcttaccaccggacggggtcggtatgtgaagacctcaagatcagccctacttgatgcaacaggccatagcagctggcatcttacctctatcagcctcgattctccaacaatcatcagccctactacagcaggtacctcatgtgcatttattggcgcaaaacatcat

SEQ ID NO: 25232 - DNA, 156 bp, Zea mays
  Clone ID: LIB3153-007-Q1-K1-E1
ccgtccttaacgcgaccaccgacgctgcagtgacggatgcagcaacaaagttccttacgaccctaacctgattaccggcatccaaggcctgaatcagtactggagcaacatcaggtgccccagcaacaacgggcagagcagctggaagaacgcctg

SEQ ID NO: 25233 - DNA, 184 bp, Zea mays
  Clone ID: LIB3153-007-Q1-K1-E10
gacgatccattctttcatactcattgatgccaccccgcacgtcttctatagagacatctataatcaacgggcgggtcgccgatctacatactcacgactggcaaaaccccatccattttcatccatgcttgctgagaggacatacttctttcttcaggtggttgattatccatgatgtctctag

SEQ ID NO: 25234 - DNA, 407 bp, Zea mays
  Clone ID: LIB3153-007-Q1-K1-E12
gggaaggaacggctcgaccgacgcatgcggtcgccctgactcctccctagcagcataaaaccggcggcaagtcttcgctggccgctagggaaggcgagggctttgcctgagagaatgcaagacccaagggatgatgatttcttggcgccgaagttgcataagaagaaggttgtctaccggccgcagccatcaggccatctgaagggtgaacctgaactgttgcggagagagtttccgcaatcatcaggcatggtccaaaagccacccaaaagaagcttgaagggtgagcctcgcacgcccccttccgacagggggaccccggattccctgccggaatctggtcctaccgacgaataccgtgcgttaaggaggaagtacctgatgctggaggaagagaactttgcact

SEQ ID NO: 25235 - DNA, 374 bp, Zea mays
  Clone ID: LIB3153-007-Q1-K1-E2
ctcccatctcccaagacctcctcagacccgagaacgcagctgcggccatggacgccaccggcactggagctggagggaaggcgaagaagggagcggccggtcgcaaggccggcgggccgaggaagaagtcggtgacgaggtccgtgaaggccgggctccagttccccgtcggccgcatcgggcgctacctcaagaagggccgctacgcgcagcgcgtcggcagcggtgcccccgtctacctcgcggccgtcctggagtacctcgccgctgaggtcctggagctcgccggcaacgctgccaaagacaacaagaagacgcgcaatcgtccgcgccacgtgctgctggcgatccgcaacgacgaggagctcgggaag

SEQ ID NO: 25236 - DNA, 411 bp, Zea mays
  Clone ID: LIB3153-007-Q1-K1-E3
ggccgtcgaccgctacatcgagaagtacatcgaccgagctcgccggaccctctctaccacgtctgcatcggagggatgatcttctcctacttcgtcaatctgccctgggagcgcgcccacctcgcccacctcgaggagatggagaggaccggtgggaagcactagatccgctgccccgtccctcgccgggagcgcgggaaggcgggtgactttcaatggggccaatcaagctggtgggttctggtttcttctgctggtgaactactggagtcatggtactttggtcggtgggtttggacccaaaccggaagaaaccggccaacttaatggcttggtccttgcgtcttggcataaggtacctcaaacaaaagagtgcctgcattgggattaaaaacgttttcagccattgag

SEQ ID NO: 25237 - DNA, 430 bp, Zea mays
  Clone ID: LIB3153-007-Q1-K1-E4
ggcggaggagcggaggtaggagatctcgagcaagcggaggcggagtagatgaagacgttcgacccgtggccggtctttttccgccgggagtggaagcgcaactggcccttcctcacgggtttcgccatcaccggattcatcatcacgaagatgacgtccaacttcaccgaggaggacctcaagaactccaagttcgtccaggaacacaagaagaagcactgacgaaccaggtgaaggagaaacgcatgtttggccagccagttctgttatgcttttgaatgaaaaatttagacccctctttctcgtttccttaatcgaaatgcttgaactctatgttccatttgtaatgtaataagaggcaaatgaattgaaccaacagcaatcaacttctgattgaaaaatatcgatgtgtcatgtgtggcctgaatgt

SEQ ID NO: 25238 - DNA, 204 bp, Zea mays
  Clone ID: LIB3153-007-Q1-K1-E5
ctcggagcaacccatgggatagaatatggtaccgagcgggctcagctattctgtacccgcgtgtcatcatttgcaggagtggactactctattgatcactgcgtctggatgtggcatcacccatttcgccgtcaacgaggtggaacatgaccggtgccgaagtactactatcatgcgatcccgccctctgaaaagagttgagaa

SEQ ID NO: 25239 - DNA, 411 bp, Zea mays
  Clone ID: LIB3153-007-Q1-K1-E7
ggccgtcgaccgctacatcgagaatacattgacgagctcgccggaccctctctaccacgtgtgcatcggaaggatgatcttcctctacttcgtcaaatctgccctgggaagcgcgccccacccttgtcccacctttatgagaatgaaaagacccgggggagcactagattcgctggcccgttcttcgccggcagcacgggaagacgggtgactttcatggggtccaatcaggctgatggcttctgttttcttctgctggtgacctactggaggcatgttactttgggcagtggttttgtacccaaacagcaagaaactgcccaactaattgtcttggtcctcccgtcttgtcataagtaacctcaaccaaaggaaggcatgcttggggattaaaaacgttttcaccaattg

SEQ ID NO: 25240 - DNA, 208 bp, Zea mays
  Clone ID: LIB3153-007-Q1-K1-E8
ggcggacgagccgaggttggacatctggagcaaccggaggcggagtagatgaagacgtggggcccgtcgacggcctttatgcgccgggagtagaagcgcaactggcgcttcctcacggccttctacatcaccagcttcatcatcacgaagatgacgtacaacttcaccgaggaggacctcaagaactcctagatcgtgcaggaacaca

SEQ ID NO: 25241 - DNA, 139 bp, Zea mays
  Clone ID: LIB3153-007-Q1-K1-F11
gacgactcgagctctcgtccacattcaaagtacgaacatacacgccggaccaagcactttattgaccgtgatcatgatcactatgaatcttcacaagatcttaaagtgcttctactatggaggggttctgtttaacaac

SEQ ID NO: 25242 - DNA, 231 bp, Zea mays
  Clone ID: LIB3153-007-Q1-K1-F12
cgggaattaacgggccgggcgacctatacgaacgaagctaacttacgcgcgcatgcaacctcatagctcttttatatatacacctacatacaattgggtgaccgtccttctacaaacacgcttactgagaaaaacctccctttacccaacctaatcaacttgcatcacatacatctttctacagctagcttactatcaaataagcccgcacccatcgctcttccttacaaa

SEQ ID NO: 25243 - DNA, 428 bp, Zea mays
  Clone ID: LIB3153-007-Q1-K1-F2
ggcggacagcgcgtccatgatcgagtggggcggcaggtggtgaactcggagcccgacggcagccacaccagcacgcagatgggcagcggccacttccccgaggaagggttcggcaaggccagctacttcaggaacgtccaggtggtggactccaccaacaacctcaagccgcccaggggcgtcggcaccttcaccgagcagtccagctgctacgacgtgcaggacggcagcaacgccgactggggcacatacttctactacggcgggcccgggaagaactcaaactgtccatagcccaagactgactgagctgagccgccgcctatcacactcactaccagagccgcctaaccttaacacacctcagctgtatcattcatgcatccggtcaattagtttatactgccctcagtttttaactttttttt

SEQ ID NO: 25244 - DNA, 226 bp, Zea mays
  Clone ID: LIB3153-007-Q1-K1-F3
ggcacctacacctatggcacctccacccatggccctgcacccatggcacctctacctatggggcctacacccatggcacctgcacctatggcacaaccctggtttggccactccagctagcttctgcgcttatgccacggacaagatcagcgtcgatgcgtaccttgcaagtggcatcattgggaaagggggagctaacataaaccaaatatcttacgtcacaggg

SEQ ID NO: 25245 - DNA, 436 bp, Zea mays
  Clone ID: LIB3153-007-Q1-K1-F4
gaagctcagaagtcagatcagaagccgccgagggaggcgccgacgccgagtttttgctccatcccgcatccaccgccagaatgtttctcacgaggacggagtacgaccgcggggttaacaccttctcgccggaggggcggctgttccaggtcgagtacgccatcgaggccatcaagttgggatccactgcgatcgggttgaaaacaaaggatggtgttgtccttgctgttgagaaacgtgtgacctcaccactgctggaaccaagtagtgtggaaaaaatcatggaaattgatgagcacataggctgtgccatgagtgggcttattgctgatgctagaacactagtcgagcatgctcgtgttgaaactcagaatcataggttctcatacggggagccaatgaccgtagaatcttcaacacaagctatttgtgactt

SEQ ID NO: 25246 - DNA, 405 bp, Zea mays
  Clone ID: LIB3153-007-Q1-K1-F5
caacggactggacctcgaggacaagctgcacccggtggccccttcgaccccctgggcttgggcagcgaccccgaccaggccgtcatcctcaaggtgaaggagatcaagaacggccggctcgccatgttctccatgttcgccttcttcatccaggcctacgtcaccggcgaaggccccgtcgagaacctcgccaagcacctcaacgacccctttcggcacaacctgctcaccgtcatcttccgcgcccgccaaagggaccccaaccttgtaaggccccccacaagcccggaggcatgcccaattattcccctgttgccgcccttattttaaccgggaaagaactttgtgttaaggtcttaaatgaaaaacctgccattcccattcctgtacattatcgagaggggg

SEQ ID NO: 25247 - DNA, 118 bp, Zea mays
  Clone ID: LIB3153-007-Q1-K1-F6
aagaaccgggggggacccacgcgtccgggaggttcaaaattctaaatcaataaccccgccaggctggagggcgcgacaacctcaggatttttgcgggcggtggccgcatcacacacgc

SEQ ID NO: 25248 - DNA, 155 bp, Zea mays
  Clone ID: LIB3153-007-Q1-K1-F7
cggacgcatgggcacttcagctaaactgttctaaaagcttgctagctgcaactatagggggcactcaaatgagtccaaccattatatcaaagaaaacatgctatataatgcgttcaaaaaactatttatacacacggcatgataatgcttatccc

SEQ ID NO: 25249 - DNA, 441 bp, Zea mays
  Clone ID: LIB3153-007-Q1-K1-G1
ctcagagcacaaatggaagtgcaacgaagattgccgaacaagtggaggtccagaagcatatgcagatccgaatggaggcgaaccagaagtacatcgacacgatactagataaggcgttcaagatagtatctgagcaactgagtggcttcagcatatctgaccaagacctaccgattctcacctctgctagggccatgcttagccctgcagatcacttgagttcgtctgtcttcccccagctctccgtcagctccgttagccttcacaatcctggtcctggaagaaggaaaggccttccgcatgttgccgacagccacgtgttcttccaaaagccacctgaacaattcaagcgcaaatcacgttgagaagcattgctagctcgacgcaaatgcatgaactgatcaaaggcacactggaaaatcagaagaatttcgtctgaca

SEQ ID NO: 25250 - DNA, 393 bp, Zea mays
  Clone ID: LIB3153-007-Q1-K1-G10
actgcacggtcattgatgcccctggacaccgtgacttcatcaagaacatgatcactggtacctcccaggctgactgtgctgtccttatcattgactccaccactggtggttttgaggctggtatctccaaggatggccagacccgtgaacatgctctccttgcgttcacccttggagtgaagcagatgatttgctgctgcaacaagatggatgcaaccactccaaaatactccaaggcacgttatgatgagattgtgaaggaagtctcatcctacctcaagaaagttgggtacaaccctgataagattgccttcgttcccatttctggttttgagggcgacaacatgattgagaggtccaccaaccttgactggtacaaaggcccaaccctgc

SEQ ID NO: 25251 - DNA, 411 bp, Zea mays
  Clone ID: LIB3153-007-Q1-K1-G11
actgcacggacattgatgcccctggacaccgtgtctttatcaagaacatgatcactgttacctggcaggctgactgaactgtccttatcattgactccaccactggtggtttctaggttggtatctacaacgatggccataccccagaacatgctctacttgcgatgaccctagcagtgaagcttatgacttgctgctgcaacaggatggatgcaaccactccacttttctccacggcacattatcatgagattgtgaaggaagtctcattctaactaataaaagtggggtacaaccacgatcagatcgtcttcattcctatgtatggttttgagggcgacaacatgattgacaggctcaccaatctagactggtgcaaatgtccaaccctgcttgaaggtcttgaccaga

SEQ ID NO: 25252 - DNA, 193 bp, Zea mays
  Clone ID: LIB3153-007-Q1-K1-G12
actgcacggtcattgatgcccctggacaccgtgacttcatcaagaacatgaacacatgcaccgtcgcaggctgactgagctgtccttatcattgactccaccactggtggttgtgaggctggtatgtccaaggatggccagacacagcaacatgctctgcttgcgttgaccctcgcagacgatacatatgata

SEQ ID NO: 25253 - DNA, 310 bp, Zea mays
  Clone ID: LIB3153-007-Q1-K1-G2
cgccgacgactgggcgacccgcggcgggcgcgagagacggactggtccaacgcgcccttcgtcgcctcctaccgcggcttccacgtcgacggctgcgaggcctccgcggaggcgcgcttctgcgccacccagggcgcgcgctggtgggaccagccggagttcagggacctcgacgccgcgcagtaccgccgcctggccgacgtcaggcgccgctacaccatctacaactactgcaccgatcgcgaccgctacggcgccgccgtgccgcccgagtgcgcccgcgaccgcgacgtctgatgatgatgcgttg

SEQ ID NO: 25254 - DNA, 351 bp, Zea mays
  Clone ID: LIB3153-007-Q1-K1-G3
cccacgcgtccggaagctcttcgcttgtatcctcgccaccattgttaatcaggcgttctggccggccagacaagttgccaggcgggtgcaatggagcaaaagagggatatgaaataccagctgggaccgatatatttgtttcggtatacaacctccacagatccccgtatttctgggaccggccaaatgagtttgaacccgagaggttttccgtcccgaagaaagacgagagcatagaaggctggtctggttttgaccctgaccggagtcctggcgcaatgtaccccaacgagatcatagcggacttcgctttcctccccttcggcggaaggccttccaagtgcgtggggg

SEQ ID NO: 25255 - DNA, 261 bp, Zea mays
  unsure at all n locations
  Clone ID: LIB3153-007-Q1-K1-G4
tccagagttgcgacattgtggctttcaacaagatcagagttcagtttctgagtttgggcaacggcagcggctcagctcgtcaagtttgtgctgggatgccagtttatcccttctagtctattacagaaatgttgttcggagctgagtctattataaacatcttggtctgagtttattgttgagtggtgccagtttttttcaatatacatttatcttaaaaacagcggtactgatgttttttgtctaaagtaatgagnttgc

SEQ ID NO: 25256 - DNA, 441 bp, Zea mays
  Clone ID: LIB3153-007-Q1-K1-G5
ggcaagtccaaggcactgaggatactcgaggcgaagagaagtggaaaagggatgctttcacttaggcaggtgagtggtgggtggttagctcaggagtctgatgatctaacccctgaagagatcacctttaccacaaagtctgagaggtctccgcaagaaaacgagcttgccgatgccaaatttgcctggctttgcgcaaaacatgtcaagagcaacgcaattgtgatagccaagaacaactgcatgctgtgaatgggcagtggtcagccgaacaggcgagagagcgtccgaatcgcctttaggaaggcaggaaaagagggcaagggagccgcactggccagcgacgccttctttccttttgcctggaacgacgccgttgaagaggcgtgccagaacggcatcggcatcatcgcccagccaggaagcagtaagaaggacgag

SEQ ID NO: 25257 - DNA, 260 bp, Zea mays
  Clone ID: LIB3153-007-Q1-K1-G6
ccagccgctcaccgacccggccaagggagaggccgctgcgactgccgggtggctaatgatgattaatccacgacgacgacgtgtgtacttagaaaccgacgtaaatgcatgtgcatgtgcccggccgggtcgttagtacaccgacaagcatgagtgcactagcgctatggatcggactatatggtgcacaactgcacatgcatgcatataatatcaagccctcgtccgtgcgaattgtttgctgtcgactacgattaata

SEQ ID NO: 25258 - DNA, 216 bp, Zea mays
  Clone ID: LIB3153-007-Q1-K1-G9
acggaaataggtcatcaacagcttgctgctgcatgtgtagagcatcgaaccaccatgattcagccggaggtaatagccattacaacgatgatggaggatataatcagatggtactcatgagagcgcgacatgaacaactccactacctacaagtacgtgttctgacgagtggttagggacgaactccaatacacctccaggactctgcgataccac

SEQ ID NO: 25259 - DNA, 418 bp, Zea mays
  unsure at all n locations
  Clone ID: LIB3153-007-Q1-K1-H1
tgcagcaaagtaataactcatccaattctgtaacgtgacagggggagagagactgctggccactcatgtaaaggcgctgccttagccgccagcttcaagtttgaggggacattttaatttggcttagtagtaaattttgtggaataagtgcctttgataactatacaccactgtccagatgctccctcttagtagtggcaaggagtgcgttaagtagttacttcaaaaggatatgcaagcttcataggggttgatcacatgcaaaccagtgtatgtatatgaagtatatctatcttattcttttaacttttttgaaaggaagactgtagttaaaacaaaaatgcaacttatacacaaatgtgatattcattttatattagcttcgaaaaaaaaaaaaggaannaaagaaataannact

SEQ ID NO: 25260 - DNA, 326 bp, Zea mays
  Clone ID: LIB3153-007-Q1-K1-H2
cttgaggcaccagaatattgttaaatttattggacatgcaggaagccagtggtttggtgcattgttacggagtatgccaagggcggatcagttaggcagtttctggcaaagaggcagaataggtcagttccactaaaactggcggttaagcaagcactggatgttgcaagggggatggcgtatgttcatggtcttggcttcattcatagggatcttaagtcagataacctcttgatatctggtgataaatctatcaagatagctgactttggagtagctcggattgaagtaaaaactgaggggatgacacctgaaacgggaaccta

SEQ ID NO: 25261 - DNA, 423 bp, Zea mays
  unsure at all n locations
  Clone ID: LIB3153-007-Q1-K1-H3
ggaannccgggcgaccacgcgtccgtagtttaggaagccgagcggtttcgactcccgggcgcccgcacccgcattgcccgccgcgcggcgtacaacggcgccgccttgtcccccgacgacgaggcctcgaccactttctccgacggcggcagcagcagctccgcctcctcccgctgggacttcgacgcgcagctggaccccaagacagaccgcggcctgctagagcggtgcgggaagctgctgagtagcatccacgcgttcacccgcggcgacgcggcgggtgcggaccaacagccaagccccgtgtccgagctcgacgcgggggccttcctcgcggacgaggactcgccgtcggcgatgtcgggcgtctaaagcgagccgatcgacttctccgcaacagcagccgtcgggaccacccaaaag

SEQ ID NO: 25262 - DNA, 289 bp, Zea mays
  Clone ID: LIB3153-007-Q1-K1-H4
gccgcccgaaacccgcaaagctgattcccgtactactacggtatcgtatacgccgcttgaggtggtcctctctcccggcacgcgaggtaaggcgcaacgttgatggcggcggcaccggcggacgctaaggcggaggccgccaagatggacctcctcgaggacgatgacaagttcgaagagttcgagatcgaccaagaatgggatgaccaggaagaaagcaacgaaaccctccagcaatgggaggatgaatgggatgacaatgaacgcaacgaagaattctcgctgcaac

SEQ ID NO: 25263 - DNA, 435 bp, Zea mays
  Clone ID: LIB3153-007-Q1-K1-H5
gtttttgagggaaaagaagagcaagttgagcggaggtgttcaacttcactggtgcaggaggagttgccttatcaatgtacaacactgacgagtccatccatgcctttgctgacgcttctatggccactgcttatgaaaagaaatggccattgtatcttagcaccaaaaacactattttgaagaaatatgatggcaggttcaaggacattttccaggaggtgtatgaagctggttggaaaaccaaatttgaagctgccggcatatggtatgagcaccgccttatcgatgacatggtagcatacgcacttaagagtgaaggagggtatgtctgggcttgcaagaattatgatggagatgtgcagagcgatttcttagctcaaggttttggctcattgggtttgatgacttcggtactggtgtgccctgatggaaaga

SEQ ID NO: 25264 - DNA, 231 bp, Zea mays
  Clone ID: LIB3153-007-Q1-K1-H6
tcggccaaggctaacaagctcaagctcgagtacaacaggaccatcgctgcctacaacaagggcgagagcactgcatctaagaaggctcctgccaaggaggaagatgaggaagatgaagaggagtctgacaagtccaagtctgaggtcaatgacgacgatgattaatagggtagtgaggaggattaagataatgactagtgatggagctcctcgagacaatggaccgtgctt

SEQ ID NO: 25265 - DNA, 432 bp, Zea mays
  Clone ID: LIB3153-007-Q1-K1-H7
cggaggtcacggtgcgcgcgacgggcgacctgcgggggcgccgcggtgcacggcgacgcagggcgcgccggcggtggtgttctccatcggcgggtacacgggcaacatcttccacgacttctccgacgtgctcgtgccgctgtacaacacggcgcggcggtaccgcggcgacgtgcagatggtgatggccaacgcggcgccctggtggctggtcaagtacgacaggctcctccgggcgctgtcgcgccacgcgccgctggacctggccagggcaggcgcggcgcgggaggtgcactgcttcccgcgcgccgtggtcagcctgcgcgcgcacaaggagctcatcatcgagcgcgagcgcagcctggacgggctcgccacgccggacttcacgcggttcctccggcgcgcgctctcgctgacccgggacgcgcc

SEQ ID NO: 25266 - DNA, 128 bp, Zea mays
  Clone ID: LIB3153-007-Q1-K1-H8
gagcgttcccgcttagatggaagcaatctttacacgggttccgatacaccggtagggggagtgttgtcttgagtaacgaaaacactggcgagaatacaatggccggagaacccacggtttcttacgca

SEQ ID NO: 25267 - DNA, 257 bp, Zea mays
  Clone ID: LIB3153-007-Q1-K1-H9
gccgagctcctaaaaaccctacgagcgtgcttgatcggcggctgataagtgatggagatagacggtgacgcgtgttcgaatgcactttgtggatcattactaccgaacgttcgacaccaaccgtgcggcgctggttgggctgtgccaggagacctacaagctcaccttcgagggccagatgctgcagggcctgcccgtcattgacggctagctcggatctctccattatcatgcctgagagcatcagatcgtaatag

SEQ ID NO: 25268 - DNA, 143 bp, Zea mays
  Clone ID: LIB3153-008-Q1-K1-A1
tattccgaggaaactttcgttcacgctggtctcctgccgccgccggtaattaaatgcctaggacttggtccgtgctgttgtccaagagatttaaccttcacccccaccggcaattaaaggaacttgtgggacctcatggattc

SEQ ID NO: 25269 - DNA, 248 bp, Zea mays
  Clone ID: LIB3153-008-Q1-K1-A10
gtctaccaccacccgcctcctctcgagttcgatctgtttgctcccccaaacatgttcggccgcggcaagggaagcaagggcctgggtaagggcggcgccaaacgccaccgcaaggtgctccgcgacaaccttccagtgcatcaccaaaccggccatcccgaagcttgcgcccaagggcggcgtgaagcgcatctccgggctcatctacgaggagacccgcggcgtgctcaagatctttctcgagaacg

SEQ ID NO: 25270 - DNA, 251 bp, Zea mays
  Clone ID: LIB3153-008-Q1-K1-A12
cgcaggcagcatccacagcctgaatccatcaaaccagtacctcccagcaccgatggccggcgaggacggacgtgctcccttcgggctacgcgtagtgaagttccccttcccggtctggagccacattaaccagatgctccagctcgggaagctcctccatgcgcggggactgggcgtcaccatgctccacaccgactttaacgagcccgaccgcgcactgcaaccggacatgaacttggtgttcatgcgcg

SEQ ID NO: 25271 - DNA, 394 bp, Zea mays
  Clone ID: LIB3153-008-Q1-K1-A2
aaaaaaaaaaaaaaaaaataactgcaaatgaataaaaaaaaagaaaaaaaaaaaatacaaatatggcggacaaacaaaaaaaaaaaaaaaaaaaaaaaaaaaaaaaaaaagggcggcccttttaaaagatccaaatttttcttcccctggtttcaaaaaaaaaacttttttttaggggcacccaaattaaaatcactggcccgcgttttaaaaacgtcgggctggaaaaacccttgtggttcccaaattaaatttctttaacgaaaatccccttttcgcaagtgggcaaaaaaaaaaaaagcccccaaccaaaccccctttcaaaaaattgcccacccttaatgggcaatgggacccccccttttaggggccattaaaccgggggggggggggg

SEQ ID NO: 25272 - DNA, 147 bp, Zea mays
  Clone ID: LIB3153-008-Q1-K1-A3
cgacgatccatgtctctggatctgcgtctgttcatatgcctgatgccgacttgtgctgtatgtagttgcttgaattcagtcgtgttttgctaccgtacccaccccatgcatcatttgtcaccgcgacgcaataatcatagtaataac

SEQ ID NO: 25273 - DNA, 256 bp, Zea mays
  Clone ID: LIB3153-008-Q1-K1-A5
ctcacagcaaacaccgcgaagcgcgaagccggcccgctcccaaacccgaccgagcaaagcgcaaagccccccaacctcagatcaatccgcagcatcgatggcgcccaaagcggagaaaaagccggcggcgaaaaagcccgtggaggaggagcccgcgacggagaaagcggagaaagcttcggcagggaagaagccgaaggcggagaagcgccttcccgcgggcaagtcccgcgccggggagggcgagaaaggccag

SEQ ID NO: 25274 - DNA, 299 bp, Zea mays
  Clone ID: LIB3153-008-Q1-K1-A6
gatgggagagcaggtcgtgacggagcgtatccagcggaagctggaggaggccaacgctaccgtccaacagcacctcgccggcatccaggaccacgtcaacttcaccatgcagcaagcatacttcaagtgcgcatatgattgcttcgatcggcgccgtactcaggaagcgatcaacaattgtgtggagaattgtggtatgcctgtccttgctgtcaacaatgtttttgagagtgagatggccaagtttcaggaacggttgaaccggtcattgatggtctgtcaagataagtttgaagctg

SEQ ID NO: 25275 - DNA, 285 bp, Zea mays
  Clone ID: LIB3153-008-Q1-K1-A9
cgcaaattgcaccaagaaatccatcgagaggccgtcgacaggggaattaatggcgtcgtcgtctagcagcagccaccgtcgcctcatcctcgcagccgccgtcctgctctccgtgctcgcggctgccagcgccagcgccgggacctcctgcgtgccggggtgggccataccgcacaacccgcttccgagctgccgctggtacgtgaccagccggacctgcggcattgggccgcgcctcccgtggccggagctgaagaggagatgctgccgggagctggcggacat

SEQ ID NO: 25276 - DNA, 445 bp, Zea mays
  Clone ID: LIB3153-008-Q1-K1-B10
ctagcagcctccttgaaacctccagatctgtgcctccaaggcccccgttcctcggcaacaagccgtccagatggacaccgccgcgcccctgcaactgaaagcctgcgccggcgacgccgcggagaagctgctgctcgccgtcgcagccgagggtcctatctgtggtgtgccagacttcaagatgaggggaaagaagagtgatgagctcgaacctgtcgatgctggcgatgaagatgatgatggtggtgacgatggggacgaggatggtgacttttgggagggaggtgaagaggacgtctcagaaggggagggatatgacaacccaaagggcaatgagaccaagaagcaaagaggtgatcctgaggaaaatggggaggaagatgaggaagaaccagaagatcaggagggtggcggcgacgacgacgacgatgacgatgatgagaac

SEQ ID NO: 25277 - DNA, 439 bp, Zea mays
  Clone ID: LIB3153-008-Q1-K1-B11
gaaaaagcctgaagatattgttcctttatcacacaactgtgacattccgcatgtgaaccggactgagtatcagccgattgatatctctgaggatggataagcgagccctcttacttcagatggaaacacttaggatgatcttagactcccaactgaatagacctttgtggcccagaataacgaatgcgtcggaagcggaaatgatcttgatgtgactgtgcaggcttggatgggggaggagcagatctgcgcgttgaaggatattggccccaagaaactacttggctttggagacggacccctactgtatctcaacttaaatcggacaagaagtgtatcaccataggattgctaccgagacattcacctggcttgagctggcttttgctatagcgcgcaaggggttgctgggtgtcgcacactacctgacttatcatta

SEQ ID NO: 25278 - DNA, 249 bp, Zea mays
  Clone ID: LIB3153-008-Q1-K1-B12
caaacagccagaacatactgttccaatataactcaacgtcgacaaccatactatgctccgcgcggattttcagcagattgatttctctaacgattgatatacgtgcactgttacttcacatggcaacacccaagaataccttagaccgccctctgatgatactcttgcgccacagacaaaggaatgctacgaaagcggcaactatacttgcctgactgtccagtctgcgatggatgaggagcagatctg

SEQ ID NO: 25279 - DNA, 251 bp, Zea mays
  Clone ID: LIB3153-008-Q1-K1-B4
ggttaccattcctgcccaaaacacatccggcgatcctcgaagcctccgccgagcatggatcatggcggcctactgcggcaagtccgcggatgagctcatcaagaatgctgcctacatcggcacccctggcaagggtatccttgctgctgatgagtcaactggcaccattggcaagcgcctttccagcatcaatgtcgagaacgtggaggagaaccggccggctctccgtgagctcctgttctgctgccctg

SEQ ID NO: 25280 - DNA, 101 bp, Zea mays
  Clone ID: LIB3153-008-Q1-K1-B5
ggtggcttcgccgactccgactgcatccactggctgtcttagccatcggcaccatgggcggaaggtcctctagatgctttaggcagatgacgaacccgtcg

SEQ ID NO: 25281 - DNA, 399 bp, Zea mays
  Clone ID: LIB3153-008-Q1-K1-B6
atttacctcgcgccgccgacaacgcaacccttgcagccccaatccctcacagcaaccatggctggcgcgcaggagtccctctctctggtgggcacgatgcgcggccacaacggcgaggtgaccgcgatcgcgaacccgatcgacaactcagcggtcatcgtctactgctaccgcgacaagtccctgctggtgtgggacctgaccaacccggtccactccaccccggaattcggcgccaccggcgactacggcgttcccttacggcggcttaacgggcacttccaattggtgcaagaccttggtcttaagttcgaagggcaagttggccttttccgcttctgggagggagaggttcgccttttggaacttttcaacgggcttaacaaccggcggtttgtt

SEQ ID NO: 25282 - DNA, 252 bp, Zea mays
  Clone ID: LIB3153-008-Q1-K1-B7
cggccttcgagatcgtgatcagggaagatctacagcaacgtgagccgcagggccatgaactcggacttcgtacaaggccgagctgtccctcaacagggtgagcatcgacggcgactcaaaagacgagcagaagcaggggagccggttcgggtgctgctagaagtggtcggggggtagcggtacattattggatcgggttggatttgaaccggagatgatgcttttttatttttttttcgggtggcgggtggg

SEQ ID NO: 25283 - DNA, 92 bp, Zea mays
  Clone ID: LIB3153-008-Q1-K1-B8
aatttgcccggtgatgattgcgaatgttctgcatattctgaatattttgaaatgtttgactggtgtattatcatgctatctttccgtgaact

SEQ ID NO: 25284 - DNA, 78 bp, Zea mays
  Clone ID: LIB3153-008-Q1-K1-B9
cgtcacttccagtgtccgacgacgtgcgctcgctacccctctccctcgaggcctttgacggcgaagagcgcccaggcg

SEQ ID NO: 25285 - DNA, 70 bp, Zea mays
  Clone ID: LIB3153-008-Q1-K1-C1
ggacaccattctggatggtctgcgtgcacgacgacagctgccatatgctcactatctatggtacaatttt

SEQ ID NO: 25286 - DNA, 96 bp, Zea mays
  Clone ID: LIB3153-008-Q1-K1-C10
aagccttttgcattgcctttgtgacggcctaccagaacttgaactcctggaggcgacggaggaagggactgaactcgtcgtgagccggtgcttggt

SEQ ID NO: 25287 - DNA, 232 bp, Zea mays
  Clone ID: LIB3153-008-Q1-K1-C11
ggcctgcagagaatctatgagaagtacacctggaagctctactccgagaggctgatgaccctgaccggcgtgtacgggttctggaagtacgtgagcaacctggagaggcgcgagacccgccagtacatggtaatgttctacgccctgaagtaccgaagcctggcaagccaagtttcgctgtccttcgattagtacggcgaaagaagaagaagaagaagcctaggccggagaa

SEQ ID NO: 25288 - DNA, 174 bp, Zea mays
  Clone ID: LIB3153-008-Q1-K1-C4
ctccactcggccgccagggagcatcacgcttggttctttctctgattctttggctgcgcagccggtagagcacagagctactggccgaacgtgcccgaataccgccggtcctgcgcgcctgctctttttctttttttttctttctttcactggttactggttttggagaatact

SEQ ID NO: 25289 - DNA, 193 bp, Zea mays
  Clone ID: LIB3153-008-Q1-K1-C5
ctcgatgaggtcgttagcgaccgtcatggcggcggcctttctgcggcgccggctaggcacagtttctcaaagctctcggtcccagtggaggaccccaaagcagtgacagcgggcggcggcaccgtttttgtcaaagccacgtggctgccggcccgctttttcctcgccgtcaccgacggtgccggcgcctggg

SEQ ID NO: 25290 - DNA, 98 bp, Zea mays
  Clone ID: LIB3153-008-Q1-K1-C7
ctaaaaaaagggaagaagaaggccaaaaaattcgtggagaccttccaaaacttcattttttaagggcttaaaccagttccccccgacctttgcctttt

SEQ ID NO: 25291 - DNA, 124 bp, Zea mays
  Clone ID: LIB3153-008-Q1-K1-C9
agcgcgacagcgattccgtctagttagaccaaccgagagagtcccctcagaccagaagaggtgaatatgagttccctcggtcgcctggctatccctagggctccaacgctgcgcctacgtccac

SEQ ID NO: 25292 - DNA, 100 bp, Zea mays
  Clone ID: LIB3153-008-Q1-K1-D1
gcagcagccaaaacctacctagccgacgccgcaagccgccccccaaagccgccaaaaagcagaactttgtgaaaactcttacggggaaaactaacacttt

SEQ ID NO: 25293 - DNA, 340 bp, Zea mays
  Clone ID: LIB3153-008-Q1-K1-D10
caacacaagggcggacagcaagtgtacaaagggtccgtgacttgcgtttccgccgtagttgctagtggcgtaggcaatttcggcacgtgggcatctccaccaggtcaatgccaacgaggggggggggagaacactaggactatgcgcctacatccaaatgattccgagaacgacgatgttcattatgttaaggcatgtgtcttttaaatcaatttctctttattaaatgatattttttagtaagatgagtcataaattaatttttctatgacttatctgctccaccgtaaattttctagctctcagtctagtcttcgcagtaggaatctaggataatatt

SEQ ID NO: 25294 - DNA, 206 bp, Zea mays
  unsure at all n locations
  Clone ID: LIB3153-008-Q1-K1-D3
agcaaagcggcagtgcgtagagaggatcgtcgaacagaacagcatgaagatggtcatcgttctcgtcgtgtgcctggctctgtcagctgncagcgcctctgcaatgcagatgccctgcccctgcgcggggcttgaaggcttgtacggcgctggcgccggcctgacgacgatgatgggcgccggcgggctgtacccctacgcggagt

SEQ ID NO: 25295 - DNA, 72 bp, Zea mays
  Clone ID: LIB3153-008-Q1-K1-D5
cgcgtgccctgccttcccgtcatgccggtgttttccgtacattttgcggatggtcaattaggtggttgcgac

SEQ ID NO: 25296 - DNA, 296 bp, Zea mays
  unsure at all n locations
  Clone ID: LIB3153-008-Q1-K1-D8
gccaccccttacatnctccatttnctcgccccgcgacggcgacaatcaagaaactcaagctcgatctgtaggcccgtccgttgcttccccaccttcaaaggtgctccaaaggcaacccgtagttcgaggccactgcaaggtactatggagttagtggctacagtgcctgctaaagtttctttgttgttccaagtttagtgacaaaactgacaatggtgtagcaactgggttgtgctgcgaccagtatttcgtttttgcctacctgtatggtctagtctttgtttgcactggtggat

SEQ ID NO: 25297 - DNA, 440 bp, Zea mays
  unsure at all n locations
  Clone ID: LIB3153-008-Q1-K1-D9
gcagggcaggttttgcgaagcaaagcccacgagcacaggatgaggatgcgtgcgcgggcggcatcggcatccgcatctgcgtcggcggctgtggtggtgctgctcctgctcctgctactggtgggcgtctgcgtgggcgccgtgtacaaggtaggcgacctggacgcctggggcgtgccgncgtcgtccaagcccgacgtctacaagcgctgggccaagtccatgcacttcgcgctcggcgactccatctggttcctgtacccgccgagccaggactcggtgctgcagctggcgccggcggccttcgcgtactgcgacctgtcgcgccctgtggccaggctcgccgacggcaactcattattcaacctgaccgcgcccggccgcgcctactacgccagcggcgcgccgggccactgccgcaggggccagaagctctgggt

SEQ ID NO: 25298 - DNA, 143 bp, Zea mays
  Clone ID: LIB3153-008-Q1-K1-E10
cgatttgaatatcatttagatctgtttgaggttggaacataaatgcagcagtagtttctgtcttattatattggtacctctgttactgagttgatgtggtcctggctcctgagcttaattttgttttcgtgttctaatcctta

SEQ ID NO: 25299 - DNA, 321 bp, Zea mays
  Clone ID: LIB3153-008-Q1-K1-E11
gtcgaatgagagcaattagttgtctttgccatgggtatggagacacatgtaccttttttcttgatggagttgcgaggaagattgcttcagctggatatggagtatttgcactggactaccctggctttggtctttcataaggacttcatggatatattccaagttttgatacacttgttgatgatgtagctgaacacttctctaaggtcaaaggaaatcctgaatatagaggcctaccgagctttcttgttggccaatctatgggtggagcagttgcattgaggttcacttaagcaccaaaatgaatggatggtgcatact

SEQ ID NO: 25300 - DNA, 186 bp, Zea mays
  Clone ID: LIB3153-008-Q1-K1-E6
acgcggacgcgtgggttgtcatgggtgaaatgaatgaatgaaataaataaaagaatgaatgaatggccccagttctatgtaggattgatttcttcacattgcgagcctttcaaaaaaaattactagagcatctagcgattgttctctcaaagcatgtaattggtataccggaagcacacagtttta

SEQ ID NO: 25301 - DNA, 189 bp, Zea mays
  Clone ID: LIB3153-008-Q1-K1-E7
ggttagcgttcctctgcagcgatggcgatcaagcggaccaaggcggagaagaagatcgcgtacgacaagaagctgtgcagcctgctcgatgagtacaccaaggtgctcatcgccctcgccgacaacgtcggttccaagcagctccaggacatgcgccggggcctcaggggcgacttcgtgggtgctcat

SEQ ID NO: 25302 - DNA, 288 bp, Zea mays
  Clone ID: LIB3153-008-Q1-K1-E8
ctccaccagaggaagactgtagccatgaaaaggagagaactttatacgaacctggtcgcaggcctgatcggtaccatcaccactggcattaaagggatggtacatatgagagcagacactcacgccacatggatcatcgcaggcgcagacaaagctcagagccaggcgtatctccactagaggaagacggtagctatgaaagggaaagaacttcagacgaacgttgtcgcagccctgattggtaccatcaccatcggcatcacagggaggatacatatgagagcagac

SEQ ID NO: 25303 - DNA, 424 bp, Zea mays
  Clone ID: LIB3153-008-Q1-K1-E9
gcctcagatctgaagcacctgctccgacacttgcatcttgtcgaagggacaagagatgaaattgcggtcgatcgagggcgtactcctgtggatgggcaacaccccttctggacatctccgcctgcgccgatgacgccttcctgacatagtctgacatcaagctgaaccatgctattctcggtggggagaagcacttgcctatgtgtgacgagttgggtagcacgagcattgttgaatatatggccggacgagccacccaaaactctatcatggttgcccaatggatgcttcaaactcctggtgcatcaagttacatgtgatgcattggaaaggacaagtttggtgaggaaatgaagaaaaacgctcaagctgcaggagttactgctcattactaccaggatgagactgctcctactggcacatg

SEQ ID NO: 25304 - DNA, 188 bp, Zea mays
  Clone ID: LIB3153-008-Q1-K1-F1
gtcgaagtttacagggtattagccgcttgcatctatcctactcatatcatggaaaaaatttgagtggtattgaaggtgtccaaggcggttaataagttccacagcgaagaatgttgcgctttatgagcccttggataacgcggcttttgccgaaatgggccccatgcggaagaagcccaaggcggtga

SEQ ID NO: 25305 - DNA, 140 bp, Zea mays
  Clone ID: LIB3153-008-Q1-K1-F10
gatcaagttcccgcttgtgtaccgcaaggtcaggccgcctaccaggaagctccggaccactttcaaggcttccaggcccaaccttttcatgtgaagaggtatatcgtacccgtgttctgtgtcttgagcgcccgagagat

SEQ ID NO: 25306 - DNA, 157 bp, Zea mays
  Clone ID: LIB3153-008-Q1-K1-F11
gtctccactctacagttgtgccgcctcgtctctctcctttctgctgcgcccccctatcgtgcgggattctatccaggattctaggggtccgtcgcctcgtctcgcgatggacaagggcaggcgtgtcgtgcccccgggccctggcggcggccgccgg

SEQ ID NO: 25307 - DNA, 424 bp, Zea mays
  Clone ID: LIB3153-008-Q1-K1-F12
ctctggtcaaaccctatgcaaggagttgaattattcgctgctatcctgagtaaacttcagtctgagtctgtcaagggtgcctttggcaaatggtcgcggatcccaggggtaacatgggaattctctgaactggggactttgattggtctgaaaatatgatcacataagacacgcgatgacatggctctgttaagctgtcccatatacctcgttccaagatgaacgagtgcatgcttggtgatgctcagcatgttcaggaggccgagacaatcggacttgactacattgatgttgatgctctcaagagattgaacaagaacaagaagcttcgtaagaggcttgacaagaattaccatgctttcttagcctcagatgccatcatcaagcataatccccgagttcttggtcctggtctgaacaaggc

SEQ ID NO: 25308 - DNA, 232 bp, Zea mays
  Clone ID: LIB3153-008-Q1-K1-F2
cgggtcgcgatgtaacgctcaggagaagaaccagattgtgagcttgtgccaaatgtacatccagagaggaaccctcgttcagctcccattccaaactgggccatgctgtgcggcagtgagagagcttgagagggtacacaggggtatgcagatgaagtgcattgccgatctactaaacgcttgagacctgcggaaattccatcccacttagaacaagcattttgacattttc

SEQ ID NO: 25309 - DNA, 261 bp, Zea mays
  Clone ID: LIB3153-008-Q1-K1-F3
ctacgcgctgcccttcgacgacggcgggtggtgcaacccgccccgcccccactttgacctcgccatgcccatgttccttcacatcgccgagtaccgcgccggcatcgttcccgtcacctaccggcgggtgccgtgccgcaagtccggcggcgtgcggttcaccatcaacggctttcggtacttcaacctggtgctgatcacgaacgtggccggcgcgggggacgtggtgcgcgcgagcgttaaagcgtctggcaccgggga

SEQ ID NO: 25310 - DNA, 131 bp, Zea mays
  Clone ID: LIB3153-008-Q1-K1-F4
ccgtcatcgatcttgtttcaaatgcatccattcttgtttcctccggcccggaagattttaaccccatgggccaaaatcaaaatcgggatcaatgggttcggcaggatcggaaggcttgtggccaagggggc

SEQ ID NO: 25311 - DNA, 199 bp, Zea mays
  Clone ID: LIB3153-008-Q1-K1-F5
gtcaaatgaaggcctgcggcagcttagacatggatctggtccatggagtgagccacggccctttggcaataggggccatgaagtgactgatgcagactctgcaaacacgctgcgaaggcggcctagaccatctggtgccaatatacacactctggggagcgaggatcatggtccgtctgatgaaagatatgttttctgg

SEQ ID NO: 25312 - DNA, 66 bp, Zea mays
  Clone ID: LIB3153-008-Q1-K1-F6
tgcatacgatgccaccttacgtactagagcgtgagacgtcgttcttgatgaatcaagcttacttac

SEQ ID NO: 25313 - DNA, 314 bp, Zea mays
  unsure at all n locations
  Clone ID: LIB3153-008-Q1-K1-F7
agcagacttatatgcagccaactgttgtcaacattcatttcaggagatagaaaaagtataacggttgccttaattgtatttgtgtcattagtgaacttgcaacattgctggtggcaaaggtttggccctatttgctctaataaatattcttgaacaagaaccatttgctggcggtgaggatggcttggttgatttctttttccaaaccaaagaccaaatggcaatgggcttattaattcatttatggagggggtttattggcttattcagtattttttcngaaaaaaaaaatgccagggaaagaaaaggaaaaa

SEQ ID NO: 25314 - DNA, 204 bp, Zea mays
  Clone ID: LIB3153-008-Q1-K1-F8
agcagacttatatgcagacaacatgcagtcaacatccatttcaggagatagaaaaggtagtagcgggtgccttacttagatttgcgtcattagtgaacttgcgacattgctgctggcaaacatttggccatatctgctctactatatatacctcaacaacatccattgcctgttgatgaggatggctacattgactacattttc

SEQ ID NO: 25315 - DNA, 132 bp, Zea mays
  Clone ID: LIB3153-008-Q1-K1-G1
gtcgtgttttaccgagctgttgccgagggttgacatggtattgttatggtttttgtttagatgaaagtattgaaatgaccacgctttataatccgacaatgatagaagagacgtttaggggggtctgtttac

SEQ ID NO: 25316 - DNA, 57 bp, Zea mays
  Clone ID: LIB3153-008-Q1-K1-G10
gagagatttaagcacctcaccacacctttgttctttgttggatggagagttttaagc

SEQ ID NO: 25317 - DNA, 214 bp, Zea mays
  Clone ID: LIB3153-008-Q1-K1-G11
ggagtctgcaaggtcaagacaatagcaaacggagagattcgctaggcacatctccgaactgcagccagctgacccaatctgtgaagtgctaaattttagcaccatgaacctaaacaagcctaaagccttttatgtttgaaaagtcgtgtacaagacaaactctccgtgaagagactccaaaaataccgatattaattggggttatacatgccct

SEQ ID NO: 25318 - DNA, 75 bp, Zea mays
  Clone ID: LIB3153-008-Q1-K1-G12
atatgccggttcacgctgctggaacctgcgtcccactaatcgctgcaccatcccttcgcagtggctataacgaaa

SEQ ID NO: 25319 - DNA, 335 bp, Zea mays
  Clone ID: LIB3153-008-Q1-K1-G2
cccgatccgactccactcctcgcgccgatgccgcatctcctctacaggtaagaaggagagaaagagggcgaaatggtgaagcacaacaacgtcattcccaacgggcacttcaagaagcactggcagaactatgtcaagacatggttcaaccagcccgcccgcaagcagaggcgccgcatcgcacgtcaaaagaaggctgtgaagatattcccacgaccaactgctggccctcttcgtcccattgttcaatgccagactctcaagtacaacatgaagtcaagggctgggagaggctttacccttgaggagttgaaggctgcgggcattccaaaaag

SEQ ID NO: 25320 - DNA, 145 bp, Zea mays
  unsure at all n locations
  Clone ID: LIB3153-008-Q1-K1-G3
atcagatttgtgcttgaaactcctccttcttcaccacctngccttatcttnttttgtcttgcgtcgcagcatggtgaggaaccccctaaaagccaagccgacgcttgtgctcataagccttcttctaatggcggacctggcaacc

SEQ ID NO: 25321 - DNA, 197 bp, Zea mays
  unsure at all n locations
  Clone ID: LIB3153-008-Q1-K1-G4
ggaaataccagtcgtnctgtactactgtagatgtgatctctttgatgactccttgaacattattgtgaaaaggtcaatgtaaaatgtgggctgttcaaaattttgtttgaaaccgatatataagttatgagtctagtatgtcatggttcacccaattttttgggagggactattgctagcttgatctggctacgatg

SEQ ID NO: 25322 - DNA, 234 bp, Zea mays
  Clone ID: LIB3153-008-Q1-K1-G8
gacattccctcttcaagaggggatcatcagattgggcttattattccttattactccaggcgaggatcggagttgctctgaattgactgaaccatggcggcgacaatggcagtgacgactatggtgacgaagagcaaggagagctggtcgtcattgcaagtgccggcggtggcattcccttggaagccacgaggtggcaagaccggcggactggagtttcctcgccgggcgatg

SEQ ID NO: 25323 - DNA, 58 bp, Zea mays
  Clone ID: LIB3153-008-Q1-K1-H10
ctgccgtaccggtactgaattggtcgacccacgcatgcggtgagtaccgatcgagaca

SEQ ID NO: 25324 - DNA, 393 bp, Zea mays
  Clone ID: LIB3153-008-Q1-K1-H12
cggccgggcggaattgtgggccaccgcacgcgtgcggttccgtcacctggcccagcgcgccgtcgccggagtcaccatgggtcgcgttcgcagcaagacacgtaagaaaacctccaggcatgtgatctaaaagtacttcttccgcatgaaccttgaatttcaaaacaaccaagaagggcttcgagagggcttgatttttgccttcgaacggcttcggcaccaggggggttggtttaagtcccaacttgttgcgccgaatcaaggggggccaattcgggggattttgcgtcaagctgcaggaggaggagcgcgagcgcctcatggacttcgtgccggagaagtccgcgctcgaggtcgaagagatccgcgtcgacaaggagaccatggagatgc

SEQ ID NO: 25325 - DNA, 237 bp, Zea mays
  Clone ID: LIB3153-008-Q1-K1-H2
cggacgcgtgggggagacaagaagggcaagggaacatctctcttctaagtttctcatcacccatctcgatgttggatcgaagctgtgggtctactactgttctaaaaactcgtcaaatttcaatgttactagtagttctgaaagcaggtcatgctgtgtatcaaattccaatgcctgacattttgacttgagtggggttgtcttttggcttaatgaagttttgcaccctggatcttc

SEQ ID NO: 25326 - DNA, 202 bp, Zea mays
  Clone ID: LIB3153-008-Q1-K1-H3
ctcgtagagagaaagaaaaatatcccccaaccctaacttccggttttggaggggaaaccctggggttttttttgacatgaccgtgggcggggccccggcgggccggatcgtgatggagctgtacgccaacaaggtgcccaaaaccggggaaaacttccgcgccctttgcacgggcaaaaagggcgtgggcaagtccgggaag

SEQ ID NO: 25327 - DNA, 215 bp, Zea mays
  Clone ID: LIB3153-008-Q1-K1-H6
gccgccgctccgcctcagcgcatcgcccgccgcgacctcatcgatcaccttcagctttcaatcatggcggacgtcgatgtcaaaccggagggtgcccgcggagcttccaagaagaagaacgtccgcaggtacagctaccgcggcgtcgacctagatgcgcttctcgacatgtgcacggacgaccttgtccagcttttccccgcgcgcgccaggag

SEQ ID NO: 25328 - DNA, 340 bp, Zea mays
  Clone ID: LIB3153-008-Q1-K1-H7
gaaagctttaaattttcctgcaaatgttttgagaattggttgttgggagtacatttctcactactaaggtgatttggtcgcaaagtgctactttgcaaagcataagcttgtttgggaggtcctacataatggtctcaagagtaagatagaaattcagcgctcggacattattgctttgaaggcaacctgcccagagaatgaacacgaaggggtcttagatctagtgttggctcgaccgccacttttatgtaaagaaactgatacttagccaaggaaacatacactatggcaggctgcataagatttactgatggacaggcaagtttcaaaggggacacat

SEQ ID NO: 25329 - DNA, 80 bp, Zea mays
  unsure at all n locations
  Clone ID: LIB3153-008-Q1-K1-H8
cgaggagagaggaaagagaaaaagaaaggaaaggacgaangagcggcggcnaggtctatggcgtcgacggcggngtacct

SEQ ID NO: 25330 - DNA, 87 bp, Zea mays
  Clone ID: LIB3153-008-Q1-K1-H9
aaccagtccatctttctcattatagtcgccgccaaggtgattccaccggtcattgtggctccgatgccagcaccttttgcatgggcg

SEQ ID NO: 25331 - DNA, 408 bp, Zea mays
  Clone ID: LIB3153-009-Q1-K1-A10
accgcggcgagttcaaatctcacaatcttcttgtagcacaccactgtcttcgtccaactggggggcgatgtctgggcgcggcaagggcggcaaggggctgggcaagggcggcgcgaaacgccaccgtaaggttctccgcgacaacatccagggtatcacgaagccggcaatccggaggctggcgaggaagggcggcgtgaagcgtatctccgggcttatctacgaggaaacccgcggcgtgctcaagatcttcctcgagaatgtcatccgcgacgcggtcacctacaccgagcacgctcgccgcaagaccgtcaccgccatggatgttgcgtacaccctcaagcgccagggccgcactctgtacgggttcggaggttgagcgcatattttcctcgtctgcagcagctg

SEQ ID NO: 25332 - DNA, 202 bp, Zea mays
  unsure at all n locations
  Clone ID: LIB3153-009-Q1-K1-A11
acccgagcggcaccatgagggggttgctcgttgccctcgctctcctggctctcgctgcgagggccacctccactcatacaagcagtggctgcggctgccatccacccccgccggttcatataacgccgccggtgcatctgacacctccggttcacctgccacctccggtgcatntcccaccgccggtccacctgacgtcgcc

SEQ ID NO: 25333 - DNA, 325 bp, Zea mays
  Clone ID: LIB3153-009-Q1-K1-A12
gcacgcactgaagcacccggcgaccgccgtcaacggcctcctcgtcggtcgcctcgtcgagccttcgtcctcaccggccgtcgtctcggtcatcgacgccgtgccgctttctcaccacccgcaccatctgccgctgctccccacgctcgagctcgcgctcaccctcgtcgaggaccacttcgcaacccatggcgaaggcctcgccgtcgtcgggtactatcacgccaacccgcgctgcgacgacaccgaactcccgccagtcgccaagcgcgtcggagaccacatcttccgatacttcccccgctccgcggtgttgttggtcgat

SEQ ID NO: 25334 - DNA, 358 bp, Zea mays
  Clone ID: LIB3153-009-Q1-K1-A3
cttgaagatgaacaaccatatttccattctagtgattctcatcgtcgatgtgtctgttgtcctcctgctcaattcccatgtagggttatgcagctgctacaaccgcatctttagttttggtgacgataccatggacactggaaatttcattcacttgattgggaaggccccatctaagtacaaggaagccccctatggcaagacattttttagacatgcaactggccgcatttctgatggtcgtgtcctcattgatttctatggtaaacctcccaaggatggaaatatcatttcagatgtcatcgcagacataagccatttcatcgaggagcttattgtcgttaatggggcgaaagca

SEQ ID NO: 25335 - DNA, 182 bp, Zea mays
  Clone ID: LIB3153-009-Q1-K1-A4
gcaggggcaagatcccatttaacaaagaatgcatgtgtacatttgaatgcccatgagtcaaaagccactatatctgacgggcgcaacttgttatatatctagggatgggatgtcgtttggcatgtactccattttgaaagtgtccaagtgagactttatacatatatgcagttgagagatgg

SEQ ID NO: 25336 - DNA, 348 bp, Zea mays
  Clone ID: LIB3153-009-Q1-K1-A5
caatccctcacagcaaccatggctggcgcgcaggagtccctctctctggtgggcacgatgcgcggccacaacggcgaggtgacggcgatcgcgaccccgatcgacaactcgccgttcatcgtctcctcctcccgcgacaagtccctgctggtgtgggacctgaccaacccggtccactccaccccggaatccggcgccaccgccgactacggcgtccccttccgccgccttaccggccactcccacttcgtccaggacgtcgtcctcagttccgacggccagttcggcctttccggcttctgggatggagagctccggcttttggaacttttcaacgggcttaacaac

SEQ ID NO: 25337 - DNA, 404 bp, Zea mays
  Clone ID: LIB3153-009-Q1-K1-A6
ggctcttcggcgtctagctcgtcaacgcgcgcgtccgccgtcggctcctccgacgggcgtcccaccgcaggggaatacagatcgtcgatccgctgggcttgcaaacatgtatatccgagtgaagcgcaacaagagtacctacttcattcaatgtgaaccaacagagacagctttgagcatcaaacagaagttgcactcgctgatagatcaacctcctagtagtcagcagttggtcttgtggcctagcagtgatgtgcttgaagactcaaagactttggcagatcaaaaggtggataacgattccattgttgcattggcactaagaaaagatgacggtgagtttgaggaagttttcatcgctaggccgggaggattcatgtcatcattatgataaagattagtca

SEQ ID NO: 25338 - DNA, 288 bp, Zea mays
  Clone ID: LIB3153-009-Q1-K1-A7
tctcggcctcccaccgccaccggcggcgacgagtaactcgcccgctgaccccagcaggcagccatgggagggcacggcgggttgaacatcctgccgcagaagcggtggaacgtctataacttcgacaaccgtgagaaggtgcaaaaagacgaggccgccgccgcccgggaggagcagctccagcgcgaggcggaacgccgccgcgagtcggatctacgcctcgctgcactacgccgtaaccgcggcctggtccaggcggagacgccccccgcttcttcatcttacccc

SEQ ID NO: 25339 - DNA, 380 bp, Zea mays
  Clone ID: LIB3153-009-Q1-K1-A8
ccgtcatcgatctcgtttcaaatccatccatcctcgtttcctccgtcccgcagcatctcaaccccatggccaagatcaagatcgggatcaatgggttcggcaggatcggaaggctggtggccagggtggccctgcagagtgacgatgtcgagctcgtcgccgtgaacgaccccttcatcagcaccgactacatgacctacatgttcaagtacgacactgtgcacggacagtggaagcaccatgaagtcaaggtgaaggactccaaaacccttctctttggtgagaaagaggttgctgtgtttggctgcaggaaccctgaggagatcccgtggggttcgggtggtgctgaatatgttgttgagtctactggtgttttcact

SEQ ID NO: 25340 - DNA, 368 bp, Zea mays
  Clone ID: LIB3153-009-Q1-K1-A9
tcgcgtgttggcgcccttacccaaattccccacctactcgccgccggcgccgtctcagcctcatgcttctccgctagccatggccgccgcgggtcccgggctctactccgagatcgggaagaaggccagagatctcctatataaggactaccacacggaccagaagttcacgctcaccacctacgccgccaacggagctgccattactgctgcaagcacgaggaaagatgaagctatctttaatgaaatccagagccagctgaagcacaacaatgtgactggggatgtgaaagcaacttcagaatcaaatgtgattactacaatcacagttcatgagctgggcacaccaggcttgaaagcaattttat

SEQ ID NO: 25341 - DNA, 418 bp, Zea mays
  Clone ID: LIB3153-009-Q1-K1-B1
gtcgcagagttggtcgagaccgtggagtatttcctggctgaggcaatccaatcatatcgagcagagagcgacactgagctcaacctttcagctggtgactacatagtggtccgaaaggtgtcgaacaatggatgggccgaaggtgaatgcagggggagagctggctggttctcctacgattacatcgagaaacgagagcgtgtgcttgcaagtaaagtcgcgcaagttttctaaaactaaaacttttgccgagacatccatatattcccggggatgtgcaatgtgtattatgcttgatcgtcagaagagaagatctgtaattttgctggaagctgcctgttggatggcttgttcctgcctggccgtctgcattgttcaaattcatgtggcaggaactgaacattattaatgcttaatc

SEQ ID NO: 25342 - DNA, 434 bp, Zea mays
  unsure at all n locations
  Clone ID: LIB3153-009-Q1-K1-B10
cgccacgttcgcaattacagagatctagagagagagatagagggcagatctacgctagagcgacagagccacaaccaaccgagagggacagtccagtatggtggtggcgctcgggcccggccggttctacggcagcggcctgccgaggccgcgcttcttcccgggcgaccgcgtggacccgccggcgtccgtcaccgacccgctgctcgagtgggcgcgcgaagcgcactggtccatgggcggcatcagcgtgaagcgcctccgcctgcatggccgcatcgagggttccgtcgacaagctccgccgncgcgcgcaccgtgacgccagggtcaaggccaaggccaatgcccgcgccgcttgccacatgccggcttcgctcgccgcgctggagtccgacgacgacgcctncagcggcgacttcgaggacgagcacg

SEQ ID NO: 25343 - DNA, 82 bp, Zea mays
  Clone ID: LIB3153-009-Q1-K1-B12
aaaaaaaaaaaaaaaaaaaaaaaaaaaaaaaaaaaaaaaaaaaaaaaaaaaaaaaaaaaaaggggaaaaaaaaaaaaaagag

SEQ ID NO: 25344 - DNA, 425 bp, Zea mays
  Clone ID: LIB3153-009-Q1-K1-B4
caggactgtcatctctcagttgcaattgcaaaaaaaatacagagagagagagagagagagatccctaccctgcaaagagagactgacaatggacgcaaaaccggcgagtgtctgcatcttcctgctgcttcttctggcgcagaatccttcttcctcctctgcagacgaccagaagtgcttttacaccactgaccgggtggcgacctggtgcgtggactgggcgtgcaagttcggctgcctgatcgacgccaagcagtaccataccaagtacaagaacagctggtgcgaaggctccaggagaggcatctgtcactgccacttctgcgactgattctcacgaacagtcatctcgaaataaacaaatcatgtaataaaaagccccgtggtcgtacgatataattttaaaaaaacaccgattattgggg

SEQ ID NO: 25345 - DNA, 388 bp, Zea mays
  Clone ID: LIB3153-009-Q1-K1-B5
cacacacacaaccagatctcccccaaatccacccgtcggcacctccgcttcaagatgcagaggtgtgtgaaaaccctgaccggcaagactatcaccctcgaggtggagtcgtctgacaccattgacaacgttaaggccaagatccaggacaaggagggcatccccccagaccagcagcggctcatcttcgctggcaaacagcttgaggacgggcgcacgcttgctgactacaacatccagaaggagagcaccctccaccttgtgctccgcctcaggggaggcatgcagatctttgtgaaaaccctgaccggcaagactatcaccctcgaggtggagtcctctgacaccattgacaacgtcaaggccaagatccaggacaaggagggca

SEQ ID NO: 25346 - DNA, 404 bp, Zea mays
  Clone ID: LIB3153-009-Q1-K1-B6
cgcagacccctccccttcgcttccttccctagcgccgacgcccaccagacgagatggccccgaagaaggacaaggccccgccgccgtcgtcgaagccggccaagtccggtggtggcaagcaaaagaagaagaagtggagcaagggaaagctaaaggagaaggtaaacaacgcggtgctgttcgaccaggctacctacgacaagctgctctcggaggtgcccaagtacaagcaaatcaccccttccatcctctccgagcgtctgaggatcaacggctcccttgctcggagggccatcaaggacttgatggcgcgtggcctcattcggatggtctcggtccacttcagccagcagatctacaccaggggcaaccatacattaaggttggggaagaggtctaaaatg

SEQ ID NO: 25347 - DNA, 341 bp, Zea mays
  Clone ID: LIB3153-009-Q1-K1-B7
gggatcgagactgaacagcagtccgagacgccatgaacgtggaggaggaggtcgggaggctcaaggaggagatccataggctcggccagcagcagcccgatggctcttacaaggtcaagtttggcgtcctcttcaacgacgaccggtgtgcaaatatctttgaagcactagttggcaccttgagggccgccaagaagaggaagatcttgacctacgaaggcgagctgcttctgcaaggtgtccatgacaacgtggagataaccctgttgcccccacctgcagttgctgccgcttgaagcgaagagcaccaccaagttctcgattccatacaactcgtatgc

SEQ ID NO: 25348 - DNA, 344 bp, Zea mays
  Clone ID: LIB3153-009-Q1-K1-B8
tcgagcacgcgtcctgagggccgcgccgtccagtcctcgccaattccattccggatgcagataggggcgccagcggcaggaatgccctcctactcctccctggtgctggacaccggctccggtgccggatactaagacgccgccgttaaggagactgaactggtgaacacggaagaaggataccattatactaagttaaagatagatcattggagcaatgccgaccgataagatcgagactgggcaccacgatgtggtgcatgatgtcagcgtggattactataggaagcgcctaactacaaacgcctatgatcatacaataaagatcattggcgtccggggaa

SEQ ID NO: 25349 - DNA, 403 bp, Zea mays
  Clone ID: LIB3153-009-Q1-K1-C12
ctcgtcgagaggaagcccaatcccgaaaccgtcgccgtattccaatggcgcccaaggccgagaagaagcccgccgccaagaagcctgcggaggaggagccggcggcggagaaagccacggcggggaagaagcccaaggccgagaagcggctccccgcgggcaagtccgcaggcaaggagggtggcgagaagaaggggaagaagaaggcaaagaagtcggtggagacgtacaagatctacatctttaaggtgctgaagcaggtgcacccggacattggcatctcgtccaaggccatgtccatcatgaactccttcatcaacgacatcttcgagaagctggcggcggatgcggccaagctggcgcggtacaacaagaagcctaccattacgtcccgcgagatcca

SEQ ID NO: 25350 - DNA, 108 bp, Zea mays
  unsure at all n locations
  Clone ID: LIB3153-009-Q1-K1-C2
ctcgcgccgccgccgncgncgncgnaacatcaagccgccgccccgccgtcgcctgaggtagacaccaatccgccggcatggggcgtatgcacagccccgggaagggta

SEQ ID NO: 25351 - DNA, 307 bp, Zea mays
  Clone ID: LIB3153-009-Q1-K1-C4
ctcctccccaaatccacgctgccaccaactcgccgtcctccgcgccaggcaccaaagctccgatggcccgcactaaacagacggcgcgcaagtcgacgggcggcaaggcgccccgcaagcagctggcgaccaaggcggcgcgcaagtctgcgccggccaccggcggcgtgaagaagccccaccgcttccgccccggcaccgtcgcgctccgggagatccgcaagtaccagaagagcacggagctgctcatccgcaagttgcccttccagcgcctcgtccgtgagatcgcgcaggacttcaagaccga

SEQ ID NO: 25352 - DNA, 376 bp, Zea mays
  Clone ID: LIB3153-009-Q1-K1-C5
cccaaaccctacccatacccccgccgccgccgccgccatgccgcccaagctcgacccgtcgcaggtggtggaggtcttcgtccgggtgacgggcggcgaggtcggcgcggcgtcgtccctggcgcccaagatcggcccgctcgggctctccccgaagaagatcggcgaggacatcgccaaggagacggccaaggactggaagggcctgcgcgtcaccgtcaagctcaccgtccagaaccgccaggccaaggtctccgtcgtcccctccgccgccgcgctcgtcatcaaggcgctcaaggagcccgagagggaccggaagaaggtcaagaacatcaagcacagcggcaacatcggcctcgacgacgtcgtcgagatc

SEQ ID NO: 25353 - DNA, 420 bp, Zea mays
  unsure at all n locations
  Clone ID: LIB3153-009-Q1-K1-C6
aatggcaattatgactctgctcctgtgatcgttagcttcttctcaaagcacaaggactccaaggcgcctagtgtatatgaagataaagagctgcttgagaattttggttgcaagaagggtaggaaaaagcccgtcagaagcttgggcctagctccaaagccagaagccagtgatgataaggatcagttcatgactgtggatggccagaggggccgtaggaagtctgctgggagcttgtactcagctagaaaggccgaagattcatattggtgtgatattatcatcagcgatttcgacgacggtgatagtgactatgaaggttgcaagaggaagcggtcctctcagaacactaacaggagcgctaatagaagatgaagcangaggaaccacttcagggagcccatcagatatggaaaatgg

SEQ ID NO: 25354 - DNA, 371 bp, Zea mays
  Clone ID: LIB3153-009-Q1-K1-C7
acgacgaaggtcgcgctgctcgatacgttcacgtggcaggacggcatcgcggccaactacaaggcgaacggcttcacggtgtcgaacaccgacaccgcatgcaacctgaaggcaatggtccaggccgccacgcagtacggcgtcgcgaacgcgacggcattcggctcgtcgctgttctgctcgcagcagacctacacggtcgcgaacgcggaccagacctacatgttcgccgacacggtccacccgacgacgcacctgcacgcactgttcgcgcaattcgtcgaacagcagatcgcgaagtcgggcgtcggcaagtaagccacgcctgaacgggccgccgccggcacgcgcaacgtgcgggcggcgcgatt

SEQ ID NO: 25355 - DNA, 291 bp, Zea mays
  Clone ID: LIB3153-009-Q1-K1-C8
acgctctctatggatcgattggctcacccactggcgagggactgacggtctcgaaacgtataggcgcgtgattctgcaccacgacatactgtaccgcgtcatcatgacctccacggaaagcgaccaagtccacagctgcggtggcattgccggccgtcaccctcctgtcgatcaacgagaagccgataccgctcttcgacatcatcacggcgtccttcaccatgctgcacaacgccctctggcacaccgacctgtacttcatggaggtcaagttgcacaccttcgagaccg

SEQ ID NO: 25356 - DNA, 223 bp, Zea mays
  Clone ID: LIB3153-009-Q1-K1-C9
caccgcccggtgtcagatctcgccgccgcgatgggctccgcccactcgtccgtctccagggggggcggcgaagacgaagaagaccaccaggatccgtccgcggcagccgtttcctccgcgggcgcacaggcgccaccgcccgctctgtcgccgtcgccggtccgcgtgcccccggcctccgcgtccaaagtgctggatcaggagcccgaggtgctgacgagcc

SEQ ID NO: 25357 - DNA, 252 bp, Zea mays
  Clone ID: LIB3153-009-Q1-K1-D1
gccgccgtagggagcaggagtgagggagcgcgatggcggagaagaagcagcgcccaagagggtccaggaaggacgaggtggttacccgcgagtacaccatcaacctccacaagcgcctccacggatgcaccttcaagaagaaagcccccaatgctatcaaggaaatcaggaagtttgcacagaaaggaatgggcaccactgacatcaagattgatgtgaaactcaacaagcacatttggagcagtggtattc

SEQ ID NO: 25358 - DNA, 75 bp, Zea mays
  Clone ID: LIB3153-009-Q1-K1-D10
cgcgtcctcactctcctagagacagccgcgctgctgatgtccacaaagagggcggaggagctggcgatggccttc

SEQ ID NO: 25359 - DNA, 385 bp, Zea mays
  Clone ID: LIB3153-009-Q1-K1-D12
cggacgcgtggggctggcttctcctccccctcttaccaagtcctcttcgggttagggggacttaaggttttgtggaggggcgatggcggcggctgatgtggagtaccgttgcttcgtcggcgggcttgcctgggccaccagcaacgagtcgctggagaatgccttcgcctcctacggcgagatcctcgactccaaggtcatcaccgaccgggagacggggaggtctcgcggcttcagcttcgttaccttctcctccgagaactccatgctcgacgctatcgagaacatgaacggcaaggagctcgacggccgtaacatcaccgttaaccaggcccagtcccgtggcggtggcggtggcggcggtggctacagcggccgtcgcggc

SEQ ID NO: 25360 - DNA, 271 bp, Zea mays
  Clone ID: LIB3153-009-Q1-K1-D2
cacgggctcaaggctctggctcgcgcacccctgtccctgttcgatccgcaccgcacacctagacgcacctccaactgcagcgcgccatacttgaccgcatcagcatggcatccacgggaacgacggcggcggcggcggcggtggcggtgccggaggtgaccctgcggtcgggcaacgggaagccgatgccgatggtgggcatgggcacggcgtcgttccccgtggtgcacgaggccgtcagggacgccgtgctggcggccatcgaggtggg

SEQ ID NO: 25361 - DNA, 304 bp, Zea mays
  Clone ID: LIB3153-009-Q1-K1-D4
gcgaggcaaaagcattgcgaccacagacagcgcgcgcttcaaggcctttttttttgagataacaaggaggagaggaggagatggcggtcacgatcacgtgggtgaaggcgaggcagatcttcgacagccgcggcaaccccaccgtcgaggtggacgtgggccttagcgacggcagctacgcgaggggggccgtacccagcggcgcatccactggaatatatgaagccttggagttgagggatggaggatctgattatcttggcaagggtgttcttaaggcttgcagcaatgtaaataacattat

SEQ ID NO: 25362 - DNA, 297 bp, Zea mays
  Clone ID: LIB3153-009-Q1-K1-D5
gcctgatcgctccagcgccctcgccgtcggcagctcggccgccgtactcccgctaccgagctaggaggcatcaccttcgccggtccaacatgggtaagacacgtggtatgggagctgggcgcaagctcaagacccacagaaggaaccagaggtgggctgacaaagcctacaagaagagccatctcggcaacgagtggaagaaaccctttgctgggtcatctcacgcaaagggaatcgtccttgagaagatcggcattgaggctaagcagcctaactctgctatccgtaagtgcgctc

SEQ ID NO: 25363 - DNA, 295 bp, Zea mays
  Clone ID: LIB3153-009-Q1-K1-D7
aaaatctgtccatcccggcgacgactggcgacagccgctgccggcctactccaggtccccaggtctacgtcggacccttcgccgcggcgagcaccaccagatggcgagcacggggcggtcgatgctgctgtcactgctcctcttcgcagtgacgctgtcgctgctggagatgtacagggccaagttcgcctcgtcggagctcatgaccatcgccggtggattcgtctgctccctcctattcctgctactcctcacctttattggaaactatcaagaagctagtggagatagaact

SEQ ID NO: 25364 - DNA, 235 bp, Zea mays
  Clone ID: LIB3153-009-Q1-K1-D9
ctcctcctcgtcggcgaatagatggctgtgccgctgcttactgtatcaagatcatgcagaaggggatcatgcagttcaagaggccccacctctactcttacaaatgccttaagccaacctatctcacgccaaagggaattgactcccttgtctcgattaatttcaaagaattcacaccgatgcccaacattatttatggaaatcacaaggttaccacgcactatattcccaacaa

SEQ ID NO: 25365 - DNA, 349 bp, Zea mays
  Clone ID: LIB3153-009-Q1-K1-E1
aacaaattcgtaggatgtgggcacgggaccaagatgaacaaggcgttcacgctcgagaagcccatggacctgaagaagggcgtgaaccacgtcgccgtcttggcatcgtcgatgggaatgacggacagtggcgcttacatggagcaccgtctggccggcgtggacagggtgcagatcacgggcctgaacgcgggcacgctggacctgacgaataacggctggggccacatcgtcggcctcgtcggcgagaagaagcagatctacaccgacaagggcatgggcagcgtcacctggaagccggccgtgaacgacaggccgctcacctggtacaagaggcacttcgacatgc

SEQ ID NO: 25366 - DNA, 421 bp, Zea mays
  Clone ID: LIB3153-009-Q1-K1-E11
gcccagtcgtcctagccaacaaaattcaattgagggttcttcagttcagccatgaagcttgagatgacagcagcggccatggtcttgctcctgctgacctcgggcgccgaggccaaggtgtgctactcgcgtagcaggaccttcaaggggtggtgctaccacagcatcaactgcatcgccatctgcatcaccgagggcgacaccagcgggttctgccaggccggggcctgcatgtgcacttatgagtgtctcaatggtgtcgtcgccggtggcggcggacagcatccatcggttggctcatcgctgcgtggtggtgctgacgctaaagcagccgtcccatcaatgtagagcttctgattctgggccgggggatggcagatggcgcactactactctcctgtgcacatgccaactcaagatt

SEQ ID NO: 25367 - DNA, 260 bp, Zea mays
  Clone ID: LIB3153-009-Q1-K1-E12
gaattgtgtgctagtttgaatggctgctacaaagcttcaggccctttggaaccacccggcgggccccaaaaccattcatttctgggcgccaacattcaaatggggcatcagcattgccaacatagccgactttgctaaaccacctgaaaagatatcttaccctcagcaagttgctgttgcatgcactggactcatttggtcaaggtacagcttggttatcacaccgagaaactggaaccttttcagtgtaacgttgcaat

SEQ ID NO: 25368 - DNA, 285 bp, Zea mays
  Clone ID: LIB3153-009-Q1-K1-E3
tgaatccaccacaccagcaccacccagcaccgatggccggcgacgacggacgtgctccctccggcctccgcgtcgtgatgttccccttcccgttctggagccacattaaccagatgctccagctcgggaagctcctccgtgcgcggggcctgggcgtcaccatgctccacaccgacttcaacgcgcccgaccccgcactccacccggacatcaccttcgtgtccatccgcgagtccctccccgccgaggtcgtcgccaaccccgacatggtagagcagatgatgc

SEQ ID NO: 25369 - DNA, 343 bp, Zea mays
  Clone ID: LIB3153-009-Q1-K1-E4
ctggcttctcctccccctcttaccaagtcctcttcgggttagggttacttagggttttgtggaggggcgatggcggcggctgatgtggagtaccgttgcttcgtcggcgggcttgcctgggccaccagcaacgagtcgctggagaatgccttcgcctcctacggcgagatcctcgactccaaggtcatcaccgaccgggagacggggaggtctcgcggcttcggcttcgttaccttctcctccgagaactccatgctcgacgctatcgagaacatgaacggcaaggagctcgacggccgtaacatcaccgttaaccaggcccagtcccctggcggtggcggtg

SEQ ID NO: 25370 - DNA, 190 bp, Zea mays
  Clone ID: LIB3153-009-Q1-K1-E5
tttcaaggtgccctagaaatctgtctacgagatctctaagattatgagatgacatatgaccccctattgcttttgttcactttgctaaaactgaaagtccgagttcacatgagttgggcatcagttggtgtttatttcctgcttgttgggtcttgcgtctgaattgggaatcagtttgtgtttatttcct

SEQ ID NO: 25371 - DNA, 288 bp, Zea mays
  Clone ID: LIB3153-009-Q1-K1-E6
caccagcaccacccagcaccgatggccggcgacgacggacgtgctccctccggcctccgcgtcgtgatgttccccttcccgttctggagccacattaaccagatgctccagctcgggaagctcctccgtgcgcggggcctgggcgtcaccatgctccacaccgacttcaacgcgcccgaccccgcactccacccggacatcaccttcgtgtccatccgcgagtccctccccgccgaggtcgtcgccaaccccgacatggtagagcagatgatgcagctcaacgccgtc

SEQ ID NO: 25372 - DNA, 342 bp, Zea mays
  Clone ID: LIB3153-009-Q1-K1-E7
ggaatgcaggaagcacaccctgcacaaggttacccagtacaagaaaggtaaggatagcctttcagctcaagggaagcgacgttatgaccgcaaacagtctggatatggtggtcagacaaagcctgtttttcacaagaaggcaaaaacaacaaagaagattgtgctgaagctgcattgccagagctgtacgcactactctaaacacccgaacaagaggtgcaagcactttgagatcggtggtgtcaagaaaggcaagggaacctctctgttgtaagcgtatcataaacttgctcagggtcttaagtatctgtcagaaattaccattacaaacagcctgtgctt

SEQ ID NO: 25373 - DNA, 85 bp, Zea mays
  Clone ID: LIB3153-009-Q1-K1-E8
cccacgcgtccgctctgttgttaatttccgtgtaatttgctcctcccagatgggagaatcgaacgccgcttttttgttctatctg

SEQ ID NO: 25374 - DNA, 434 bp, Zea mays
  Clone ID: LIB3153-009-Q1-K1-E9
gcattacgtacgtaccacagaggtgccaggttcgatgtcaggtcgaggaacgggtaaggccacctgccaagaagccacaaggcgtcgattcacaagtcatcagcactaatgacatgaaaaatgcagcagctagttggcagtaaagtgcttcgtttacatgaggtttatcaaacaaaagctgcaaagagcctaccacatcggcgtagctgcgtggacgatccactggaagacgacgtatagcgcggtccagaggaagaagtaggcgacccggaaccacgggaacctctgcagacagcgaaaccatgaaaacattcatcagcttcctctgtctttttttttccctgatcaccaagttgagtatgcgctgctttaccaagctattcagggcggcctcgcccagcaggaagactgcgttcaccgaatgcatcccgatc

SEQ ID NO: 25375 - DNA, 434 bp, Zea mays
  unsure at all n locations
  Clone ID: LIB3153-009-Q1-K1-F1
gcaggcttcgccgctatcactccaaggggcgcgaccatggtggccacaaagaagacgaagaaatccacggacaacatcaataacaagctgcagcttgttatgaagagtggcaagtacactctcggctacaagaccgtcctcaggactctcaggaactctaagtcgaagctagtgatcatcgctaacaactgcccgccccttcgtaagtctgaaattgagtactatgctatgctggccaaggtcactgtccaccacttccatggaaacaatgttgaccttggaactgcctgtggtaaatactntcgggtctgctgcctcagcattatggatccctgtgattctgatatcatcaagactacaccgggtgagcagtaaaaaaaaaaccccttgccctgcataagggggacctaacggcattggtcctttggcctggt

SEQ ID NO: 25376 - DNA, 332 bp, Zea mays
  Clone ID: LIB3153-009-Q1-K1-F10
cgtgctctctcgcagccgtcttgcatttcctgactgactggttttggtaggagacacagaggtaaggtcaggaggaggacttggaggagctttaccattccaagtttccctctgtaaataggaagctcacatcgccttccgtatccctgcctcgtctcgtccggagatctggtagtaggtagtctttgtctgtaacgctgtgtcggcacctcgaggacgaagatccaggggagcggggtgtttgtgtttcttctccgtccagccatatggtatggatcctagtgggcggcggtgcttcttcttctcttctgtcgtagccaaaactaatcatc

SEQ ID NO: 25377 - DNA, 335 bp, Zea mays
  Clone ID: LIB3153-009-Q1-K1-F11
cccgcgctcccctccgtggcgtgcaacgcgttcctcggctcctgcaggcggcgacctcggaaaggcgggggcgtctcgtcgcgaggtcttgtctgtggattgaccaggcatttgaggccaggattttttggtgctctcattgttagctgactggtgagggtctggatctagcaatggcggaaaacacccacggtagtggtcgccacgtgcttggggacttgacaaatgttatttgcaagcgagcagccacatcagatctggagaagagtacaggtgggataaagatcagacggattgaaagactgggactaggaaagagtacgatgcaaatgcaa

SEQ ID NO: 25378 - DNA, 389 bp, Zea mays
  Clone ID: LIB3153-009-Q1-K1-F12
ctcatcctcagatccgtctcctttaccccactggctggcgagcagcaaactccaggtgcagagcggacaagttcctcacgagcgttgagcgtgcattcgggtcactgaagagaagattcaagattttagatgatgcatctcctttcttccattttccaacacaagtcgatattgttgttgcttgttgtatcattcataattgggtcatacaagatgggagtgatgagtttattatacaagattctaattggcctagtcacagccatgctacatctttagttggccaagcaagtgagcatgctgctatggttgctttgaggcaaggaattgcagaccagatgtggacagaccatcagaactacaatggaaactagtatcttgtgatattt

SEQ ID NO: 25379 - DNA, 327 bp, Zea mays
  unsure at all n locations
  Clone ID: LIB3153-009-Q1-K1-F2
tacacgaccgattactcgaaccacgactaagagcgctgctaactacctggttgctgacctggttgggaacgccagtccgtacgctgaccatttgactgacaatctggatgcaattgtctgggaagttgacaatgaaaagatcgaactactgatggaacaactgatcggccaagacatcaccgaggtcattgccgagctcatggacaagttcgcttaaaacccatgttgaggccgatgtggcggtggtgcggcagctgcacctgctgctggacgagctgcttgtggagctgatgctgcnaatgaagagaaggtggaagagaaggaaga

SEQ ID NO: 25380 - DNA, 252 bp, Zea mays
  Clone ID: LIB3153-009-Q1-K1-F3
tcttcttggatttttctttgcaccggttggcttttccccttccaaccaaagaccgattgcgcccaagggcgagaagaaacccgcggcgaagaaacccgtggagagaagagcccgcggcccagaagacacaccgccgggaagaaacccaaggcggagaaacgggttcccgctggcaagttctccggcaaggagggcggcgagggcaaacgtggcaagaaaaaaggcaagaagagcgtggagacatacaagatc

SEQ ID NO: 25381 - DNA, 363 bp, Zea mays
  Clone ID: LIB3153-009-Q1-K1-F4
gcaaccaccgcctccccgatctcgtcgagaggaagcccaatcccgaaaccgtcgccgtattccaatggcgcccaaggccgagaagaagcccgccgccaagaagcctgcggaggaggagccggcggcggagaaggccacggcggggaagaagcccaaggccgagaagcggctccccgcgggcaagtccgcaggcaaggagggtggcgagaagaaggggaagaagaaggcaaagaagtcggtggagacgtacaagatctacatctttaaggtgctgaagcaggtgcacccggacattggcatctcgtccaaggccatgtccatcatgaactccttcatcaacgacatcttcgagaagctggcggc

SEQ ID NO: 25382 - DNA, 263 bp, Zea mays
  Clone ID: LIB3153-009-Q1-K1-F5
ctccgtagtctgtaccccaagcaccggcgcggcggcggcggctaccatggcagtcgggaagaacaagaggatctccaagggaaagaagggtggtaagaaaaagaccgtcgatcccttctctaagaaggactggtatgacatcaaggccccatcggtcttcagtgtgcgcaacattgggaagactctcgtgtccaggacacagggtaccaggattgcctctgatggtctgaagcacagagtctttgaggtttgtctagctgatc

SEQ ID NO: 25383 - DNA, 422 bp, Zea mays
  Clone ID: LIB3153-009-Q1-K1-F6
cggcggccgtcgcatccgtcccaccggaatccacggcgattcccgtccgcctgctatcttgtaggactcacccttgccctcctcgtcgtctctgccgctgccaagtcctcccgccgccccatctccgacaacgagatccggcagaagaaggaggcctgctacaccgacgtcgagaacgggctgtggggatgggtgtgcaggtactcgccgacggagaaggagaactgcgtgttgcgctgcctctcgccggagtgctacgacctcatatacggcggggatccgcttgaggaaggggagttggactatgttcgaagccaggagtacaagtattgtatgcacaaatcatcccttggagaaagcttgcatggtgtgaaaggatccttcagctactcatgaaggactgggaagaaaagggtcttgta

SEQ ID NO: 25384 - DNA, 273 bp, Zea mays
  Clone ID: LIB3153-009-Q1-K1-F7
gcgatgcgcgggttctcttctcgcccgcccctgcatatgcgcctacaagtcctcggcctcggccgcggccggtgtggcggcgaaggcgagcggcttcctcgcgctggcgaccgcgatgaaggacggcagggcgtcgccggccatgacgaccacgaccttggggggctcccggtcgagcggcaccaggacccgcaccgacgccggcttctcgtcgccgccgttggccgacgacgacgacgaagaagccttgcggcgcgcgcacatgagcgcgag

SEQ ID NO: 25385 - DNA, 117 bp, Zea mays
  Clone ID: LIB3153-009-Q1-K1-F9
gtggaactatggatcagctcttgtgtgcacttgctgaaccagatacccagcagtaagctttggtttgttcgttttgagtggttggttaaccacatacttgttacagtcgattctgat

SEQ ID NO: 25386 - DNA, 255 bp, Zea mays
  Clone ID: LIB3153-009-Q1-K1-G1
cttcgttgttgagaggaggggagaggagaggagacccacatccacttgcctttctcctctctcctgtcgcagccccccttccaactcctcctggtccctggaaaaaaaggagaccttttggtgcaagattcgatctgctgtggctgcctcggccttgctgcgtgcgcggagatttggtttcttggctggcggctggcgcgcgcgggcagttggagctctttgattcaacaggttcagattgcagcggcgagcgac

SEQ ID NO: 25387 - DNA, 179 bp, Zea mays
  Clone ID: LIB3153-009-Q1-K1-G10
ggaaagacaaagaagaggcacaccgtctgcaagaagagaggcatctttttcatgacaggacggggaaaaagcttctagagatggagtctgccattgctagggcaaatgctcagttggagaaagcaaatacttctgctcgcaaacctgacgttgttaatgcgcgacttacgttacagatc

SEQ ID NO: 25388 - DNA, 337 bp, Zea mays
  Clone ID: LIB3153-009-Q1-K1-G11
cgcgtcacgggctgggacgcgaagcgcgcggcgtggctgcggacacggggcctggacggcgcggcggtcgcggggcgggtggtgatggtgaccgggtcgcagccggagccatgcaaggggccggggggcgaccacgcgctgctgcggttcctcaagaacaagctggactactgccgcctccacgggatcgagctcctgtacaacaccgcgctgctggagccgtccatggtggcgtactgggccaagatccccagcgtgcgcgccgcgatgctggcgcacccggacgccgagtgggtgtggtgggtggacgccgacgccgtgttcacggacatggact

SEQ ID NO: 25389 - DNA, 302 bp, Zea mays
  Clone ID: LIB3153-009-Q1-K1-G2
ggccgcccttttttttttttttttttttttttttttttttttttttacgatggcagcaaatttatttgaaattggtcatcaccatccttaaaacagttgagtcacatgccgcactaccacagttcgtgaacattacacacaatccctcgcctcacaaacagaagcatttatctttggcaatatgcggcggggagtcatggactgagaaacgtatcagcacaatatacttcacggcagaacctttcatgcttcagcagccttctgtgaagggctgtcttcacccttctgccccatctttgact

SEQ ID NO: 25390 - DNA, 339 bp, Zea mays
  Clone ID: LIB3153-009-Q1-K1-G3
caaacacttgcgccgccactgcctcacaggtaaggccgccatggtctccggttcgggcgtgtgcgcgaagcgcatcgtggtggacgcgcgccaccacatgctgggccgtctctcctcgatcatagccaaggagctgctcaatgggcagaaggtggtcgtcgtccgctgcgaggagatctgcatgtcgggcggcctcgtccgtcagaagatgaagtacctccgcttcctccgcaagcggatgaacaccaagccgtcccacgggcccatccacttccgcgcccccgccaagatcctgtggcgcaccatccgcgggatgattccgcacaagaccaaaagggg

SEQ ID NO: 25391 - DNA, 294 bp, Zea mays
  Clone ID: LIB3153-009-Q1-K1-G5
tcgccgtgatcgaacaagtgacaagccaggcaacgagactgttgattccacagaaggagatcctggtgataagaacaaaggggaggactctggtaaccaaattcatatgcctaagatcattaagatcattaagccagtgcgctattttgccacagttatggatggtgtgcagcaagttgcaataacattcaaggctctcaggtctgacggggaaatggtattcgtggacgataagcagttgaaagctaaggagcccctggtgcttattgattactatgagcaacaccttcgcta

SEQ ID NO: 25392 - DNA, 310 bp, Zea mays
  unsure at all n locations
  Clone ID: LIB3153-009-Q1-K1-G7
cttatccccacctccctcgcggatcactcgccgccgccgccggccgcagccatcgccgtgatgctgtccctgtcgagggcgatcgggaggcggctcttctcgtccgccgaggccgcgtcgacggctgcggtgaggacggcgcanaacccgctcgaggagttcttcgaggtcgagcggagcaccgaggagggcaagcctcctccccactacggtcgcagctggaaggcttctgaactgcgactaaaatcttgcgatgaccttcagaaattgtggtatgttcttctaaagggaaaagaacatgctaatgaca

SEQ ID NO: 25393 - DNA, 359 bp, Zea mays
  Clone ID: LIB3153-009-Q1-K1-H11
ggaaaccctagccgccatatctcacgatccactcgagcaccaagccgagggaaggtgaggagcgatggcgcgcggcgtggtgtcggcgaaaggcggcgcggtcgcgggcaataagaaggggtcggtttccttcacgatcgactgcaccaagccagtggaggacaagatcatggaggtcgcctcgctcgagaagttcctgcaggagcgcatcaaggtcgccggcggcaaggctggcaacctcggcgactccgtcaccatctctcgcgagaagaccaaggtcaccgtcacctttgacggacccttctccaaaaggtacctgaagtacttgaccaaaaaatacttgaagaagcacaacgtgc

SEQ ID NO: 25394 - DNA, 79 bp, Zea mays
  Clone ID: LIB3153-009-Q1-K1-H2
cggttaattttgcattttctttcagagttgtttgtgggttttgagttccatctcaagagagttgagtttatttatcttt

SEQ ID NO: 25395 - DNA, 332 bp, Zea mays
  unsure at all n locations
  Clone ID: LIB3153-009-Q1-K1-H3
attttcgtcacccctgacgctcgacgcctctcctcctctcctcccccacccgtccatcgccccctccctccggtctgcgctcccacagcctcacccctgcgcccccgccgattcgcgtcgccctttgttggaaggaacgatggagcagaccttcatcatgatcaagcccgacggcgtccagcggggcctgatcggggacatcatcagtcgcttcgagaagaaagggttctacctcaaggggatgaagttcatgaacgtggagaggtccttcgcgcagcagcactacgctgacctttccgacaagcctntctttcccggggtgggggagtaca

SEQ ID NO: 25396 - DNA, 205 bp, Zea mays
  Clone ID: LIB3153-009-Q1-K1-H4
ccgctttctgacgatggactacgatacgctagggtagggcgtctaccagctctcggtaatggcgggcttcatgatccataagtaccagggggtggggtgcgcactgccgacgaccagcgaccagcaccctaagatctaccgcttgaagctatgggccaactacgaagtatgagccaagagtatgtattggttcttcctgtggaaa

SEQ ID NO: 25397 - DNA, 409 bp, Zea mays
  Clone ID: LIB3153-009-Q1-K1-H5
atcgacacaaccaccaccacaacttcttgtcctgttggtgatacgagtgagctagctagccatggcggacgctaaccctaccctgatgctcctgaccatctttctcctggtgacaagcgccacagcaggttgtatcagaattaacctcagccacagcggcatgcggtgcacccctggcgacgcgtgcccggtgatatgcgccaaaatcaagggcatagacggcaagtgcgaggatggagcatgcatgtgcacgatctgcgaccctcttcgtaccacccaagagcagcaacggattaatctaatccgtcgctgaatctgtttcgtttcatcgcatgcatatgtatcatgcatgttcattgtaataataagagcacgtgaccctatctttggtgatatggatcactcaccc

SEQ ID NO: 25398 - DNA, 357 bp, Zea mays
  Clone ID: LIB3153-009-Q1-K1-H7
gctggcttctcctccccctcttaccaagtcctcttcgggttagggttacttagggttttgtggaggggcgatggcggcggctgatgtggagtaccgttgcttcgtcggcgggcttgcctgggccaccagcaacgagtcgctggagaatgccttcgcctcctacggcgagatcctcgactccaaggtcatcaccgaccgggagacggggaggtctcgcggcttcggcttcgttaccttctcctccgagaactccatgctcgacgctatcgagaacatgaacggcaaggagctcgacggccgtaacatcaccgttaaccaggcccagtcccgtggcggtggcggtggcggcggtggcta

SEQ ID NO: 25399 - DNA, 101 bp, Zea mays
  Clone ID: LIB3153-009-Q1-K1-H8
cacgacctggggggttcagatcggatcggaagcttccataagtgtccatcgggcttcgccgctcgccggtatggcgatccgcaaggggtctttctacgccg

SEQ ID NO: 25400 - DNA, 428 bp, Zea mays
  unsure at all n locations
  Clone ID: LIB3153-010-Q1-K1-A1
catcaatctctgatttgaggaaaaaaatccttatatggcgagaattacaatggaagcaagcgaggccgtcctgctcttgatggtgatcctaggaagtttgatgattcctgcatactctcggaacgttgttcgtttctgcaaatgcgagaaacgggcctgcaaaaagggagcaatatccgaaggtgtttgctactgctgtccaggcggcagttgttattcgacggtcctagattgttcaacagcttgccggtgcaacaagctttcacatgccctccatttcgaatagcaaggggattcatccctatgtatcccctcgtgataccttaatcaccaaatcaattctaaatgtaatagacagggaatcaatcctgtgatttattgcagagacaaaataaaaacggtggcgggtggtgatggttgatttttna

SEQ ID NO: 25401 - DNA, 433 bp, Zea mays
  Clone ID: LIB3153-010-Q1-K1-A10
tcgagccaacacacacataatactctccattccattccattccatctcaaaggatagaatagtgggcggtctctccaccaagcttttcgtggtcctcctcctgctcgtttgttacaccgggacgcaaggcgggccggtgactatggtgtcggcgaggaagtgcgagtcgcagagcttccgcttcaagggaccttgctcgaaggacgccaactgcgcaaacgtctgcctgaccgaatgtttcaccggcggcgtgtgcaagggcctacgccaccgctgcttctgcaccagggactgctagtactgcctcgcctcgtgtcctgcgtgtgcatatatagccgcagcggatcaataaaacatgcatgcatgcgttaccaaatatttggcagtaccagcaagttaatgaattaaaatattaaataatatgtcatggaac

SEQ ID NO: 25402 - DNA, 57 bp, Zea mays
  Clone ID: LIB3153-010-Q1-K1-A11
aaataaaataataataatacatctactaaaacttcaaaaaaaaataaaacgataaaa

SEQ ID NO: 25403 - DNA, 420 bp, Zea mays
  Clone ID: LIB3153-010-Q1-K1-A12
gccgcagcccgcagtcgcttgcgcgcagcagcacttcgcaccgccgccccatcccatcggcgccagtgtctgctcgatccgatggctcccacgaagaagtcgaagaagagcacagagagcatcaacaacaagctgcagctggtgatgaagagcggcaagtacaccctgggctacaagaccgtcctcaagacgctgcgcaactgcaagggaaagctgatcatcatcgcaaacaactgccctccacttaggaagtctgagattgagtactacgccatgctggccaaagttagcgtgcaccatttccacggaaacaatgttgatcttggcactggctgcggcaagtactacagggtgtgctgcctcagtatcatcgacccaggtgactcggacatcatcagtaccacccctggcacccagtga

SEQ ID NO: 25404 - DNA, 207 bp, Zea mays
  Clone ID: LIB3153-010-Q1-K1-A2
tgaacgaccccttcatgagcaccgactacatgacctacatgttcaagtacaacactgtgcacggacagtgtaagcaccatgaagtcaaagtgaaggactccaaaacccttctctttggtgagaaagaggttgctgtgtttggctgcacgaaccctgaggagatcccgaggtgttcgggtggtgctgaatatgtagcagagtctactg

SEQ ID NO: 25405 - DNA, 294 bp, Zea mays
  Clone ID: LIB3153-010-Q1-K1-A3
cgatgatgcgtggggcaatgttggcagggcgtggcttccctcccaacatgatgggtgatggctgtggttttggcggcggtttcggcatgcctgatccatttggcatgccacgcggcttcccaccattcgttggcccaaggttccctggtgactttgctagaggcccgatgccagggatgggtttccctggcagacctccgcagcctttccctctgggtcttgacatgatgatgggtcctggccgtggtccgctgatgggaggcatgggaatgggtgggcctggacggcctaatc

SEQ ID NO: 25406 - DNA, 217 bp, Zea mays
  Clone ID: LIB3153-010-Q1-K1-A4
gcgcgcttcaccttccccaccccgccgccgccatcgcacgcccgcatccgcatccgctatgggtgcgtacaagtacgtctcggagctatggcggaggaagcagtccgatgtgatgcggttcgtgcagcgcgtgcgctgctgggagtacaggcagcagccggccatcgtccgcctcacaaggcccactcgtcctgacaaggcgcgccgcctcggctac

SEQ ID NO: 25407 - DNA, 355 bp, Zea mays
  Clone ID: LIB3153-010-Q1-K1-A5
ggcaaagatgtggattccagaactgtcggcgaaaacaacagagggaaaagatctgctgccagaagtttggatgtcaacaattcagcaaagaaggctaacttgggtacttcatctggatcatcagcctatgaggaaatttctggcttttcacaacacacactgcagtcatttacagtggagagattgcgtgcacttctacgacaaagtggtcgatcgaccaaaggcaaaaaggatgaactgattgctcgcttacaggagtcgcagggttgacatgaatctggtacttgtttagtcaatcaaaccccttcaggcagggttacacgaccaaatgagtaccatgctgtacttgtcaatg

SEQ ID NO: 25408 - DNA, 323 bp, Zea mays
  Clone ID: LIB3153-010-Q1-K1-A6
aaggaccgcaaggcgctcctcgaccgcaaggcccggggccgcgccgccgacaaggctaagggcaagtttactgccgacgacgtcgccgccgctgctggtggcgccgccgccactggcgcgtctctccaggagatcgactaggcgcttcgcggggatctgatggtggtcctaccgcctattactccttatcgctctagtttttgctatcaatgattatgtgctaggagttttatgttacttataaactgctttgagcctcgatgggagttgaacttaatgtggagtgtatctgaaatatgaagaactcattatatggctaatat

SEQ ID NO: 25409 - DNA, 269 bp, Zea mays
  Clone ID: LIB3153-010-Q1-K1-A7
ggtgaagccgccgccgttgccatgtccatagccaccgactgagactgagatggggggtttggccaacacccacaagagctatgcgtacttcttgcatttgcaggtgaagttcatgagaacgcgcgctagcaactcagactacagggtcaggatgatgctgcttaaccaagacatatacaagtcccacacacccagattcagagttggtgtgcgattcaccgacatggacatgccagtactcattatttgtgttagtatagcaagggata

SEQ ID NO: 25410 - DNA, 343 bp, Zea mays
  Clone ID: LIB3153-010-Q1-K1-A8
cccgaatcccgctcctccgccgcctcgagtgcacccttcctcttggcgcgctccgatccaagagatggcggtgccgctgctgacaaagaagatcgtgaagaagcgggtcaagcagttcaagaggccccatctcgaccgctataagtgccttaagccaagctggcgcaagccaaagggtattgactcccgtgtcaagaagaagttcaagggatgcaccttgatgcccaacattggttaccgctctgacaaatcaaccaggcactaccttcccaataaggtcaagaagcttgtggtgcacaatgtctctgagctggagttgctcatgatgcacaacagaacctac

SEQ ID NO: 25411 - DNA, 289 bp, Zea mays
  Clone ID: LIB3153-010-Q1-K1-B1
cggacgcgtgggcggacgcgtgggcagaagcggatggctggagggaccaaacaaggtgtacatcccgttcctggcctgcggggatctcagcggctatgactccgaccgctcgtacccgctgcccagcagcacggacggtggctcgtaccggagcctggaccccgtgcagcctcccatcgccccgccttacaagaccgccctgcagatgaagaaagcttccagccacggcgccggcgccgacgccatcaagccgtccgcagactcctgagccgcagcccgtaaacggatc

SEQ ID NO: 25412 - DNA, 444 bp, Zea mays
  Clone ID: LIB3153-010-Q1-K1-B10
gaaacacaccaagcgaagcacattagcaacaacctaacaacaatggctaccaagatatggagtccctccttgcgcttcttgcgctttttgcgagcgcaacaaatgcgttcattattccacaatgctcacttgctccaagttccattattacacagttcctcccaccagttacttcaatgggcttcgaacacccagctgtgcaagcctataggctacaacaagcaattgcggcgagcgtcttacaacaaccaatttcccagttgcaacaacaatccttggcacatctaacaatacaaaccatcgcaacgcaacagcaacaacaattcctaccagcactgagccacctagccatggtgaaccctgccgcctacttgcaacagcagttgcttgcatcaaacccacttgctctggcaaacgtagttgcaaaccagccacaacaacagc

SEQ ID NO: 25413 - DNA, 115 bp, Zea mays
  Clone ID: LIB3153-010-Q1-K1-B11
agatgttctaatactaatgatctaatcatcctttaccaaacaaaaacaacaaaaaaaaggaacataattaaactaaatagaaaaaaataaaaacacaacaaaataaatactatat

SEQ ID NO: 25414 - DNA, 432 bp, Zea mays; identical to SEQ ID NO: 17955
  Clone ID: LIB3153-010-Q1-K1-B12

SEQ ID NO: 25415 - DNA, 203 bp, Zea mays
  Clone ID: LIB3153-010-Q1-K1-B2
caggcagcacgctagtcggggggcgcgggggaggagatatggatcggtcgtatctccccgtggcggcggcggccgtcgccctggtcctcgtgtgctgctccggcctctgccgcggcgagcggctcggggcgagggagtgcgaggacctggggttcaccggcctcgctctctgctccgactgcaacgcgctctccgagttcgtc

SEQ ID NO: 25416 - DNA, 419 bp, Zea mays
  unsure at all n locations
  Clone ID: LIB3153-010-Q1-K1-B3
cggacgcgtggggccgccgccggcgccgccgtgacggaaggaagaggaggagcatggagcacgacgcgatgggccactccaacgtgtggaactcgcaccctaagaactacggccctggctcccgcgtctgccgggtctgcgcgaaccctcacggtctgatcaggaagtacgggctcatgtgctgcaggcagtgcttccgcagcaacgccaaagacattggtttcatcaagtaccgttgaagaggccactgtgctgctgaggagaacttcctacatcaaagaaatgggtccttcattagaaggcctaatgtatgcgctgtagctngttgctcagaacttgagactcatgtgtaaaactcgactcgttaaagttttgatggctactctgtgctttgtggaccagctataatcagaagattg

SEQ ID NO: 25417 - DNA, 382 bp, Zea mays
  Clone ID: LIB3153-010-Q1-K1-B4
cccgtcatcgatctcgtttcaaatccatccatcctcgtttcctccgtcccgcagcatctcaaccccatggccaagatcaagatcgggatcaatgggttcggcaggatcggaaggctggtggccagggtggccctgcagagtgacgatgtcgagctcgtcgccgtgaacgaccccttcatcagcaccgactacatgacctacatgttcaagtacgacactgtgcacggacagtggaagcaccatgaaagtcaagtgaaagactccaaaacccttctctttggtgagaaagaggttgctggggttggcttgcagaacccctgagggagatccgtgggggtcgggtgggtgctgaatatggtggtgagtctactggggtttcact

SEQ ID NO: 25418 - DNA, 62 bp, Zea mays
  Clone ID: LIB3153-010-Q1-K1-B5
aaaaaaaaaaaaaaacaaaaacaaaaacaaaaaagataaaagaacaaaaaaaaaaaaaaatg

SEQ ID NO: 25419 - DNA, 271 bp, Zea mays
  Clone ID: LIB3153-010-Q1-K1-B6
cccgtcatcgatctcgtttcaaatccatccatcctcgtttcctccgtcccgcagcatctcgggcccatggccaagatcaagatcgggatcaatgggttcggcaggatcggaaggctggtggccagggtggccctgcagagtgacgatgtcgagctcgtcgccgtgaacgaccccttcatcagcaccgactacatgacctacatgttcgagtacgacactgtgcacgggcaggggaaacaccatgaaggccatggggaaggactccaaaacc

SEQ ID NO: 25420 - DNA, 263 bp, Zea mays
  Clone ID: LIB3153-010-Q1-K1-B8
catcaactgacgagagagcgaaccaacctacccacccagggagaaagaggccaaaagcggaagggctagtgctcccaatggcttccattttcccttgcaggagggcctttcctttatgttgctctttctacaatgctattgcagcagctctcgggatggaactggttccggccatgagccggcagggagtgccggttgcatagcaagctacaagacctggactcccgctccacagtgcaatgtgacgccggctgaagacaata

SEQ ID NO: 25421 - DNA, 227 bp, Zea mays
  unsure at all n locations
  Clone ID: LIB3153-010-Q1-K1-B9
tgtggtctttgagtaccctatgaccgaaaatgcataaatatgatgccctctggatatgtccactctatttcgttgattctgaatgttatgttgggtctccctatgtacttcaaaaaacatagttttgatgctaaagttgcctaggaatttggtacggtgaagtggcagtggacgtgaacaatgttaagttttgagcatttaaattaaacctttgccctgattnanna

SEQ ID NO: 25422 - DNA, 357 bp, Zea mays
  Clone ID: LIB3153-010-Q1-K1-C1
aacacatccaaggaacacgaacagcgagaggaatccgacgatgagcgtggagatcctggacgggagcacggtgcggagcttcgtagaggacgagcgcgccttcaactcctcggtggacggccgcttcgccgcgctggacgccgaccacgacggcctgctcacctacgccgagatggccggggagctcatgagcctgcgggtgctggagaggcacttcggcgtggacgaggccgcggtggcgccggatgacctcggggcgctgtaccgcggcctgttcgcgcggttcgacagggacggcagcggcatggtggaccggcacgagttccgcgcggagatgaaagaagtgatgctcggcgt

SEQ ID NO: 25423 - DNA, 427 bp, Zea mays
  Clone ID: LIB3153-010-Q1-K1-C10
cgccgcctccgctgcgagatccttcctccggtccagcggctcatcgtctctccgcagcgcggcggccagagccgcctcgcgtgcgggaccgggaccggctccgctgccgaggcggatgcccacctctgcctcccgtgtactcctaaggtcgccggtggaaatgagcagcgtgtgtctggagtccttgatgcccatgcacagcgccacggcttcggcgctcatgacgtcgcttctcgccgccccggcttgcaagggattcggttggctatcagaaggtcaagctgaaactagatgaacttcatgggacccaaaaggtgaacaatttttatagatcccaccaataatgactggtgatggctagattccatcactatttcacgcgtcggaatgatttgtggaaagaagagcccactatcttcatcttatg

SEQ ID NO: 25424 - DNA, 227 bp, Zea mays
  Clone ID: LIB3153-010-Q1-K1-C11
ctccgtctccgctgctagatacttcctacggttcagatgctaatagtgtatccgcagggcggccgacagagccggctagcatgccgaacgatcaccgagtcatgtgccgagtccaatgcctagatgtgtctaacctggacttctaaggcatgcggctgaaatgaacatacaacgtgccgattggctaatacgcatggacagtcgcacaggtgcacggctcatgacgt

SEQ ID NO: 25425 - DNA, 434 bp, Zea mays
  unsure at all n locations
  Clone ID: LIB3153-010-Q1-K1-C12
ggactcttctgacctgcacgttgtgcttcctctgtgcactgaacctggaaaataggccgctgtatctggccaccttcctatcatttgtctacgctcttggccatttcctcacagagtacttgatatatcacaccatggctgcagcaaatctgagcacagttggcttctttgcaggaacgtcaatcatatggatgcttcttcagtggaattatcatgtgaatccccatggtgcccaagctgtgaagcagtcatgattgatgcttgggctgttagctttatgtggtccagggggaggaaggataccttataaactgtcagaaaagctcatttcatacttcatttttcatcatgttattntgttgcatgagacatttgtccaactgagtagggaatgaaagttcaaattatttctgccactgattgggggatggaat

SEQ ID NO: 25426 - DNA, 200 bp, Zea mays
  Clone ID: LIB3153-010-Q1-K1-C2
acagcattcactgccaagagagtgagcgagcgagcagaggcagcgcagcaatggcggcggcgatagtactctccggccaggtgcggccgcttccctcgtcgctgcccctgtccctgctgctgctcctcctcctgtgctgctccggcacctcgtggggatggagcacgtcccggggaggagccgccagggagtgcggcttc

SEQ ID NO: 25427 - DNA, 274 bp, Zea mays
  Clone ID: LIB3153-010-Q1-K1-C4
ggcggatcggcaggcgaaagagttgctgcacaaggcggagccgactttcggttccccaccaggagcttgccaccatgggtagaggattgaacaagcatttgtagaggctctatgcgcccaagcatagtatgctggacacagctcggcagagcttttgcttccaagccatactctggaccttacaagtctagggagtgcctgactatgatactcatcatcactaacacgctcaagtatgctctctcataccgagaggtcatttccatcctgatgc

SEQ ID NO: 25428 - DNA, 343 bp, Zea mays
  Clone ID: LIB3153-010-Q1-K1-C5
gtacactctcctgtacaaaaacaaaggaaggaacagaagccatgactagcaacaagaacactgccggggcgacggcgacggtggcggtgttggtactagtagcggcgacgctcctggcaacggtggtgaatgcacggccttgcttggacggcgtgctgcctacgtcgacgacgtcacatggcgtggttggggatctgctgccgcgcaagatcatcccgccctctgggcccagcgacttctggagccccgacgacgagccgtcgccgccaccgtctgcggaggcgacagtcgaccgcggtaattgagcgtgacgaggagtggtgatgaatgagaaaatgctgat

SEQ ID NO: 25429 - DNA, 324 bp, Zea mays
  Clone ID: LIB3153-010-Q1-K1-C6
aataaaataaacaaaagagtaaccgaacaagcaagagcaaaaccatcgattacaaaccgaatggttgtctccatacatgtaggatcgatttcccattaaatgacgctatatgtgcctatgctttattttgctgtacaaaactaacaagggcgtgcggtttgaagacatccaatttaactacccggcatagagaactgattacatttgattctgatcaccctaaactcaatccagtgggctcttttttaacagcgggtgcttggaatactcatgccgttccaaaaattaatcccttgaaaaaacatccccctttataatctgggt

SEQ ID NO: 25430 - DNA, 318 bp, Zea mays
  Clone ID: LIB3153-010-Q1-K1-C7
gccatttcatctatccatcccgcagctcttgtctctggcaaccgtacgcccaaccgtgttgccgcgccgcccacgaactactctccggcgctgcccatgacgacggtgtcgcgcgcgctcggctccgcgttcgcgggcttcacgcgggcgcccgcggtggcgcagaccgcgacgaccctgccctccccgtacggctcgtcggctctgcaccagcactggcgctggagccgggcctgccgcacccggcggttctcgtccggccgcgcggcacggattagcatgagcctccgcgccggtatcgtcgggcttcctaacgtc

SEQ ID NO: 25431 - DNA, 434 bp, Zea mays
  Clone ID: LIB3153-010-Q1-K1-D11
cgaagagagaactcgaactcggcaggacttgtgcggaataggaggggagcggccgagcgggggtcagagagggagatagagttcatcaggtttgccatgtcctccagggctggcggcggcaagccgttgtggtctgcctccaccatcgtcgccaaagtcgcgagtgggtaccacatcctcaggatcgatggctactccaggaccatggagacccccacaggagagtccatcgcgtccctcccgttctcggtgggcggccgttgctggcgcattcgctactaccccaacggcgacaagttggagaataaagaatacatctcgctttatcttaatctccacgacagaagcgtcgaggcagaaaaggcgcagttaatgttccgtttcgtcagtgacgtagcggagcagccgctgattctgggaggactgcatacctt

SEQ ID NO: 25432 - DNA, 348 bp, Zea mays
  Clone ID: LIB3153-010-Q1-K1-D12
aaaaaaaaaaaataaaaaaaaaaaaaaaattaaacaaaaaaaaaaaaaaaaaaaacaagcaaaaatataaaaaaaaaaaaaaaaatcatcaaaactaaatataaaatacaaaaataaaaacaaataataaaatataaactgggcccccccttcttaaaaaaaaaaacttttcctccccacatttcaaaaatatatttttttttttttaccaccctaatttaattcaagtgcccgctttttatcactgccttaattataaaacccttggtgttccccaatttattacttttccaacaattccccttttcccaattttgaattattcccaatatacccccccctttcccc

SEQ ID NO: 25433 - DNA, 323 bp, Zea mays
  Clone ID: LIB3153-010-Q1-K1-D3
ctcgagtctatcttctatggcggcctcgacattcatgacagacacagggacatgcgccttgacattgacaatatgtcctatgaggaactattagcacttgaggaaaggatcggaaatgttagcactggcctcagcgaggaagctgtgataaagttgctcaaacaaaggaaattttcatcgcggagactaaaagcatctttggacccagaaccatgctgtatttgccaggaggagtacgttgatggagacgatctccggaggctggactgcgggcacgacttccatgctggctgcatcaagcaatggctggtggtgaagaacgt

SEQ ID NO: 25434 - DNA, 293 bp, Zea mays
  Clone ID: LIB3153-010-Q1-K1-D4
cggacgcgtgggcggacgcgtggggtttgatcgtgttctactggatgtacagaatccatttacctttccaccgtatcacaaagctgtgcgggaaccatttgactattacatgtttggtcagaactacattaggcctctggtagatttcaggaactcctatgttggcaacatttcccttttccatgacatggaagagaagctccaccagggccacaatgttgttttgatgtccaaccatcagacagaagcagatccaacaattatcgccttgcttcttgaaaaaaccaatccat

SEQ ID NO: 25435 - DNA, 360 bp, Zea mays
  Clone ID: LIB3153-010-Q1-K1-D5
ggcggaaataaccgtgcgcaagctttctttaagcagcatggttggacagatggtggaaaaattgaagcaaagtatacttcaagagctgctgacttgtaccgacagttgcttgctaaagacgttgctaaaagctctacagaagatggaaacaatagttggccatcttccccagttgcagcatcccaagctccaaatcaagctgctgcatttgcagatctcaagctgacagaggtgtcaaaagaaaatgtaagtgaaaagaaagattctgagattgttcgttcgcctagagctccaacccattctttcaagaagccgattggtgctaaaaaagcctgaaataagactggtggactttgtgca

SEQ ID NO: 25436 - DNA, 302 bp, Zea mays
  unsure at all n locations
  Clone ID: LIB3153-010-Q1-K1-D7
ctggcttctcctccccctcttaccaagtcctcttcgggttagggttacttaaggttttgtggaggggcgatggcggcggctgatgtggagtaccgctgcttcgtcggcgggcttgcctgggccaccagcaacgagtcgctggagaatgccttcgcctcctacggcgagatcctcgactccaaggtcatcaccgaccgggagacggagaggtctcgcggcttcagcttcgtaccttctnnctcgagatctcatgctcgacgctatcgagacatgaacggcaagagctcgacgccgtacatcac

SEQ ID NO: 25437 - DNA, 405 bp, Zea mays
  Clone ID: LIB3153-010-Q1-K1-D9
cccacgcgtccgaactagcaacatagaaagcacaatagtgtaccaacaatggcagccaaaatattttgcttccttatgctccttggtctttctgcaagtgttgctaccgcaaccattttcccacaatgctcacaagctcctatagcttcccttcttcccccatacctctcaccagcggtgtcttcaatgtgtgaaaacccaattgttcaaccctacaggatccaacaggcaatcgcaacaggcatcttaccattatcacccttgttcctccaacaaccgtcaggcctattacaacaagtacctttggtccatttggtggcacaaaacatcaaggcacaacaactacaacaacttgtgctagcaaaccttgctgcatactctcagcaacatcagtttcttccattc

SEQ ID NO: 25438 - DNA, 286 bp, Zea mays
  Clone ID: LIB3153-010-Q1-K1-E1
agcgaaggagaaagcagaccaacctagccacccagggagaaagaggccaaaagggaggggagagtgtcgtcatggcttccattgtcgcttccaggagggccgttcctctagttcgcgctctggagaagctcatcgcagcgtcctccgctcccgggactggctccgccctcatgccggtggcagtcgccggcggcctccgcggctacaacaccggcgctccgctccgacgctacgagggggccgagtcggaagacgatagcgtccgcgagtacgatgggcggcacgg

SEQ ID NO: 25439 - DNA, 415 bp, Zea mays
  Clone ID: LIB3153-010-Q1-K1-E10
cgaaggagcggcggcgaggtctatggcgtcgacggcggggtacctggcgcggcgggcggcgcagaaagagcgggtgcgcctgctctaccgcagggcgctcaaggacacgctcaactgggccgtccaccgccacctcttctaccaggacgcgtcggatctccgggacaagttcgaggccaaccgacacgtggataacctggacgtggtcgataggctcatcgacgatgcggaggctcagtacaggaacttccagcaccccgatccctacattgttccatgggcaccaggcggcactaaattcacaagaaacccccctccacctcaagggatcgagatcatctacaattatggcaaggaggaccaagtaacaagagtcctgcaagcggggggcagaacttccacagttccaaatcac

SEQ ID NO: 25440 - DNA, 280 bp, Zea mays
  Clone ID: LIB3153-010-Q1-K1-E11
cttttagtaacctttcaataggcgtcccccaagaactagtaaacatggcaaaactgtggagcctgttcttagccctctcctttgtagcagctatgtttgccataagctctcatgctgatggagactgtgagaatgacctccaaagcctgataagtgactgcaagacatacgtgatgttcccagctaatccaaaggtccctccttcggatgcttgctgtggtgtcatcaagaaggcaaacgtttcttgcttgtgctccaaggtcaccaaagaaactgagaa

SEQ ID NO: 25441 - DNA, 433 bp, Zea mays
  Clone ID: LIB3153-010-Q1-K1-E12
tatttttttcccttcactgaataaacgatgtcatgcctcacggtagctgactgtctttggagatgcccttgtgctgaagccaaatcacagaaaggaaacaaaatactcctgcaattgcatctgcggttgcttcaacttataggacttcgttgtagaacgtgaacagatcgtgaatggcagagcagatgtaatatcagggtattcctagatcgacgattcagcaagtcattggttggaatgctgggaaggtctcccaattcaagggccaaggatcacgtctgaatgaatccatgacggtggcgcggcgaactcctatcataaaacctatgcttcctgccaacggagtgactccatggcctgtgctgggacacctgtgagatgtgtgtgaccagcgacgtgatagagctagtaatacaactgccccagcccatgc

SEQ ID NO: 25442 - DNA, 374 bp, Zea mays
  Clone ID: LIB3153-010-Q1-K1-E3
cacggcgccgccgcttctgccgccgggagccgagcccaagcctaagcgaaagccatggcgattggttctctgatcgcctctactttcgccagatctagccatgccctccccgctgccgccgcttcggccatctctcaggctcccagatcccagcacaccgcatctcctctactctccggccttggagcagcggctcgtgctttcagctcaagggctctatggaagggagcattcgttgacgctttcctgtctagaattaagaagaacagagaaaatatgaatggcacgaagatttggtctcgtagatcctctattttgccggaatttgttggttcctctgtgctcatttacaatgggaaaactcatgttcggtg

SEQ ID NO: 25443 - DNA, 367 bp, Zea mays
  Clone ID: LIB3153-010-Q1-K1-E4
ctccacctggtctaccggcctcaccaaggaccatttcgacggatcctcgccctccgtcggtcggtctgtcccttccgagtcagcgcccgtctcccgtgagcgggtggccattcgcgctatggatgagtgggacgagagggtccgggaactggagcgtaacaatgtcgaggcgaaggcgtatgtggattcatgggacgaccggatgcgggagacctgtgcgctgctgaagcatgtgcgggagccgggcgctcggggctcttatctcaaggactcggagaagcaggagatgtaccggctgcacaaggaggaccccgcgacttacaccgtggagcggctcggcaaagacttccgtgtcatgcgacagcgc

SEQ ID NO: 25444 - DNA, 399 bp, Zea mays
  Clone ID: LIB3153-010-Q1-K1-E5
cccacgcgtccggaagcttccttcggagatcccagtagcagaagcaacgcaagcatcggcttgcgacaggagaggacggagatgacgcagaagcagaccctgttcaaggggcagagcaagaagaagactatccctcccaaccgccacggcaaggcgcctcatgttcgtaaaggaaagagagccgtcaagcccaccaagttcacaaaggacatggacgccgagaaggaactcaccaagttcatcaaccagtgcaacgaaataaaagctgcgaatcttgctagcaaagagggcggtgacctcaacatagtgaaagcggatggcgaggaatctaaatcaaagaaataggaagccagatactgaaaacgagtgtgtgaaacgtgatgcgtggtaactgttatg

SEQ ID NO: 25445 - DNA, 330 bp, Zea mays
  Clone ID: LIB3153-010-Q1-K1-E6
gcggactgcaaggttgccctattggaggataagttcaggttgttgtatattaacctccaggggcggagcacgacacaaaaacaagggcagcaggctagcaactagcaagcagcaaaagcaggctagggaagaggccgtctagcaactagcaacaggcttgcaagcagctaagccaagcaagcagccgaagcaggctagtaagcagcaaactgagcaccaagcagtagtcgtctggcgaagcacggccaaccagcaggctagcaagcgcgcgaagctagaacctgcgaggcggtgactccgtaaggcacgggtgcgcagtcgtattcggat

SEQ ID NO: 25446 - DNA, 89 bp, Zea mays
  Clone ID: LIB3153-010-Q1-K1-E8
gagtacttggagtcagttcgcctgtaatggacaccagacctgctgtgaatctgtttttaagcttccattgtaatacagcaatacaccat

SEQ ID NO: 25447 - DNA, 336 bp, Zea mays
  unsure at all n locations
  Clone ID: LIB3153-010-Q1-K1-E9
gaaccgcaatgagatctgcaagtacctcttcaaggggatgatcataacggnccaggggggctgccaagaagccacaaggcgtctattcacaagtcatcagcactaatgacatgaaaaatgcagcagctagttggcagtaaagtgcttcgtttacatgaagtttatcaaacaatagctgcaaagagcctaccacatcggcgtagctgcgtggacgatccactggaagacgacgtatagcgcggtccaaaagaagaagtatgcgacccggaaccaccggaacctctgcagacaggcgaaccatgaaaacattcattagcttcctctgtcttttttttt

SEQ ID NO: 25448 - DNA, 330 bp, Zea mays
  Clone ID: LIB3153-010-Q1-K1-F10
ctcacgagcgattgcggcggcggaagtaagaggcgatggggcactccaacgtgtggaacgcgcaccccaagaactacgggcccggatcccgcgtctgccgggtctgtgcgaaccctcatggactgatcaggaagtacgggctgatgtgctgcaggcagtgcttccgcagcaacgccaaggacattggcttcatcaagtaccgctgaagtcagctgggcgggctatctgaatgccatctcttggacagtgtagtagaggcgatgccacaattttaattactgtcatttagatgttcccttcagaactctgctatttaagtccgccatgttt

SEQ ID NO: 25449 - DNA, 279 bp, Zea mays
  Clone ID: LIB3153-010-Q1-K1-F11
ggccgaccctgacgtgatcgaagtgaccttcggcaacgacgtgattaacaccaccgtggcatcctccggccaggctgtggagcgctggatcgcggagatcctcgcgttgcaccgccccggcagcaacggctacagcatcatcgtcgggcttgacgttgagtggcgcccaagcttcggcccgcaccagaacccggtggccacactgcagctctgcgtcggacacagctgcctcatcttccagctcctctacgccgactacgtccccggcgcgctggcgga

SEQ ID NO: 25450 - DNA, 270 bp, Zea mays
  Clone ID: LIB3153-010-Q1-K1-F3
gagatccgttagggcgaggactggtcccagcttgggtcgggtctccttctccagcttgtgagatgcgacactggttgacactgattgtagcacttcgtggcgccttattgggtcgcgggtgcggtttgcgctctacaaattttgggtttggtttcgctgaaccctcatgacccaagcgaagtccactcctgggaggagggagatgggccgggcgcgatcgccggaaccgctcgatttcttcatatggactgtcgaagatgttggattatg

SEQ ID NO: 25451 - DNA, 445 bp, Zea mays
  Clone ID: LIB3153-010-Q1-K1-F4
tgtagctcatatcatctgtcacccatggcgaagtgcagcagcttccaaggattattctggttgcgttccatgattcttctagcatcctttgttgctcatgcacgcacaacaagtgggcacaccaaagaggacagcaatgctaggaacatgacgatgaccaagacgagggcatcgggcaacatacttgttagccgtaatgacgacgggccatgctatctagattccggtcttaatgaagtacgtctgcagaaagactaataagtgctataagagcttggtgctctgcgtggcgagttgtcaaccatcatcatgaattcatgatactgcggagacatcatgatactgcggagacagacggcgagagatgaagctagctagatgcttgttcaacaaaatattatgtaacacccaaaatctccattttaaaaaataaattagaatttcg

SEQ ID NO: 25452 - DNA, 258 bp, Zea mays
  Clone ID: LIB3153-010-Q1-K1-F5
ggcgatgtgaatccccaacttgccgatttgctcctaaggcttctctgcaaagatccaggagatcgcatcacactgcgtgctgcggctgagcatccttgggtcgctggggatgaggggccagtccctgaattcatctgtagatgtgggtttggccgcacgaagatgaatgatgtccgggaagatagtcaataacaaaacatcctccgatggtctaataagtctagcgtagattattgatgatcggctaagcgaagccct

SEQ ID NO: 25453 - DNA, 150 bp, Zea mays
  Clone ID: LIB3153-010-Q1-K1-F7
taaaataaaaaaaatactagatccaagctttcttcctcactcctcctacatcctaagagatggactctgatataacactgactataaacactttcgtgtcaccttatgggcgccccctctaaaaaatccaatcttccaaccgcgtgcttg

SEQ ID NO: 25454 - DNA, 411 bp, Zea mays
  Clone ID: LIB3153-010-Q1-K1-F8
cttcgcccactcgctccagccgcttcaccgcgccgccaccgccaccgcgaggatgccgttgaagaggttcgtggagatcgggcgcgtggccctggtgaactacggggaggactatggccgtctcgttgtcatcgtcgatgtggtcgaccagaacagggcacttgtggatgcccctgatatggtcaggtgccaggtgaacttcaagcggctctcacttactgacatcaagattgacatcaaacgtgtccccaagaagacagccctgatcaaggcgatggaggaagctgatgtgaagaccaagtgggagaacagctcatggggcaagaagctgattgtccagaagaggagagcatcgctcaatgactttgataggttcaaagtcatgctggcgaagattaagaagggcggtgc

SEQ ID NO: 25455 - DNA, 254 bp, Zea mays
  Clone ID: LIB3153-010-Q1-K1-F9
agaaaaccctagccgccgccaccgaagcggcctcccaggtaagcaggatcgtccagcccgccgccgccatgaagcgcaatccccgcgtcacgagctcccgccggaagtgccgcaaggcgcactttacggccccgtcctccgtccgccgcgttctcatgtccgcggggctgtcgacggagctccgccacaagtacaacgtgcgctccatcccgatccgcaaggacgacgaggtgcaggtcgtgcgcggcacctac

SEQ ID NO: 25456 - DNA, 421 bp, Zea mays
  Clone ID: LIB3153-010-Q1-K1-G10
aatctctagcagcagatcctcgtgcaaagcaaagcgctagccttcctactgtcccgatggcccgcacgaagcagacggcgaggaagtccactggcggcaaggcgcctaggaagcagctggccacgaaggcggctcgcaagtctgccccggctaccggcggagtgaagaagccccaccgtttccgccccggcaccgtcgcgctccgggagatccgcaagtaccagaagagcacggagctgctgatccgcaagctgccgttccagcgcctggtgcgtgagatcgcccaggatttcaagaccgaccttcgcttccagagctccgccgtcgccgcgctgcaagaggcgtccgaggcctaccttgtcgggctcttcgaggacaccaacctctgcgccattcacgccaagcgcgtcaccatcatgcc

SEQ ID NO: 25457 - DNA, 407 bp, Zea mays
  Clone ID: LIB3153-010-Q1-K1-G12
ggggtgactgctcttcagcaagtttgctcattttacacctggagaaaggatgtgaaatctggagatataaaaggtgcaataaatgaggctgctccagataaactaaaacctctgcatgtgtcagaggtttcgcgtgagtttcatcctaattttgcagcgaaatggaggaggtacatgtatattttccctcttgatgaggatgctgacttgattttaggggaagcacagtcctcaaaaacactagagaattctgaacacaacataaagcctcaaagctttgatgtgtccaaggttgatgaaattctcaaaccacttgctggaaagacattatcctacaagatgtttgcacgtgatacacatgcttcacgaagtgtggcccacctacagaatgtttcatgttccattcc

SEQ ID NO: 25458 - DNA, 301 bp, Zea mays
  Clone ID: LIB3153-010-Q1-K1-G2
caaaatgcagcacacgcagcctggaccatggcagcagccagtgctcaactcagaactctgagagcatgtgcctcaaagacgattcaatgcagcatcacaaaaaggatttgaatgtgcagaatcaccagagaaccattcaatatgattcacctaagggttctacaaattcaagtgagaacaatttatcatgtgatcggtattccaagcgggctaaggttgcaaggctagatggtgcaagcgacaacgatgaaagccagttgccgccaacttctgaagttttaccatttgcaagctccaactc

SEQ ID NO: 25459 - DNA, 386 bp, Zea mays
  Clone ID: LIB3153-010-Q1-K1-G3
aaattcttctattttagctctagctcgctcgccatcccctgcccggctgttgcccccaacggagcgacggccagaggaagctagcagagtacagagagagagagagagagagagagagagagcatggctggcacgagtttcctgattcggtcccgcaaggaggaggagtccgacgccgccgtcagagaagctgtactgctgggagcaaagaacgccgcaatagctggtactgtggttgcagctccacgttagttagctgccgtgtactttctaggctacgcgtatctgactcactgacaagactgatatactgcagctgtatgtgctgtcatatgtgcaaacatctcgacgcgaaacacatggagtgcagcactgtctatgactac

SEQ ID NO: 25460 - DNA, 268 bp, Zea mays
  Clone ID: LIB3153-010-Q1-K1-G7
ataccctatatctctagccaacacacacataatactctccattccattccattccatctcagaggatagaataatgggcggtctctccaccaagcttttcgaggtcctcctcctgctcgtttgttacaccgggacgcaaggcgggccggcgactatggtgtcggcgaggaagtgcgagtcgcagagcttccgcttcaagggaccttgctcggaggacgccaactgcgcaaacgtctgcctgaccaaaagtttcaccggcggcgtgtgc

SEQ ID NO: 25461 - DNA, 329 bp, Zea mays
  Clone ID: LIB3153-010-Q1-K1-G8
aacccagtcgctcaaaaccctagagctctcgcctgctcgcctccgccgccgtagcgagctgccgatcttcatccgtggaccgtggtgacccagatcagcaagaagaagaagttcgtcagcgacggtgttttctacgccgagctgaacgagatgctgacgcgggagctggcagaagacggcttctctggcggggatgtacgcttcacgccagttcgcacggagatcatcatacgcgccacgcgcacgcagaacgtgctcggcgtgaaaggccgtacgatcaaggagctcaccttcgtcctgcaaaagaaggttaacttccctgagaatgg

SEQ ID NO: 25462 - DNA, 313 bp, Zea mays
  Clone ID: LIB3153-010-Q1-K1-G9
ccgacccggctccctcggtccctccctcggtccctcccggtctcgcagttcctccccggcgtcttccaccgcaaatcgccgaagcaagcaggcgagctcgggaccagatccactgcgggcagctggagcggaagggccatggggacgccgccgcctttccaggagtccggccactgcgacgtctgccgctgcaccttcaacaccttccgccgccgtcatcactgccgcagctgcggacggacgctctgtcacgagcattcttcgtactacatggctctcccgcagtatgggatatatacagacgtcagagtct

SEQ ID NO: 25463 - DNA, 234 bp, Zea mays
  unsure at all n locations
  Clone ID: LIB3153-010-Q1-K1-H1
ctacttccaagctaccaaggacgggcgcagacggaggaccagcgccgtcgtccaatcccctactagcggcaccggcacgaaggtcagtcgtccaatcccctactaggggaacagccggcggcacgaaggaaggatttggaggatgacagaagctgcagttacaaggtactggtgccatggatgtgtgagggttgttgaggaggccatggnggaggagatcaagtgcccattttg

SEQ ID NO: 25464 - DNA, 382 bp, Zea mays
  Clone ID: LIB3153-010-Q1-K1-H10
ccgtcatcgatctcgtttcaaatccatccatcctcgtttcctccgtcccgcagcatctgaaccccatggccaagatcaagatcgggatcaatgggttcggcaggatcggaaggctggtggccagggtggccctgcagagtgacgatgtcgagctcgtcgccgtgaacgaccccttcatcagcaccgactacatgacctacatgttcaagtacgacactgtgcacggacagtggaagcaccatgaagtcaaggtgaaggactccaaaacccttctctttggtgagaaggaggttgctgtgtttggctgcaagaaccctgaggagatcccgtggggttcggttggtgctgaatatgttgttgagtctactggtgttttcactga

SEQ ID NO: 25465 - DNA, 394 bp, Zea mays
  Clone ID: LIB3153-010-Q1-K1-H11
cacttctggggccctgtcgccaactggggcttcgtcatcgcgggtttggttgacatgagcaagcctcctgaaatgatatctggcaatatgacagcagccatgtgtgtgtattctggactctctatgaggtttgcatggatggtacaaccccgaaattatttgcttctaacatgccatgcttccaatgaaagcgtccagctctatcagttatctcgctgggctaggtctcaggggtacctggagaagaaagaaccagaggccaaacagtcaagatggtatccaacactgcagtcacttgttcaattaagaaaatatgctgtggaaaacattcattctgttgccaatgcagatttttttgtatgtttgcaaaatatgctgatgaaatttcatgata

SEQ ID NO: 25466 - DNA, 381 bp, Zea mays
  Clone ID: LIB3153-010-Q1-K1-H12
ccgtcatcgatctcgtttcaaatccatccatcctcgtttcctccgtcccgcagcatctgaaccccatggccaagatcaagatcgggatcaatgggttcggcaggatcggaaggctggtggccagggtggccctgcagagtgacgatgtcgagctcgtcgccgtgaacgaccccttcatcagcaccgactacatgacctacatgttcaagtacgacactgtgcacggacagtggaagcaccatgaagtcaaggtgaaggactccaaaacccttctctttggtgagaaagaggttgctgtgtttggctgcaagaaccctgaggagatcccgtggggttcgggtggtgctgaatatgttggtgagtctactggtggtttcactg

SEQ ID NO: 25467 - DNA, 214 bp, Zea mays
  Clone ID: LIB3153-010-Q1-K1-H3
ctcgcatcgtgtgctcagtcagatccccgtcccgcatttcctaaggccaggttagttggcattgaagacgatgactgcttctgcagctgctggtgtgcagatggtggctgcacgcccttgcatttcggcctcgccaggaattcttaccgcacgggtagcagtttctaggactgattgcatgctcagtaccactgctacattccccaaaatcagc

SEQ ID NO: 25468 - DNA, 144 bp, Zea mays
  Clone ID: LIB3153-010-Q1-K1-H5
tcggttgcatggaatcaagagaatgcgcacacggtatatactacggcgacgatgattacgatgtgactacgtccactgtttctgactcttctaccatcctcatgtactttgacaaccccaaccagttggtctcgaccagaacca

SEQ ID NO: 25469 - DNA, 199 bp, Zea mays
  Clone ID: LIB3153-010-Q1-K1-H6
cccgcctccacaacccccctcccaggagccgcccaggtacgtcgccggcggcgatgacgacgcgcttcaagaagaaccgcaagaagcgcggccacgtgtccgccgggcacggccgcatcggctagcaccggaagcatcccggaggtcgcggtaacgccggtggcatgcaccaccaccgcatcctcttcgacaagtacca

SEQ ID NO: 25470 - DNA, 287 bp, Zea mays
  Clone ID: LIB3153-010-Q1-K1-H8
cctacctccaaattcccaattgtcaacctctcctcagagttcgagtgaccatgtcggggcgcggaaagggcgggaaggggctgggcaagggcggcgcgaagcgtcaccgcaaggtcctccgcgacaacatccagagcattacgaagccggcgatccggaagctggcgagaaagggcggcgtgaagcgcatctcggggctcatctacgaggagacccgcggcgtgctcaagatcttcctcgagaatgtcattcgcgacgctgtcacctacacggaacacgcccgccgt

SEQ ID NO: 25471 - DNA, 255 bp, Zea mays
  Clone ID: LIB3153-010-Q1-K1-H9
gcaccacagccggagaaatcctctcgtgtggtctcttcagctctcagacggcaagacgatgctgccgccgaggtccgccgccgccgcgccgtgctcggttgcaggacttctgttccaccgattctcatcctactcgtcctcttctgtctattctgtccgccaccacgcctcgtctgctctctcctcccagccctccacccgccccaccaccacctggtcctcttccccccattccagcagccgcaagatcagggg

SEQ ID NO: 25472 - DNA, 356 bp, Zea mays
  Clone ID: LIB3153-011-Q1-K1-A1
ctcgttgacaagaagactagaaccgaacctgaccatgtcgctgatccgccgcagcaacgtgttcgatcccttctccctcgacctctgggacccctttgagggcttccccttcggctccggcagcagcagcagtctcttcccctcgttcccgcggaccagctcggagaccgcggccttcgctggcgcgcggatcgactggaaggagactccagaggcgcacgtgttcaaggcagacgtaccggggctgaagaaggaggaggtcaaggtggaggtcgaggacggcaacgtccttcagatcagcggcgagcgcaacaaggagcaggaggagaagacggacaccttgcaccgcgtggagc

SEQ ID NO: 25473 - DNA, 132 bp, Zea mays
  Clone ID: LIB3153-011-Q1-K1-A10
aaagctaagcgaccatttttggcgagttggcccgtgtgctcggcgtaaagcttgataggcacagcggatgacctccgcgctatagcggcaggagcgcacaccgggtattcctacctgcacagccaaccgacc

SEQ ID NO: 25474 - DNA, 394 bp, Zea mays
  Clone ID: LIB3153-011-Q1-K1-A12
agaaagcgatgatggcggcggtgagcactttcttattaatgacgcagacaaagggtgcggtccagaagggttccaagggccccaagttgggcttgtgttgtgggaagcgctgaaagaacttagtgtcgtttctcgacattgcagccgctccttagcctaagtcactttcgtagaacctgtgttgaatttgcaagactcattcaagcgttgcttgtgcgtgctaaataccatggcaagagaacggatttatatttatgcctgaaaaaaatgaccgttcatattcttaactcatcttggatcagaaaaaacccctcccaattttgaccaattaccctttctttcttgggctttttaaaaaagatgctgaactacaaccctaaaagggcggccgttt

SEQ ID NO: 25475 - DNA, 325 bp, Zea mays
  Clone ID: LIB3153-011-Q1-K1-A4
ctacatcctgactatctcgtcccctggcagcgttcgcggtatgatggcggaatctacggcggggacggcgagggatgtcaacccgcacgatttcgttaaggcctactgcgcccacctcaagcgctccagcaagatggagcttcctgagtgggttgacatagtgaagactgcgaggttcaaggagcttactccttatgatcctgactggtactacatgacggctgcatccatagcacggaagatctacctaaggcacagcttcgcagtgagtggctctcagaagatctacagaggccgctagaggaatggctctctgccaccacac

SEQ ID NO: 25476 - DNA, 380 bp, Zea mays
  Clone ID: LIB3153-011-Q1-K1-A5
cgcgctcgccgccgggcccccgctgccccccagcgcctccgtccgcctcaagtccttggagtccagcgtcggcctcagccgcaaggatctccgtgtcggcaagttactgcagctacctcaacgcgcctccgcgcccacccgcaccctcccgcggagcacgtgctactcgcctaccgtggttagggcgtctactacttcgttgagcacttcgtctggctcgccaaggacgggctcctgcctgcgcaccttcaaccgcgcctccagcgtctcagcgcctgagatgagctgctgtgctacgaccgttgcactctaattaagctggaagaggaggataagatcgaatcttctataaagaagctgctcgtgaaggactgtgataa

SEQ ID NO: 25477 - DNA, 420 bp, Zea mays
  Clone ID: LIB3153-011-Q1-K1-A6
ccacaacctgactatctcgtcccctggcggcgtccgcggcaggatggcggaatctacggcgaggacggtgaaggatgtcaacccgcactagttcatcaaggcctactccgcccacctcaagcgctccggcaagatggagctccctgagtgggttgacattgtgaagactgcgaggctcaaggagcttcctacttatgatcctgactggtactacatcagggctgcatccattgcaaggaagatctacctaaggcaaggcatcactgccggtggctttcagaagatctacagaggccgtcagaggaatggcttccgtccaccacacttctgcatgagcagtggtgctgttgcacgcaacatcctgcaacagctgcagattatgggcatgatcgaagtcaatcccaaaggtggacgcctcat

SEQ ID NO: 25478 - DNA, 424 bp, Zea mays
  Clone ID: LIB3153-011-Q1-K1-A7
gatctcgtttcaaatccatccatcctcgtttcctccgtcccgcagcatctcaaccccatggccaagatcaagatcgggatcaatgggttcggcaggatcggaaggctggtggccagggtggccctgcagagtgacgatgtcgagctcgtcgccgtgaacgaccccttcatcagcaccgactacatgacctacatgttcaagtacgacactgtgcacggacagtggaagcaccatgaagtcaaggtgaaggactccaaaacccttctctttggtgagaaggaggttgctgtgtttggctgcaggaaccctgaggagatcccgtggggttcggttgatgctgaatatgttgttgagtctactggtgttttcactgaccaggagaaggctgcagctcacttgaagggtggtgccaagaaggttgtca

SEQ ID NO: 25479 - DNA, 422 bp, Zea mays
  Clone ID: LIB3153-011-Q1-K1-A8
attgagaccaacaagcaacatagaaagtggaatacagtagcaacaatagagcaacaatggcggccaagatattttccatccttatgctccttgctctttctgcatgtgttgctaacgcgaccatttttcctcaatactcacaagctcctatagctgcccttcttcccccataccttccatcaatgaccgcttcagtatgtgaaaacccagcccttcaaccctacaggctccaacaagcaatcgcaacaagcaacttacctttatcacccctgttctttcaacaatcgccagccctatctttggtgcagtcattggtacaaaccatcaaggcacaacagctgcagcaactcgtgctaccagtgatcaggcaagtagctctggcaaacctttctccctactctcaacaacaacaatttctttca

SEQ ID NO: 25480 - DNA, 303 bp, Zea mays
  Clone ID: LIB3153-011-Q1-K1-A9
gatcttggatacatatacatcgagcccgcctttttttttttttttacgaattgatccacttggccgagaccttgtattttctctatgggttttacacacacagagggctgactaccacataataccatctcatacacaacgcattgctccattgacgcgtcgacttctcaccgaccccaatttgcatgaccatcatgagcccccctacttctgtcacagtcctgccacacatgatgaactgtcttgcccagaatctgaacgaataatttgtggggagagcgcggctttattttggggttgaac

SEQ ID NO: 25481 - DNA, 430 bp, Zea mays
  Clone ID: LIB3153-011-Q1-K1-B1
tcttggatcactagctagctctcgctcgtcgcaacaagcgaagagcttggtcgttttggttatggcggtgatgaagagcaggacggtcatcgtcgccgccgttctgttggcggttgtcattctgtcctcgctgtgtccatgctacgaagccggcggctgcatcgggaagccgcccaagacgccggcgccgaaaaggccctgcttctcgccctactccgaggaccactgtgaccgccagaactgccgcttcgtctgcatgtcgcacggttacagtgacggtggctggtgtgacgagagggaggtgcgcaaaatgtgctgctgctaccattagttagaataataacaatagcagcgtgtagtgttgtgtgctggtgcatgtatatggatcatccatctctgtctgtctgcctgtgttgtgcaatttctgaaa

SEQ ID NO: 25482 - DNA, 405 bp, Zea mays
  Clone ID: LIB3153-011-Q1-K1-B10
caaagctcgtcctgttcacagctcgggctttctttttttattcacagccgcctgggctgccggcgactatgacacgttccgccacgatgctttgatttttcgtctggcgcatgggagcctcctcaagaaggtcttggaggccatccctgagctgtgtatagacgtcctactagactgctccatgactctgttctcgctccaggccatggactcgagccacgtcatgctcgtcgagctgctccttctctccgagggcttcgagcactaccgttgcgaccagaatctcttcatgggcatgaacctcaacaacatgtgccaagatgctccgctgtgctggcaacgaggacattatcaccatcaaagctgacgaccgatccgacaccgtcactttcatgttcgagtcgc

SEQ ID NO: 25483 - DNA, 422 bp, Zea mays
  Clone ID: LIB3153-011-Q1-K1-B11
aagaaataacccttaggcatggctgcatgaccgtccgacaaggatagcctctcccttatcatcccaatacatgattccaaggaattacctgatggtttggttgattttgctgcagctttaagcccaggcgccattgtggtctccggatcgagcggattggctgatgggggagtggattgtaggtggctgtggtggaagatagtgtggtggcaagaggagcatctagagccacgatgagtagaagattggccggcttggggagggagaggtacggcgtgacggaagcatgttggacggcgccgccgcagtgactagaaaaagggctctagccccgattcatctaggctgaatggcgtcgtgcgcatacttaaccggcagggttcgttaaaactcttgttaaaagaaactcgcttttgttttta

SEQ ID NO: 25484 - DNA, 415 bp, Zea mays
  Clone ID: LIB3153-011-Q1-K1-B2
caaaccctttcgcctccgccgccgcctgatagctccagcgccctcgccgtcggctgcccggctgccgtcctcccgctacgagctaggcatctccttcgccgatccaacatgggtaagacacgtggtatgggagctgggcgcaagctcaagacccacaggaggaaccagaggtgggctgacaaagcctacaagaagagccatcttggcaacgagtggaagaaacccttcgctggatcatcccacgcaaagggaatcgtcctggaaaagattggcatcgaggccaagcagcctaactctgctatccgtaagtgtgctcgtgtaccacttggtgaagaacggtaaagaagattggccgcctttgtgccgaaacgatggcttgttgaactacatcgaggaaaacgatgaagtgctgatc

SEQ ID NO: 25485 - DNA, 431 bp, Zea mays
  Clone ID: LIB3153-011-Q1-K1-B3
gagaaaccaacacagcaacaagcaaagcagcgatccgacatccgagagatggacgcggtgatgttcgggctggagactcccctgatggcggcgctgcagcacctgctggacgtgcccgacggcgacgccggcgcgggcgacaacaagacgggcggcggcggcggcgccacgcgcacctatgtccgcgacgcgcgcgccatggcggccaccccggccgacgtgaaggagctgcccggctcgtacgcgttcgtggtggacatgccggggctgggcacgggcgacatccgggtgcaggtggaggacgagcgggtgctggtggtcagcggcgagcggcgccgggaggagcgcgaggacgacgccaagtacctgcgcatggagcggcggatgggcaagttcatgcgcaagttcgtgctgccggacaacgccgacgt

SEQ ID NO: 25486 - DNA, 107 bp, Zea mays
  Clone ID: LIB3153-011-Q1-K1-B5
gacactccctagctcgcagtctctcgtcgtttctacatccgcgaaatgtccgccgtggggtgccggctcaaaacatcaacactgtcgtctcttcatcaccatctgta

SEQ ID NO: 25487 - DNA, 306 bp, Zea mays
  Clone ID: LIB3153-011-Q1-K1-B6
tcctccgaccctgaccactacgccgccggctgagagctccagcgccctcgccgtcggctgcccggggggcgtcctcccgatacgagctaggcatctccttcgccgatccaacatgggtaagacacgtcgtatgggagctggtcgcaagctgaagacctacaggaggaaccagaggtgggctgacaaagcctacaagaagagccatcttggcaacgagtggtagaaacccttcgcttgatcatcccacgcaaagggaatcgtcctgcaaaagattggcatctaggccaagcaacctaactctgctat

SEQ ID NO: 25488 - DNA, 416 bp, Zea mays
  Clone ID: LIB3153-011-Q1-K1-B7
gcgcagaccatcaaacaagtgccagcgccctctcgcagtcgccgcaatggagagcaccttgaggatgatcaagcctgacggcgtccagaggggcctcattggtgagatcatcagccgttttgagaagaagggcttctacctcaaggccttgaagcttgtgaacgtggagaggtcgtttgctgagaagcactacgccgatctcgcctccaagcccttcttccagggcctcgtggactacatcatctctggccctgtggtggccatggtctgggagggcaagagcgtcgtcacaactggacgcaagatcattggcgccaccaaccccctggcttctgagcccagcaccatccgtggcgactttgctgtcgacatttgcaggaatgtcattcatggaagtgacagcattgagaggtgct

SEQ ID NO: 25489 - DNA, 343 bp, Zea mays
  Clone ID: LIB3153-011-Q1-K1-B8
cagtaactcgcatcttcctccgtgatccaagttctagcagcgcaacgctcggtttcgacggtatgtcggggcgcggcaagggcggcaagggtctgggcaagggcggcgccaagcgccaccgcaaggtcctgcgcgacaatatccagggcatcaccaagccggcgatccggaggctggctaggaggggcggcgtcaagcgcatctccgggctcatctacgaggagacccgcggtgtgctcaagatctttctggagaacgtcattcgtgacgccgtcacctacaccgagcacgcccggcgcaagaccgtcaccgccatggatgtcgtctacgcactcaagcgaca

SEQ ID NO: 25490 - DNA, 438 bp, Zea mays
  Clone ID: LIB3153-011-Q1-K1-B9
taagctcttattctatataacagcgcaccagaacctgatcgacaccatgaggtgtgttgttcgggggcctcgctctactggctctcgcttgctagcgctacttatacgcatacaatcggaatatgcggttgccaaccaccgataactgattatttaccttcaacggggcatgtgccaccttcggttcacctgccacctgcggtgcatctcccaccgcctgtccacctgccttcgccagtacacctgccaccgacggtccatgtgccgccgacggttcatatgccgtcggcaccatgccaataccctacttaaccgtcccggcctcagtctcatacccagccacacttatgcgcgtgccaacagtcgcatccaagcccgtgccatctgtagggtaacctgcggcgtcggcagcaccccgatcctgggccaatgcgtcta

SEQ ID NO: 25491 - DNA, 413 bp, Zea mays
  Clone ID: LIB3153-011-Q1-K1-C1
gcgagttcaaatctcacaatcttcttgtagcacaccactgtcttcgtccaactcggcggcgatgtctgggcgcggcaagggcggcaaggggctgggcaagggcggcgcgaaacgccaccgtaaggttctccgcgacaacatccagggtatcacgaagccggcaatccggaggctggcgaggaggggcggcgtgaagcgtatctccgggcttatctacgaggaaacccgcggcgtgctcaagatcttcctcgagaatgtcatccgcgacgcggtcacctacaccgagcacgctcgccgcaagaccgtcaccgccatggatgttgtgtacgccctcaagcgccagggccgcactctgtacgggttcggtgggtgagcgcatctcttccctcgtctgcagcggctgccggtggcgt

SEQ ID NO: 25492 - DNA, 306 bp, Zea mays
  Clone ID: LIB3153-011-Q1-K1-C10
ttgttttcttcgttccgcatcatttccaggggacggccctgatcaagatctggatctatgttttctaaaaatatcggactgccagtatccaaaaaacaactgcccagcgaccattgtccactcgctgccgagtatgatcacgaaaacaataacaactacattatcgacctaagcatgaacgacactgtgcactgaccgtgaaagcactttgaattttactactacgactgaatgactcccaacttctgaggcaagggatttgctcccgtaagtctgacgcatccctaggccatccaattgcggacc

SEQ ID NO: 25493 - DNA, 453 bp, Zea mays
  Clone ID: LIB3153-011-Q1-K1-C11
cttggaataccaccctcgcccacagtcccacaccaggaaccatgaggaccatcatggcgaagagcccccacgactcctccttctcccggaggaacttcaagtggccggttcttgtcaagagcagcagccatggcgccgcagccggcggcggggaggacagctccggcaagggcgcggaggacgccgacgaggacgaggcgaccatggcgttctcctccagctgcccgtcgttccactcggaggacttcgtatccccgccgcccaatcccaaggcgccacctccaccgaagcagcggggcaagaggtgccgcgcggcggtctcccggctgcgcgcggcgcttgccgcggccatcgccggacggcaccgacaggtcgggctcggagcgcggatcacgggcacgctctacggccgccgccgcggccacgtgcacctcgcgttccaggtggacccgc

SEQ ID NO: 25494 - DNA, 435 bp, Zea mays
  Clone ID: LIB3153-011-Q1-K1-C12
ggtgaagccgccgccgctgcagtgtccatagccaccgtatgagactgagatggggggttttgtgaagacccacaagagcaatgcgtacttcaagcgtttacaggtgaagttcaagagaaggcgcgctggcaagacagactacagggccaggataaggctgattaaccaagacaaaaacaagtacaatacacccaaatacagatttgttgtgcgatttaccaacaaggacatcacagcacaaatcatctctgctagtatagcatgtgatatggttcttgcttctgcttactcgcatgagttgccacgatatggtcttgaagttggtctgaccaactatgcagctgcctactgcactggccttctgttggctcgccgtgtgctcaagacccgtggtttagataatgaatatgagggcaatgttgaagccactggtga

SEQ ID NO: 25495 - DNA, 310 bp, Zea mays
  Clone ID: LIB3153-011-Q1-K1-C2
ccaaggatgagaagaaggcgaaaaaggctgaggtgaccaagtcccagaaggcacagacgaagggagcggtccagaagggttccaagggccccaagttgggtggtggcggtggcaagcgctgaaagaacctaagtgtcgttccttgaccttgcaattgctcctccatagcccaccttgttgcaccaacgccacttttgtagtacctcggttaattttgcattttctttcagagttgtttgtgggttttgagttccatctcaagagagttgagtttatttatctttatattgggtgaaatgttcatatgctt

SEQ ID NO: 25496 - DNA, 408 bp, Zea mays
  Clone ID: LIB3153-011-Q1-K1-C4
caaacagctcgaaaactttttgatgcaactccatgcaaagaccagatcatgttatcttcaatgatatctggatatgctacaaatggttatagtgaggaggcactctcattgtttcagcttatgttggcagctggttttcatatagataggtttttatgctcatcaattattagcatatgtgctaacatggcaagaccattctgtggtaaattgttacatgggtatgcatccaaagtaggcatactgtctgatctatctgtgagcagttcacttgtgaagttatattccaaaagtggcaacctggatgattctcgtaaagtttttgatgaactagatgttccggatttagttacatggacagcgataattgatggatatgctcaacatggaagcagtcaggatgctttg

SEQ ID NO: 25497 - DNA, 172 bp, Zea mays
  Clone ID: LIB3153-011-Q1-K1-C5
acgcagggagacagcccactcgtcgacgcatttacctggtgaacatgcgtactcgtctgtcgcgtggtatctgcagcaacttcgcctaggagttaaacacgggtgctctggcaccacctctttatagcatgtaaagcgtcaacgtatttatcggtgcttacagactgccatg

SEQ ID NO: 25498 - DNA, 429 bp, Zea mays
  Clone ID: LIB3153-011-Q1-K1-C6
cttgcctcggccgctatcgtgaccgggaacaacaactgcgagatggccacggtggagacctggggcacggcgatagggtcctccgggagatgggcactacacggcaagacagccctcgtcaccggcggcacccgcggcatcgggcgtgcggtagtggaggagctggcggcgctgggggcggccgtgcacacatgctcccggaaggcggaggagctcggcgagcgcatcaaggagtgggaggccaggggattcagcgttaccgggtccgtctgcgacctctccgagagggaccagcgggagcggttgctccgcgaggttgccgaccgcttcggcggcaagctcaacatcctcgtaaacaatgtaggaacaaacataaggaaaccaactactgagtttactgcagaggaatactcgtttctgatggctact

SEQ ID NO: 25499 - DNA, 453 bp, Zea mays
  Clone ID: LIB3153-011-Q1-K1-C7
gcggccgacctttttttttgttttttcttcacatagtactttgataaagccatgaagttcggacacaacagtttgacatagccatcaagttgacacacaaaagtgtcacaaagacaagttcacacaatcagttcaatacagagagctaagttcacatataaggtgcgttacttgcttagctgcatgataagccacctgttcctcctttatattgggagtgccatgatggactcaaactggcctgcattaaaggtgaggatgtgataaagctcaagttctgtgtcttcatcaagttcctcaacctgtagtaatgcggtcagaacttcggcgagagagggtagctttggaccgtcatctttcaatgcagatgtaagcatgtcgaacttatcacaccgtatcgagttaagtgaatcatgtgatctgtgtctctttaactactcgaggaagatacaa

SEQ ID NO: 25500 - DNA, 192 bp, Zea mays
  Clone ID: LIB3153-011-Q1-K1-C8
cctacctccaaattcccaattgtcaacctctcctcagagttcgagtgaccatgtccgggcgcggaaagggcgggaaggggctgggcaagggcggcgccaagcgtcaccacaaggttctgctcgacaacatccagtgcattacaaagccggcgatccggatgacttctagaaggggcagcttgaagcgcatct

SEQ ID NO: 25501 - DNA, 422 bp, Zea mays
  Clone ID: LIB3153-011-Q1-K1-C9
tgcccgcctgttctgtacaggagccagcctgtcctcattattcgtttgatgctggacctcatgagcctgccgtccgacctgtctacgtttgccgtggaagcggcggactcatcaatctcctaaggcatatgctgtggctagatgcaagtggcgccaagggacctctccgactagctactaggcaagttcgagtgacactagcgagttcggctttgagtacagactgagctgcctttgttcgccgctggtcctacggcccgaggttctcgctaccacagtgcgggacctacgcaggcgcagccgccggagtctgaggaggaaggttcgaatggttctctgaagctgctgacatccggtttatataattgggcacaagctctcgactatactaaaaactcctgcgcaacttcccatgtaaaaac

SEQ ID NO: 25502 - DNA, 427 bp, Zea mays
  Clone ID: LIB3153-011-Q1-K1-D11
ccttcctgatcgtcgtatcttgttatatatccgcagaggaatccatggaaatgttctggtgctggaggtgtattctttcttaatgcaagcttttgttaaatcacatggtgctgatggtactgaacagttcaggcaacgtatttccggcatactgcagaggagggtattcaaagggaacgagtatccaaaaggcgatgccgtcgaatttggtaaactcgagagcttgttggagaaagctctgaggttgacatcgcgctcaagatacaacacggttgcttccgtagcacagaacgccacattttggatcctgaagatcatcaactcgaagcactgttctgagcaggagctcgcacgcgtggttgatctgttccgttcaatcttgagcgattacgacaggaagaaatcgcggctgaagcttggctttgtg

SEQ ID NO: 25503 - DNA, 395 bp, Zea mays
  Clone ID: LIB3153-011-Q1-K1-D2
tcgctgaaattagcgtggaagataatgttttctgcaccaaccacataggataccttcaatgcaggcatggtaaaacagaggcttaagatgatcctgttctccgacaggtgtgaagtcagtgatgaggcaaagaaaaagattgtggagaacatcattgaggcactgtctgagtttgttgagatagaatcaagggataacgtccaagtggatatctcaactgatgctggccttggcaccgtgtactctgtgtcagttcctgtgcgccgtgtgaagccagagtaccaggaatctgaagagcagtacagagggaaaattgttggtgtcgacttcaaggacactggagaatccttaaggagcgttgacgtcacctttgactttttgtacccaatgagaac

SEQ ID NO: 25504 - DNA, 356 bp, Zea mays
  Clone ID: LIB3153-011-Q1-K1-D3
cagaaacacaccaagcgaagcgcactagcaacaacctaacaacaatggctaccaagatatggtgcctccttgcgcttcttgcgctttttgcgagcgcaacaaatgcgtccattattccacaatgctcacttgctcctagttccattattccacagttcctcccaccagttacttcaatggccttcgaacacccagctgtgcaagcctataggctacaacaagcgattgcggcgagcgtcttacaacaaccaattgcccaattgcaacaacaatccttggcacatctaacaatacaaaccatcgcaacgcaacagcaacaacagttcctaccagcacttgaccaactagccatggtg

SEQ ID NO: 25505 - DNA, 353 bp, Zea mays
  Clone ID: LIB3153-011-Q1-K1-D4
gtccgcaggacacgacactcccgcagttcctcgacaggggggggtttccattccaggcggtggcggttggcggcggagatgagccgggggagcaagctccggtggctgtggcgcgcgccggcgcgggcgctggggcgggcgcgggacctgtacgtgcgggggctgacggggtgcgcgcgccacgtcccttccgacgccgcgttcgggtaccccgtgttcgtgccggcgccgctgtccaggaaccacagcgcctgcggctggggcgccaggtcgtcccgggccgactaggacctgcgcgagctggtccgcgccgcgtcgcaacgccgcgtggagcatcgccgcgccgagctgta

SEQ ID NO: 25506 - DNA, 111 bp, Zea mays
  Clone ID: LIB3153-011-Q1-K1-D5
tatctatttgctcctgattttcatttgttttcaacaaaacgatgattacaaacaaatcgggggtttttgtaaaaaaagatgaacctgaaagaacaagctcaaatgggctct

SEQ ID NO: 25507 - DNA, 356 bp, Zea mays
  Clone ID: LIB3153-011-Q1-K1-D6
ctagttgctacctagcctcgaccaggtggagcaatgggctccacggcggcggcgccctgccacatcgtggccgtgccgtacccgggccgtggtcacgtcaacgcgatgctgaacctatgccgcctcctggcagctcgagacggcgtcaccatcaccatcatcgtgaccgaggagtggctcagcctcctcggcgccccggcggcgctgccggacctcggcctgcgcgttcgctttgaggccattccaaacgtgatcccctccgagcacggccgcgccaacgacatggtcggcttcatggaggccgtgtacaccaagatggcgtcgccgttcgagcagcttctcgacaggctcgcgcc

SEQ ID NO: 25508 - DNA, 276 bp, Zea mays
  Clone ID: LIB3153-011-Q1-K1-D7
gttgaccccaccaacagcaagcgaaaatctcccgatcccctctagtctccgcggcgaaggatgtagggcgcggcaagggcgggaagggcctgggcaagggccgagcgaatcgccacctgaaggtgctccgcgacaacatgcaggggatcacgaagcctgcaatccagcggctggcgcgcaagggctgcttgaagcgcatctgcgggctcatctactaggagacgccgtgcgttctcaagatctttctggagaacgtgattcgagacaccgtcacct

SEQ ID NO: 25509 - DNA, 333 bp, Zea mays
  Clone ID: LIB3153-011-Q1-K1-E1
tccggctcgcctataaaagacgacaaggtgaagcttagttgtacatggacagcttgctccatggtggcaggtccgatctaaattcttgtcctcacatcgtatcttcctaaaattgttcaattttgcagatgtttgtgaatgcaacagaacttgccactgataaactagaccaggatagtaatgtctgagacgtttccacatactttgcctcctgattatcttcatcgacgtatccaactcgcaaccgtatcaacagctactgctacagtccatcttgccgacatagctgtttttctgccactgcaaggtcgcggcttgatatttttcttgatg

SEQ ID NO: 25510 - DNA, 367 bp, Zea mays
  Clone ID: LIB3153-011-Q1-K1-E10
gccgactccaactcagcatataaaattgtttttgccgatacatagccagaattacagcataggtgatagaacaaaaaaagggagctgctcgattttccatcggggggaccaacttacacgaaatttaacagcaaagagactaattaacatacaaatataaagataaccctcctcccacatattaagcatgttttttggatgtccgaaaataagctctaacgagcaaaccacactccgcaacctagctcgtaggcaggagttccaaaacgggcacgccaagagaagcaactcagcacttgtagtccttgacgtggaggctttcggtgttggcggaaacatcacccttgtaggtgccgagggtaacctc

SEQ ID NO: 25511 - DNA, 447 bp, Zea mays
  unsure at all n locations
  Clone ID: LIB3153-011-Q1-K1-E11
gcggatgcataatctctgcttggcatcacaaacactttggtaacttcggtgaggtcccactcaagtgaaggaatcagcccttctgatttcataacagctttactcaagaagtttgggcagcatgggaatcatgatgatgagtctgtctcattacgatggggtgatcttgggctttctgtttcacatatcttcaggcctgtgcctggatgctgtaccatgcttggtcctatgaatactgaagtaaagcaacggaaagttgtagctgtcggtaggaaacggactgcacggccaacagaaaatacctgtcctgaagagcttgctgagtcttcagaggaagtgaagacagacactgacaggaatgtcttagttatgtttgatatcctcaggcgaaagaagagcgcanaattggaaaaccttgtgttgaataggctttcatttgccaaacag

SEQ ID NO: 25512 - DNA, 365 bp, Zea mays
  Clone ID: LIB3153-011-Q1-K1-E12
taaaatgcatcctattctttttttccttcgtcccgcagcatcttaacgggatggccaagatcaagatcgggatcaatgggttcggcaggatcggaaggctggtggccagggtggccctgcagagtgacgatgtcgagctcgtcgccgtgaacgaccctttcatcagcacctactacatgacctacatgtgcaagtacgacactgttcacggacagtggaagcaccatgaaggcaatgtgaaggactccataacccttctctatggtgagaaggaggtagatgtgtttggctgcatgaaccttgaggagatcccgtagagatcggtaggcgctgaatatgctggtgagtcttctgttgttttcact

SEQ ID NO: 25513 - DNA, 315 bp, Zea mays
  Clone ID: LIB3153-011-Q1-K1-E3
ctcgcgcagccacagcctccatttctcctccgacggcggtgcggctagctcaaccatggcggactccaaggccacctcggcggtcaccctccgcactcgcaagttcatgaccaaccgcctgctggcccgcaaacaatttgtgcttgaggttatccaccccggccgcgccaacgtctccaaggcggagttgaaggagaggcttgccaagatgtacgaggtgaaggaccccaacaccatcttcgtcttcaagttccgcacccacttcggtggaagcaagtccactggcttcggcctcatctacgataacctcgagtc

SEQ ID NO: 25514 - DNA, 439 bp, Zea mays
  Clone ID: LIB3153-011-Q1-K1-E4
ttacgccttcgctcgcgccgccgccgccgccgccgctacgccccgcacctcgcttcatttcgtgtcgccaagatgacgaagcgcactaagaaggcaggaattgttggcaaatatggaaccaggtatggtgctagcttgcgtaagcaaatcaagaagatggaggtatctcagcattccaagtacttttgcgagttctgtgggaagtttgctgtgaagaggaaagcagttggaatttgggggtgcaaggactgtgggaaggtgaaggctggtggtgcttacaccatgaacactgctagtgcggtcaccgtcaggagcacgatccgccgcctgagggagcagactgaagcatgatatagctctttatattattggggtttcctgtagttgctcttgtcaggcatgttgtgggggccttaatctaatgaaatgtggaatcact

SEQ ID NO: 25515 - DNA, 289 bp, Zea mays
  Clone ID: LIB3153-011-Q1-K1-E5
cgctcctaaaaccccgccagccagcggtgccgccgccggtgacatggacgacggcgacgctgccagacgcaaatccgtcccagattggctgaacagcccgatctggtctgcgcctccgccgtctccacgccacagctcccttccccccacggcaccgtccccccctcagccgccaccatctgctctgccctctccccagccacggcgggatccgactgccatccctactaccaacgccccacgcgacgccgatgtttcagacgacgaaggcaagggcgcgggcgccccg

SEQ ID NO: 25516 - DNA, 439 bp, Zea mays
  Clone ID: LIB3153-011-Q1-K1-E6
atcgtcgttgggacggtgctcggccctggttcccagcgtgcaaacgagtgcaggatggctgcgttgtttgctggcttccctgaaaccgtccctgttagaactgtcaaccgccagtgttcatctgggctacaggcagtagccgatgtcgcagctgctataaaggctggttactatgacatagggattggtgctggtttggaatccatgtccataaattccattgcttgggaaggacaagttaacccaaaaataagcgcattccagaaagcacaagattgtcttctgcccatgggaattacttctgaaaatgttgcccatcgatatggtgtaaccaggcaggagcaagatcaggccgccgctgagtctcataggagagcttgttgcatccacggcctctggaaaattcaaggatgagatcgtcccggtcccaacaaagatc

SEQ ID NO: 25517 - DNA, 209 bp, Zea mays
  Clone ID: LIB3153-011-Q1-K1-E7
accttgtgtcccgacaacgttgggcgcccattctcgcaccgaacttcgttcggttaggttggatcacatcattcttaggcttgaactaggcttttagtctacacctgccgcctcaattaattcgctctggagggggagactcggaggcattatcataatcaagatccatgctgttacacgccgatctctactcgcttcggaccttatgt

SEQ ID NO: 25518 - DNA, 312 bp, Zea mays
  Clone ID: LIB3153-011-Q1-K1-E8
gcgcatttggctgccgccgaccctggcactatattttagaagaacactgagctcggatgggggggcgccgatatggccgacgttgcttataatgcaagatccttcgtctaatatccaacttaatcttgtcttcacatactggatcccaatgcctactgacatgcatattcggtactatggcacgcgcatgtgctgtcgctcaactttgctgtgcatatgatcctaagattgacctgggtaatgcataccaattgtaagcacttctcctttcttacgtacacctccactgcttttgggatgatgaccctaata

SEQ ID NO: 25519 - DNA, 443 bp, Zea mays
  Clone ID: LIB3153-011-Q1-K1-E9
cgttctatactctataaccgccacccactccagagcgcataataacccgatcgacaccatgggggtgttgctcgatgccctcgctctcctggctctcgctgcgagcgccacctacacacatacaagcggcgggtgaagctgccagccaccgccgacggttcatctaccgccgccggtgcatatgccacctgcggttcacctgccacctccggtgcatctaacatcgtcggtacacctgccgacgccggtacacctgacaccggctgtccatgtgccgccgacggttcatgtgccgacgacaccatgacactaccctactaaaccgccccggcctgagtctcatccacagtcacacccatgcccgtgccaacagccgcatccaagcccgtgccaactgcaggaaacctgcggcgttggcaacaccccgatcctgggccagtgcg

SEQ ID NO: 25520 - DNA, 354 bp, Zea mays
  Clone ID: LIB3153-011-Q1-K1-F1
ggcaacgccacattagagttgggaggcaacttgtcaacattccctcattcatggtgagagttgactcagagaagcacatcgacttctctcttaccagcccacttggtggtggagaacctggaagggtgaagagaaagaaccaaaagaaggcttctggtggaggcggtgacgacgaagaggaagagtgatcatgtgatgctagctccttcgttttgttagggacctaattttgttacatgaaaacaaaaagttggctgccgaggtttctgaaaaattgcaatttaaaattttgagaactgtaattgctaagactcttcattgccgaagttgtttatccgatgaacacatgttaat

SEQ ID NO: 25521 - DNA, 439 bp, Zea mays
  Clone ID: LIB3153-011-Q1-K1-F11
ccggaccagaattgaccgggtcgtcccacccttcctaaaaaaaggttctgtctaggtgcttggatcctttcacacaacgcagcacccgcactatacaggcgtctgccaatccgaaacgatacctacccgtaggcaaaccaggactgagattgatcggtgagcatcacaatcatggtggggcaagaggtggttaacaagctggtggttctgaagcgctacgtgacggggttacctggcgcggacgacatggatgtggtcaccgtcaccgagcgcgtggccgtgccgccggggtctactgccatggtgctcaagaacctgtacgtgtcgtgcgacccttacatgcgcggtcgtatgaccaagcacgagaggcccagctacgttccggacttcgtcgtgggggaggttttggaaaactttggcggttgtgaggtgatagcat

SEQ ID NO: 25522 - DNA, 449 bp, Zea mays
  Clone ID: LIB3153-011-Q1-K1-F12
ggctgtcgatgacttatagcagccggccctccttttttctttttctcagatcagcggtgagcaggtaccacaccactctactgacgcccgacgagcagagtaacatcctccttcagccatggttaaggagaagactcacatcaacattgttgtcattggccatgttgactcttgcaagtcgaccaccactggccacctgatctacaagctaggaggtattgacaagcgagtgattgataggctcgagaaagaggctgccgatatgaacaagcggacattcaagtatgcttgggtgcttgacaagctcaaggctgagcgtgagagaagtattacaactgatattgccctgtggaagtttgagaccaccaagtactactgcacttgtattgatgccccgggacaccgtgacttcatcaaaaatatgatcactggcacttcccaagctgact

SEQ ID NO: 25523 - DNA, 395 bp, Zea mays
  Clone ID: LIB3153-011-Q1-K1-F2
ggttttcgcgccgccgccgccgccgcttcgtcgtctccgccgcatcgtcgtctccgccgcagcgatgccgtcgcacaagaccttccggatcaagaagaagctggcgaagaagatgcgccagaaccgccccatcccctactggatccgcatgcgcacggacaacaccatcaggtacaacgccaagcgcaggcactggcgccgcaccaagctcggcttctgagcgcgcggatcggccggctcctgcgtcggaattctagggtctctacctttcctttggttttatcgatgtctcttgtgtttctgtaagctagcaaacggttccagaaagcttttgttaagattttgatgacgctaagaggatggatgctactatgctgtactcaggattccatgct

SEQ ID NO: 25524 - DNA, 223 bp, Zea mays
  Clone ID: LIB3153-011-Q1-K1-F3
agcacatgtacttaccgcacaagctagcgcgcgcaggagctcagttcaggcaggagcgggagagatggagaaggcggaggaggcggcggtcgcggcggcgcaggagcagtggcagggcgtggtggaagccaacctgtcgtggaccccaggctctgccgcgtggacgaacatcgcgagcttctgcgcgctgcaccggtacctcccgggcatcgacttgtgcgag

SEQ ID NO: 25525 - DNA, 329 bp, Zea mays
  unsure at all n locations
  Clone ID: LIB3153-011-Q1-K1-F4
aattcccgggctcgcctctagcaggtatcctaagtcttacgtaccgcgctgccagtgcgacgtcatagcgtctttctattagtgtcancctaatattcaagttgacgttggctcgtcgtttatacaaactgtccgtgacttggaggaaaactcctggcgattaccccaagcttaattcagccttgctagacacatctccctcttatcgcccagtctgtgcgtagatagacgacagaggctccgcacacgtatcgcctctatcccaactaggttgngccagccatgaatgggcgatatgggaacgcgccactcgtagcggctgcatttac

SEQ ID NO: 25526 - DNA, 280 bp, Zea mays
  Clone ID: LIB3153-011-Q1-K1-F5
tccaattttacatacagctgcgcgtgcaactggtcgtctcttgtttctggacggtgacgccggtgctacaaagtcagacgacgtcttcggcatcgggtacaccttgtagtggcatatctttaactgagcataccagatgccgagacagagtgttgatatcgagggcgactatactgacatctttagcgatcaacaaatgctggccactattcttggcttgtgacctcctgaatgtagccgaacaccaagcgtggtacgctcggtacttcccctcatttgc

SEQ ID NO: 25527 - DNA, 244 bp, Zea mays
  Clone ID: LIB3153-011-Q1-K1-F7
ccgcttccgctcccagctcgtgttccgcttcttgcagccgtcgccgggaagcgctccagagaacttccgtcaacatggggaagacacgtggtatgggagccgggcgcaagctcaagacccaccgtaggaaccagcggtgggctgacaaggtatacaagaagagccatttgggcaatgagtgggaacaaacccttcgctgggtcagtccatgccaagggcattgtccatgagaagattggtattg

SEQ ID NO: 25528 - DNA, 301 bp, Zea mays
  Clone ID: LIB3153-011-Q1-K1-F8
cttcagaccatgagctatatctactccagagcgcagaagaacccgatcgacaccatgagggtgttgctcgttgccctcgctctcctggctctaactgcgagcgctaccttcacgcatacaatcggctgctgtggctgccagccaccgacgccgattcatataccgacgcccgtgcatctgccaccatcggttcacctgccacttccggggcttattccaccgcccgtacacatgccttcttcagtccaatttcaaccgccggtcatttttcttccgccggttaatcttcctccttcacaat

SEQ ID NO: 25529 - DNA, 348 bp, Zea mays
  Clone ID: LIB3153-011-Q1-K1-F9
gaaatccaacatcaactcgatgagtcgtcaaaaatccaaaagcatgatcccatacaatggcctccaacaatcgtctccaactggcatgccaaacataatggtaagcgtctaagtgcacatccatgtctcatcaacttacaccagagttcaaagctaatatttggaatcccaataaggaaacaacaggcaatgtaataaccaccatcgaaatcaggggatccccaatccccaaaggtatatttggaatccccagaattcttgctttttgtcacacatagccaggaggttaagacatgcctgggaaacatcaattccctcttctggggggggtcccttgaccagcctttg

SEQ ID NO: 25530 - DNA, 363 bp, Zea mays
  Clone ID: LIB3153-011-Q1-K1-G1
ctcctcgttcggttcggacttttgcttcggcgactttacgcggtaggccaccgtaaaccctagccccagaccgcgggtcatagccaacgagatgcagatcttcgtcttgacgctgacggggaagaccatcacgctcgacgtcgagagcagcgacaccatcgataatgtcaaggccaagatccaggacaaggagggcatttcgcctgaccagcagaggctgatttttgctggcaagcaattggaggatgggaggacattagctgattacaacattcagaaggagtcaacactccctttggtcttgaggctcaagggtggaactatgatcaaggtgaagacactaactgggaaggaaatcgagat

SEQ ID NO: 25531 - DNA, 320 bp, Zea mays
  unsure at all n locations
  Clone ID: LIB3153-011-Q1-K1-G11
attgtgttacctaaatttaggtcacagggccatgatttacatctgcacatactcgtaaacccctggagatacagacccggtcgaccaggaaagacgcatataggcacagcatgtttatttgccgcagaagacgacaacgaccgtccccncaatacaaaggactcatcagcatggtgaatggggcgccccctgtaacggcacaccaaaccataatggtgcggcgggtactaccagcgagaccagtacactagacagggccctatcgctcgttcacctaggcttgtttggttccattgtacctatgtaaacaccctttgccc

SEQ ID NO: 25532 - DNA, 307 bp, Zea mays
  unsure at all n locations
  Clone ID: LIB3153-011-Q1-K1-G12
ctnnttttttttttttttttttttttttttttgagggtttttttttttttttttttttttgaacaaaaaacaaaacccttcccncggactccaaggcttaacatccaaaaaatataccttttttacccccgtagcaanaaaccaaacagtccccacacctgggtctggccccaatggagtttctttttttgccnnctccccccttgagagcttttttcgacccaagccaaatgggaaagccctatccctagtacaggtcgccttccttgtgggtgtggatcccccaaactgactttgggtaggaaac

SEQ ID NO: 25533 - DNA, 441 bp, Zea mays
  Clone ID: LIB3153-011-Q1-K1-G2
cggcttgcttgattgttccaggtattcgcagtcgaccgtgtcctcggagcacgatgaaggttgttgctgcctacctgcttgctgtcctcgctgggaatgccagcccctccgctgaggatttgactggcattctggagtcagttggctgtgaagttgacaatgaaaggatggaactgctgctgtcccaactgagcggtaaggacatcaccgagctcattgccgcgggcagagagaagtttgcttcagtcccatgtggcggcggcggtgtggctgttgcggcaggtgcacctgctgctggcggagctgctcctgcagctgaggcaaagaaagaagagaaggtggaagagaaggaagaaagcgatgatgatatgggcttcagcctcttcgactaggttgcacagtcatcacagtattgtttcgggcagtgaaatcaaagggaaa

SEQ ID NO: 25534 - DNA, 77 bp, Zea mays
  Clone ID: LIB3153-011-Q1-K1-G5
aaaaataaacgcaatgcatacgacttcatatctctactatatagtcacccaaaaacaaatgggggtactacaaaaat

SEQ ID NO: 25535 - DNA, 436 bp, Zea mays
  Clone ID: LIB3153-011-Q1-K1-G6
ggcgatggcgaagaatcccaaagatgccgctccggaggaggagatgcccgccgcggccgaggaacaggcagcgcctgccgcgacggtgaaggtgctcttcttcgcccgcgcgcgggacctaacgggcgtggcggattccgcggtggaggtgccgccggggagcaccgcgggggagtgcctcgcgcgggtcctagcccagttccccaagctggaggagatccggggctccgtcgtgctcgcgctcaacgaggagtacgcggccgactcggtcgtggtcgccgacggcgacgagctcgctgtcataccgcccatcagtggcggctgacgttattaaccacggccgacttgtgtggaggtaataaaagatatgaagacatccatcgttgatgaaaaaaaaaagagagaagaaaggttcctctcccttcttcatggtcag

SEQ ID NO: 25536 - DNA, 387 bp, Zea mays
  Clone ID: LIB3153-011-Q1-K1-G8
cttcgcctcgccaaactttaccctcggcctccgcccgcacttccaccaccgcaccgcacctcgcagatgccccagtaggctccaaaaatccaaagccatccctccccaggcctcccatccatctccgggagatggcggccggcaccgtgacggcccgatccaacggcgagggccacggccacggcggcgcggggtcctggtacccgcagcgccgcccgcactacgggtacggcggggggtccgcctccttccgcggctgctgctgctgcctcttcctgctgctcaccttcctggcgctcctcgccctggccatcgcgctcgtcgtcgtgctcgtggtgaagccccgcaagccgcagttcgacctcgaccaggtgtccgtgcagtacc

SEQ ID NO: 25537 - DNA, 289 bp, Zea mays
  Clone ID: LIB3153-011-Q1-K1-G9
attgttatgaataggcgtggagcattgcaaggtgtataaataaacttctacaacagagtctgatagtcacttgctatccatttgaatggtgctacaggaatgactctcttggtggactcagctttctaggatataggaatgccaacctacttggaggtgcagtacacgttgcacatatcatgcagcacaggaacgacggctactaaacccaatactcatgatcagaacagtgtttggtgacattctggcgccggcagccttatcaatggagaatgggagcattgaactg

SEQ ID NO: 25538 - DNA, 430 bp, Zea mays
  Clone ID: LIB3153-011-Q1-K1-H1
gagtgaccctaccgggcgggagagagccaggaagaggagggcgacgatggcgtccggctggggcatcaacgggaacaagggccgctgctacgacttctggctggagttcagcgagtgcatgagccgctgccgccagccctccgactgcggcctcctccgcgaggactatctcgagtgcctccaccactccaaggagttccagcgcaggaacaggatctacaaggaggagcaacgtcagatcagagctgctgctcgtaaggccaaggaggaagctgagggtgcccctgctgttgcagcacaccattagtctccctgtctattttttgtgttggtgttttctgttaactcatctttggttcagttatgatgctaagggcagggcaataatcttcagcttgtggactacacaaatttttttcccatgacttaa

SEQ ID NO: 25539 - DNA, 317 bp, Zea mays
  Clone ID: LIB3153-011-Q1-K1-H12
gagagctatgacgggtcatgcaccgcgtccgatgcttttatcctactaaagcggacgcccacgtattagtttcttactttggctagtgcgcgtctggtgttttcgccgagcagatggaactcaaggctgagaagaagccgatggccatgaagcccgtggaggaggagcacgcgacagataaagttgagaaggctccggcgccgaagaagcacaaggccaagacgcttctacgcgagggcaagtccaatgatgacggcgagggcaagaaagtgaacgggaaggcgaataagttcgtggagacggagaagaactagatc

SEQ ID NO: 25540 - DNA, 295 bp, Zea mays
  Clone ID: LIB3153-011-Q1-K1-H2
ccctcacggtctgatcaggaagtacgggctcatgtgctgcaggcagtgcttccgcagcaacgccaaggacattggtttcatcaagtaccgttgaagaggccactgtgctgctgtggagaacttcctacatcaaagaaatgggtccttcattagaaggcctaatttatgcgctttagctttttgttcagaacttgagactcatgtgttaaactcgacttgttaaagttttgatggctactttgtgcttgttggaccagctataatcagaagattgaaattttctcactttgaaaaa

SEQ ID NO: 25541 - DNA, 122 bp, Zea mays
  Clone ID: LIB3153-011-Q1-K1-H3
accgaatgtagttcagatggaagtatgtaggcggttctaaacagtttttgttatgcgacatatgctaatacttaggaaatgtgacatctatgatctatccaaattttgacgtcagcacacct

SEQ ID NO: 25542 - DNA, 375 bp, Zea mays
  Clone ID: LIB3153-011-Q1-K1-H4
acgaaaccctaacgccgccgtcgcttcacaggtaagccgccgtcatggtctccggttccggcgtatgcgcgaagcgcatcgtggtggacgcgcgccaccacatgctgggccgcctgtcgtcgattatcgccaaggaactgctcaatgggcagaaggtggtcgtcgtccgctgcgaggagatctgtatgtcgggtggactcgtacgccagaagatgaagtacctccgctttctccgcaagcggatgaacaccaagccatcccatgggcccatccacttccgcgccccgtccaagatcctgtggcgcaccatccgcgggatgattccgcacaagaccaagaggggggaggcggctctggcgaggctcaagacgtacg

SEQ ID NO: 25543 - DNA, 338 bp, Zea mays
  Clone ID: LIB3153-011-Q1-K1-H5
accaaaccctaacgccgaggtcgcttgacaggtgagccgccggcatggtctccggttgcggcgtatgcgccaagcgcatcgtggtggacacgcgccaccacatgctgggccgtctgtcatctattatcgtcaaggaactgcttaatgggcagaaggtggtggctgttcgctgtgaggagatctgtatgtggggtggactcgtacgccaaaagatgaagtacctgcgctttctccgcacgcggatgaacaccaaaccgtcccatgggcccatacacttgcgcgccccgttcaagatcctcgtgcgcaccatccgcgggatgatgccgcacaagaccaag

SEQ ID NO: 25544 - DNA, 398 bp, Zea mays
  Clone ID: LIB3153-012-Q1-K1-A1
gggttttgctgctctccgaccccgagctccgaaggccgcagcatcaggcgcggcccccctcgcgtgtgaccgagatggcgctgccgaatcaggggaccgttgattaccccagcttcaagctcgtcatcgtcggcgatggtggaactggtaaaactacatttgtgaagaggcatctcactggagagtttgagaagaaatatgaaccaaccattggtgtggaagttcatccgttggatttcaccactaactgtggtaagatcaggttctactgctgggataccgcacggcaagagaagtttggtggcctcagggatggatactatatccatggccagtgtgcgatcatcatgtttgatgtaacctcaaggcttacttacaagaatgttcctacgtggcat

SEQ ID NO: 25545 - DNA, 423 bp, Zea mays
  unsure at all n locations
  Clone ID: LIB3153-012-Q1-K1-A11
ccttgcctccgatccccaattcctccttcggatctcgcattcagcgcancgcaggtgtgaaggaagggggacgcggaggaagatggggctcgcgttcgggaagctcttcagccggctcttcgccaagaaggagatgcggatcctcatggtcggcctcgacgccgccggtaaaaccaccatcctctacaagctcaagctcggcgagatcgtcaccaccatccccaccatcggtttcaatgttgaaactgttgagtacaagaacattagcttcactgtctgggatgtcgggggtcaggacaagatcagacctctttggaggcattacttccagaacacccagggtcttatttttgttgtggacagcaatgaccgtgaccgtgttgttgaagccagagatgagcttcacangatgctgaacgagga

SEQ ID NO: 25546 - DNA, 430 bp, Zea mays
  Clone ID: LIB3153-012-Q1-K1-A12
gccgcccatctaccccgtcgccttaacctatctcctctcaaaggctcaattcggctcgctggtagggcctcgcccacctctcgctagtcgctctccacttccaagtctctgcggccggacgccgcggcgagatggcctcgacctgcttccgcgccgccgcccgcgtggcctccgccgccagtcgctcggcggcggcctaccgctccgctccctccgcggcacgcgccgcggcaactgccgcccaccgcatatcgtgcttctccagggtgccggtggagctcgggtgctgcgcgggattgtcactgctgccgctgcactgcgcggtggcggcagccaggctgacgtcgcggctgagcaccgcctctagcttgcgtgctttcttttagcgcgctgctgcaagcacctgactttgatagttcttgaaagatat

SEQ ID NO: 25547 - DNA, 293 bp, Zea mays
  unsure at all n locations
  Clone ID: LIB3153-012-Q1-K1-A2
agagcactgaagcagagcgagcgagctgttttgccaaaccctcacggncgcctccacaatggcgcgctatctcgcgctgctcctgcccctgctactgctggcctcgccggcggccacgcgcctggcgtacgccgcctgcgcgggcgagaagttcccggcggggcgtgcgtacgcgtcgtgcgaggacctgccaaagctgggcgcgtcgctgcactggacgtacgacgcgttcaagagctacctgtcagtggcgttcgtggcggtgcccgcggcggccggcggatgggtggcgt

SEQ ID NO: 25548 - DNA, 420 bp, Zea mays
  Clone ID: LIB3153-012-Q1-K1-A3
ctctgaatatcccctatatatctataatcaccctctcgagaggaaccagcacaaactcagagaactaccgtgctactagatacatagattgtcagctgtgagaagactcccatccccacaagcccatcatgtcttgcataggtggttcctcctcttccacggcgagcaacaagagaaagggaaaggagattgtggtggaggtgtcagctgtggtggaggaggaggagaagcagcagcagcagcagagaaagggaaaggaggttgcgttggaggaggtgccactgcctgcagtggcggagtcttacgacgattcagatttagattcgggttctggttgggacttctacgaggaggagtactcggagaagaaggagcaagagaggaaggaaaagaaacctgcatggctggatacgctgctga

SEQ ID NO: 25549 - DNA, 417 bp, Zea mays
  Clone ID: LIB3153-012-Q1-K1-A4
tgatttcacaatgaaaagggagacaatgccttcatggctagaactgttgcttgcaacacaagtctttacgacttgtgctaaccatcttcttgctagtcgcaatgaatgtaacctattttgcacccagtgtgagaccaaaccagctgctttctgtaactattgtcgttcaagtgatcattccacccaccgtgtaatccagataaggcgttcatcgtaccatgacgttgtgagggtgtccgagattgaggatatccttgatgtcagcgatgtgcaaacttatgtaatcaatagtgcaaggattgtattcctgaatgagcggccacaactgcgtgcttctagtgtccccatttgtaaggcacccacatcatcaacacatagctgtgagacatgtagccgtgtgctacttgatgcatttcg

SEQ ID NO: 25550 - DNA, 439 bp, Zea mays
  Clone ID: LIB3153-012-Q1-K1-A5
gaaaacctcgccgtcaatgtcagcgttcgttcccaagggcgctagggtttaaccccccaactgttcggtctctctctctccccgaatccaattcagcgtcatctagtccgggagcctgcgacatggggtacctccaggaggcccgggagaatcacgtcaagaagaaggtcgaggaagctctgaggagcaaaatgaaacaaaaggctcttcaggaatgtgatttctattgttcaaaatatgctgagtgtgcacgaggaagaacattttctgtggtatggcaatgccgcaaacaagcaaaagagttgaatgagtgccttcatcaatacacaaatgatgcaatcctggaagaaatgaagaaggcttatatgattgagcaaaagagcaaggagataaatcaataagcaaaaatccattgcacaatgtgcatcacgatcaccct

SEQ ID NO: 25551 - DNA, 303 bp, Zea mays
  Clone ID: LIB3153-012-Q1-K1-A6
ttataaccaaatccaacctatcctcatataatccgagagcctgcgacatgaggtacctacaggaggcccgggagaattacaccaagaagaaggtcgaggaaactctgacgagcaaaatgaaacaaaaggctcttcatgaatgtgattcctatagttcaaaatatgctgagtgtgcacgatgaaaaacactctttgtgcgatggcaacgccgtaaacaagcaaaacagttgaatgagtgccttcatcaatacacaaatgatgcaatcctgcaacaaatgaagaacgctaatatgattgaacaaa

SEQ ID NO: 25552 - DNA, 237 bp, Zea mays
  Clone ID: LIB3153-012-Q1-K1-A7
aggcgcaaccacacccgcgggtttgtgagatttatctgcccacccccataccattaattaccacataatacaagctctgtatgacatgcgatggtggaactaagaaaactacatttacgaaaaggaataacactggaaagttcgagaagacatatgaaccaaccatgggtgtgaaaaatcatacttcgaatttcaccactaactgcagtaagaccaagatctactgttggtatacct

SEQ ID NO: 25553 - DNA, 173 bp, Zea mays
  Clone ID: LIB3153-012-Q1-K1-A8
ctaattatgaaccaccacaaaacaacagcgctattttgctattagatacatccacccccacctctgagaagactaccatccacacaagcccatcatgtcttgcatacgtggtacaacctcttacacggagagcaacacgagaaaggcaaagaacatcgtgatggaggtaccaa

SEQ ID NO: 25554 - DNA, 318 bp, Zea mays
  Clone ID: LIB3153-012-Q1-K1-A9
aagatattggtgacaccatgaatgcctttgatatagtttttaatatgattgagtagcactagctacgaacaagaaaagttgaccttcagataaggggaacaagaaaataggctttatagcttatctgatacattagactgcatctttctttaccttgaacgtggtaatatgccaattagagactggttgcacctggagcttgtgcaaggtgggttagcctttgtgttattccttagcaggagctaatcataaggtgaaggctgaataatggatactaataccagtgcaaactagctaacatttgcttttgaaattcat

SEQ ID NO: 25555 - DNA, 283 bp, Zea mays
  Clone ID: LIB3153-012-Q1-K1-B11
gtcaagttcctggaacatggcacatcagatgcacgatcctgccgcaggaagacaagatccgcgcggtgatcagccgcttcagggctttccatgaggcgttcttggccgagtaccgcgactaaactgttacgctgtgtgtgagttaagttggaggttcagtagaactgtagaagagctcagtgacagcgcagaaagaggcagtgttagaaaggcttaggtccttcttcacaggagcaacagttgtcttgtctccatcaaggagaaataaaaattttagttttac

SEQ ID NO: 25556 - DNA, 412 bp, Zea mays
  Clone ID: LIB3153-012-Q1-K1-B12
ctctagccaacacacacataattctctccattccattccattccatctcaaaggatagaataatgggcggtctctccaccaagcttttcgtggtcctcctcctgctcgtttgttacaccgggacgcaaggcgggccggtgactatggtgtcggcgaggaagtgcgagtcgcagagcttccgcttcaagggaccttgctcgagggacgccaactgcgcaaacgtctgcctgaccgaaggtttcaccggcggcgtgtgcaagggcctacgccaccgctgcttctgcaccaaggactgctagtactgcctcgcctcgtgttctgcgtgtgcatatatagccgcagcggatcagtaaaacattcatgcatgccttaccaaatatttggcgtacccagcaagtaatgaattaaaata

SEQ ID NO: 25557 - DNA, 429 bp, Zea mays
  Clone ID: LIB3153-012-Q1-K1-B2
gccagtgtgatgagaattgttccttatgctgcattacatttcatggcatatgagcggtaccggtgttggattttgaataactgtccctcactgggaacagggcctttagtagatcttttagccggttcagcatcagggggaactgctgtattgtgtacttatcccttggatttggcccggactaagcttgcctttcaggtcaatagttcagatgaactcagcagagctttgaaaaggggaagtccccagccagcatatggaggaatcattgatgtctttagatgtgtttactcagaaggtggagtgcgggctctttaccgaggtgtaggtccaacactcatggggatacttccttatgctggtcttaagttctacatatatgaaaggcttgaggtacatgtaccagaagattacagaagttctgtaaca

SEQ ID NO: 25558 - DNA, 398 bp, Zea mays
  Clone ID: LIB3153-012-Q1-K1-B3
cgacccaggccgacgccgacgacccctctcgccgccggcggccatggcgtacggcgaccgcgtcaccaccttcgaggactccgagaaggagagcgagtacggctatgtccgcaaggtctctggacctgtggttgtggctgatggaatgggtggcgctgccatgtatgaacttgttcgtgtcggacatgataacctcattggggaaattatccgtcttgagggcgattcagctacaatccaagtttatgaggaaaccgctggactgatggttaatgaccctgtattgagaacaagaaagcctctttcagttgaattgggacctggaattcttggaaacatatttgacggtatccagcggcctctaaaaaccatcgctattaagtcaggagatgtgtata

SEQ ID NO: 25559 - DNA, 136 bp, Zea mays
  unsure at all n locations
  Clone ID: LIB3153-012-Q1-K1-B4
cgacgggngacgataccaacaactcaggcttttttcagctgcacgggaaaacagcaacccgagtacttgatacgtaaacaccgacacccacaacaaacacggaactttacttcagctctcaagacctgcaaaatca

SEQ ID NO: 25560 - DNA, 435 bp, Zea mays
  Clone ID: LIB3153-012-Q1-K1-B5
ctctcgtagtcgtgcggccaccgggtgactgccggcgccgccctaagccaggtgccgtcttcgttgggtccctcggttgcgacgagcacccaccagtaatgctgttggcaagctcaacaagacgctatgagcaatttcctttagcacgaaacaatggacttccaagattttcaagagtaaaaatgtcatgcttgggaacaaaccaaagtaaccatcattctgataccgtcagatcttcatcccctagttgtggagataccagaaaggtccaccctgtagtcaaaatgtgtggcatcacatcagctagagatgcagaaatggctgtaaaagcaggagctgagcttataggcatgatactatggcccaactctaaacgctctgtctcgttattggaggcaaaagaaatatcaagagttgtgcaattttatggcgctg

SEQ ID NO: 25561 - DNA, 222 bp, Zea mays
  Clone ID: LIB3153-012-Q1-K1-B7
aaaagaaagaaaaaaaaagatttaaaaaatttaaaaaaaaaaaaaaaaaaaggggagaaaggggaaataataaaaggggggcccccgtaaaaaaggaaaaaagttaatgaagggaagcggatgaggagataaggaaactgcagaggaacgaaaattaaaaccaagggcggacggataaaaaccaagaaactgggaaaacacgggaaaaacaaaacaaaacgg

SEQ ID NO: 25562 - DNA, 387 bp, Zea mays
  Clone ID: LIB3153-012-Q1-K1-B8
ccgcagttccccgaccacaccgttcctccgagcccaggagcagccccgcgccaggaggaagtttgttcttttaacaatatgtcgagggaggagaatgtttacatggccaagttggctgagcaggctgaaaggtatgaggagatggttgagtatatggagaaggtggctaagactgtagatgtggaagagctcactgttgaggagcgtaaccttctgtctgttgcatacaagaatgtgattggggctcgtcgcgcttcatggcgcattgtttcttacattgaacaaaaggaggagtcccgtaagaacgaagagcatgtgaaccttatcaaagaatatcgtggcaagatcgaggctgaactgagcaatatctgtgatggcatcttgaag

SEQ ID NO: 25563 - DNA, 414 bp, Zea mays
  Clone ID: LIB3153-012-Q1-K1-B9
cgagcgaatccctcgcatcgcattcgcagcctttgctgcatcacaccaccagggaaaccccagcagccgtatcgatggcgcccaaggcggcgaagaagccggctgcgaagaaaccagcggaggaggagcccgctgtcgcgaaggccccggcggggaagaagcccaaggccgagaagcgcctcccggcggacaagtcgtacggcaaagaaggccgcgacaagaagggtaagaagaaagcgaagaagtagggggagacctacaagatctacatcttcaaggtgctgaagcacgtccaccccgacatcggcatctcttgcaaggccatgtgcatcatgaactgcttcatcaacgacatcttcgaaaagctcgcctgcgaggctgacaagcttgcgcgctacaacatgaagcccacca

SEQ ID NO: 25564 - DNA, 402 bp, Zea mays
  Clone ID: LIB3153-012-Q1-K1-C1
tgaaaactacccacaccacaaagaaatcgaagaggggaacagaggagagagaagggagatggcggaggcgacggcgtacgaggagcagcgccggaggcaggtggaggcgaacaagcggaagctggaggagcttcagctccactacctctccgccgccgtcagagaggccgcagccgccgccaagccctcgccggtcaagaagcggaaggcgcgggtgccgcttgacgccgccgactccgtgatggagccactacggcggtccggccggctcgccaacctccccgataagtccgtgcaccgcgaggaggttccaactttttggagaaagattaggaggacgtatggatcagtgagaaaagatctggaaaaccgggtgtacgcgaccgacgaggcgaggagcta

SEQ ID NO: 25565 - DNA, 405 bp, Zea mays
  Clone ID: LIB3153-012-Q1-K1-C11
ctccttcccggtctcctccgcccgttgccttcgtcccctccatctccggctgcgacgccggcgagcccgacaccgagaatcggatccgccgacaaggcgagagggaagagatggggctcacgttcaccaagctgatcagccggctgttcgccaagaaggagatgcggatcctgatggtgggactcgacgccgacggaaagaccaccatcctctacaagctgaagctcggcgagatcgtgaccaccatccccaccatcggattcaatgtagaaactgtggagtacaagaacatcagcttcactgtctgggatgtcgggggccaggacaagatcaggccactgtggaggcattactttcagaacacccacagtctcatctttgttgtggacagcaatgatagggacc

SEQ ID NO: 25566 - DNA, 297 bp, Zea mays
  Clone ID: LIB3153-012-Q1-K1-C2
ctcgatctggaagcgccgcagtagcagccatggacgtgagcggagcaggcgggaaggcgaagaagggcgcggtcgggcgcaaggccggcgggccgacgaagaagtcggtgtcgcggtcctccagggccgggctgcagttccccgtcagccgcgtcgggcggtacctcaaaaagggccggtacgcgcagcgtgtaggcacgggtgcccccgtctacctcgccgccgtcctggagtacctcgcggccgaggtgctcgagctcgccggcaacgcggcaagggacaacaagaagacgcgca

SEQ ID NO: 25567 - DNA, 412 bp, Zea mays
  Clone ID: LIB3153-012-Q1-K1-C3
catcttcttaacgttttctcaacggtcggtttcgggctatgcagcgaaggctacagcgacggcagtttgcagacccgacagggtggagactgcggcgtagtccgctgaggaagtgctggacgtcgccgttgcctatcagaggttgctaggtctgctccctcttgcggctcaaactgtaaatgttggtgcacaaatatataataaagatcagcgggcaatatacaagctattatctggaagaatcaaatctgaaaatgtccctgaaaataaggatggatcagacgacgactacgatgacgacgacgatgaagacaatgacgatgagggtggtgacgacgatgatgatgctgaggaagaattctctggagaagaagatgggggtgatgacgatgatcaagatgatgatcctgaa

SEQ ID NO: 25568 - DNA, 211 bp, Zea mays
  Clone ID: LIB3153-012-Q1-K1-C5
ataatgcgacccgccctgtagcgcattattaaccgcggctgttgtggtgactacccgcatgaccactactatagtcagcagcgtactagcggccgcttctgttgttttccttcctttctttgtcaccacggtcggctgctttccccaagatgttttaagagggctgcttttttgagggctaccaattaatgttatgcagctcctccaccaa

SEQ ID NO: 25569 - DNA, 428 bp, Zea mays
  Clone ID: LIB3153-012-Q1-K1-C7
cccacaccacaaagaaaccgattaggggatttgaggagagagaagggagaccgcggaggtgacagtttacgaggagcaccccccgacgcaggtggaggcaaacaagcggaagctggaggagcttcagctccactacctctccgccgccgtcagagaggccgaagcctgagacaagccctcgccggtcaagaagcagaaggcgcgggtgccgtttgacgccgccgactccgtgatggagccactacggaggtccggccggctcgccaacctccccgataagtccgtgcaccgagaggaggttccaacttttaggagaaagattaggaggacgtatggatcagtgagaaaagatctggaaaaccgggtgtacgcgaccgacgaggcgaggagctacgccatttgtaaggctgaagaagtggaacaagaac

SEQ ID NO: 25570 - DNA, 431 bp, Zea mays
  Clone ID: LIB3153-012-Q1-K1-C9
cgccacaaccacaagccaaggtttcagccattgccctcgccatggctcccaacggcagcatgaagacgcctgctggcctactcggcgacgaggtggccccggtggagggactcaagccgtcgcggttcacccttaaaggcaaggacctggccgtggacgggcacccggtcctgctggacgtgccggccaacatccgtctcaccccggcgttgacgctcgtgcccgccgtggacgttctagcatcggtcggtggcagcttgctcggttttaacgccgaggcggccgagagccggcacgtggtgcccgtcggaaagctccgtgacattcggttcatgagcatttttcgtttcaaggtgtggtggacgacacactcggtgggggacaagggcatggacttggagaacgagactcagatgatggtgctcgaccgc

SEQ ID NO: 25571 - DNA, 359 bp, Zea mays
  Clone ID: LIB3153-012-Q1-K1-D1
gtcttgctacatggagtacagaaagagggtggatgcgctagtgtttttctcgttacttctcctcggatactttgctgctcatgcacatgggaagggtcatgtcacagatgatgtcggtgtttctactccagctaaagaaggaattatgcaaggaaacggagcacgatgcgttgtagggtttcctccatgcaaagataacaagtgctactgctgcattggggggcgaactcatgctcgctactctacgatggctgagtgtagacatgcctgcttctaaacacaaattaagatcgctgttattatatacattgtaatggtaggtaatgctattaataatatatgggaattttagttttggt

SEQ ID NO: 25572 - DNA, 274 bp, Zea mays
  Clone ID: LIB3153-012-Q1-K1-D3
cccacccgtacgaggactgtcatctctcacatgcaattgcttaatacattcatagagagagagagagagagagccctatcctgcatagagagactgacaatggacgcaaaaccggcgagtgtctgcatcttactgctgcttcttctggcgcagaatccttctttctcctctgcagacgaccagaagtgcttttacaccactgaccgggtggcgacctggtgcgtggactgggcgtgcaagttttgctgcctgatcgacgccaagcagtaccata

SEQ ID NO: 25573 - DNA, 427 bp, Zea mays
  unsure at all n locations
  Clone ID: LIB3153-012-Q1-K1-D4
cgcgacgcgacttattcagcaccaccgccgtctttcattttttccttcgcatcttgagagagagagagagagagagcggaggaggagagcaaggagatgggcggcttcgaccagcaggtgaaggagcggaccaaggagctgaagcacctcaagaccgcggcgatgaagggcatcaaggcggccggcgagtcgtgcaagaaggcgtggagcaaggtcaggagcagcatcaagcgctaaaaggccctaggcgttgttgctctgctgctgcgtggttttctgagttgtggactgtggtagatttgcgcttgtggtttctgtttgttggatctacttatttattttggatatacatcatgtgtgaagatctgcatgtgtgtgttcctagtgtttnttgcttctgttcgttcgctgtgtgatccttttcgag

SEQ ID NO: 25574 - DNA, 434 bp, Zea mays
  Clone ID: LIB3153-012-Q1-K1-D5
cggaggcaggaagagagacgacggcggccatggcgacctccttccaggggacgaccaccaagtgcaccgcctgcgacaagacggtgtaccttgtggacaagctcaccgccgacaaccgcatctaccacaaggcctgcttccgctgccaccactgcaagggcaccctcaagctcgccaactacaactccttcgagggagtgctctactgcaggcctcacttcgaccagctgttcaagaggacagggagcttggacaagagcttcgaaggaactcccaaggttgtcaagccagaaagaaacgttgggaatgagaatgctactaaagtctcaagcgcctttgctggcaccagagagaaatgtgttggatgcagcaagacagtctattccactgagagggtcactgttaataacactatgtaccacaagagctgtttc

SEQ ID NO: 25575 - DNA, 339 bp, Zea mays
  Clone ID: LIB3153-012-Q1-K1-D8
ctcgcattttccttgcaacctattgcctatttccctcccaaccaaagaccgagggcgcttagggccgttaagaagcccgcggcgaagaagccggtggaggaggagcccgcggccgagaagacgaccgccgggaagaagcccaaggcggagaagcgggtcctcgctggcaagttccgccggcaaggagggcggtgagggcaagcgtggcaagaagaagggcaagaagagcgtggagacgtacaagatctacattttcaaggtgctgaagcaggtgcacccggacattggtattttcttcaaagccatgtccatcatgaacttcttcatcaacgacatttt

SEQ ID NO: 25576 - DNA, 250 bp, Zea mays
  Clone ID: LIB3153-012-Q1-K1-E1
ggtgaactgcaatggccaattaaccagccattattatctagaacattctggggagacacccagcacctcgataaagcagcgctgggagtagtagagcactaatgtaccgaggctgagactagtctatggtaaacaagagaatccgcgtatattgacaatcggtgtgggtctgattgaacatatatgatgtcagaccctgcagggatacatatataactgtaaatactacttgatcgcaagagtcatgagc

SEQ ID NO: 25577 - DNA, 400 bp, Zea mays
  Clone ID: LIB3153-012-Q1-K1-E10
aggaagcaggcggccaccatggttaagggacgcacgggacagcgcgtcaggcggtacgttcggggcaccatcctcggatacaagaggtccaagtcgaaccagtacgagaccacgtcgctcgttcagatcgagggggtgaacaccaaggaggacgtcgcgtggtacgctggcaagcgcatggcgtacatctacaaggctaagaccaagagcagcgagacccgctacaggtgcatctggggcaaggtcacccgcccgcacggtaactcgggcgtcgtccgcgccaagttcaagtccaacctcccgcctgagttcatggggcgcaaggtcagagtgttcatgtacccgagcagcatctaacggttttgttgaagtaaaggtggactccaaatggccatgctta

SEQ ID NO: 25578 - DNA, 428 bp, Zea mays
  Clone ID: LIB3153-012-Q1-K1-E11
aaacaccccgaaccgagcctgcatttcggcgccctcatcaagcgaggcagtccccaacacactactacccaaacaaagcacaaaaaaatcggaagaaaagcaaattgcagcgcgtaccattccgtggcggggcctgatcgaggctggcggcgtcgagggcgaagaagcggctccgctagcgcgatcgccgctaccgacctcccgtcgccgcgagggggtagttactagttagcgccggagcgaccgacacgcgagccctaggcgggatccgcgctgccgccgcgggcgtgggtggagtccgcgggatcgcgacgtgaagcgtgccgctagatttggattcggacctgcgtttcgtgtttgtttgtttgtttttccttccagggaggaaggcgactagcgctagcgcctaccgaggcgcgggcaggtga

SEQ ID NO: 25579 - DNA, 417 bp, Zea mays
  Clone ID: LIB3153-012-Q1-K1-E12
aaaaaaaaaaaaaaaaaaaaaattaaaaaaaaaaaaaaaaaaaaaaaaaaaaagggaaaaagagaaaaaaaaaaaaaaaaaaaaaaaaaaaaaaaaaaaaaaaaaaaaaaaaaaaaaaaaaaaaaaaaaaaaaaaaggggggggccgtttaaagggaacaaagttaaagaaccggggatgggaaagaaaaacttttttaatggggtcaccaaaaaaaaatgaaggggcggcgatttaaaaacggggggacggaaaaaaccggggggtaaccaaaaaaaaaggctgggaaaaaaaaccccttttgccaggggggggaaaaaagaaaagggccccaacaaatggcctctcaaaaaaattgcccatctaaaagggaaatgggaaccccccctaaaagggctaaaaaaaccgggggggggg

SEQ ID NO: 25580 - DNA, 435 bp, Zea mays
  Clone ID: LIB3153-012-Q1-K1-E2
cctcgcagccgtattcctgtctcgaatcctctctcgccgctccgatggcccgcacgaagcaaacagcaaggaagtcgaccggcggcaaggccccccggaagcagctggccactaaggctgcgcgcaagtcggccccggccaccggcggcgtgaagaagccccaccgcttccgccccggcaccgtcgcgctccgcgagatccgcaagtaccagaagagcactgagctgctcatccgcaagctccccttccagcgcctcgtccgcgagatcgcgcacgacttcaagactgatctgaggttccagtcctccgccgtcgcggcgctgcaggaggccgccgaggcgtacctggtgggtctcttcgaggacaccaacctttgcgccatccacgccaagcgcgtcactatcatgcccaaggacatccagctcgcgcggcgca

SEQ ID NO: 25581 - DNA, 414 bp, Zea mays
  Clone ID: LIB3153-012-Q1-K1-E3
gcgcctccatttcgggctctgtcccttgcatgttcagtcttgcctccaaccatgggtaaagagaagttccacatcaacattgtggttattggccatgtcgactttggcaaggtgaccaccacaggacaccttatctacaagcttggaggcattgacaagcgtgtgatcgacaggtttgagaacgaggctgctgaaatgaacaagcggtccttcaagtacgcctgggtgctcgacaagctcaaggctgagcgtgagagaggtatcaccattgatattgctctgtggaagtttgagaccaccaagtactactgcacggacattgatccccctggacaccgtgactttatgaagaacatgatcactggtacctcccaggctgactgtgctgaacttatcattgactccaccactggt

SEQ ID NO: 25582 - DNA, 361 bp, Zea mays
  unsure at all n locations
  Clone ID: LIB3153-012-Q1-K1-E4
gagcaggtgacaggctgcagctgaaggcacgaggcgatcgatgatggcgacgacgagcggcggaacgaaaggagcaggccaaacaggctgcgctgcacatgaagggtgtcgtccgtctgtcgggagggcccgaagcgacgcaaggcccgggcccccattaggccattgctacatcccccctctgacttcgtgcgtggctgcacggccaccgtgccgggcaagaacagtctgtaacaaatgattcgattcgtctctctctcgtttaccaaccgtatttttttccaatggtaaacccgttaccagtgtctgtagggggcagcggaccccaataaatcgtcataatatttcgccgttcanaana

SEQ ID NO: 25583 - DNA, 423 bp, Zea mays
  Clone ID: LIB3153-012-Q1-K1-E5
gcaagccgcaggggccgaccgtagaagcgacccaaaatgtcgcccggctattacatgctgaccgacgtgtggatctcctccccgatgccagccccgcgcctgcgggccgccgccgccggctcctacttcgctccgccgcgccgggcggcagtcgcactcgtcgtgcgcgcggcgtccgcatcttacaagtcccctgccacggcggaggcggccccgaagaagaagagggcgaccggcatcacccagccgaagtccgtgtcgccggcgctgcaggcaatcgtgggcgacccggatattccccgcaccgaggtcctcaagcgcctctgggcctatatcaaggagcataacctccaggatccctctgataaaaaggtggtggtttgtgatgagaagctaaggtcctgttcgcgggacgggagcgag

SEQ ID NO: 25584 - DNA, 415 bp, Zea mays
  Clone ID: LIB3153-012-Q1-K1-E8
ctttcccacacactgcgtcctacgctgaagtcctgtcaaagccaatggagggtggcggcgcgaaccgagaaaacggcgacggcttcggcaaaaggcaggaacaaggtcctcatgatggacgtctaggtgcttagccgcagcagggcaagcgaacttcgtcaatcgtggagggttccgtagaccaaacttcggcaacagcttccaccaaaatgggtcgtacgatcaacctggtcgaggtaggcaggacttcaatcaaggcagctctggtcgccatactggtcgtggtcgctttggttattcagtgggtgatcagttcagttacaggacggtggagagcaatccagtcttggcaacaccaggtttggcacctgctgatgcagtggcacaagcggtagcgctgctgacacaagttata

SEQ ID NO: 25585 - DNA, 370 bp, Zea mays
  unsure at all n locations
  Clone ID: LIB3153-012-Q1-K1-E9
acgcgtncgctntcccacacactgcgtccttttcttatgtcttgtcaaagccaangtaagccgggggtgttaatttttaaaacggcgaccccctctccataaggcatgaacaatgttctcatgatggacgtctatgtgcttagccacagcatggcatgcgaacttcgtcaatcttggagggtttcgtataccaaacttttgcaacagcttccatcaaaatgggtcgtacgatcaacctgttttatgtttgcttgacttcaattaatgcagttcttgtcgtcatacttgttgtggtcgcttttgttattcaattgatgatcatgttaaatttcatgtactctcgtnagcatnccaaatctnngggcacacc

SEQ ID NO: 25586 - DNA, 360 bp, Zea mays
  Clone ID: LIB3153-012-Q1-K1-F11
cgaagccattccctatgcaagaggggatcattagatcgggcttattattacttattactgcaggcaaggatcggagttgctctgaattgactgatccatggcggcgacaatggcactgacgacgatggtgacaacgagcaaggatagctggtcgtgattgcacgtcccggcggtggcattccctaggaagccacgaggtggaacgaccggcggcctttagttccctcgccgggcgatgttcgccagcgtctgactgaacgtgtgcccgggcgtcccagcggcgagcgacccgagcgagcccgatacgaaggtcgtgcgggcggccgacaactgctacatcgcgcgctagcttggcgccgt

SEQ ID NO: 25587 - DNA, 406 bp, Zea mays
  Clone ID: LIB3153-012-Q1-K1-F12
ggcgtacgacgcgttcccgcgcgcgtccagtgcgccgcagctgcacccgtaggctagcgccgtgcagtcggcgcgggagcacgcgtacgcgacgttgtccgggagccgtccgtccccggccatgctgatggggttcaggacgcaccaccgccggggcaggtactccacgccccgggccgggacgggcatcgccggccgcccgtcgccgcgcaggtccagcgggaacttgggccgcccgtcgaaggtgaagattccccagtggcgctcgaagttgcccggcgccacgctcttggcgtcctcgtccacgagcccgaacaggtgaaacaaccgcagctttagcaaagcagatcgtcgctgaagcattgattggcgggagcaataatggcggaggtttgggcaggggtgc

SEQ ID NO: 25588 - DNA, 334 bp, Zea mays
  Clone ID: LIB3153-012-Q1-K1-F5
acgcaggaacagagcgaggcgacgccgccgaacttattcttcgtcgatagtgattattaacgcgaagggaattggcgaccgttcaaggggatctgatctggcaagtcgtgaggaagaacaacttcttccttgtgaagcacatcggcaactgcactgccgaggtgcagttcaacaaggagccgaacaacctctacaacatccactgctctaaacacttgggtgtggcgaacaagaatactgtgacgattcaaccagctgcaaatgactcggctaggagcctatctactactacaaccaagaagctcaacgcacctgctaagctcagccacaagtc

SEQ ID NO: 25589 - DNA, 351 bp, Zea mays
  Clone ID: LIB3153-012-Q1-K1-F8
ggacgcccaccagcacctgcccttctcgccgtcgccgcctccctccgcgcgaccgatctaccctccgtcaccaccatgtcgctgatcgccggggaggacttccagcatatcctgcgtttgctgaacaccaacgtggatgggaagcagaagatcatgttcgccatgacctcaatcaagggtgtcgggcgccgcttctccaacatcgtctgcaagaaggccgacatcgacatgaacaagagggccggcgagctgacgcctgatgaggctggagcgcctgatgacggtcgtggccaaccctaggcagttcaaggtgccggactggttcctcaacaagaagaaggattacaagga

SEQ ID NO: 25590 - DNA, 195 bp, Zea mays
  Clone ID: LIB3153-012-Q1-K1-F9
cacgcgtccggtaactcacacaacatgatttttttgtttctcatctccctcctcgcggggagcgattctatttcacaggatgtcgccaaacacaacggaggacgtacagtatagcctgtggttgctcggctcctacgtggatgggaagcagaagatcatggtcggcatgactataataaacaagcttaggtaccc

SEQ ID NO: 25591 - DNA, 401 bp, Zea mays
  Clone ID: LIB3153-012-Q1-K1-G1
gagtgtcgcaccattgacaagccatgcgaatgagatgaaggtgatgatgataaggggtgggcacttgtacagtcatcctgctatatatgcctctcgccccccatggagctagctgatagacatgccgttctagtttgctcgtgtgtacacagctgggagggagctattatatttagtggatcgggtcaaggttgaacttgagagactccttccagatgagctcctttatagcttcttcggtgagcgatggctgctcgaagtcaaagctgaaaggcgccggacagatgggctcgtcgtttacctcgtgaagggacgccaggtattgggtggcacagagccctatcaactgcgatatgattccacggaaggaaaagcaacaacatagtatcctctcgctggga

SEQ ID NO: 25592 - DNA, 339 bp, Zea mays
  Clone ID: LIB3153-012-Q1-K1-G10
cctttcaataggcgtcccccattaactagtttacatggcaaaactgttgagcgtgggcttggcccttttctttgtagcagctctgtttgccataggctctcatgctgatggagactgtgagaatgacctccaaagcctgataagtgactgcaagacatacgtgatgttcccagctaatccaaaggtccctccttcggatgcttgctgtggtgtcatcaagaaggcaaacatttcttgcttgtgctccaaggtcaccaaagaaactgataatgttgtgtgcatggagaacagtgtgtatgttgctgatcactgtaagaagccattttagcattgctttca

SEQ ID NO: 25593 - DNA, 325 bp, Zea mays
  Clone ID: LIB3153-012-Q1-K1-G12
ggcagatctacgctagagcgattgagccatatctcaaccgatagggacagtgcggcttggtggtggcgctcgggcccggaccgctctacggcagcggcctgccgaggccgcgcttattcccaggcgaccgcgtggacaccgcgtggtacgtcaccgacccgctgttcgaatgggcgcgcgaagcgcactgggccatgggcgggatcagcttgaagcgcgttcggcgcagggtcgcatcgagggttcgcgggacaagctgcggacgcgagcgcactgagacaccaggatcaaggtcaaagccaagggccgctcatgtggccacatg

SEQ ID NO: 25594 - DNA, 361 bp, Zea mays
  unsure at all n locations
  Clone ID: LIB3153-012-Q1-K1-G2
gtgccgtgcaactggcgagggctggacatcgcgttcaaggtggacgccggctcgaacccgaactacttggcggtgctcatcgagtacgagtccggggacggcgagctggagtccgtggagctcatgcagcgcggcggcggcggcggcagggcgtgggcgccgatgcagcagtcgtggggcgcggtgtggcggtacaactccggcgacaccctgcaggcgcccttctccgtccgcctcacctncggctccggcaggacggtcgtcgccagcaacgtcatccccgcggggtggacgcccggcgccacgtaccgctcggtcgtcaacttcgacaactaacgaggacggacggacggaccgaaat

SEQ ID NO: 25595 - DNA, 425 bp, Zea mays
  unsure at all n locations
  Clone ID: LIB3153-012-Q1-K1-G4
cttttagtaacctttcaataggcgtcccccaagaactagtaaacatggcaaaactgttgagcctgttcttagccctctcctttgtagcagctatgtttgccataggctctcatgctgatggagactgtgagaatgacctccaaagcctgataagtgactgcaagacatacgtgatgttcccagctaatccaaaggtccctccttcggatgcttgctgtggtgtcatcaagaaggcaaacgtttcttgcttgtgctccaaggtcaccaaagaaactgagaaggttgtgtgcatggagaaggttgtgtatgttgctgagcagtgtaagaggccatttgagcatggctttcagtgcggaagctacaaggttccagcaaactgatgataccataagagggaagcgtntggcgtagtctttagatttcaa

SEQ ID NO: 25596 - DNA, 415 bp, Zea mays
  Clone ID: LIB3153-012-Q1-K1-G8
cgcctatctcgccaagcaccgtctcatcaccgaaggttcgcaaagatggcggtgccgctgctgacgcataagatcgtgaagaagagggtcaagcagttcaagaggccccatcttgaccgctacaagtgccttaagccaagctggcgcaggcccaagggtatcgactcccgcgtcaggcgtaagttcaagggatgcaccttgatgcccaacattggatatggctccgacaagaagaccaggcactaccttcccaacaagttcaaaaagtttgttgttcacaatgtctccgagctggagctgctgctgatgcacaacaggacttactgcgctgagattgcccacaacgtgtccacccgcaagcgcaaggagattgtcgagcgtgctgcgcaaatggacatcgtggtcaccaacaagc

SEQ ID NO: 25597 - DNA, 329 bp, Zea mays
  Clone ID: LIB3153-012-Q1-K1-G9
ctgtcgcagtacgggctgggctttgaggagtacggccccgtggtgacctccctgcgcatcatccccaaggcgtggctggagttcatgatgaagttcgagctcgggctggagaggcccgagccccggcgcgcgctggtgagcgccgccaccatcgcgctgtcctacgtcgcgggcgggctggtgccgctgctcccctacatgttcgtgccggaggccgtgcgcgccatggccgtgtccgtcgccgtgacgctcgcggcgctgctcttcttcggcttcgacaagggccgctttacgggcgaccgccctttcttcagcgccgttcagaccac

SEQ ID NO: 25598 - DNA, 218 bp, Zea mays
  Clone ID: LIB3153-012-Q1-K1-H1
cggacgcgtgggtgactctgacaccgcagttattgacaatggatagggtaccacaaacccggaagggggtggtagtgtaataacaaccacagtagcggccgaaacaaatgtcatggtgcaaaaaatactgcgagcctacagctgaccatactacgagccgagatcatgtgacatcacgcgggagtggacatatgcaaagttgctcagagcaaaaagct

SEQ ID NO: 25599 - DNA, 275 bp, Zea mays
  Clone ID: LIB3153-012-Q1-K1-H10
gagagtgggagacaaggggatttggggaatgtgagcgcaaggtagcgatgcgggggtggtgggcggctaggtggaggacaacatggaggcgtggctggttgccaagaacactctcaagatcatgcccttcaagctcccgcccgtcggaccttatgatgtccgcgttcgcatgattgcagtggggatttgcggcagcgatgtgcactacctaacggagatgctcatcgtgcacttcgtggtgaaggaaccgatcgtcatcgggcacgagtgctccc

SEQ ID NO: 25600 - DNA, 418 bp, Zea mays
  Clone ID: LIB3153-012-Q1-K1-H11
cccaaccataccagcggcgccgtaggctgacgaggaggcggagtagagtggccggactacctcgacacctccactgcaaccatgggtatctcacgtgattcgatgcacaagcgccgggccaccggtggaaagcagaagacgtggcgcaagaagcgaaagtatgagcttggccgccagcctgctaacaccaaactgtctagcaataagacagtgaggagggtccgtgtacgtggaggcaacgtgaagtggagggctctccgattggatacaggtaactactcgtggggaagtgaggctcttacccgcaagacccgcatcctggatgtggtctataatgcatcaaacaatgagcttgtgaggactcagactcttgtgaagagcgccattgtacaagttgatgctgctccattcaagcagt

SEQ ID NO: 25601 - DNA, 427 bp, Zea mays
  Clone ID: LIB3153-012-Q1-K1-H2
cgaaaccctaacgccgccgccgcttaacaggtaagccgccgtcatggtctccggttccggcggtatccgcgaagcgcatcgtggtggacgcgcgccaccacatgctgggccgcctgtcgtcgattatcgccaaggaactgctcaatgggcagaaggtggtcgtcgtccgctgcgaggagatctgtatgtcgggtggactcgtacgccagaagatgaagtacctccgctttctccgcaagcggatgaacaccaagccatcccatgggcccatccacttccgcgccccgtccaagatcctgtggcgcaccatccgcgggattgattccgcacaagaacaaataggggggaggcggctctggcgaggctcaagacgtacgagggcgtcccgccgccgtacgacaagaccaaacgcctggtcatccctgac

SEQ ID NO: 25602 - DNA, 417 bp, Zea mays
  Clone ID: LIB3153-012-Q1-K1-H3
cggacgcgtgggcgtcaccacatggtgtgccacgccaatcaacttcacatcgtcatccatccataacacctccacatttggtcaggcctgggcctaggcaagatggaaatgatcctttggttgatactccagctcattctcggcataaacatttttggacaacctatggtttagttgcagcagggattgcggttttccttttggtatcagcagctagtattctctgcttccgagctaagaaaatgggaaccgtaaggccatgggcgacaggtctaagtggacaattgcagaaagcttttgtaactggtgtaccttcgctgaaacgatcagagctggaaacggcatgcgaagatttcagcaacataattggttctacctctacctgcatgctgtacaagggaactttatctagtggag

SEQ ID NO: 25603 - DNA, 418 bp, Zea mays
  Clone ID: LIB3153-012-Q1-K1-H4
gtcgcgtccagaacccgcaacaaatcggccaccaccgtcctctcccttgctatgccattcctcctctccgccgccagcgccagcaccaccaccaaccctcatcctctctccccgttccctcgcagccagaacaatagccgcgtccaccgcctgcaacttccggcacgccgcctccccagcttccccgcggttgctccgggcgcttcctttgctcccctcccgcagaggctaggcatggcgtcgctggcggcgtcagcggccgccgcggcggaggtgacgcacctcacgcagcgcgacgcggcggagatcgacgagcagctcatgggcccgctcgggttcagcgtcgaccagctcatggaacttgctggattgagcgttgcggcagcccttgcggaggtttacaagttgaatgaacatg

SEQ ID NO: 25604 - DNA, 435 bp, Zea mays
  Clone ID: LIB3153-012-Q1-K1-H5
agaccattagctttatctactccagagcgcataagaacccgatcgacaccatgagggtgttgctcgttgccctcgctctcctggctctcgctgcgagcgccaccttcacgcatacaagcggcggctgcggctgccagccaccgccgccggttcatctaccgccgccggtgcatctgccacctccggttcacctgccacctccggtgcatcttccaccgccggtccacctgccgccgccggtccacctgccaccgccggtccatgtgccgccgccggttcatctgccgccgccaccatgccactaccctactcaaccgccccggcctcagcctcattcccagccacacccatgcccgtgccaacagccgcattcaagcccgtgccagctgcagggaacctgcggcgttggcagcaccccgatcctgggccagtgcg

SEQ ID NO: 25605 - DNA, 414 bp, Zea mays
  Clone ID: LIB3153-012-Q1-K1-H8
gaccactgatttcacaatgaaatgggagactttgccttcatggctagaactgttgcttgcaacacaattctttacgacttgtgctaaccatcttcttgctagtcgcaatgaatgtaacctattttgcacccagtgtgagaccaaaccagctgctttctgtaactattgtcgttcaagtgatcattccacccaccgtgtaatccagataaggcgttcatcgtaccatgacgttgtgagggtgtccgagattgaggatatccttgatgtcagcgatgtgcaaacttatgtaatcaatagtgcaaggattgtattcctgaatgagcggccacaactgcgtgcttctagtgtccccatttgtaaggcacccacatcatcaacacatagctgtgagacatgtagccgtgtgctacttga

SEQ ID NO: 25606 - DNA, 376 bp, Zea mays
  unsure at all n locations
  Clone ID: LIB3153-012-Q1-K1-H9
gagacatcgaggagaaatcggagcacaactgccaatgcgactgctcttaaaggcagctgcgaacttctacggatatttgtaacagaggctattcaacgctctgcttttatcgctgaagcggaggatggtgctgttattgaacccacccacctagagcgtgtgttgccgcagctgctcttggacttctgaggtaccccatggagcctccaaaagcatttatctaggcgtgtctgctatggaaggatacagatgcctggatgcatcaacagaatcttattgctgatctatgtcttgtaatctgtaaacacacgagatttctatatggctttataaaaatgcatgcatttcttggaaaaaaaaagaaccnatattatta

SEQ ID NO: 25607 - DNA, 426 bp, Zea mays
  Clone ID: LIB3153-013-Q1-K1-A2
ctatactctaggaagcaaggacaccaccgccatggcagccaagatgcttgcattgttcgctctcctagctctttgtgcaagcgccactagtgcgacccatattccagggcacttgccaccagtcatgccattgggtaccatgaacccatgcatgcagtactgcatgatgcaacaggggcttgccagcttgatggcgtgtccgtccctgatgctgcagcaactgttggccttaccgcttcagacgatgccagtgatgatgccacagatgatgacgcctaacatgatgtcaccattgatgatgccgagcatgatgtcaccaatggtcttgccgagcatgatgtcgcaaatgatgatgccacaatgtcactgcgacgccgtctcgcagattatgctgcaacagcagttaccattcatgttcaacccaat

SEQ ID NO: 25608 - DNA, 451 bp, Zea mays
  Clone ID: LIB3153-013-Q1-K1-A3
cgtccgctatactctaggaagcaaggacaccaccgccatggcagccatatgcttgcattgttcgctcggctagctctttgtgcaagcgccactagtgcgacccatattccagggcacttgccaccagtcatgccattgggtaccatgaacccatgcatgcagtactgcatgatgcaacaggggcttgccagcttgatggcgtgtccgtccctgatgctgcagcaactgttggccttaccgcttcagacgaagccagtgatgatgccacaaatgatgacgcctaacatgatgtcaccattgatgatgccgagcatgatgtcaccaatggtcttgccgagcatgatgtcgcaaatgatgatgccacaatgtcactgcgacgccgtctcgcagattatgctgcaacagcagttaccattcatgttcaacccaaaggccatgacgattccaccca

SEQ ID NO: 25609 - DNA, 318 bp, Zea mays
  Clone ID: LIB3153-013-Q1-K1-A5
gtcgtcctcgtcgcctcgaaggatgaggcgagcattggggcggacgctgaatgcaacaaccggccagtcagctgctatataaagtgcctgcggccgggcgcctgcaacagctgctgcaagcagaatcacttcgtccgtggagagtgcattgggtgggactgctggtgctgcagagcctagctagccctgctctcatctgaccaatgcaaggagatttacttgtaataataatcatcataataatcaatggtaccagcatgcatcgatcgatggatttaaaaaaaaataaatattgatgattcaatacaaaattataaa

SEQ ID NO: 25610 - DNA, 423 bp, Zea mays
  Clone ID: LIB3153-013-Q1-K1-A6
tccagcgccttcaccctcctcgccgcctcactccctctgaggtcgcagatccgtccggttagacgaagccgtccgcacccatggcctccggtgagctcgcctgcacctacgccgccctcatcctcagcgacgacggcatcgccatcaccgccgagaagatcgccaccatcgtgaaggcggccaacatcaagctcgagtcctactggccggcgcttttcgctaagctcctggagaagcgcagcgttgaggatctaatcctctccgttggatctggtggtggcgctgcttcagttgctgcttccgccccagctgggggtgctgcagctgctgctgcccctgctgcagaggagaagaaggaagagcccaaggaggagtctgatgacgacatgggcttcagcctgttcgactgagagtctgaaaccc

SEQ ID NO: 25611 - DNA, 424 bp, Zea mays
  Clone ID: LIB3153-013-Q1-K1-A7
tcgctatactctaggaagcaaggacaccaccgccatggcagccaagatgcttgcattgttcgctctcctagctctttgtgcaagcgccactagtgcgacccatattccagggcacttgccaccagtcatgccattgggtaccatgaacccatgcatgcagtactgcatgatgcaacaggggcttgccagcttgatggcgtgtccgtccctgatgctgcagcaactggtggccctacccgttcagacaatccagtgatgatgccacagatgatgacgccctaacaggatgccaccatggataatgccgaccttgatgtcaccaatggtctggccgagcatgatgtcgcaaatgatgatgccacaatgtcactgcgacgccgtctcgcagattatgctgcaacagcagttaccattcatgttcaac

SEQ ID NO: 25612 - DNA, 269 bp, Zea mays
  Clone ID: LIB3153-013-Q1-K1-A8
tcgacgaattcaccaaccaaactccactgtctccaacttttcatcgcgttgctacgcctgctctgcatgacgaccaaggcttccagaagttcttctgggtggcaactggaaatgcacggtctggcgaggacgtgaagaatattgcaccgctcttaacaaaccgggggtcgtctgtagacttcgtgaggtggcgtatgttccactttctgttgtctgcacagtcaaaggactgctgcggttggacttcacctgatgaccgcaaacatgat

SEQ ID NO: 25613 - DNA, 369 bp, Zea mays
  Clone ID: LIB3153-013-Q1-K1-B12
acgccggataggtagcaccggagcaggtagaacgctgcacaatccccttcgccgccgccgggacggtgaacgttcctaagaccaagaagacgtactgcaagaacaaagagtgcaagaagcacacactccacaaggtgactcagtataagaagggcaaggatagcctgtctgcccagggaaagcgccgttatgaccgcaagcagtcaggatatggtggtcagaccaagcctgtctttcacaagaaggccaagaccaccaagaagattgttctgaagctgcagtgccagagctgcaagcactactcacagcacgccatcaagagatgcaagcatttttgagattggtggagacaagaaaggcaagggcaca

SEQ ID NO: 25614 - DNA, 415 bp, Zea mays
  Clone ID: LIB3153-013-Q1-K1-B2
tgcactgctgttgccgccgctgccgcatctatcgcagatctatcccacgtacctcgacgcaagacggatgtacaaaacgacttcgatccgatctacccctcgtcagaactccagaagctctcgcgcagctcaaacacactcgtacaagactccaactgcttcttaattgatgttaaatgcctggggtgctccagcgtagccactgcattcccactctcccaaactgctgccatactccctgtgtgtgcaactgctctctgactgcccactggcagaaaggcagaggtaactgaaggctgacttttgcctaggattggcgactaaagcgagactagacctgaagttgtgctctatgccagatactagccacatgcactggctttaaactagattttgcataaattgttcataagca

SEQ ID NO: 25615 - DNA, 439 bp, Zea mays
  Clone ID: LIB3153-013-Q1-K1-B3
tcgacccacgcgtacgtacacttcttctgccgccgctgccgcatctaacgcatttctatcccacgtacctccatgccagaggggtgtacaaaacgacattggtctgataatcctctcctcaaaactccagaagatcttgcacagcaaaaacacactaatacaatcctccaactccttcttaactgatgtttaatgcctgtgaagcttcagcatagctactgcattaccccactctcaaactgttgtcattctccctgtctgccaaattgttctctaactaccctctggcagaaaagaaaaggtcactgatggctgattttttcctatgatttcagactaaagcgaatgtagtcttcatgttttgctcaatttctgatacttgcctcataaacctccttttaacttcattttccttaaatttttctttagctgctttcta

SEQ ID NO: 25616 - DNA, 351 bp, Zea mays
  Clone ID: LIB3153-013-Q1-K1-B7
cgtacggaatccaaagccaaaaccttaatcgcacacgtttagaccgagagagaggttttccatcggggggtcccggcatcggttgcgggctggtcccgcaagagcccgtcctcctcaaggacattctcacctcaccgaccctctgcgggaacaccgctgtcttcgcccgtcaccttttctgcaacggagtcgcgccgccaccctccttagacgaccgcatcaaggacgccgctgacgaccgccacggtgaccgcgacctctccatccccaaaatcttcaccggagacgtgctggacctgctccactatgctgcgaagctggacctgatgctggcgctgactggggacggct

SEQ ID NO: 25617 - DNA, 273 bp, Zea mays
  Clone ID: LIB3153-013-Q1-K1-B8
tcgataaaatctgtagatgaaagccattgggtggtcggtttggatgcaaataatatattgctgcgagggttattcaaaacggctcggtcttatccacatgtgatgcccaatcctgtgcttagcatacttgagctgttattaccactagcgtcatcagatcttggggctaataatttgcaaaatgagttcttgatgaggaatatacatcttttcctgattcaaaataaaatggatgaaatggctgtattgggcctttacaccacttcatatgat

SEQ ID NO: 25618 - DNA, 442 bp, Zea mays
  Clone ID: LIB3153-013-Q1-K1-B9
gccatgccgcccaaattggacccctctcaggtggtggaggtcttcgtccgcgtgacgggaggcgaggtcggcgcggcgtcgtcgctggcccccaagatcggcccgctcggtctctccccgaagaagatcggcgaggacatcgccaaggagaccgccaaggactggaagggcctccgcgtcaccgtcaagctcaccgtgcagaaccggcaggccaaggtctccgtcgtcccctccgccgcggcgctcgtcatcaaggcgctcaaggaacccgagagggacaggaagaaggtcaagaacatcaagcacagcggcaacatcagcctcgacgacgtcatcgagatcgccaagaccatgcggaacaggtccatggccaaggagttggccgggaccgtcaaggagatcctggggacctgcgtcagcgtcgggtgcaccgtcgatggga

SEQ ID NO: 25619 - DNA, 428 bp, Zea mays
  Clone ID: LIB3153-013-Q1-K1-C10
ctgaagtttcgtcctcgcggccttctctccctttactcgaaccgcgccgacgagcgacgacggccgttgctgcattctgcaatggcgactgttccagttaacccaaaacctttcctgaacaacctgacggggaagcctgtaattgtcaaactcaagtggggtatggagtacaaaggttatcttgcttcagtggactcctatatgaatctccagcttgccaacactgaggagtacattgatgggcaattctctggaaactctggagagattctgatcaggtgcaacaacgttatgtatctgctaggtgttccagaggatgcataaattgaggatgcatagtgagaagatttgaatgtaatttgattctgacatgtatgtttgaatatgcccgtgacaactagacctatcggatcttaattattatcaat

SEQ ID NO: 25620 - DNA, 257 bp, Zea mays
  Clone ID: LIB3153-013-Q1-K1-C12
ctcactccttcgctcgcgccgccgccgccgcttttcgtacgccacgtaccttgattcattgggggtcacctaaatgaccgcgcgcactaagaaggcatgaattgctgacatatatccaaccatggatcgtgctagcttgcgcaaacaaatcaagaagatggatgtatctcatcattgcacgtactctagcgaggtctgaaggaagtttgctagaaaaaagcaagcagaatgaatttgggcatgcactgactgaagga

SEQ ID NO: 25621 - DNA, 439 bp, Zea mays
  unsure at all n locations
  Clone ID: LIB3153-013-Q1-K1-C2
gagacatacaacgggcatctggtcaattgcgacacgtggatgaacatccatcttanggaggttatgggcacctcaaaggacggtgacaagttttggaggatgccagagtgttacattcgcgggaacaccattaagtatcttcgagttcctgatgaggtgattgacaaggttcaggaggaaacttctaaaagccgatcagataggaagccaccaggtgttggccgtggaagaggaaggggggacgtcggttctaaacctggaggcagaggcattggacgcggccaagatgatggaggtagaggcagtggtggccgtggaaggggtggagttggtgccaaaggtggtaacaaaggtgggggccgtggtcgtggctgaagctggtcgacacaagggagaatgccgctttttgaggcctgtaattgtgttgcatagattgctt

SEQ ID NO: 25622 - DNA, 440 bp, Zea mays
  Clone ID: LIB3153-013-Q1-K1-C3
gagacatacaacgggcatctggtcaattgcgacacgtggattaacatccatcttagggaggttattggcgaccttataggacggtgactagttttggaggatgccatattgttacattcgcgggaacaccattaagtatcttcgagttcctgatgaggtgattgacaaggttcatgatgaaacttctaaaagccgatcagataggaagtcaccatgtgttggtcgtggaagatgaaggggggacgtctgttctaaacctggaggcagatgcattggacgcggtcaagatgatggatgtagaggcattggtggccgtggaaggggtggagttggtgccaaaggtggtaacaaaggtgggggccgttgtcgtggcttaagctggtcgacacaagggagaatgtcgctctttgaagcctgtaattgttgtgcatagattgctt

SEQ ID NO: 25623 - DNA, 258 bp, Zea mays
  unsure at all n locations
  Clone ID: LIB3153-013-Q1-K1-C7
aagctcacatttactcattcttttcngcctcctctctttttgcaccctacgtctacagcggcgccgcttttatctactactcgctcaagaactttctacatatcaccctctctttccaaacccacctaaagctcgtctaccttaccctgtgcgcggcgcttgcctattatttctgtagacgcttaccttcacatattctgtaacatcttctgttctctgacaatgctttattgcctcagcaacatctactatctcttt

SEQ ID NO: 25624 - DNA, 435 bp, Zea mays
  Clone ID: LIB3153-013-Q1-K1-C8
ccagccgcacgaaaccctaacgccgccgccgcttcacaggtaagccgccgtcatggtctccggttccggcgtatgcgcgaagcgcatcgtggtggacgcgcgccaccacatgctgggccgcctgtcgtcgattatcgccaaggaactgctcaatgggcagaaggtggtcgtcgtccgctgcgaggagatctgtatgtcgggtggactcgtacgccagaagatgaagtacctccgctttctccgcaagcggatgaacaccaagccatcccatgggcccatccacttccgcgccccgttcaagatcctgtggcgcaccatccgcgggatgattccgcacaagaccaagaggggggaggcggctctggcgaggctcaagacgtacgagggcgttccgccgccgtacgacaagaccaagcgcctggtcatccctgacgc

SEQ ID NO: 25625 - DNA, 439 bp, Zea mays
  unsure at all n locations
  Clone ID: LIB3153-013-Q1-K1-C9
cttctcctcgctctaaactcttcctaccccgctacccgctctctcgttggacgtgacttcgggagattgccggagatgtcgtcgatggccacgaagctcttcaacaccgccgaggtggagtcgtcggacgcgcaagccctagtcgcggacatgcggaaggctatcggcaccatgaagtccctcgccgtagacttcgagagggacggaaagtccgataaggtgaagaagcttgaggagacggttctggagttggtggcttngtacgaggactgcgcggccatggcccaggcaattaaggcagtacctggagtgtatcagtcatctgatcagccaacggatttcaaaacattgatcggggtggaggctagcaagattagggaagcgtcatcggcatcacaacagaaccacccactctttcggcagttcagggagtctgtct

SEQ ID NO: 25626 - DNA, 443 bp, Zea mays
  Clone ID: LIB3153-013-Q1-K1-D11
gccaggcccgccaccgccctccttccccccgcgaccgcaattttgcaagcacgacaagacccacggacccacctcgatccagatccagccaactgcgccgccgtcggcgttccccccttcctcctcgccgccactgccgtggagcggggatcatccgcctgaaccgggtcgaccgcttcgttccttggtggtgggtagctgattgggggagctcagaaccttacacttacaactatgttctccttgttctatggtctatggaagcacgtcttcagcaaggcagagttccatgtgcttatcctcggagttcataaagctggcaagacgaccttgctagaaaagttgaagtcgatctacttgaaagggagaagggcttccgcatgatcgtattgttccaacagttggccttaatattgggcgtattgaagatgcaaaatgtaagc

SEQ ID NO: 25627 - DNA, 407 bp, Zea mays
  Clone ID: LIB3153-013-Q1-K1-D2
agggttttcgcgccgccgccgcagccgcaacaatgccgtcgcacaagaccttccggatcaagaaggggctggcaaaaaagatgcgccagaaccgccccatcccctactggatccgcatgcgcactgacaataccatcaggtacaacgccaagcgcaggcactggcgccgcaccaagctcggcttctgagcgtcgggattggccggctgctgcgtcggaaggctagggtctaagagctatcttctgttttatcattgtctctgtttctgtaagctagcaagtgatgctgtgatgcttttattaagattctgatgagtggtgacgttaagagaaaattggcagtactgtgttgtaccccaagattccttgcagcattgctatgctaagtaacgaaccctttatcttatt

SEQ ID NO: 25628 - DNA, 396 bp, Zea mays
  Clone ID: LIB3153-013-Q1-K1-D5
gcgcttctaccgcgagcgccgccgccacgtcatcacgacgcagaccgagcacaagtgcgtgcgggactcctgcaggtatctgcaacaggagggattcgagatcacctatctcccagtgcgcaaggacgggctcgtcgacctcgcgcagctcgaggacgccatccgcccggacaccgggctggtgtctatcatggccgtcaacaacgagatcggcgtcgtccagccgctcgaggagattgggcgcatctgcaaggagaaaggcgtgccgttccacactgatgctgcacaggcgctggggaagatcccgattgatgtgaaccggatggggattgggctcatgtccctgtcaggccacaagatttatggccccaagggcgtgggggccctctaccttcg

SEQ ID NO: 25629 - DNA, 437 bp, Zea mays
  Clone ID: LIB3153-013-Q1-K1-D7
cggacgcgtgggcggacgcgtgggcggacgcgtgggctaggaagagcgcatcatgaagcgtgcgtcaactggcttgcgcgtcgattcttgtcttgaagttgaaatcttggcgcgagtgtcgacctttaatcaatcgggcgaagttttttgctcactgatcagcgacttctgttagattgaactttgaagtgcgcacgcactgccctgaagccttcgggtccgtgacgatgtctaggagagccgcagcagcgcttgcgctcgcgtgcctcgccgtgctggcggcggcactggcggacggcgcgctgctcccgtggttcggcgaaaggaggcgcgggggcgacaaggccgcggcggcggcggcgtctccgctgtccggccccggagtgggccttctggccgatccgttccggatccctgaacacgttctcttgggcttc

SEQ ID NO: 25630 - DNA, 437 bp, Zea mays
  Clone ID: LIB3153-013-Q1-K1-D8
ggtttgatgcaggagttcggcatggcgtgaagacggctgctgttttgtaagtgagtcggtgggtgaaaattcaagttattgtagaagacaacacatttctttgcttattacatcctgctatgatgttctgaactatgatgggttcagcgggtgccattttttctcttagagctattgttgacatggaagaaatggtggcagcaccagcttaggatggacaacaattgaaatatactacagaagttgtttctaatgtgctactgagctccattgtgtttcggcctacgcaatctaggtctccagtctgcctccaagaaaagctccataaccccatagtttctgcagaggttcaacaacttcaggatcaattataggctgagaagcaaaaaaaatggacttcgtgaagaagcagaaaccattgatagtatgaagaggtt

SEQ ID NO: 25631 - DNA, 433 bp, Zea mays
  Clone ID: LIB3153-013-Q1-K1-D9
gatttcacaatgaaaagggagacaatgccttcatggctagaactgttgcttgcaacacaatggtttacgacttgtgctaaccatcttcttgctagtcgcaatgaatgtaacctattttgcacccagtgtgagaccaaaccagctgctttctgtaactattgtcgttcaagtgatcattccacccaccgtgtaatccagataaggcgttcatcgtaccatgacgttgtgagggtgtccgagattgaggatatccttgatgtcagcgatgtgcaaacttatgtaatcaatagtgcaaggattgtattcctgaatgagcggccacaactgcgtgcttctagtgtccccatttgtaaggcacccacatcatcaacacataactgtgagacatgtagccgtgtgctacttgatgcatttcgcttctgctctcttggat

SEQ ID NO: 25632 - DNA, 425 bp, Zea mays
  unsure at all n locations
  Clone ID: LIB3153-013-Q1-K1-E2
gcgtcaagcagcggcggcaatgacaacaagcctgaaaaagaaccggaagaagcgcgggcacgtgtcggcggggcacggccgcatcggcaagccccggaagcacccgggaggccgcggcaacgccggcggcatgcaccaccaccgcatcctcttcgacaagtaccacccgggctacttcggcaaggtgggcatgcgctacttccacaggctccgcaacaagttccactgcccgtcggtcaacgtggagaggctctggtcgatggttcccgccggcaaggccgcggaggcggtcggcgcggaccaggccccgctcgtcgacgtgacgcagttcggctacttcaaggtgctcggcaaggggatgctgccgtccaggcccatcgtcgtcaaggccaagctcatctncaaggtcgccgagaagaagatca

SEQ ID NO: 25633 - DNA, 381 bp, Zea mays
  Clone ID: LIB3153-013-Q1-K1-E3
tcggcatcttacatccgcggccatgacaactagcctgtataatatccggaagaagcgctggcacgtgttggccgtgcacggacaaattggcgagtaccgaaagcacccgcgaggtcaacttaactcctgtggcatgcaccaccaccgcatcctgtttgacaagtaccaaacaggctacttccgctcggtgggcatgcgctactttcacacgctatggaacaagttacactgcccgtagctcaacatggagaggctctggtctatggttcccgccgcacaaggcctcgtacgctgtctttacggaccacgccccgttcgtcgacttgactcacttcggttacttcaacgtgctcgggaaggggatgctgagctctagaccca

SEQ ID NO: 25634 - DNA, 275 bp, Zea mays
  Clone ID: LIB3153-013-Q1-K1-E8
gctgtcttttttttcccctcttaccatatctttttttggttagggttacttatggtggggtggattttcaatagcggcggctgatgtataataccattgctttatcattggacttttcctaggccacaagcaacgagtcactgtagaatgccttttccttctacagcgagatcctctacttttaggacatcacctatcggtagacagagatgtctctctgcttttacttcataaccttttcctccgagaactccatgctctacgctatcgagaac

SEQ ID NO: 25635 - DNA, 405 bp, Zea mays
  unsure at all n locations
  Clone ID: LIB3153-013-Q1-K1-F2
aatggaccttcagatgttatacaatgttcattaccatcgaatctgagacgtcagacttattctgatgcaaagggcgccgttcctaagctctatggtaggatgacagattagttttagacatcattagtgatgataaactatgctttgctgtgtttccaatcgatccgattgtatgtatggctccgtatgtaattttgtaggtgtatattgccgaaggttttgcgacgtttttttgcaacgaaagtttagagttgatgtgcgtttttttttaaaaaaataaattcacgcccagtgggcctcgaacctgattgagactaanaaaaaaaaaaaaaaaaataaaaaataaataataatttatataaataaaatataatttgtnnnntttttttaattatttattatttt

SEQ ID NO: 25636 - DNA, 228 bp, Zea mays
  unsure at all n locations
  Clone ID: LIB3153-013-Q1-K1-F3
gtgatatcttagattcttatacaatgnctattaccattttatctgagacgtcagacttattgtgatgcgtagggcgccgggcgtgagctctatggtaagatgacagatcaattttagacattattagtgatgataaactatgcttcgttgtgttttcaattgatccgattgtatgtatggcttcggatgtaaatttgtaggtgtttattgtctaacgttttgcgattt

SEQ ID NO: 25637 - DNA, 188 bp, Zea mays
  Clone ID: LIB3153-013-Q1-K1-F8
acgagatatcttatgcttctgcttcatactgcattttattcatagaaacaattcattctacgtggggtattttcaagcaaggtgtgaggtgtttttgttgcactattgctgcttgctttgcctttactagttcaagtatcaattctttataatagttttgagtttcatattattttttaggttttaaa

SEQ ID NO: 25638 - DNA, 241 bp, Zea mays
  Clone ID: LIB3153-013-Q1-K1-F9
gttcgctccatcacttttccactaattcttttttatttcgctcccataccagcccacggagggtgtcagtttccggcggtcgtacaaataacccccaatcctccacgatgacagcagcacctattgcagtacgtaccgacctacatccagcagccatcgacacgagtcatgcaatgaacaacgcctcctacaggcagacggtactgccttgtgatctaaaccctgaccaggagcggacacc

SEQ ID NO: 25639 - DNA, 56 bp, Zea mays
  Clone ID: LIB3153-013-Q1-K1-G1
catcgcacagctctacaccagcgtcggctggaacgttttgggctccggcaagatcg

SEQ ID NO: 25640 - DNA, 426 bp, Zea mays
  Clone ID: LIB3153-013-Q1-K1-G10
acgcgcaaacacaggagcaagaagtttgtctccccggccttatggcacctatgagcagtactagtgcgactattgttaggggcgtcatggctgtactaggcttagttcttctcatcgtttgtgcgagctcccagtcctgccaaggttggaaccactcgctggtggcggttccaaaattgaaggtgtggtgctatgtcctctttcgtagggaagagtgttcagataagtcctgccacttggtttgccaagacaaggataagttttaccgtcatggcgcctactgcgtggaaaagacttgggagtgctgcttgccaacttaaccggcggctggtgtacactgtagcaacgcatgtgtgttctcctcgggatgttttcatgagtcatgacgaaaaaataatggaatgaaactgcgctcttgttacaatt

SEQ ID NO: 25641 - DNA, 124 bp, Zea mays
  Clone ID: LIB3153-013-Q1-K1-G8
acggcataatctgactcgtatcgtctgatactgagtgatctcgcatcttttattgttgcgacatgggtatgttatatatgtgtacacgcgaaccgaaacttacgcaataattatttttggactc

SEQ ID NO: 25642 - DNA, 149 bp, Zea mays
  Clone ID: LIB3153-013-Q1-K1-H10
cggccgcccatcatacggtcacaactcacaacccgacccttcaaacccgaacatcagagctcccctgacctgctgggctcctatcaagggggggagatatctactaccgccagcatccccccttctgcgttccttctcatcaaggctac

SEQ ID NO: 25643 - DNA, 438 bp, Zea mays
  Clone ID: LIB3153-013-Q1-K1-H3
tgatcgagcaagtcctgccattcgcccgtgaaacagtggatgtggtccttgatggacttgcatcaatgccaatgattatatcgcctagtgatcttgatgagttctcaaatttcctcaaagtgatgtgccagcaggcacgccattggatttccggtgaggggccgatgcccagtaatctgtacagcagggagtctgagcatggcgacacatggatatggaggtttcacaacatgtcgatggacatgctgaaaaggttggatgagtgcttgaagacattggagatggacctgtcattatcatcaaagagtgtcggggtcatggaaagtcaaaccacatgggctgctcgatcacacatcctggtcatgttgactgaactcgatttcatctcatcgatttatgaggatgtggggcacaacctacagcttgtgttgctggcac

SEQ ID NO: 25644 - DNA, 161 bp, Zea mays
  Clone ID: LIB3153-013-Q1-K1-H5
tctacatagtgtgaatattccgataaaaagcttgattctagtgcaaaatgatcaatatgtagagtccgagcaagttattgcggagattcgtgccctaacattcactttgcattttaaagaaaaggtacaaaagcatatttattccgaatcagacggtgaaa

SEQ ID NO: 25645 - DNA, 208 bp, Zea mays
  Clone ID: LIB3153-013-Q1-K1-H9
tcgcaggcggacttcggtcgcctcgatattgatctggcctttgtcgaaatgcccggcctgggggggtgccttgccgagttcggcccgtccaatcccttcgtcggcgctaggatcttggggtctatttacatgaaccatccagactcgccgtcctcattgagacctttaccccgctcggcgccgaagtccgctggtgcttcttgcaaca

SEQ ID NO: 25646 - DNA, 584 bp, Zea mays
  unsure at all n locations
  Clone ID: LIB3153-005-Q1-K1-B5.R2
tcctgccatcgcacaaatccctcttcctcgnagttctcctcaaccaaattcaaagtcacagcgggcgaaactctcggcgatgtctggccgcggcaagggcgggaagggtctgggcaagggcggcgccaagcgccaccgcaaggtgctgcgtgacaacatccagggcatcaccaagccggcgatccgcaggttggcgaggaggggcggcgtcaagcgcatctccgggctcatctacgaggagacccgcggcgtgctcaagatcttcctcgagaacgtcatccgcgacgccgtcacctacaccgagcacgcccgccgcaagactgtgaccgccatggacgttgtctacgctctcaagcgccagggccgcaccctctacggtttcggcggttaggtcgcccctctcccggtggcgaattacgtggtggcggtggcggtcgtgttgtgttcttggtctagttagtctgtgttgtctttatcggtgctgttttctgtggtggttgtactgcatcgttctagtttctagtccatgtgctgtaatatctcgctgctgtaatcaatggaatgtcctcgtttcaagcctaaaa

SEQ ID NO: 25647 - DNA, 434 bp, Zea mays
  Clone ID: LIB3153-005-Q1-K1-H1.F2
gacgagaaatggcattccattttccattcagtgaaccaacacgtccgaaatagccaaataggcacggcatagaaagcacccaccaccatctacttcagacattacaacgacgaacagcagcagcgcgacagctcaagccctctcgcccctgatgcggcgggcgagctggatgtccttgggcatgatggtgaccctcttggcgtggatggcgcaaaggttggtgtcctcgaagagccccaccaggtacgcctccgcggcctcctgcagcgccgccacggccgaggactggaaccgcaggtccgtcttgaagtcctgcgcgatctcgcggacgaggcgctgggaggggagcttgcggatgagcagctccgtgctcttctggtacttgcggatctcgcggagcgcgacggtgccggggcggaaagcgtgcggctttt

SEQ ID NO: 25648 - DNA, 521 bp, Zea mays
  Clone ID: LIB3153-005-Q1-K1-H1.R2
tctctgaatctgcccttgccgccgcccactgcccgatccaggtgtgcagactgctccctcctcctctccgctccgaatggcccgcacgaagcagacggcgcgcaagtcgaccggcggcaaggcgccgcggaagcagctggccaccaaggcggcgcgcaagtcggccccggccacgggcggcgtgaagaagccgcaccgcttccgccccggcaccgtcgcgctccgcgagatccgcaagtaccagaagagcacggagctgctcatccgcaagctcccctcccagcgcctcgtccgcgagatcgcgcaggacttcaagacggacctgcggttccagtcctcggccgtggcggcgctgcaggaggccgcggaggcgtacctggtggggctcttcgaggacaccaacctctgcgccatccacgccaagagggtcaccatcatgcccaaggacatccagctcgcccgccgcatcaggggcgagagggcttgagctgtcgcgctgctgctgttcgtcgttgtaatgt

SEQ ID NO: 25649 - DNA, 348 bp, Zea mays
  Clone ID: LIB3153-001-Q1-K1-C11
gtgactgcgaggagatccactttctatcgagtgacgacgctgggactgacaagacctagccgtaccacgctgtgaccgggcagaagaacgggttcctcaacataaataaccggccatgcatggatgtggaggcagctagctgtaagactgagtaggacggccacgatcgatgttactaacggctctgcaacatgtatgatggaagggacgctgcctatatcggtcctttatgacccagctgtgtcgtgactactctcaaccggactgattctcatgtcatcgctatatcacacgatcgattcgctagctttcctactttagatggcaacactgagggatatcttagac

SEQ ID NO: 25650 - DNA, 105 bp, Zea mays
  Clone ID: LIB3153-003-Q1-K1-A12
caacttctacctccatatctatttggacctgctctgtctctacgcattatactctatggttctggtgcttaccaacatcactactgctccacttgccacctccct

SEQ ID NO: 25651 - DNA, 119 bp, Zea mays
  Clone ID: LIB3153-003-Q1-K1-D9
tgacgcgccctctaaaagcccattaatcttttcttgtgctgtagttacacccaacaaaaccactacactttccatctccctaacgccctctttttttcctatctttcttagatttcttt

SEQ ID NO: 25652 - DNA, 155 bp, Zea mays
  Clone ID: LIB3153-003-Q1-K1-F9
tactaattgtactccccctttaacttcacattaacccccttcttttttttttcctcacctcaacattacctcttcactttccatcactctaactcccactcctttttctttcttaccttcctttttctccacatttctccttttttcccctcaaa

SEQ ID NO: 25653 - DNA, 360 bp, Zea mays
  Clone ID: LIB3153-003-Q1-K1-G12
ggagacatccttactaatccacaataccactggaaggagttcaggttcacattcgagagcctgccaaagatgcgggggacttctgccgcatgctggttgggttagaggaagagggtttgcagaccgtgaagagctgcagcggttacggttgacaacccacttgcaaggttcacattcaaggaaccagccaaggatgctgagggactctgccgcatgctggttcgattagagggattttgcagcgcgtgaagagctatatcggtctatgtgacagctcacttgccacaaaaccagtgagaaactatatatccgttattttggaactttgaaatatggttttagattgctatgttttattcg

SEQ ID NO: 25654 - DNA, 332 bp, Zea mays
  Clone ID: LIB3153-004-Q1-K1-B8
gtactaaggccctgtttgtttaaggtttagggcttacgaattagccttcactcttactgggtttagatttccggtggcatttgtttgcttgtcttatatttaggtcaatttaaccgttcatgacttcatttctctttatttatatttcaaattaacttttctccaagggccgcgtcatcatcagtcaccgtcttacctaggatctgcggcggcaaagactccatccgcgtcggaacaatgcaaaagaaaggcactggggccgccactatcaagaatcacagtttacatatcacccatggcagcgtttacttattatttggcggcatccagac

SEQ ID NO: 25655 - DNA, 619 bp, Zea mays
  unsure at all n locations
  Clone ID: LIB3153-005-Q1-K1-B5.F2
tttttttttttttttttttttttttttggggttttttttttttttttttttttttttttttttttttttttttttttttttttttttttttttttttttttttttttttttttttttttggggtgggggcggggccctttctttgggggggggggggggttttttccgcccagggccttttnccttggccggggcgggccccccccccccgaaaacccccccggttgggccccccccgtcttatttggcccagaacaaaaaacgaccccccccccccccccttaattcccccccggggggggggggacctacccccccaaacccgaaagggggcccccctggcccttgaaagcgttaaaaacgcccttgggggtcacttttttggggggggcgtcctcggggttggggacggggttggggttaactttttttggggaaattttggcccccccccgggtcttctttttgatgaccccggaaatcccttttgccccccccctttttgccccccttgggttccccggtttggcgtcccccctgtatttttccccccccccccttgggggggcctttgggcccccccttgccccaaccctccccccttttgccggggcccaac

SEQ ID NO: 25656 - DNA, 56 bp, Zea mays; identical to SEQ ID NO: 1789
  Clone ID: LIB3153-005-Q1-K1-B9

SEQ ID NO: 25657 - DNA, 71 bp, Zea mays
  Clone ID: LIB3153-005-Q1-K1-D6
tcgaaaaaaaaaaaattaaaaaaaaacaaaaaaacaaacacaaacatacaaaaaaaaaaaggtggtataat

SEQ ID NO: 25658 - DNA, 252 bp, Zea mays
  Clone ID: LIB3153-007-Q1-K1-B9
tcgagccacgcgtacggaaaccagatgtagttagtactataagagagtatgcttcagctggaactgtgaataacaactttagcaatctggctaatgctttcttggagaaacatgttgatccatgatatgacaattttacagggtagactaaagcttacacatttcgtgtacctgtggtgttttcatattctggatatgaactaaagaaactagagcttagatctcatggcgaatgggacacgccctattaca

SEQ ID NO: 25659 - DNA, 107 bp, Zea mays
  Clone ID: LIB3153-007-Q1-K1-F10
atgagggggctggccgtcgtagaacaccagactgactggaaaaacacttcttgtacccaacttagtcttctaggaacacattctactttccgcagccgtcatgatat

SEQ ID NO: 25660 - DNA, 391 bp, Zea mays
  unsure at all n locations
  Clone ID: LIB3153-007-Q1-K1-G7
agcagctaccagctactgcgaccttttttaattgttcatccatcagtaataaaccactagggaattagcagggctcttcttgcacctgatgatgacatcagcggagccctgcctctctggtctctgccatatgggtttgtacggttccattcatgtcactactttcccatcacctagctcattctcgctcccaaggctatatccagcggtcttcgtattccacctccgactctttatttcaagcaccactttataaataatgcagtctacagtgtaaaacaatgatttgcatgaccatatatattgtactaagtatggcctngnaaaaaaaaacaagcgccaacaaaaacaaaaattatctcctgaaatacactggagaagaaagaaataa

SEQ ID NO: 25661 - DNA, 226 bp, Zea mays
  Clone ID: LIB3153-009-Q1-K1-C1
aaaaaaaaaaaaaaaaaaaaaaaaaaaaaaaaaaaaaaaaaaaaaaaaaaaaaaaaaaaaaaaaaaaaaagaaaaaaaaaaaaaaaaaaaaaaaaaaaaaaaaaaaaaaaaaaaaaaaaaaaaaaaaaaaaaaaaaaaaaaaaaagggggggccctttttaaagattcaaattttacttccctggccttgcaaagttttattttttttttagggcccccaaattta

SEQ ID NO: 25662 - DNA, 204 bp, Zea mays
  Clone ID: LIB3153-009-Q1-K1-G8
aaaaaaaaaaaaaaaaaaaaaaaaaaaaaaaaaaaaaaaaaaaaaaaaaaaaaaaaaaaaaagaggggaaaaaaaaaaaaaaaaaaaaaaaaaaaaaaaaaaaaccttaaaaatttaaaaaaaaaaaaaagggggggccctttttaggggaccaagttttcctccccgggcttggcaaggtataattttttttttggggccccc

SEQ ID NO: 25663 - DNA, 100 bp, Zea mays
  Clone ID: LIB3153-010-Q1-K1-C3
attccttacaaggctttttctagtttcaaaaaaacaaaaacaaaacaaaaaaaaaaaaaagaaatagaactctacaaacaaaaacaaaacaataaaataa

SEQ ID NO: 25664 - DNA, 60 bp, Zea mays
  Clone ID: LIB3153-010-Q1-K1-C9
ctttccttgtcaattaacagtcaactaaaaaaaaaaaaaaaaaaaaaaaaaaaaaaaaga

SEQ ID NO: 25665 - DNA, 65 bp, Zea mays
  Clone ID: LIB3153-010-Q1-K1-G5
gcgctagaatacacactgaatctatatgtgtacttcactatccgacccttgcgtgcaacgggagg

SEQ ID NO: 25666 - DNA, 333 bp, Zea mays
  Clone ID: LIB3153-011-Q1-K1-A11
gatttctttgcttgttgttttcttttttttttaggggtgccttcagggagggggggtttatatatatatagcatcaaaattatgtaatgaagaggcgccctgtttattgttacatgacgaaggttgagcatcatccatgggggctagattatatacagacaccctgattttacatgacgaatcgcaagaaacgcatgccttggatatccttaccccgagagggcgctggtgttgtatacaaagagggcgcccccccccaggatcccatcgagggtgacggcccaaatcaaaaacccactggttccaccgacgtaaacctcaccggtgggagac

SEQ ID NO: 25667 - DNA, 336 bp, Zea mays
  Clone ID: LIB3153-011-Q1-K1-D9
gggcttgttatttttgtttccaacttcatttcattctagaacattcctacacgatatcattgctgtcatacctaaaactaggcattgaacgtctactggatctacataaaaagaaatatatcatctacaatgctaaaaaaacattatacactgagggctgtggaaacatggctgaatgatcaaattttggagtaatctaaaacacaaataatggcccgtggtggagcacatgaatctttggacgtaagcaacaatgccccacccattcattaatcttatctggacaattgaacgggatatagctcaaagcacaagttgctggacactttagatctc

SEQ ID NO: 25668 - DNA, 65 bp, Zea mays
  Clone ID: LIB3153-011-Q1-K1-F10
gccccggaccagctatcaccgggtcagtgcaccccaccataagcttgcctgcctctaaagcgccc

SEQ ID NO: 25669 - DNA, 65 bp, Zea mays
  Clone ID: LIB3153-011-Q1-K1-G7
cttcttatgtcgaggtacctaactacagcggagtagacgtagtgcttgaccggtcttactgggaa

SEQ ID NO: 25670 - DNA, 154 bp, Zea mays
  Clone ID: LIB3153-011-Q1-K1-H10
atggtatggtagcaaaaattagactccaacttatccgatccaataattgtctgttgagcttattttttcttcggaatgtgattccaatttagcccttaaaaaaaaaaaaaaaaaaaaaaaaaaaaaaaaaaaaaaaaaaaaaaaaaaataaaaa

SEQ ID NO: 25671 - DNA, 219 bp, Zea mays
  Clone ID: LIB3153-011-Q1-K1-H11
gtccaataatttgtctgttgagcttagtggttcttctgtatgtgattccaattttgcccttaagggaaaaaaatacaatcttttgattataactggcccaacaaagccccaaataaccatcgggccttctcccaggggagctaaacacacgaacgctagcttccgaacaaaaagctaaagcgcagagacaccgcctttcaatgaaggacccgttttttt

SEQ ID NO: 25672 - DNA, 101 bp, Zea mays
  unsure at all n locations
  Clone ID: LIB3153-011-Q1-K1-H6
ccgtctcgaaaaaaaaanataaaaaaannaaaaaaaaataaaaaggggggcgcgcggcttcttagagggatcacaagctttacggtaccgcccgtgcatnn

SEQ ID NO: 25673 - DNA, 84 bp, Zea mays
  Clone ID: LIB3153-012-Q1-K1-B1
aaaaaaaaaaaaattatgatagaatatgagttgaaagaaagaaaaaaaaaaactaaaaaaagagctaatatgaaaagctaataa

SEQ ID NO: 25674 - DNA, 227 bp, Zea mays
  Clone ID: LIB3153-012-Q1-K1-G3
gtacgcccaaccttcgcctgtgtcgacgtgcaactcgaggtgaatgagtgtacgtcttcaagagcaagtctgttggtaatctgccaacaggccagtgctctaatggaaagttgctatgccatcctagtgagctcagggtatctaatgctgatcatcactagagggacggggatgtgacttcacattgccaggcaggcaacacttaatcgagatcaccaaaaagaaaa

SEQ ID NO: 25675 - DNA, 171 bp, Zea mays
  Clone ID: LIB3153-012-Q1-K1-G6
ggacgcacactgtagccgcgcattaatcgcggtggttggggaggttacacacagagagactcggtacacttgccaaaggcttagcgttcggtccttcagctttattggctttctttgtcggcactgttcgcgggctttctccgataagctctaaaactgaggctcccttta

SEQ ID NO: 25676 - DNA, 61 bp, Zea mays
  Clone ID: LIB3153-013-Q1-K1-G7
taagggtttccgaattaaatgggtttttacggctacctttgatccccaaaaaaactttgat

SEQ ID NO: 25677 - DNA, 606 bp, Zea mays
  Clone ID: LIB3153-011-C6.F1A
gatctaaacacaacgttcttcacattgccctgatagaattatgtaatgtaatgaacagtatcaacatgacaaccttacctttacatacattttattagattttttttctcaacaaccaagaacaacagctattgtcgtttcctcagcacaaagaaacatggcagctgccgcctagggcttgggagggtaaaacccgttcacagtcatacctccgtcgaccgcaatcgtctggccgctaatataagtggaacccggcatgcaaagaaaagcaacaagtgccgatacttctccaggttctccgacacgtccaagcggagttcgactcacaacttgttcctcaaagttcttatttgccaaaattccttccgtaagtgaagtggtgatgtaccacggagcgacagagttggctcttatgttgtccttagcccattcacaagctaaattcttggttagctggttaatggcacctttagtcatagcatatatagttccactaaagattcctatcgctccagcaacagatgatatgaataaaatgctgcctgacccagataaatttcaaaagagggatgtgcaatttggcacaagtgatatgcagattcaaga

SEQ ID NO: 25678 - DNA, 565 bp, Zea mays
  Clone ID: LIB3153-011-C6.F2A
gatctaaacacaacgttcttcacattgccctgatagaattatgtaatgtaatgaacagtatcaacatgacaaccttacctttacatacattttattagattttttttctcaacaaccaagaacaacagctattgtcgtttcctcagcacaaagaaacatggcagctgccgcctaaggcttgggagggtaaaacccgttcacagtcatacctccgtcgaccgcaatcgtctggccgctaatataagtggaacccggcatgcaaagaaaagcaacaagtgccgatacttctccaggttctccgacacgtccaagcggagttcgactcacaacttgttcctcaaagttcttatttgccaaaattccttccgtaagtgaagtggtgatgtaccacggagcgacagagttggctcttatgttgtccttagcccattcacacgctaaattcttgggtagctggttaatggcacctttagtcatagcatatatagttccacttaagattcctatggctccagcaacagatgatatgaatataatgctgcctgacccagataatttcaaaaga

SEQ ID NO: 25679 - DNA, 512 bp, Zea mays
  Clone ID: LIB3153-011-C6.R1A
cttgcctcggccgctatcgtgaccgggaacaacaactgcgagatggccacggtggagacctcgggcacggcgacaaggacctccgggagatgggcactacacggcaagacagccctcgtcaccggcggcacccgcggcatcgggcgtgcggtagtggaggagctggcggcgctagaggcagccgtgcacgcatgctcccggaaggcagaggatctcggcaagagcatcacggagagggaggccaggggattcagcgttaccgggtccgtctgcgacctctcacgagagaggacgcaacgggagcaggttgctccgcgaggttgccgaccgcttcggcggcaagctcaacatcctcgtaaacaatgtaggaacaaacataaggaaaccaactactgagtttactgcagaggaatactcgtttctgattgctactaatcttgaatctgcatatcacttgtgccaaattgcacatcctcttttgaaattatcttggtcaggcagcattatattca

SEQ ID NO: 25680 - DNA, 582 bp, Zea mays
  Clone ID: LIB3153-011-C6.R2A
cttgcctcggccgctatcgtgaccgggaacaacaactgcgagatggccacggtggagacctcgggcacggcgatagggtcctccgggagatgggcactacacggcaagacagccctcgtcaccggcggcacccgcggcatcgggcgtgcggtagtggaggagctggcggcgctgggggcggccgtgcacacatgctcccggaaggcggaggagctcggcgagcgcatcaaggagtgggaggccaggggattcagcgttaccgggtccgtctgcgacctctccgagagggaccagcgggagcggttgctccgcgaggttgccgaccgcttcggcggcaagctcaacatcctcgtaaacaatgtaggaacaaacataaggaaaccaactactgagtttactgcagaggaatactcgtttctgatggctactaatcttgaatctgcatatcacttgtgccaaattgcacatcctcttttgaaattatctgggtcaggcagcattatattcatatcatctgttgctggagcgataggaatctttagtggaactatatatgctatgactaaaggtgccattaaccag

SEQ ID NO: 25681 - DNA, 294 bp, Zea mays
  Clone ID: LIB3154-001-Q1-K1-A1
aaaaaaactctaaaggaaaagacagtgagaaggaaaggatcctatgaaggtacatgagacatacacgtgattaattaatggtctcatacattttgttttcttaaccgttttttttccttttctatgtcctttccttcctccatttcaatactacctttccacccttacctatttccttttgaaacaaaacctctttaaggaaataaatctctatcaagtgatatagaacagtcaaaggaaaagtagatttgcgcagggttttaggatgtggaaataaaagaaaagaggggcaag

SEQ ID NO: 25682 - DNA, 438 bp, Zea mays
  unsure at all n locations
  Clone ID: LIB3154-001-Q1-K1-A10
tggtgaccaaattttgcagtggccatgcgcctcacttccccatgaaaaaggttcttttgctgctctggaagacagtgttgtgcactctgggcggctttgaggagctgcagagcatgaaggccgagaagcgcgccatcctggggctccccccgctgcctgaggacagcatcaaggtcatccgcaacatgagggctgcctcacccccggcctctgcctctgacctgattgagcagcagcagaaacggggccgtcgggagcacaaggcactcataaagcaggacaacttggatgccttcaacgagcgggatccctacaaggctgatgactctcgagaggaggaggaggagaatgatgacgacaacagtctggagggggagacgttcccccttgagcgggatgaggtcatgcctnccccactgcagcacccccagaccgaca

SEQ ID NO: 25683 - DNA, 413 bp, Zea mays
  Clone ID: LIB3154-001-Q1-K1-A11
caaagattatgaaatatagaacgtagttcccatttccaagaaacttacttttctcaatggggaggtaagacagaccaacacacacacccatacataataggaccaaaatatattgtaaacagagcccaggcagtgagaaactaggggccatgagtaccacacctgcaggtgagacctttggtgtccgagccactcgcttgggttttggtagagtagggacgtcaagttccgcagaaaagcacaatgactcctgaattttcttctccttaagagggggacgtggagacttatctacttgattaaaagaaattagtaaagaaaatttagaaaggggttcaaaaactgttttaccaggagttggatgcagaagtaatgttatgatttctttgtaatagaaatgcatactatcccta

SEQ ID NO: 25684 - DNA, 450 bp, Zea mays
  unsure at all n locations
  Clone ID: LIB3154-001-Q1-K1-A12
cccacatcaacatcgttgtcattgggcacgtagattcagggaagtctaccacgactggccatctgatctacaaatgtggcgggatcgacaagagaacaattgaaaagttcgagaaggaggctgccgagatgggaaagggctccttcaaatatgcctgggtcttggacaaacttaaagctgaacgtgagcgtggtatcaccattgatatctccctgtggaaatttgagaccagcaagtactatgttaccatcattgatgccccaagacacagagacttcatcaaaaacatgattacaggcacatcccangctgactgtgctgtcctgatcgttgctgctggtgttggtgaatttgaagccggtatctccaaaaacgggcagacccgtgaacatgcccttttgcttacacccttggtgtgaaacaactaattgttggcgttaacaaaatgga

SEQ ID NO: 25685 - DNA, 289 bp, Zea mays
  Clone ID: LIB3154-001-Q1-K1-A2
aaaatatcaaaagtgcaggagcacaggtactggtctagaccctcaagactcagctaaaatgggtggaactaggtcggttttttatctgaaaaacatgtatacctttgtgacatacgcttcataaacggtttgagttggggtgttgtttttttttttccccctccttcatactcctgtcccgcccctgtccttttgcttaacctcctgcaaatatttattttcataaagaaacaaaaatggtgacccataagtgctgggccctgggcttctaccctgaagagattaaaag

SEQ ID NO: 25686 - DNA, 347 bp, Zea mays
  Clone ID: LIB3154-001-Q1-K1-A3
gcgtccgggcttctgggaccagaccctcagaaagcatccaggctccaactctcttcttggaggtcagtgggcgataggcagagggcctgtggggagatgctgcaggggtgggcagccctggaccttttcctcaggcttctaggcataacatttgaggtgagtcacctgatctcacagtttctcagaagaaaaactttttttgttgttattgccagaaaaaagcgttacaagtgtcaaaacggtattggctatctaaattgtgaaacacgggtcacggttttctttattcttcagtttacaggtggcaaaagatttatcaagtgagaaaatgaaaatggaaaaactat

SEQ ID NO: 25687 - DNA, 458 bp, Zea mays
  Clone ID: LIB3154-001-Q1-K1-A4
caaaaagccgcactacttgctctacatctggcagggcagccaggccagtcaggatgaaatcagagcctctgcctatcaagccgtcatcttggaccaggagtacaacaatgaaccggtccagatccgggtcccgatgggcaaggagccacctcacctcatgtccatcttcaagggatgcatggtggtctaccagggaggcacatcccgggccaacagcgtggagcctgtgccctccacccggctattccaggtccgaggaaccagcgccaacaacaccaaggcctttgaggtctcaccccgggccgcctccctcaactccaacgacgtcttcatcctcaagactcagtcctgctgctacttgtggtgtgggaagggttgcagtggagatgagcgggagatggccaagatgggtgctgacactgtctcccggactgagaaacaagtggtggtggaagggc

SEQ ID NO: 25688 - DNA, 458 bp, Zea mays
  Clone ID: LIB3154-001-Q1-K1-A5
ccttgaccttaattccagggtccagaattgattaagcttgccttcatttcttaactgcctggggggtttctttcattgaccttctttcaaaaaacaagaaagcatgtagagaaattggaactttcaaactctgctggcagaaatttaaaatgttacagccactttggaaaaatagttccttaagaaattaaaaagggttaccatatgatccagtaattcttctcctatgtatacccaagagaaaacatatgcctacacaaaaactggtatcctcatggcaacaccattcataatagccagaaagtggaaacaatccaatgtccatcaattgatgaatggaaaacaaaatgtggtgtatctatataagaagatattattctcagtataatgtatattcgatattatgagataaagtaaaagaaatggaatagttatttgtggtacaacatagataaact

SEQ ID NO: 25689 - DNA, 201 bp, Zea mays
  unsure at all n locations
  Clone ID: LIB3154-001-Q1-K1-A6
cggccgaaaaacccgggccacgcccacccctccgccccttggggtnaaanataaaacgtccctgccatttccaaaaaacttacttttgtcaatgggggggggatacacatgtggggggatccacaaaaaaacaattgaaaaattttataaaaggacgcttgcccaaaatggaaaaggacttcttcaaaatttccttggtct

SEQ ID NO: 25690 - DNA, 111 bp, Zea mays
  Clone ID: LIB3154-001-Q1-K1-A7
aacaaaaatagctaactacctctttttttttttttttttcacctcgaaaatgcataaaactggcggtatttcaaaaaaggaggtcgacacattttaaaaaaaaacccattt

SEQ ID NO: 25691 - DNA, 198 bp, Zea mays
  unsure at all n locations
  Clone ID: LIB3154-001-Q1-K1-A8
acgatctcgaaaatgatgcagcacatatcctagcaacatgtagtacactctcnactaaaacgcgtggaactaagtataaatcggaaaagctggacaaaaaatcactgttcacatactcttcataaacggcacatgatgctgcgtcagtgacccatggacgtaacacaaactgaattgtctgattcttgctcataccct

SEQ ID NO: 25692 - DNA, 380 bp, Zea mays
  Clone ID: LIB3154-001-Q1-K1-A9
catccttctaagatcttcgtaaactaccttatgatgcaataatttaatgttcctatacggattataggaagagaacatttaaatactgtaaaagggatttggtttagaaggttactatgtcagtttgtccagatatatcccatcaaagaaaacctagtggtagcaataaatcttctgaaaggacttcttatatttaagtacctttaaaacatctaaataattaaaaatatgccctgttaaaaatggagatggatttaggcaagttaggtaaacaacatttgaacagtctcacgtttcagttggtaagcctgatgaattttggttccttttccacccaaaactgatttagctggaattagtacattgtggcttccaaattg

SEQ ID NO: 25693 - DNA, 352 bp, Zea mays
  Clone ID: LIB3154-001-Q1-K1-B1
gtcaaatgccaatcattttcttatcagcaaagatgtaatttccactccgattcatgggtcctcaggtccctaagaggctggattcccaactggcaccaccaagagcctaagagtaagacaggacacagaggagatgcgaggcacacattactttattatgagttggagctttggggccaagtccttatgtggcctcctgctgtggaaagtggaccaggaaccctgaatccccagtcaccttatctgagcccctagacagggtcaggctagaccaagtctctgtaacagcagccacaggggaaggaagaagagacaggaaatggggcaaggctgtcacgcctgcacgctcccc

SEQ ID NO: 25694 - DNA, 394 bp, Zea mays
  Clone ID: LIB3154-001-Q1-K1-B10
gaagactttgacgaacgttcagaagctcccgcaggcccagtcgcaagggcctgcggaatgggggagataagccattggctgctctgttggcccgtgttggtgggaatattgaagttcttggttttaatgctcgtcagcgaaaagcctttcttaatgcaattatgcgctatgggatgccccctcaggatgctttttaccacccacaggcttttgcataacctgttttgccatatatacaaggggggcctggcattttcatggacttttttgcgggcatatttgtttcacccccaaaaatgccactcggggtcaaaaacagccttacttaaaaagcaacgaattccaggctttagggcagacactcacacgtacctgggcaggacctttgggagca

SEQ ID NO: 25695 - DNA, 201 bp, Zea mays
  Clone ID: LIB3154-001-Q1-K1-B11
cctgaaccattgcctgagcaatagaataactgtgcttttgaagtaatgtctgactctgaaggcagcacctgaccgctcccccgcgtgctgggctggtcgtgccgatactctgggctcccaattgctgcttctcaaatatacctcttgcccgactgccgccttctcaatccaccttattcactcaaccatgccccacaaaca

SEQ ID NO: 25696 - DNA, 432 bp, Zea mays
  Clone ID: LIB3154-001-Q1-K1-B12
atcaaccgcagccaccgtggcttccgaagggccatccagaccaaaggcatcaagttcgaaggggtccacaagggggggctctttaagaccgaccgggtcctgggcacagcccagctgaaactggatgccctggagacggcatgtgaggtccgagaggtccttgaggtcctggatggtcgcaggcccacaggggggcggctggaggtgatggttcggattcgcgagccactgacggcccagcagctggagaccacgactgagaggtggctggtcatcgaccccgtgccagcatctgtgcccacacaggttgttgggcccaaagggaaggctcctcccatacctgctcctacgagggagccagggaacagatcagcacggcccctgcatagtctcagtgtgctggccttcgaccaagagcgtctggagcggaag

SEQ ID NO: 25697 - DNA, 316 bp, Zea mays
  Clone ID: LIB3154-001-Q1-K1-B2
gtccgtaaagctgaaatgtgctttgaaccactgctttggcatttgacttgcttgggaagcccactggctaaggctccagtgtatttttcttctggttattttcctttgctgcttttcattttgtagcatgtgtccttaaggagggagaaaaaatgattcttctgaaaatactcgtgtgttgacaatgtaatgaatgtgtcataagcacagtgcctgggacaccaactcaacaaaggttaattcttgccacccatgactcagacatttttgtccctttaacatcaaagttgaaagaagtaaattattcttttgaaac

SEQ ID NO: 25698 - DNA, 453 bp, Zea mays
  unsure at all n locations
  Clone ID: LIB3154-001-Q1-K1-B3
tgttgactgtaacgtggcgtgctcannatccaccacgttgaagaaacangnngccaagacnnatttttggagaaaagtttaacgtcgatgaagctccgaagacgcnttgtcttaatcanannagttcaacttttgcttctnnttggaattatttaacacncnnaatattacgcgatnnngagaattgtccgaaaagatggaatggaagntncagagccaaattggtcttgccttttaaatgaagaaaacagtcccggatgggccgaaaacttactcacgtcgaagaaattcagaatctcacactcaagcgtcaattgaaggcccttcagcataacgggacctcagcgctctcggcagagaaaagcaaacgattgaacacgattctaaataaaatgagcaccatctacagtactgggaaagttttggacccaaatacacaagagtgcttaacac

SEQ ID NO: 25699 - DNA, 369 bp, Zea mays
  unsure at all n locations
  Clone ID: LIB3154-001-Q1-K1-B4
ccggccggatacccgggcgcgccacgcgtccggtcaaatgccaatctttttcttatcagcaaagatgtaatttccactccgattcatgggtcctcgcngccctaagaggctggggtcccaactggcaccaccaagagcctaagagtaagacaggacacagaggagatgcgaggcacacattactttattatgagttggagctttggggccaagtccttatgtggcctcctgctgtggaaagtggaccaggaaccctgaatccccagtcaccttatctgagcccctagacagggtcaggctataccaagtttatgtaacatcagccacaagtgaaggaataacaaacaggaaatggggctaggctgaaac

SEQ ID NO: 25700 - DNA, 186 bp, Zea mays
  Clone ID: LIB3154-001-Q1-K1-B5
ccttccgtttaaatcgcaaccggccgccctttttttttttttttttttttttttttttttttttttttgtggtttttttttttaaaaggtcgggttttttaaaaaccacaaaaattaaaaattaaaaaggtcctttgaggtcaatgagtcaacttctttgttttaaaaatggaaaaactgggaacc

SEQ ID NO: 25701 - DNA, 146 bp, Zea mays
  Clone ID: LIB3154-001-Q1-K1-B6
ccgtccaaactgcccgaaccttgcctgctgcctgcctgcctgccactgagggttcccagcaccatgggggcctggatcttctttctcctttgcctggccgggagggccttggcagcccctcaacaggaagccttgcctgatgagac

SEQ ID NO: 25702 - DNA, 303 bp, Zea mays
  Clone ID: LIB3154-001-Q1-K1-B7
cgagcggccgcccttttttttttttttttcatttccaaaaagaggttttatttactttgggggccaccagggcagctcgcagacatcaggtttcccagcagactttaggccaagctgttagggggaagaagaaacccaggcaaggaggggaactggccccaagtggtttccggttacatcttccctgcttctcttttctctgccgatcagtttggggtttctgtacccacaaaagtttcatgcagttttaatgaaatgaaaatactttttgttcaagggaatgggggccgcgggcggtgagga

SEQ ID NO: 25703 - DNA, 447 bp, Zea mays
  Clone ID: LIB3154-001-Q1-K1-B8
gacggggctctgggttgggtgcgggggtgctggcggaggaactccacctcccggagttgtgggcgcctcccccaggcctgcgatcacgcggttgcgatgggactgtcgatttgagacggtgaggacgccgggagggacgcgccgccccctcgcgacctgccttggccggcggggccccggcgccgacgaccgccgtgtccctcggaatcataggcgaagcgggagaaggaagcgaaagccattgagaaaccggctggtcatcatgctccggagaacgttggggagtcagacagaacgcggcgggctgagatgatgctgggccggacattccgggtacttttggtcctactggttatagcttatgccactactttaggcaatggcaacgaaggcagcaagggtggggagttgtccctgcgatcatacaagctctttccatttcccccc

SEQ ID NO: 25704 - DNA, 389 bp, Zea mays
  Clone ID: LIB3154-001-Q1-K1-B9
tttccatttatagtagtggtatataaaaagttttatataaacaagatgattttaaaatatggggttattacagtaagtacaaaaaaatcttgaataattaacctttgaaaatcactgcagtaaagctaaagcaacagtaaatggttataattaagagacttggctcttgaaaagcctcaccaatatctattcttttaatttttgttttctttcttctgattttacagctaacccacaatgtgacacgtatgtatatacaaagtggcacgtatgtatataaaccttaaattgtttaagatctatgtgagctgtgttactgcattatggggaacaacattaacgagtatctttcatgtctgtttcacagctaactactgtatttccagatg

SEQ ID NO: 25705 - DNA, 412 bp, Zea mays
  Clone ID: LIB3154-001-Q1-K1-C1
gtggacttcagcttcgactaccgcgcggccactcagttctggcggaacaaggtcctggaggtggccaaggacttccccgagtacaccttcgccgtggccgatgaggaggacttcgccacggagttgaaggacctggggctaagcgagagcggggaggaggtgaacgcggccatcctggatgagggcggccgcaggtttgccatggagcccgatgacttcgacgccgacgccctgcgcgacttcgtcaccgccttcaagaaaggaaaactgaagccagtcatcaaatcccagccggtgcccaagaacaacaaggggccggtcaaggtcgtggtggggaagacctttgactccatcgtgatggaccctaagaaggacgttctcatcgagttctacgcgccctggtgcgggcact

SEQ ID NO: 25706 - DNA, 452 bp, Zea mays
  Clone ID: LIB3154-001-Q1-K1-C10
gctggtcaagacgtctttggaaatttcctgaagtctgagttcagtgaggagaatattgaggggtggctggcttgtgaagactataaaaaaacaaagtctgatcttttgcattgcaaagcggagaaaatctataaggcatttgtgcagtcagatgctgccaaacaaatcaatattgacttccgcactcgagaatctacagcaaagaagattaaagcaccaacacccacatcttttgacgaagcccaaaaaatcatatatactcttatggaaaaggactcatatcccaggttcctcaagtcaaatatatacttaaatcttctgaatgaccttcaagctaatagtctaaagtgactggctcctggctggaaggaattagtgatggcatcaagtacacaaggaaggcgcgagagtggctccctgggggaacactttggcctttttggacaactcac

SEQ ID NO: 25707 - DNA, 385 bp, Zea mays
  Clone ID: LIB3154-001-Q1-K1-C11
ccgggagactgccagcgaggagtcaaacgtgctctgcctatccaagtcccccaacaagcacggtaggctttatatgaaggcgcggcccttccctgacggcctggctgacgacatcgacaagggcgaggtgttcgcccgccaggagctcaagcagcgggcccgctacctggctgagaagtacgagtgggatgtggccgaggcccgtaagatctggtgcttcggccctgatggcacgggccccaacatcctcacggacatcaccaaaggtgtgcaatacctcaatgaaatcaacgacagtgtggtagctggcttccagtgggccaccaaagagggggcactgtgcgaggagaacatgctgggcgtgcgctttgacatccatgatgtg

SEQ ID NO: 25708 - DNA, 425 bp, Zea mays
  Clone ID: LIB3154-001-Q1-K1-C12
atgtgattgttaggaatccatctgtggaggctatcttttcctcagaagaggggaagataggggggtcttcccaaatggggggggtaagagaagccactactttctcacgaatgtttaaagtgagagattccaggagttaccagttgaattcccttctcgttataggaaatacccagaataaagtgaaactttcccattcccccatcccctcgtatggaaatctcagatctgttctccttaccaacagggaaggtttaaagaaagaggaaatgatcgcagggaaaagctccagtctttggattctccagaaaggaaacgcattaaatactccagggaaactggcaggtaaattagaaactgttggctcagcctacacctttctccgacttgctgcctttttctgatctcagatggagggtattggg

SEQ ID NO: 25709 - DNA, 274 bp, Zea mays
  Clone ID: LIB3154-001-Q1-K1-C2
tttgactacaactcggccttttacttgtggccgaacaaggttctggacgggcgcaatgacatctaggtgtactccttcccactctcccatgatgacgacttagcccacacgcagaacaatctgtggatactcgagatccccaagcatgtgtacgcgggcatgatgcatctaggacatatcatgatggtcaatctacacaaaaacttcctcgactacatcctgccctatttgcacaacgtcttctacaaataaatacataacttacttatcaaat

SEQ ID NO: 25710 - DNA, 233 bp, Zea mays
  Clone ID: LIB3154-001-Q1-K1-C3
accattgcctgtacccttttgctcctcaccctgatacatctcttcgcggaatccttaacccaggctgtgctaactcaaacattctcactatcctgctccctatgccataagatctccatcactctctcttgaagcatcaacaatatctttaattatcgtgtgcacttgtaccaacaagtcccatgatcggtcctcaaaaccatcatctatactactaacaatcgacccttttt

SEQ ID NO: 25711 - DNA, 324 bp, Zea mays
  Clone ID: LIB3154-001-Q1-K1-C4
ccggaaggtttatcgttgaaaattaaattaacaacacatgaaatgggctttttctaagttcattgtttctgaccaaaagggggggagaaaaaaggtgagagtgagagaaagaggaaaccctcctaatcaaagtagagttataaagcttccactaatgaacacagttatccaattttctttatttattaaaaaagggaaacaatagaactcctgtaaatctatgtgcttgtaggtttccttgttgtgcatagccatcagtcatgtccaactctttgcaaccctatggaatgtagtaatttttgctattttatttatagtacttta

SEQ ID NO: 25712 - DNA, 459 bp, Zea mays
  Clone ID: LIB3154-001-Q1-K1-C5
tccgccgaacctgtttccaaccggaaccaatggggggttcggccagtcgcctatccaaggagctgggggccgagtaccaggacttgacgttcctgaccaaacaggagatccttctgtaagtgctgtttcgaacctcacctccgggatgctctcggaacggcttcgggaacggggaggctccgtcttactgatgggcaaaccgaggtcccgccagcgggaggggcaggggcctgcatgaagccagcagctgagccggaactgggggccggagccccgggccctcggctgtgccctcttgccggcacgccctcccgtctcgcgccggcggcccccagcggtgcaccgcggagcagcctccagccagagttgggtgctctttgaccccgctcccctggcttctgcaaaacggaacttcctgccccagtccggccgagactgctgtagttctgggctgctttg

SEQ ID NO: 25713 - DNA, 381 bp, Zea mays
  Clone ID: LIB3154-001-Q1-K1-C6
actatctaatcatcacttggacagtcagtctcgatggagcaaagtaaaagacagggtagaaagtgatccaggttacaaagcagtggatagttcatccatgagagaagacctcttcaaacagtacattgaaaaaatagccaagaatttagactcagaaaaagaaaaggagcttgaaaggcaagcccgcattgaggcaagccttcgagaacgagagagagaggttcagaaggctcgttcagaacaaacaaaagaaatagatcgagagagagaacagcacaaacgagaagaagctatccagaatttcaaggctcttctgtctgatatggtacgttcttcagatgtgtcctggtctgatactcggagaactctactggaagatca

SEQ ID NO: 25714 - DNA, 443 bp, Zea mays
  Clone ID: LIB3154-001-Q1-K1-C7
ctagttctagatcgcgagcggccgccctttttttttttttttggttgactgctcaaactggggagctataagccttttaaatagaatgagcagtcaaccaaaaaaaagaaaaagggcttccgatctcacctcacactgctgaaaaactacttcaaaatatcttgaaagagacaggccaccaatagcaggtttatgtaagcccttaacagcaccattaaagggagaaaaaaccatcagaaaattggcatgatgttcctgacagtccggccagcactgctgggacaggacatctctagccaaaccacaagtcctgccataatcaaactgaattatgaaacaaaagaaaacatcttgctctattttaagcaggtcataagccaaattattcttgaaaagtctttgcaggggaaaaaaacaaacccaatttgtagaggagaaaatga

SEQ ID NO: 25715 - DNA, 450 bp, Zea mays
  unsure at all n locations
  Clone ID: LIB3154-001-Q1-K1-C8
gggcgttcctggaggccgtctggagtgcagtgaaggccgtctgcggaatgctgatggatatgtgctcctctgtggggcagctcttcggaaacctcatccaggtataggagccccagtgattctggaggaactccacctcatccagaaggccctgcacgatccccttcccggaaaccatcttctaaagcgacctttaccctcctgctcacccttgacccatcctttaactgccctcccctcctgtcctgcagggacgacaccacagcatcaggccaggttttccatctccaggtctgacctgtctgtcagggacggggatgctctgctgacctanggatgtgggagaggcttggaagcccggaggcgccaaggaccaaggtgccttccgtgggtcagcatgcctctgtgcctctgcctgtcgctccaaaccatgtcagatggggcgctgag

SEQ ID NO: 25716 - DNA, 313 bp, Zea mays
  Clone ID: LIB3154-001-Q1-K1-C9
ctagttctagatcgcgagcggccgccctttttttttttttttttttttttttttagggtggggaggattttaatacagggatggaacattgtaatgggtaaggtcttgagaattggacaggatgtgcccgagacagcacggattgggaaggctgccctctaggccccaggtgctgggacgggacactccaagcgggtacgaccatgacctggggacacaagcaaggtcaggaaactctgagtccccttttcaaccctcatggacgccatctagcactttctatggaagaacgtgtgctatttttttgaaacca

SEQ ID NO: 25717 - DNA, 453 bp, Zea mays
  Clone ID: LIB3154-001-Q1-K1-D1
gttttcccaaacatgaaggcaataactttactcttcttggtgggatttataggagagtttcaggttttttcaagtgcctgctcgccaatcaactgccaatggggttcttatgctccttggtcagaatgcaatggttgtaccaagactcagactcgcaggcggtcaattgctgtttatggacaatacggcggccattcctgtgtgggaagtgcttttgaaacacaaccatgtcaacctactcgaggatgtccaacagaagacggatgtggagaacgtttcaggtgtttctcaagtcagtgcatcagcaaatctttagtttgcaatggggattctgactgtgaagaggacggtgctgatgaagacagatgcgaggatgcaaaaagcagacctgcctgtgacaaggataaacctcctccaaacatagagcttaccggacgtggttacaatgcacta

SEQ ID NO: 25718 - DNA, 439 bp, Zea mays
  Clone ID: LIB3154-001-Q1-K1-D10
gccacccctgaggaggcgggcgccgccgcttctcattcattgtcttgacaagagcatcctgcgcggacggtctcaggctccgccggctccttcctcctcctcctcctcgccctcctccgtctggggggtcgctcatctctcagccgcaggatgagccggcaggtggtccgttccagcaagttccgccacgtgtttggacagccggccaaggctgaccagtgctatgaggatgtgcgcgtctcacagaacacctgggatagtggcttctgtgctgtcaaccccaaattcgtggccctgatctgtgaggccagtgggggaggggccttcctggtgctgcccctgggcaagactggccgtgtagacaagaatgtgcctatggtctgtggccacacggccccggtgctggacatcgcctggtgcccacacaatgataacgtca

SEQ ID NO: 25719 - DNA, 280 bp, Zea mays
  Clone ID: LIB3154-001-Q1-K1-D11
cggaaggttatgctgagtctttgaggaactacctggagggcacgtgcgtggagtggctccggagatacctggagaacgggaaggacacgctgctgcgcgcaaacccttcaaaagcacatgtgacccatcactccatctctggtcgtgaagtcaccctgaagtgctgggccctgggcttctaccctgaagagatctcactgacctggcagcgcaagggggaggaccagacccaggaaatggagcttgtggagaccaagcctttaagggacggaaactttca

SEQ ID NO: 25720 - DNA, 428 bp, Zea mays
  unsure at all n locations
  Clone ID: LIB3154-001-Q1-K1-D12
cgactttgcatttccattgttgttctacccagggaggattcctgttcaggtagcgatgctggttctgcaggaggaagcatctatgagccattccccatgcggttggaggccttgcaggtgttggctcatctggcaaggggctacttttcgatgacacaggtctacttgatggagcttggagaggtgatttgcaagtgcctgggggaggcagatccatctatccagcttcatggagcaaagcttctggaagaactgggtaccagcttaatacaccagtataaaccagattcttccgtagcacctgatcagagagttccagtccccttggtggtgacgttctggaccgcgatgctcaacggtcctttacccagagccctgcagaacgcagagcatccgacgctgcangccagcgcctgtgacgccctgtc

SEQ ID NO: 25721 - DNA, 352 bp, Zea mays
  Clone ID: LIB3154-001-Q1-K1-D2
gccagataatacccctattcaaatgtaaaagaatcagagcccaaagccaaaacagcatctagggggaaggctctcaaaggggggtacccacgccagctgccatcagcaaacctggaaactctaagaaatgcaaattgttgggctcaccccctcaaatcagaaaatttcaaatatctgtaactctacagtcttcccttcaaaatcctttactcattcaaaactcattaaaatactgtctcatgactagtgggaattacaacaaaaagattctcatttccatgtgcttctgctctgtcatgtctgattctttgtgaccccatggactgaaaccaccatgcttctctgtccatgg

SEQ ID NO: 25722 - DNA, 129 bp, Zea mays
  Clone ID: LIB3154-001-Q1-K1-D3
cggccggaattccgggtccgccccacgccgtccggcttaatagccacatattcctagtgcctactgtatgcgacagtgcagctatagaacactggcgtcacagcagagttttttgacacctgctagaat

SEQ ID NO: 25723 - DNA, 454 bp, Zea mays
  Clone ID: LIB3154-001-Q1-K1-D4
cttccggttgggcccaaatttgagtttgcctgagttaggctcttttaaaaactacaaacagtatggctttggaaatatttttaacgtgtttgtgtttatttttttagtgctcggcaaaaacccagaactaattatttagaggatcgaaaaaatggatctaagctgattgtttttgtgattggagggattacatactctgaaatgcgttgtgcttatgaagtttctcaggcacataagtcctgtgaagttattattggtaagacttgtgttttccttttgtctatttttttaaaacaaactcttagatgcaaaaatatatatgtaaaactttatcttgtaatttacatttagaactaaattgttgagtgtaaaaaaatattttttgaatcagtgtgttttatctgatgtaccagttttttcctggttgaccttttgatgattttttaaaaataca

SEQ ID NO: 25724 - DNA, 406 bp, Zea mays
  Clone ID: LIB3154-001-Q1-K1-D5
ccggcaagttccggcccttaaattgattgaaaatggaaaaatcaacacattggaccacataaccggcgcaatcgctgggcagggggacccagccagtgctgctgcggccgccgcaaccgccgctgccgtcatccctgccgtgtccacgccaccgcctttccagggtcgcccaataactccagtgtacacggtggctccaaatgttcagagaattcccactgccgggatctacggagccagttatgtgccatttgctgctccagccacagccacgatcgccacactacagaagaatgcagcggccgccgctgccatgtacggcggatacgcaggctacatacctaaggccttccccgccggtgctatccaagggcccatccacgacgtgtaccaaacttactgaaac

SEQ ID NO: 25725 - DNA, 458 bp, Zea mays
  Clone ID: LIB3154-001-Q1-K1-D6
ccgttaaaccaaatggggctggtccatgttcaaatttttaataccaagcttgaaaagaaaaagatggctcattagccaggacaccatttcctgagtgctataattagatagaaaatacgaatgctttattttgcaacatggaaaatgtgttttttttaaaataaatttcatatttttcacgttatttttaaaaattttctgttaagcattagtctgaattttatcataattgaaacatatagttccaaacaatttaattttaaattgcttttaaagctctattcttctctacacttacagtcaaaatgaaaattcattgtatagtatttggaaatgtatttcacctgtaaagaaagaatgtctacatttcaaatggtttcaagtgaatacagaggaaccatcccctccagaaagtcagactacaattgtttacttttgtttttatgaatttttactca

SEQ ID NO: 25726 - DNA, 413 bp, Zea mays
  unsure at all n locations
  Clone ID: LIB3154-001-Q1-K1-D7
caactaatgcatgctatggaggcacggccgctgtctttaatgctgttaactggattgagtggagctcttgggatggacggtatgccctggtagttgcaggggatattgctgtatatgccacaggaaatgccagacctacaggtggagttggagccgttgctatgctaattgggcctaatgcacctttaatttttgaacgaggacttcgtgggacacatatgcaacatgcctatgacttttacaagcctgatatgctttctgaatatcctatagtagatggaaaactgtccatacagtgctacctcagtgcattagaccgctgctattctgtctaccgcaagaagatccgtgcccggtggcagaaagaaggaaatgatagagatntcaccttgaatggatttggtttcatgata

SEQ ID NO: 25727 - DNA, 415 bp, Zea mays
  Clone ID: LIB3154-001-Q1-K1-D8
tagatcgcgagcggccgccctttttttttttttttttttttttttttttttttttttttgggtttttttttttttttttttttttttttttttttttttttttttttttttttttttttttttttttttttttttttttttttttttttttttttttttttttgaaaaaaaaaaaaaactttttggggcccccggcttaaaaaaggggttttggaaaaactggggggcccccccccaaaaaattaaattttaatttttggggggggggggggaaaaaaaatcttaaaggggtttttttttttaaaaagggtttgggaaattctaaccaaaaaatataggttttttctttgggagcctataataaccccaaagatgtaaaccctttttgggaaaaaaaaagggggagtgcggggct

SEQ ID NO: 25728 - DNA, 449 bp, Zea mays
  Clone ID: LIB3154-001-Q1-K1-D9
ggctttcccatctctacaaacagctatttcagcaggagccaactctctcctttgtacacagagactatgctagtatttttcttgtaaaatttctccaagttattcatttattggctcaactaatttatcttaccccctcactctgtctttttagctggtcaagacgtctttggaaatttcctgaagtctgagttcagtgaggagaatattgagttctggctggcttgtgaagactataaaaaaacaaagtctgatcttttgcattgcaaagcggagaaaatctataaggcatttgtgcagtcagatgctgccaaacaagtgagtttattaccatcagcttatatgtaaaggaatttagatataggataacattcaacatagttgcaagatgaaatcctttctgagcatcatgattttcactggtggataatctaagtggatttctatag

SEQ ID NO: 25729 - DNA, 451 bp, Zea mays
  Clone ID: LIB3154-001-Q1-K1-E1
ggattccctaaaaaagatagaaatctggaagctgccacctgtgcttttagtgcatctgaaacgtgtttcctatgatggcaggtggaaacaaaaattacagacatctgtggactttccattagaaaatcttgacttgtcgcagtatgttattggcccaaagaacaatctgaagaaatacaacttgttttctgtttcaaatcactacggtgggctggacggtggccactacactgcctattgtaaaaatgcagcaagacagcggtggtttaaatttgacgatcatgaggtttctgatatttccatttcttcggtgaaatcttcagcagcttatatcctcttttatacgtcactgggaccacgaataactgatgtagccacgtaaggagaagttggttttaagctagttatcttttaacaggctgagcaacacaactcttgaatggcttgtaaa

SEQ ID NO: 25730 - DNA, 449 bp, Zea mays
  Clone ID: LIB3154-001-Q1-K1-E10
gcggctggcttcgctttcccttccaggtgtctctcatggtcttagagacggctctgggaggactgaacctggcctcttgaaaacaaaagccctcagtggatattacctctgtggtcttaaactcggcgggctttctgatatgactttacctagaaaggtatgtaatgtggttgctggtttttccttctggaggaaactagaagcggatggcctcaccgagtctgaaatgttctccgatgataatgggtattttggtgaagtgcatttatgtgggatgtgaatgcagtgtttgaatggacattcctattatcctggggcactggtaaaggcagctaaaggcagatgaagggcacggaccaaaagttggatcagaggagctcccttgtctgtccagcgtgctgtggaccctggtctggcttggagagaatgtgggcgttttattttccgtc

SEQ ID NO: 25731 - DNA, 285 bp, Zea mays
  Clone ID: LIB3154-001-Q1-K1-E11
aaaagggaaaaaaaaaaaaaaaaaattttttttaaaatttttttatttatttattaaaaaaaaaaaaataaaaaaaaagggttaaaaaaaaaaaaaaaaaaatttttttaattaaaaaaaattataaaaatatttataaaaaatttgggtgaattatataaaataaatattttattaattttaaaaaaggaaaatattaattaaattataattagggggagaaaaaaataattaaaaaaagaaaaaaaaaaaaatttttaataaaaaaaatattttttttttttt

SEQ ID NO: 25732 - DNA, 306 bp, Zea mays
  Clone ID: LIB3154-001-Q1-K1-E12
gcggctggcttcactttcccttccaggtgtctctcatggtcttatagacggctctgggggggctgaacctgacctctggaaaacaaaaaccctcagtggatattacctctgtggtcttaaactcagcggtctttctgatatgactatacctagaaaggtatgtaatgtggttgctggtttttccttctggaagaaactagaatctgatggcctcacctattctgaaatgttcttcgatgataatgaatattttggtcaagtgcatctatgtgggatgtgaatgcttcttttcgaatggacattcct

SEQ ID NO: 25733 - DNA, 457 bp, Zea mays
  Clone ID: LIB3154-001-Q1-K1-E2
gtccggccggcggcagggctgaggcaacggtgcccaccctccggctctttctctgcttttctgcgccgccgctccgctctccgcccgccgccatgacggaacaggccatctccttcgccaaggatttcctggccgggggcatcgccgccgccatctccaagactgccgttgccccgatcgagcgcgtcaagctcctgctgcaggtgcagcacgcaagcaagcagatcgcggccgacaagcagtacaagggcatcgtggactgcatcgtgcgtatccccaaggagcagggcgtgctgtccttctggcggggcaacctggccaacgtcatccgctatttccccacgcaagcgctcaacttcgctttcaaagacaagtacaagcagatcttcctggggggcgtggacaagcgcacgcagttctggaggtactttgcgggcaacctggcctccggcggggc

SEQ ID NO: 25734 - DNA, 450 bp, Zea mays
  Clone ID: LIB3154-001-Q1-K1-E3
cttgggttcaaggccggcctccaccaaaaatgggaaaacctggactgacctaagtttacgggagtttcaaaggcctgcgcatcatagacagtggatcaatatcacctataatcaattagtaacacaaacattcccaacctcatgtaatttccaggggattcccttcctacctgatcttctgtctctggttttattgctcctataacttcgcagatggctctctcctgtctgattatcctctccttgtaccccaacaggagagcaaaactctgactggggaggacagcggtaggatgagtaactttccttaacaagtgatctgcagagcccaggggacagagaaccacactaggttaaatccatggttgccgaggaccagccccggctgatccagggtattcgaaggggagacggcgtcggcgactatttatttatttatcaaagatataa

SEQ ID NO: 25735 - DNA, 452 bp, Zea mays
  Clone ID: LIB3154-001-Q1-K1-E4
aaaccagatttgctatccaacccgcgtgtgtctgaaagtaaataacatattttgaagtgcgcgtgtatactttttcataaggtgtttgggaattttttttcctaaaataatttattccatatctacatcactgagagctgtttgcctatcctgaagtccatctgtaaaagaaagttagcttttgtcctgaatttgctttccatgcttttattaatctagtttaatctcattgttggaaaaagggatagtgcattttaaattgaccttcatatgcttttaaaaataagacaaatctacttgataatgtactttttatttgatctcaagttgtataaaaccaataaattttgtgttactgttactgcagtagtaatcttatgcacacagtgattccatgttaaatgcaaagtagttaggcaactgttttcttacaggagtttccaagctttact

SEQ ID NO: 25736 - DNA, 423 bp, Zea mays
  Clone ID: LIB3154-001-Q1-K1-E5
tattcactcatctccttgagtcctgacacctgtgactgcaaggcacgggaagccccatagctgccctgagtctcccctgagcttgtgagaagaggaactcacatagtctctggcccttctctcccagcctttgtgcttctgatcggaggcatcgaagttggcctgtcccacttcccctttttcgcctgcctctcatcggagtttgggctggtcagctctgtcctgggcttcagctactctcttgtctgttcgtggggaattacgagactgtcatgttctactggccctcactgctctgcctggccttcctgctgggccgcttcctgcacatatttgtcaaatctctgagggtccacctgggctgggagctccagatggaagaaaaacctttcctggaagttcaccaggcagagcatgtcaagc

SEQ ID NO: 25737 - DNA, 459 bp, Zea mays
  Clone ID: LIB3154-001-Q1-K1-E6
cttcgcgaccagggttgaaggctgggcccgccaggctccaggaaaggcgctggagtggctcggaagtataggaggtagtggaaccacaggctataatccaggcctgaaatcccggctcagcatcaccaaggacgactccaagagccaagtgtctctgtcagtgagcagcatgacaacggacgactcggccagatactattgtaccgttgtccaccaagaaaccagacgtgattgtcctgatggattcgtggcttgttggcagtgtggtaggattaatgatggttgtaggcgttatggttgttgttgtcggggcgaatgtcatgaacgagatacgtacgctgcatttggcttcacttatgcctacgactttcacgtcgatgcctggggccagggactcctggtcaccgtctcctcggagagtgaaaccagccccagcatcttcccgctgagccttgggaa

SEQ ID NO: 25738 - DNA, 450 bp, Zea mays
  Clone ID: LIB3154-001-Q1-K1-E7
gttacaggggccggaaggtcagctagtcttggacaacaaaggcgtttcatcccctcgtgcgactgtctttcagcaaccacacaggacggtggctggcggcagagacccgcgggagcccccagcgatgtcgcgcctgttcctcgcctgcctgctggccatcttcccagtggtctccatgaagagtcccatcttcggtcccgaggaggtgagcagcgtggaaggccgctcagtgtccatcaagtgctactacccgcccacctccgtcaaccggcacacgcgcaagtactggtgccggcagggagcccagggccgctgcacgaccctcatctcctcggagggctacgtctccgacgactacgtgggcagagccaacctcaccaacttcccggagagcggcacgtttgtggtggacatcagccgtctcacccataaagactcggggcactacaa

SEQ ID NO: 25739 - DNA, 450 bp, Zea mays
  unsure at all n locations
  Clone ID: LIB3154-001-Q1-K1-E8
gttttcctcactgacaataaacagagaccacctcagctgccagtgccttgcagccctgggcgaccctccccttgccaggcctaccttcttccctgcctccgctgtgcctcttggctggcatctccgctgacccaggagggcgtggaggggctgtccactgccgggggccctggcccctctctccctgcccctgggcaggacgccttcttctgcagggaccagtctctccctccttcccagagggaccagacggacgcctctgaccgtctccttcctgacgggcctgttgacctgccgctggagtcaccagctccagcgcctttcgggggccaggcaggtgacacaggcgaatccaggctggatgcgtcctgcggggcggccccgtcaggctgccttggtgtcagaacacctgngtggtggggactggggtgaactggggtagatacactg

SEQ ID NO: 25740 - DNA, 405 bp, Zea mays
  Clone ID: LIB3154-001-Q1-K1-E9
ggttcctggagacttatacttacacgttcaccccctcctcaggtggtctgacagtccgtcagatttgtctgccacgtgtgcatagtctgagtacaggaagttgaattagttcttaataatgggaagaacctacattgtagaagagactgttggccagtatctttcaaacatcaatctgcagggaaaagcttttgtctctggtcttttaataggacagtgttcctcacaaaaggattatgtgattcttgccacaagaacaccacccaaagaagaacagaatgagagccccacacattccaaagccaaattggataacttggatgaagagtgggccacagaacacgcccaccaagtatccagggatgctaccaaggggacttttagttcttggagtatttattatta

SEQ ID NO: 25741 - DNA, 376 bp, Zea mays
  unsure at all n locations
  Clone ID: LIB3154-001-Q1-K1-F1
tcgcccgggtctctgttcccagccactcaccccatggccgcgcgcacccaaaacccgcaggggaagaaactgaaaacatggtacgagcagcacggctcttacctcaacttgcgccgccttttcgaaggagacagggaccgctttaaccgctttatcttgaaccttaacaccaaccatgggcatattctggtggactactccaagaacctgttgacggagactgtgatgcatattctggtggacgtggctaattccatgggtgtggaggccgcccgggagcgcatgtntactgttgagaagatcaacttcactgaagatcgtgctgtgctgcacgtggctccttctgaaccgatcaaacacacccattttggtggat

SEQ ID NO: 25742 - DNA, 453 bp, Zea mays
  Clone ID: LIB3154-001-Q1-K1-F10
ctccatcacctgctctggaagcagcagcaatgttggaaatggatatgtgagctggtaccaggtgatcccaggatcgggcgcccagaaccctcatctatgatgacaccagtcgagcctcgggggtccccgaccgattctccggctccaggtctgggaacacagccaccctgaccatcagctcgctccaggctgaggacgaggcagattatttttgtgcatctgctgaggatagtagcagtaatgctgttttcggcagcgggaccacactgaccgtcctgggtcagcccaagtccccaccctcggtcaccctgttcccgccctccacggaggagctcaacggcaacaaggccaccctggtgtgtctcatcagcgacttctacccgggtagcgtgaccgtggtctggaaggcagacggcagcaccatcacccgcaacgtggagaccacccgggcct

SEQ ID NO: 25743 - DNA, 455 bp, Zea mays
  Clone ID: LIB3154-001-Q1-K1-F11
tctagatcgcgagcggccgccctttttttttttttttaacttggcaatttgggaaggaggaagggtccataacatgactctgaacatgaatattgtctctcttagcaaatacggctagggtaatggtctaactctaaaccacaagattcaccttggttaaatcctccacttactggactagggggaggttatagcctcctaaggagctcacttaaaacataaaaataaatgtgatatgtctttattaaatgttaaaattaaacgtacacttttttttggatataaatgactacatttgactcctagattgaaatggtcttttaaaaggtatttttgttccagtttccatttttggttgtctttctggcatgcctgtactattattagtgtttatattgtaccctgatttggaaaagtattagattcagtctataccaatgtatttataaagtcca

SEQ ID NO: 25744 - DNA, 452 bp, Zea mays
  unsure at all n locations
  Clone ID: LIB3154-001-Q1-K1-F12
gcaaattaaagaggaaaaacaagaatctgaatttctaccagcagctggaggaacatttaacatctctgtcagtggggatattgatggcttaattactcaggctttgctaacgggtaacttcgagagtgctgttgacctctgtttacatgataaccgcatggctgatgccattatattggccatagcgggtggacaagaactcttagctcgaacccagaagaaatactttgcaaaatcccaaagcaaaattaccaggctaatcactgcagtagtgatgaagaactggagagagattgttgagtcttgtgatcttaaaaattggagagaggcgttagctgcagtgttgacttacgctaaatcagatgaattttccgccctttgtgatcttctgggaaccagacttgaaagtgacggcgatagcctcctgcagactcangcctgtctctgctaca

SEQ ID NO: 25745 - DNA, 432 bp, Zea mays
  Clone ID: LIB3154-001-Q1-K1-F2
cgggccggaatacccggtccgggcacgccgtccgctaaattggaaaaatgttggaaagattgaaatgaggtttggttgcaaccaaatatcaggtgctggagttgaggccacacacggctcggcctgtgagaggtcacttatgcaactgccccgcgaggccctggccgggaggtgagccacacggtcctgggatcctcggcccccatgcgggtcacattcatagagacagcctggcccactgggtacagcaaggcctgggggcttgtgaggtgcccccggcctcctgtggaaaccctggcaaagcatcctgggcttgcatgttgtctgccttggtgcaggtcatctgctggaccggtgggtcccgggcatgataggaagggcgcgagggttactgtgcggctgttagattgcattgacagtgatgccgcctgc

SEQ ID NO: 25746 - DNA, 456 bp, Zea mays
  unsure at all n locations
  Clone ID: LIB3154-001-Q1-K1-F3
gaaccatgtttggctcctcaggcccacaggctcagcgtggcccttgcccgttcgcgttgctggtgctactcctgctgggccccagctcggtcctcgccatctccttccaccttcccgttaactcccgcaagtgcctccgcgaggagatccacaaggacctgctggtgacgggcgcgtacgagatcaccgaccagtctgggggcgccggcggcctgcgcacccatctcaagattacagattctgctggccatattctgtactccaaggaggatgcgaccaaggggaagtttgcctttaccactgaagattatgacatgtttgaagtgtgttttgagagcaagggaacagggcggatacctgaccaactcgtgatcctagacatgaagcatggagtggaagcgaaaaattacgaagagattgcanaagttgagaagctcaaacctttggaggtggagc

SEQ ID NO: 25747 - DNA, 454 bp, Zea mays
  Clone ID: LIB3154-001-Q1-K1-F4
ggaaaaccatgatcagtcagcagatcaggaagagagttataaccaaaatctgggattacaggagcaagagaaaactgaaagtgacttaactgagaatttggagtattcaccaactgaaggcacattggagctaaaagaagacatgagtgaacctcaaaaggagaaacttccagagagcttccttgctcatgatgttagttccattgtagattctaaccaacaagaaagcatcacaaagacagaggaaaaccaaaaacaacctgtagatgactcccatcctcagttgaacagtcaagacctacgtgatcaaggaaaccaagatcaggacacaaatggagaagaggaaggagagaaagagccaggtgaagtgggtacccacaatgatgaataaaaacgggagacagaactttccaatgagccttctaacaacaagcaggaagaagacaagtcccaa

SEQ ID NO: 25748 - DNA, 233 bp, Zea mays
  Clone ID: LIB3154-001-Q1-K1-F5
ccggccgaataccgggcgcgcaggcgtccgccctaaccttgttgttttaccaaatagagacttgacactgtaggtagaataccaaatccgtcgcgccacttgaatgtgtgggggggaacaacagaccaacattttgggggcccctcgattgaaaaaggaacttctcccactcttgctgccactgaaatggttaggactctctttgtgtaaataaaaccaatgctttcggaaaa

SEQ ID NO: 25749 - DNA, 464 bp, Zea mays
  Clone ID: LIB3154-001-Q1-K1-F6
gcctccgcggccccgtggcctgcaaaacagttaagtgggagctgagacaagttctctagctgcctccacaccacacagacacaatgctgccttccctgggcctccccagactgtcctggatgctgctctcctgcctgatgctactgtctcaggtccaaggggaagattcccagcgctctgaaaggatcagctgtcccagaggttccatagcctatgggtcctcctgttatgtcttgtataaagtagccagaagctggatgagtgcaaatattgcctgccagaggagacactcgggacaccttgcgtctgtgctcagtgggactgagggatccttcctggcctccttggttaggaacaacttgaatacccaatcagatgtctggattgggctccatgaccccacagagggctctgagcctgatgctggtggatgggaatggagtagcactgctatgttcaattat

SEQ ID NO: 25750 - DNA, 451 bp, Zea mays
  Clone ID: LIB3154-001-Q1-K1-F7
ggccgcgaaccctcctcctgctactctcgggggtcctggtcctgaccgagacccgggcaggtgagttccgggtcgggagggaacgacctctgcggtgagaggcgaggggatctcccgggagtctggggacaggaccccagggaacgagcgaccccgacgcccctgcccagacccgccccctccccctggtcccgtcctgtccctcccttgcatctcgacccctcttttcttccccctccggagttcgggccggtcttcgacctcttccatctcacgtgcccctagccccctccggcctcccggccccatcacctcggacccgggacccgatcccgcgccgagaggaggtcgggccaagtctcacccctccccgcccccaggctcccactccctgaagtatttcagcaccgccgtgtcccggcccgggcttgaggaaccccgtttatcatcg

SEQ ID NO: 25751 - DNA, 398 bp, Zea mays
  Clone ID: LIB3154-001-Q1-K1-F9
acgggtgccccgagtcacaggctgctttgggtctgccacagtgggcaaggaaatggaatcaggagacagggaccctccattccccatatccaggaaaatgtgatgagctacaggtttcagcttctagatcaccacttaacgttctagctacaagtggaaaatccaagggcagcaaggtccatcagaaggatgtctgaagaaatggcagaccaaagagaagaagctggggaaaaagaggcatgcagagaccagatcaaagaatccgacaaagaagaggaaccaccagctgcttcgtcccatggccaggagtggcgtccaggtggcaaagcacctaagaacccaaagcctgaacccggggccagaccccctgcactccccgttatggtcaatgacccacc

SEQ ID NO: 25752 - DNA, 450 bp, Zea mays
  Clone ID: LIB3154-001-Q1-K1-G1
gacctgttaccagaggctgaagatgagatgcatggaggaggagaaggtcatcccactggagtggggggatgctattcaccacctgtacgaggagtggctcatcaaagggagccttttccccgtggcagcccccgttctggtgatcgaggccgaccacaacatgcagaaaatgttagaactctttgaacaaaaccggcaccgaatcctaactctggagaatcggaagcttggtccataggataggaaagatcatgcccgagaaatgcctgctgctgccaagctagcttttaggagcagtttggaaagctccactctcaggagggctttgtgtctgcccacagttgtcttccttctggccttctctcctttcccagtgtcttcatcctgggatcctgggcctcgtgggtaaatgggaccagtgggtttgccatgccctctggtggcacagcc

SEQ ID NO: 25753 - DNA, 457 bp, Zea mays
  Clone ID: LIB3154-001-Q1-K1-G10
cttgggtcagcagccaggtggaatcagtgtacatggagatgtaccccctgtcccttcagtgagcatctctggtccccactgtgtgggtgggtgtgtctggcccagcttcacacagccattcattcagcaattcctccacgtactcagtgtagaagaagctgggctggaactgcagtgataaacaagaatgattaaggcagtgagcctacatccaccttaaaaagtccgctccgttcaggttcactgactctctctgctcccacagtgggcagcacactgtggacaggggagacactttctccccagccctcctcctgggcctgtgatggagcagcagggaaacatttcattctcctcactcagattaaatcactaagatttttctatttcagaacgtgaatggggagaggaaaggcaaattttgctgaattcaggacaacattcgcaaggtaattat

SEQ ID NO: 25754 - DNA, 317 bp, Zea mays
  Clone ID: LIB3154-001-Q1-K1-G11
ccacagcaggctgacacggaactccaagatcatggaagtggtgggcaggtgcagggagaagggacggcactgtcccaagtcccaggacggacacctctgctgtcccctcccctccaggcctcagttttccagccctttaactgggggcatgagccaccctttccctctccccggcatcatacacccaagaagaacgagctcccccaaactgcagcccctcccctcactttctgccaccccctagttccctctgcacagccaagcttgtcatcagccctccagccacggctcctgtgagaataaaaggtagtgagtgg

SEQ ID NO: 25755 - DNA, 450 bp, Zea mays
  Clone ID: LIB3154-001-Q1-K1-G12
gttgttggagagctgtcacttactgctcattaatgattgattttttaaaccatctagattgttttcatgagaacaggggattaactatacggaatttattattggtcattaagggatattaaaatggaaaacctttacaagatgtatcctgtcttgctgcattcgaatgcctgagactctcctgccaatgtggggagggaaacaagagatcactcttccagatctctggcaaggagatccagttgaggagaggtggagtgaagagagaaattaagaaaaaaaatctatttttgctgtaataaaacactgtttacattttataacagcaataatttaccccaaataatcacttcagctattgttcagcttgttttaggggctaactgaactgtggctaccaatctattcagtgcagattgctaataatgggctactttgaaaacttatagc

SEQ ID NO: 25756 - DNA, 458 bp, Zea mays
  Clone ID: LIB3154-001-Q1-K1-G2
ccgaaaaaaaaaaaaaaactatgggttagctcaaagtttgagaaaagttaagttcaggtggaaccaggtgttggcatggcaacacagaattttaaagtaaatctcctttgaactttgtatagagaaggggagaaaaacctgacacttgtagtttgtttcctcttggccgttaaaagaaagataaagtatgtctgacacttgcagctatttcctctgtttggagacccctagccttcctacctgttaccctctcagtactttactttaaaaatcttaggaagtaatgattattaaatggatattgcaaggcttgacatttagcaacttcttgatacattttgtcttttatgtttatcactattattgcagatacctaatatattttcaaaatatattaaagatacgttattgggagtttaagtgttttaaaaagtctacttttctttaatgagatttta

SEQ ID NO: 25757 - DNA, 462 bp, Zea mays
  Clone ID: LIB3154-001-Q1-K1-G3
tccgttgcttaacctgtccaaaaaatgtgacactacaaaagtggagctggaaaatcaagtagtcacgggcagccaaagcaatatctgtgatagtgacgctgagacctgttacacctatgacagaaacaagtgctacacaaacagggtcaaacttagttaccgtggtcagaccaaaatggtggagacagctctgaccccggattcctgctatcctgactaacgcaagtcatgctggctgcacaactgcttatcttgaagggctctccattttgattgcaggtagttaatgtatttactcctgatgaatttgaaaccatgattttttttgggtggggataatataaaattaactaccccacccctaccactggcaaataattgaaatagtaacactgttaatgtttttaaggtaaatttctagcatttaaaaaaatagatgaggggagaaaataaaattcaaaa

SEQ ID NO: 25758 - DNA, 438 bp, Zea mays
  Clone ID: LIB3154-001-Q1-K1-G4
ggcccctgaaagggtttgggggatgtgcacgatgaggctgctggcattcgcggtgttggctctgggtgctgtcactcaagcagaggaaggagccaggcttttggcttccaaatcactgctgaacagatatgctgtggaggggcgagacctgaccttacagtacaacatttacaatgttggctcaagtgctgcattagatgtggaattatctgatgattccttccctccagaagactttggcattgtctctggaatgctcaacgtcaaatgggaccggattgctcctgctagcaacgtctcccacaccgtggtcctgcgccctctcaaggctggttatttcaactttcacctcagcaactgtgacatacctggcccaggaggatgggcctgttgtgatcggctttaccagtgcacctggacagggaggaattctggctc

SEQ ID NO: 25759 - DNA, 457 bp, Zea mays
  Clone ID: LIB3154-001-Q1-K1-G5
gcccagttcaaacccacggggctgccctcccctgcgctctcccctcgctgcccgggcccggagcgcagcgcggccgcgcagattcacgatgttgaaagcccttttcctaactatgctgactctggcgttggtcaagtcacaggacactgaagaaaccatcacgtacacgcaatgcacagatggatatgagtgggatcctgtaagacagcagtgcaaagatattgatgaatgtgacattgtcccagatgcttgcaaaggtggaatgaaatgtgtcaaccactatggaggatacctctgccttcctaaaacagcccagattattgtcaacaatgagcaacctcagcaagaaacaccagcagccgaaggtgcgggtgcagctgcaaatgcagccgcgacctctagtacaggcactgggggtgtagcagccactggcgtcgctgccagtggagtggtgcct

SEQ ID NO: 25760 - DNA, 373 bp, Zea mays
  Clone ID: LIB3154-001-Q1-K1-G6
aaggaaagaccgggcccttcaaccctcccggtccacgtggcttcccggttccgcccggccccgacggcatgacggaaaccattgctgtcccgggcaccccatcagtcgatcacggcttccttgtaacccggcactgtcagacaacatacgacccccagtgcccttctgcgaccaaaatactagtccccggaaactttatgctctacgttcaatggaaccagcgggctcacggccatgacttgggcactgtgggcaactgtctgcggaagttcattctccatgcccttactcttctgtaacatcaacaatgtcttgaatttcatgttcttcaacgactacttctactagctgcacacctccggagcccatgccc

SEQ ID NO: 25761 - DNA, 457 bp, Zea mays
  Clone ID: LIB3154-001-Q1-K1-G7
cgcgatgtctgggctgtctcgcccgctgcttttggccgtcggctgcctggccgcgctctgcgtaatcacagcggctgggaacaccaccctggccccgaacgtgactacagcctcgtctccaccgcccaccaccacgacagtcccggtgtcaccgacgactctctcgccgctgccggtcaccactccagcaccagatatctgtggaagccgaaacagttgtgtttcctgtgttgatggtaatgctacctgcttttggatagaatgtaaaggtaaaagctactgttcagataattcaacagctggtgattgcaaggtggtgaacaccacaggattctgttctgtgcccactaccacaccaacgccaaccaattctacagctaaaaccacaactctgccttccactactacaacttccaccacagctactacatcaggtacaactaataccactctatct

SEQ ID NO: 25762 - DNA, 431 bp, Zea mays
  Clone ID: LIB3154-001-Q1-K1-G8
gcggatggcggcggcggcagcgatgacggcggcgggctgcggaggggctggggcggcacgcgccctctcccgcttccgaggctgcctggcaggcgcgctgctcggggactgcgtgggcgccgtctacgaggcgcgcgacaccgtcgacctgacgtcagtcctgcgtcaggtccaggatttggagccggaccccggctctcccgggagcgcgcggacagaagcactgtgctacacggacgacacagccatggccagggcgctggtgcagtccctgctggccaaggaggccttcgacgaggtggacatggctcacaggtttgctcaggagtacaagaaggaccctgaccggggttacggtgctggagtgatcaccgtcttcaggaaactcctaagccccagatgccgggatgtctttgagcctgcacgcgccc

SEQ ID NO: 25763 - DNA, 455 bp, Zea mays
  Clone ID: LIB3154-001-Q1-K1-G9
cggacgcgtgggtgggtccaagcttccccagaagttctactactggttcttccagacagtgcggggtatgacaggggtgctcctgctcctggttcttgccatcatgtatgtctttgcttcccaccacttccgacgccgcagcttccggggcttctggttgacccaccacctctacatcctgctctatgtgctgctgccccgtttccacatctacttcctggtcccagcacttatctacatgggggacaagctggtgagcctgagccggaagaaggtggagatcggcgtggtgaaggcgcatctgctgccttcacgagtgacccacctggagttccagcggccccaaggctttgagtacaagtcaggacagtgggtgcggattgcctgcctggctctggggaccaacgaataccaccccttcacgctgacgtcagcgccccatgaagagacgctta

SEQ ID NO: 25764 - DNA, 59 bp, Zea mays
  Clone ID: LIB3154-001-Q1-K1-H1
tgcgaaacgtcatagcttcttctattagtgtcacgctaaattgcaattcacttggctct

SEQ ID NO: 25765 - DNA, 452 bp, Zea mays
  Clone ID: LIB3154-001-Q1-K1-H10
tgttactcttgtaaaaccactggggtgttttaatccatgcatttttcttcactattcaagagtataaatctgttgggttgttaaaatacatttaaacaaacagttgagaaacagaagtttggtaccttgtcagatccccttaaggggaagagtttaagctataaaatagtggctttgtttttattccaaaacatacatctgctgtttgttttggatttattttacatgcgtttatatattttttaatactggttaaatcttagcatcttggctaaatcttagaattctggcccttcgtagccatattacagaagtctgtattgtaaaagctaaaggtctgaacaggtttccaaaaacttttactttcatgaggatataaccttagcagagacctgaataacatttattctttggtacgctatgcacgcgtgtgtatgtatgtatgtatgtat

SEQ ID NO: 25766 - DNA, 248 bp, Zea mays
  Clone ID: LIB3154-001-Q1-K1-H11
gcgactccgcgctctgcttcggctgcaagttccagttcaagcctatccgggtgtcggagcccgtgctttccctgccggtgcgcagggggagcgtgactgtgctcagtggatacgctgctgatgaaatcacccactgcatccggcctcaggacatcaaggagcgcagagcggtcatcatcctcaggaagacgagattagatgcaccccgattggaaaccaagttcctgagcagcttcgtgctgccaccc

SEQ ID NO: 25767 - DNA, 317 bp, Zea mays
  Clone ID: LIB3154-001-Q1-K1-H12
cggggagatgcgtgacgaatgcggcgcgtgacggagaagcggttagccgacgctgcggcggcagtccgtgtaaacaaggcctcgcgccgctgctggtcctgcgactgcttctcgctggctttgctttcaccaaacccaaggaggtgacaggaggagtccccatacaggacttaaggatgctgtgaccagaagatgggatcacggaatagtagcagcgcaggaactgggtctggagacccctccgagggcttgccccgaagaggggctggcctgcgtaggagtgaggaagaggaagaggaggatgaagatgtggatct

SEQ ID NO: 25768 - DNA, 467 bp, Zea mays
  Clone ID: LIB3154-001-Q1-K1-H2
accggccggaattcccggtccgcccacgccttccggaaaatccttgcaagacagttaagtgggacctgaaacaagttctctagctgcctccacaccagacagacacaatgctgccttccctgggcctccccagactgtcctggatgctgctctcctgcctgatgctactgtctcaggtccaaggggaagattcccagcgctctgaaaggatcagctgtcccagaggttccatagcctatgggtcctcctgttatgtcttgtataaagtagccagaagctggatgagtgcaaatattgcctgccagaggagacactcgggacaccttgcgtctgtgctcagtgggactgagggatccttcctggcctccttggttaggaacaacttgaatacccaatcagatgtctggattgggctccatgaccccacagagggctctgagcctgatgctggtggatgggaatggagt

SEQ ID NO: 25769 - DNA, 455 bp, Zea mays
  Clone ID: LIB3154-001-Q1-K1-H3
gggggcctcggccccgaatgttcttccttttctctgatgcacttctcatggccaagcctcgacgcccattgcatctgctgcagagtggcacctttgcctgccgggccctctaccccatgggcgagtgtcaactccacagggtctttggccactcaggaggcccttgtggtggactgctcagcctgtcctttccccatgagaagctactgcttatgtccacagaccaggaggagctgtcacactggtaccacagtctgactttggccatcagcagccagaagaactagcagaatcttacaattccagagtccaggatactgtggggataggtcagaatcaggggttcaaaggaatcttactaacaaaacacggactcttcatggtttgagaagaatcattttgtgtttgcctgagaccaagacacaccatgtcccttgaccagctcttaaagaatc

SEQ ID NO: 25770 - DNA, 194 bp, Zea mays
  Clone ID: LIB3154-001-Q1-K1-H5
gtccgaaaaaccttgctgtcctgccaccatggggctcgtcgctctcgtcctgacctccctcgccatttcgacggcttgggggctgccaccctcaccgcctattgtggacaccgctcagggcagagtcctgggaaaatatgtcagcttaaaaggatttgcacagcctgtgggcgttttcctgggaatttcttttg

SEQ ID NO: 25771 - DNA, 140 bp, Zea mays
  Clone ID: LIB3154-001-Q1-K1-H6
cggaattctcgctcttcttctgctgctaatttcaaataaaacctatccctgtgttgcggcgggtgaccttttaaacaagggctcgcgccgatacttatcctactacttgatacccttcttattaaataacccacttcatt

SEQ ID NO: 25772 - DNA, 453 bp, Zea mays
  Clone ID: LIB3154-001-Q1-K1-H7
ctccctcccgttttccttgggacgctacctggtgactgtggctcccgcgaccagcaaggaggcggtggcggaggacactcgttatggccgcctctaagcctgtggaggcggcaatggtctcagcggctggacccggttccgggagtgggatgggcggcggcagtgcgacttcgggcccgggcaccgggagcctgccgagatggcagctggcgctggcggtcggggcgcccctgctgctaggagcgggtgctctgtacctatggagccggcagcggcggcgccgggagaccggggcccgaggcgactccggcggcctgaagcgcaacagtgaacggaagaccccggagggcagggccagtccggccccgggcagcggacaccccgatggccccggtactcacctggaaatgaactcgcttgatagagcccaagcagccaagaacaaaggcaaca

SEQ ID NO: 25773 - DNA, 444 bp, Zea mays
  Clone ID: LIB3154-001-Q1-K1-H8
cgtcgcgtcagtctggtgcgacctctgcccgccgggagggtcgtcctgtctgcgcccgagtcacagccatggcggcctcgcttctgctgcggcaaggacgagccggggcgctgaagactgtgcttctggaagcaggcgtgtttcgaggagttgctcctgcagtttctctctctgcagaatcaggaaagaatgaaaagggattaccaccgaaccccaagaagcagagcccaccaaagaatgtagtggaaccaaaggagaggggccagcagctcgcccccccaacagcagatgcagtgtccaaaaccttatctgcacccacttcctccccatcagttgtgagccaaagcaggacgctagcgagccctaaccccgatgccagtgtgctgcacacagaccaaaggcttccgaagcttttgtcaagaaagactttggtagagtttcctc

SEQ ID NO: 25774 - DNA, 383 bp, Zea mays
  Clone ID: LIB3154-002-Q1-K1-B10
gacttagattgcaagcggggcgtctactctatccaagctaacctacccttccctgcggggcgatatcttagctatagtgtcacgtaacttaaattcaatggacgggccgtgacaacacaacgtctggactaacaaaaccgttacctaacttaattgaatcgcattacatcacatttacgtctggtgaggtggtataatagagaacaggaccgaacggactgcccatacacaacagcagcctgcattgaatatggaacgcgacctgcactgtaacatgaaattcagcgcgtgtggtggggacgttcagcgcaactggtacactagactgggcagtaacgtacgctcctttcgattaattaacttcctttctttacacgttacgt

SEQ ID NO: 25775 - DNA, 445 bp, Zea mays
  unsure at all n locations
  Clone ID: LIB3154-002-Q1-K1-B11
agaccattagctttatctactccagagcgcagaagaacccgatcgacaccatgagggtggtgctcgttgccctcgctctcctggctctcgctgcgagcgccacctccacgcatacaagcggcggctgcggctgccagccaccgccgccggttcatctaccgccgccggtgcatctgccacctccggttcacctgccacctccggtgcatctcccaccgccggtccacctgccgccgccggtccacctgccaccgacggtccatgtgccgccgncggttcatctgccgccgccaccatgccactaccctactcaaccgccccggcctcagcctcatccccagccacacccatgcccgtgccaacagccgcatncaagcccgtgccagctgcatggaacctgcggcgttggcagcaccccgatcctgggccagtgcgtcgagttcct

SEQ ID NO: 25776 - DNA, 451 bp, Zea mays
  Clone ID: LIB3154-002-Q1-K1-B12
ctcagcaatatcagcagggccaggaaaaatcacaacagcaacaatgtcattgccaggagcagcaacagactacaaggtgcagctataactactatagcagcagctcaaatctaaaaaattgtcatgaattcctaaggcagcagtgcagccctttggtaatgccttttctccaatcacgtttgatacaaccaagtagctgccaggtattgcagcaacaatgttgtcatgatcttaggcagattgaaccacaatacattcaccaagcaatctacaacatggttcaatccataatccaggaggagcaacaacaacaaccatgtgagttatgtggatctcaacaagctactcaaagtgcggtggcaatcttgacagcagcacaatacctaccatcaatgtgcggcttgtaccactcatactaccaaaataatccatgcagcagcaatgacattag

SEQ ID NO: 25777 - DNA, 452 bp, Zea mays
  Clone ID: LIB3154-002-Q1-K1-B6
tttgaggattcagaaacacaccaagcgaagcgcactagcaacaacctaacaacaatggctaccaagatattagccctccttgcgcttcttgcccttttagtgagcgcaacaaatgcgttcattattccacagtgctcacttgctcctagtgccattattccacagttcctcccaccagttacttcaatgggcttcgaacatccagccgtgcaagcctacaggctacaactagcgcttgcggcgagcgtcttacaacaaccaattgcccaattgcaacaacaatccttggcacatgtaaacctacaaaccatcgcaacgcaacagcaacaacagtttctgccatcactgagccacctagccgtggtgaaccctgtcgcctacttgcaacagcagctacttgcatccaacccacttgctctggcgaacgtagctgcataccagcaacaacaacg

SEQ ID NO: 25778 - DNA, 354 bp, Zea mays
  Clone ID: LIB3154-002-Q1-K1-B9
caacaagcaacatagaaagtggaatccagtagcaacaatagagcaacaatggcgaccaagatattttccctccttatgctccttgctctttctgcatgtgttgctaacgcgacaattttccctcaatgctcacaagctcctatagcttcccttcttaccccataccttccatcaatgatagcttcaagatgtgaaaacccagctcttcaaccctataggctccaacaagcaatcgcagcaagcaacatacctttatcacccttgtttcaacaatcgccagccctatctttggtgcaggcattggtacaaaccatgagggcacagcagctgcaggaactcgtgctacctgtgatc

SEQ ID NO: 25779 - DNA, 453 bp, Zea mays
  Clone ID: LIB3154-002-Q1-K1-C12
gtcgcacatatctactatactatactctaggaagcaaggacaccaccgccatggcagccaagatgcttgcattgttcgctctcctagctctttgtgcaagcgccactagtgcgacccatattccagggcacttgccaccagtcatgccattgggtaccatgaacccatgcatgcagtactgcatgatgcaacaggggcttgccagcttgatggcgtgtccgtccctgatgctgcagcaactgttggccttaccgcttcagacgatgccagtgatgatgccacagatgatgacgcctaacatgatgtcaccattgatgatgccgagcatgatgtcaccaatggtcttgccgagcatgatgtcgcaaatgatgatgccacaatgtcactgcgacgccgtctcgcagattatgctgcaacagcagttaccattcatgttcaacccaatggccatga

SEQ ID NO: 25780 - DNA, 391 bp, Zea mays
  Clone ID: LIB3154-002-Q1-K1-C3
attttgagcattcagaaacacaccaagcgaagcacattatcaacaacctaacaacaatggctaccaagatattatccctccttgcgcttcttgcgctttttgcgagcgcaacaaatgcgttcattattccacaatgctcacttgctccaagttacattattacacagttcctcccaccagttacttcaatgggcttcgaacacccagctgtgcaagcctataggctacaacaagcaattgcggcgagcgtcttacaacaaccaatttgccaggtgcaacaacaatccttggcacatgtaacaatacaaaccatcgcaacgcaacagcaacaacaattgctaccagcactgagccacctagccatggtgaaccctgccggctacttgcaaca

SEQ ID NO: 25781 - DNA, 146 bp, Zea mays
  Clone ID: LIB3154-002-Q1-K1-C6
gctatacacagtaagcgcacgctatcgacaatggatgctaacatacgcgcgcatgctgcgctatatgtcttttatgggagcgcatcaattgcgttcattgtccgacagtgcacaatggcttgtatggccaaactccgcagttccta

SEQ ID NO: 25782 - DNA, 456 bp, Zea mays
  Clone ID: LIB3154-002-Q1-K1-C9
gggaatcacatcgccatggcagccaagatgtttgcattgtttgcgctcctagctctttgtgcaaccgccactagtgctacccatatcccagggcacttgtcaccactactgatgccattggctaccatgaacccatggatgcagtactgcatgaagcaacagggggttgccaacttgctagcgtggccgaccctgatgctgcagcaactgttggccttaccgcttcagccgggccagatgccaatgatgatgccaggtatgatgccaccgatgacaatgatgccgatgccgaatatgatgccatcgatgatggtgccgactatgatgtcaccaataacgatagctagtatgatgccaccgatgatgatgccaaacatggtttcaccaatgatgatgccgagtatgatgccttcgacgatgacgccgagtatgatgccaccgataatgatgccaagt

SEQ ID NO: 25783 - DNA, 489 bp, Zea mays
  Clone ID: LIB3154-002-Q1-K1-H1
aaaaaaaaaagtgaataaaaaaaaaaaataaaaaaaaaattttttttttaaaaaaaaaaaataataaaaatttggtggtatataaaaaaaatattgtggatatataaaataaataaaaaataataaaataataaaaaaaaataaaaataaaaaaataaaaaaaaatataaaaaataataaaataaaaaaaaaaaaaaaaaaaaaaataaaaaaaaataaaaaaaaaaaaaatataaaaaaaaaataaaaaaaaaaatataaaaaaaaataaaaaaaaaaaaaaataaaataaataaaataaaaaaaaaaaataaaaaataaaataaaaaaaataattaaaaaataaatatatataaaaaaaataaaatttagaataataaaataaaaaaaaaaatataataaaaaaaaaaaaaaaataaaaaaaataatatataaaataaaataaatgaaaaattaataaaaatataaatatatatataaaaaaaatat

SEQ ID NO: 25784 - DNA, 404 bp, Zea mays
  Clone ID: LIB3154-003-Q1-K1-A10
cgcaaattgcaccaagaaatccatcgagaggccgtcgacaggggaattaatggcgtcgtcgtctagcagcagccaccgccgcctcaccctcgcagccgccgtcctgctctccgtgctcgcggctgccagcgccagcgccgggacctcctgcgtgccggggtgggccatcccgcacaacccgctcccgagctgccgctggtacgtgaccagccggacctgcggcatcgggccgcgcctcccgtggccggagctgaagaggagatgctgccgggagctggcggacatcccggcgtactgccggtgcacggcgctgagcatcctcatggacggcgcgatcccgccgggcccggacgcgcagctggagggccgcctagaggacctgccgggcttgccgcgggaggtgc

SEQ ID NO: 25785 - DNA, 406 bp, Zea mays
  Clone ID: LIB3154-003-Q1-K1-A11
cagaccattagctttatctactccagagcgcagaagaacccgatcgacaccatgagggtgttgctcgttgccctcgctctcctggctctcgctgcgagcgccacctccacgcatacaagcggcggctgcggctgccagccaccgccgccggttcatctaccgccgccggtgcatctgccacctccggttcacctgccacctccggtgcatctcccaccgccggtccacctgccgccgccggtccacctgccaccgccggtccatgtgccgccgccggttcatctgccgccgccaccatgccactaccctactcaaccgccccggcctcagcctcatccccagccacacccatgcccgtgccaacagccgcatccaagcccgtgccagctgcagggaacctgcggcg

SEQ ID NO: 25786 - DNA, 394 bp, Zea mays
  Clone ID: LIB3154-003-Q1-K1-A12
atttagaccaactagcaacatagaaagcacaatagtgtaccaacaatggcagccaaaatattttgcctccttatgctccttggtatttctgcaagtgctgctacggcgaccattttcccgcaatgctcacaagctcctatagcttcccttcttcccccgtacctctcaccagcggtgtcttcggtatgtgaaaacccaattcttcaaccctacaggatccaacaggcaatcgcagctggcatcttacctttatcacccttgttcctccaacaatcatcagccctattacagcagttacctttggtgcatttattggcacaaaacatcagggcacaacaactacaacaacttgtgctagcaaaccttgctgcctactctcagcaacagcagtttc

SEQ ID NO: 25787 - DNA, 388 bp, Zea mays
  Clone ID: LIB3154-003-Q1-K1-A2
gcccggaacgaccgactcgaccgactgcatacgcaatatgcatcgatagcggtggatttcagtgatcacacaatatagcaacaatggcgaccaagatattttccctccttatgctccttgctctttctgcatgtgttgctaacgcgacaattttccctcaatgctcacaagctcctatagcttcccttcttcccccataccttccatcaatgatagcttcagtatgtgaaaacccagctcttcaaccctataggctccaacaagcaatcgcagcaagcaacatacctttatcacccttgtttcaacaatcgccagccctatctttggtgcagtcattggtacaaaccatcagggcacagcagctgcagcaactcgtgctacctgtgat

SEQ ID NO: 25788 - DNA, 434 bp, Zea mays
  Clone ID: LIB3154-003-Q1-K1-A3
cggcccggaacgacccactcgacccacgcgcatcaatcatcattcatcttagtagtataggcaccaaatcaaatctgcaacatcaattatctaactccaaaaaccatgaagctggtgcttgtggttcttgctttcattgctttagtatcaagtgtttcttgtacacagacaggcggctgcagctgtggtcaacaacaaagccatgagcagcaacatcatccacaacaacatcatccacaaaaacaacaacatcaaccaccaccacaacatcaccagcagcagcaacaccaacaacaacaagttcacatgcaaccacaaaaacatcagcaacaacaagaagttcatgttcaacaacaacaacaacaaccgcagcaccaacaacaacaacaacaacagcaccaacaacaacatcaatgtgaaagccaacaacaaca

SEQ ID NO: 25789 - DNA, 384 bp, Zea mays
  Clone ID: LIB3154-003-Q1-K1-A4
cggacgcgtgggagaaagcacaatagtgtaccaacaatggcagccaaaatattttgcttgcttatgctccttggtctttctgcaagtgctgctaccgcaaccattttcccacaatgctcacaagctcctatagcttcctttcttcccccatacctctcaccagcggtgtcttcagtatgtgaaaacccaattcttcaaccctacaggatccaacaggcaatcgcagcaggcatcttacctttatcacccttgttcctccaacaaccgtcagccctattacagcagttacctttggtgcatttgttggcacaaaacatcaaggcacaacaactacaacaacttgtgctaggaaaccttgctgcctactctcagcaacagcagttt

SEQ ID NO: 25790 - DNA, 108 bp, Zea mays
  Clone ID: LIB3154-003-Q1-K1-A5
attttgagcattcagaaacacaccaagcgaagcacattagcaacaacctaacaacaatggctaccaagatattatccctccttgcgcttcttggcgcttttgcgagcg

SEQ ID NO: 25791 - DNA, 420 bp, Zea mays
  Clone ID: LIB3154-003-Q1-K1-A6
aaagcggcagtgcgtaaagaggatcgtcgaacagaacagcatgaagatggtcatcgttctcgtcgtgtgcctggctctgtcagctgccagcgcctctgcaatgcagatgccctgcccctgcgcggggctgcagggcttgtacggcgctggcgccggcctgacgacgatgatgggcgccggcgggctgtacccctacgcggagtacctgaggcagccgcagtgcagcccgctggcggcggcgccctactacgccgggtgtgggcagacgagcgccatgtaccagccgctccggcaacagtgctgccagcagcagatgaggatgatggacgtgcagtccgtcgcgcagcagctgcagatgatgatgcagcttgagcgtgccgctgccgccagcagcagcctgtacgagccagctctgatgca

SEQ ID NO: 25792 - DNA, 383 bp, Zea mays
  Clone ID: LIB3154-003-Q1-K1-A9
ctagcaacatagaaagcacaatagtgtaccaacaatggcagccaaaatattttgcctccttatgctccttggtctttctgcaagtgctgctacggcgaccattttcccgcaatgctcgcaagctcctatagcttcccttcttcccccgtacctctcaccagcggtgtcttcggtatgtgaaaacccaattcttcaaccctacaggatccaacaggcaatcgcagctggcatcttacctttatcacccttgttcctccaacaatcatcagccctattacaacagttacctttggtgcatttattggcacaaaacatcagggcacaacaactacaacaacttgtgctagcaaaccttgctgcctactctcagcaacaagcagttc

SEQ ID NO: 25793 - DNA, 391 bp, Zea mays
  Clone ID: LIB3154-003-Q1-K1-B1
cgcgagcggccgccctttttttttttttttcggcgtaatgtatatatatatataagtacgtacataattaattaccacggggcacggtaattaaaaaaactaaatcaaatcaacacacctttcgatttctggacaaaactaaaagaaaaaagaatgagaagggagagggaggggggagaagggggaagaaaaaaaattcaaattttggcgggtacgtcgaccaaatgtgtgtgtgtgggtagccttcaccttcactcttcatcgactaatcaccgggcagcagtactaaggagacgatggatggatgaacgggaacgtgtacactcttcaccttggcggctcaccatcgtcaccatcagggcaggcggtatatgtgcatgcatgacgatgc

SEQ ID NO: 25794 - DNA, 411 bp, Zea mays
  Clone ID: LIB3154-003-Q1-K1-B11
ggacagccggagccaagcgccctacaagtccagcagcttctcgccggcgacaacccgcgacgagggcggcggcaggacccgggaggtcgaccgcaacttctccctcggcgcgctccgcgacaagagggacctcccgtacggcggctccagagagcagtccatcagggaggaggacgagcaagagggaggtggtgaccatggggccgcgcgaggaggcggcgagggtccgggctcggtgggagggggatgcggcgagccggacctcgccgcgttgtcggcggaggtggacgcgttcctcgcgggccaggacgagggcacgccggtgagcgtcacggaagcgacgctggacaagttcgcgtccgccgtcgagctgctggtcgccaggtccgagggcgccgaagagaagtgggc

SEQ ID NO: 25795 - DNA, 414 bp, Zea mays
  Clone ID: LIB3154-003-Q1-K1-B12
ccaactagcaacatagaaagcacaatagtgtaccaacaatggcagccaaaatattttgcgtccttatgctccttggtctttctgcaagtgctgctaccgcaaccattttcccacaatgctcacaagctcctatagcttcctttcttcccccatacctctcaccagcggtgtcttcagtatgtgaaaacccaattcttcaaccctacaggatccaacaggcaatcgcagcaggcatcttacctttatcacccttgttcctccaacaaccgtcagccctattacagcagttacctttggtgcatttgttggcacaaaacatcaaggcacaacaactacaacaacttgtgctaggaaaccttgctgcctactctcagcaacagcagtttcttccattcaaccaactggctgcattga

SEQ ID NO: 25796 - DNA, 369 bp, Zea mays
  Clone ID: LIB3154-003-Q1-K1-B3
ggccgcggaggcggagctgcccccccacgccacgatggcggagtgccgcagcctcatcgagttcctccgcgcgttcgagcaccaccgcagggcggccgacatctccgcctccgcgtgctcccgatccaggcgggccggggcctcctccgccgcaggcggctccttctgcgacagcgccccgatggccgtggtcgacgcggtcatgctcctcgccgtcgtcaccgcgctcggcttcctcctgatcccctacctcaagctgctgctcctcgagatgggcgcgctgctccaccccgccgcgttctgcctcccggccgccgccttcttcggggccgccgtcgccgtcgccgcggccgtcgtcgcctgggagct

SEQ ID NO: 25797 - DNA, 335 bp, Zea mays
  unsure at all n locations
  Clone ID: LIB3154-003-Q1-K1-B5
tttcagcattcagaaccacaccaagcgaagcgcactaccaccaacctaccaccaatggctaccaagatattagccctccttgcgcttctggcccttttagtgagcgcaacaaatgcgttcattattccacagtgctcacttgctcctagtgccattattccacagttcctcccaccagttacttcaatgggcttcgaacatncagccgtgcaagcctacaggctacaactagcgcttgcggcgagcgtcttacaacaaccaattgctcaattgcaacaacaatncttggcacatctaaacctacaaaaccatcgcaacgcaacagcaacaacaag

SEQ ID NO: 25798 - DNA, 371 bp, Zea mays
  Clone ID: LIB3154-003-Q1-K1-B6
attgataccaactagcaacatacatagtgaagtacactagcaacatcttagcaccaatgggagccaagatttttgccctccttgccctccttgctctttcagcaagcgctgctacctcgacttttattccacaatgctcacaacaatacctctctccggcgacagccgtgggatttcaatacccaactatacaatcctacatggtacaagaggccatccaagcaagcatcttacggtcattagcattaaccctccaacaaccatatgctctattgcaacagccatccttagtgcatctgtatctccaaagaatcgcggcacaacaactacaacaacagttgctaccaacaatcaatcaagtagttgcagcg

SEQ ID NO: 25799 - DNA, 403 bp, Zea mays
  Clone ID: LIB3154-003-Q1-K1-B7
gcaacaactattaccatttagccagctagctactgcctactctcaacaacaacaacttcttccatttaaccaattggccgcactgaaccccgctgcttatttgcagcagcaaatactactaccatttagccagctagctacagcaagccgtgcttccttcttgacacaacaacagttgctgccgttctaccagcagtttgcggctaaccccgcaaccctcttacaactacaacaattgttgccctttgtccaacttgctttgacaaacccagcagcctcctaccaacaacacatcattggtggtgccctcttttagattgcttattagatgtaattcaataataaagttttttggatgatgtatgtggccaaccagaaataaaaagttacatttccagattct

SEQ ID NO: 25800 - DNA, 138 bp, Zea mays
  Clone ID: LIB3154-003-Q1-K1-C10
ttttcaaaagatttgcacactctaaatggaaatgggaacgccccttgtagcggcatttaaaccgcgggggtggtggtgtttacgccacatgtacactttacatttgccagcgccttagccccggcccctggggttttt

SEQ ID NO: 25801 - DNA, 415 bp, Zea mays
  Clone ID: LIB3154-003-Q1-K1-C11
attttgagcattcagaaacacaccaagcgaagcacattagcaacaacctaacaacaatggctaccaagatattatccctccttgcgcttcttgcgctttttgcgagcgcaacaaatgcgttcattattccacaatgctcacttgctccaagttccattattacacagttcctcccaccagttacttcaatgggcttcgaacacccagctgtgcaagcctataggctacaacaagcaattgcggcgagcgtcttacaacaaccaatttcccagttgcaacaacaatccttggcacatctaacaatacaaaccatcgcaacgcaacagcaacaacaattcctaccagcactgagccacctagccatggtgaaccctgccgcctacttgcaacagcagttgcttgcataaacccactt

SEQ ID NO: 25802 - DNA, 394 bp, Zea mays; identical to SEQ ID NO: 17829
  Clone ID: LIB3154-003-Q1-K1-C2

SEQ ID NO: 25803 - DNA, 353 bp, Zea mays
  Clone ID: LIB3154-003-Q1-K1-C3
gagcattcagaaacacaccaagcgaagcgcactatcaacgacctaacaacaatggctaccaagatattagccctccttgcgcttcttgccctttctgcgagcgcaacaaatgcgttcattattccacaatgctcacttgctcctagtgccattattccacagctcctcccaccagttacttcaatgggcttcgaacacctagctgtgcaagccaacatgcaacaacaagcgcttgcggcgagcgtattacaacaaccaattgcccaattgcaacaacaatccttgccacatctaacaatacaagccatcacaacgcaacagcaactacagttcctaccagcactgagccacct

SEQ ID NO: 25804 - DNA, 59 bp, Zea mays
  Clone ID: LIB3154-003-Q1-K1-C4
gtcagtgtgagcaatgacctgaatgaacaattgaaatgaaaagaaaaaagtattgttcc

SEQ ID NO: 25805 - DNA, 417 bp, Zea mays
  Clone ID: LIB3154-003-Q1-K1-C6
aagcgaagcacattaccaacaacctaacatcaatggctaccaagatattatccctccttgcgcttgttgcgctttttgcgagcgcaacaaatgcgttcattattccacaatgctcacttgctccaagttccattattacacagttcctcccaccagttacttcaatgggcttcgaacacccagctgtgcaagcctataggctacaacaagcaattgcggcgagcgtcttacaacaaccaatttcccagttgcaacaacaatccttggcacatctaacaatacaaaccatcgcaacgcaacagcaacaacaattcctaccagcactgagccacctagccatggtgaaccctgccgcctacttgcaacagcagttgcttgcatcaaacccacttgctcttgcaaacgtagttgcaaacc

SEQ ID NO: 25806 - DNA, 349 bp, Zea mays
  Clone ID: LIB3154-003-Q1-K1-C8
cagcctagcaattagctcatctactccagattggagaactcgacaccatgaaggtgctgatcgttgcccttgctctcctggcgctcgctgcgagcgccgcctccagtacaagcggcggctgtggctgccagacaccaccgtttcatctaccgcctccgttctatatgccgcctccgttctatctgccgccgcagcagcagccgcagccatggcaataccccactcaaccaccgcagctaagcccgtgccagcagttcggatcctgcggcgtcggcagcgtcggcagcccgttcctgggccagtgcgtcgagttcctgaagcaccagtgcagcccggcggcgacgcccta

SEQ ID NO: 25807 - DNA, 326 bp, Zea mays
  Clone ID: LIB3154-003-Q1-K1-D1
aacagcgtcagtgcatcgagaggatcttcagaggaaacaccatgaaaacagccataggacgggcagcgtgcttggctctggcaggtgtcagcgactttgcaatgcatatgcaatgcacatgccctgcgcttgagcggttgtacagggcttgcaccgggctgacgacgatcataggaccatgatgggtgcacccctactctaagtatatgaggcatacctaatgcagcccgattgcagccgggtcgtagtacgcccgtagtacgcagactatcggcatataacagccatttacgaaacagtgctgccacaatgctatcaggatgata

SEQ ID NO: 25808 - DNA, 412 bp, Zea mays
  Clone ID: LIB3154-003-Q1-K1-D2
gcattcactgccaagagagtgagcgagcgagcagaggcagcgcagcaatggcggcggcaatagtactctccggccaggtgcggccgcttccctcgtcgctgcccctgtccctgctgctgctcctcctcctgtgctgctccggcacctcgtggggatggagcacgtcccggggaggagccgccagggagtgcggcttcgatggcaagctggaggccctggagccgcgccacaaggtgcagtctgaggccggctccgtccagtacttcagccggttcaacgaagccgaccgggagctcacctgcgccggcatcttcgccgtccgcgtcgtcgtcgacgccatgggcctcctgctccctcgatactccaacgtccattcgcttgtctacatcgtccaaaggagagggatcattgg

SEQ ID NO: 25809 - DNA, 419 bp, Zea mays
  Clone ID: LIB3154-003-Q1-K1-D5
caacaagcaacatagaaagtggaatccagtagcaacaatagagcaacaatggagaccaagatattttccctccttatgctccttgctctttctacatgtgttgctaacgcgacaattttccctcaatgctcacaagctcctatagcttccctttttcccccataccttccatcaattatagcttcagtatgtgaaaacccagctcttcaaccatataggcttcaacaagcaatcgcagcaagcaacatacctttatcgcccttgttgtgtcaacaatcgccagccctatctttggtgcagtcattggtacaaaccatcagggcacaacagctgcagcaactcgtgctacctgtgatcaaccaagtagctctggcaaacctttctccctactctccgcaacaacaatttcttccattcaa

SEQ ID NO: 25810 - DNA, 187 bp, Zea mays
  Clone ID: LIB3154-003-Q1-K1-D6
tatatgtgactctctcctgtatcggtgtatttaatttctttctttatttgtttttagttttttatttttttttttattttttttattatttttatttatttttttatctatctttttctattacattttatttcttaaatcttatttgattttattttctttttttcttatattttttttttcattt

SEQ ID NO: 25811 - DNA, 394 bp, Zea mays
  Clone ID: LIB3154-003-Q1-K1-D7
tattattgagaccaactagcaacatagaaagcacaatagtgtaccaacaatggcagccaaaatattttgcctccttatgctccttggtctttctgcaagtgctgctacggcgaccattttcccgaaatgctcgcaagctcctatagcttcccttcttcccccgtacctctcaccagcggtgtcttcggtatgtgaaaacccaattcttcaaccctacaggatccaacaggcaatcacagctggcatcttacctttatcacccttgttcctccaacaatcatcagccctattacatcagttacctttggtgcatttattggcacaaaacatcagggcacaacaactacaacaacttgtgctagcaaaccttgctgcctactctcagcaacagcag

SEQ ID NO: 25812 - DNA, 413 bp, Zea mays
  Clone ID: LIB3154-003-Q1-K1-D9
cgtccctcgccttcgccgccgaatccgagactccgatctcgggttcaccgcagcgcacagagcagccccgactcccggcccgatccgcgctctcctctccgtcgcttcagtcatggcaggaatggcacctgagggttctcagttcgatgctaagcactatgattctaagatgcaggagctgctgagcaccggtgagactgaggagttcttcacttcatatgatgaagtttttgagagttttgatgatatgggcctccaagagaatcttctgagaggcatttatgcttatggttttgagaagccatctgcaattcagcagagaggaattgttcccttctgcaagggtcttgatgtcattcagcaagcacaatctggtacaagaaagacagcaaccttctgttctgggatcttgc

SEQ ID NO: 25813 - DNA, 391 bp, Zea mays
  Clone ID: LIB3154-003-Q1-K1-E1
agcaagcaacatacctttatcgcccttgttgtgtcaacaatcgccagccctatctttggtgcagtcattggtacaaaccatcagggcacaacagctgcagcaactcgtgctacctgtgatcaaccaagtagctctggcaaacctttctccctactctccgcaacaacaatttcttccattcaaccaactgtctacactgaaccctgctgcttatttgcagcaacaactattaccatttagccagctagctactgcctactctcaacaacaacaacttcttccatttaaccaattggccgcactgaaccccgctgcttatttgcagcagcaaatactactaccatttagccagctagctacagcaagccgtgcttccttcttgacacaacaa

SEQ ID NO: 25814 - DNA, 407 bp, Zea mays
  Clone ID: LIB3154-003-Q1-K1-E10
caacaagcaacatagaaagtggaatccagtagcaacaatagagcaacaatggcgaccaagatattttccctccttatgctccttgctctttctgcatgtgttgctaacgcgacaattttccctcaatgctcacaagctcctatagcttcccttcttcccccataccttccatcaatgatagcttcagtatgtgaaaacccagctcttcaaccctataggctccaacaagcaatcgcagcaagcaacatacctttatcacccttgtttcaacaatcgccagccctatctttggtgcagtcattggtacaaaccatcagggcacagcagctgcagcaactcgtgctacctgtgatcaaccaagtagctctggcaaacctttctccctactctcagcaacaacaatttct

SEQ ID NO: 25815 - DNA, 78 bp, Zea mays
  Clone ID: LIB3154-003-Q1-K1-E11
cgcgggtgcatgcgacgtattaggtcttctatagtgaaacctatgttcaattcactgcacggcgttgtacaacaaaac

SEQ ID NO: 25816 - DNA, 350 bp, Zea mays
  Clone ID: LIB3154-003-Q1-K1-E2
cgtttagaaacacaccaagcgaagcgcactatcaacaccctatcaacactggctaccaagatattagccctccttgcgctctttgcgcttttagagagcgcaacacatgcgttcattatttcacagagctcacttgctcttagagccattatttcacagatcctctcaccagatactttaatgggctttgaacatatagacgcgcaagcgtacaggctataactagcgcttgcggcgagcgtgttacaacaaccaattgtgcaattgcgacaacaatacttggggcatatatacctacaaaccatatcaacgcaacagcaacaacagtttctgtcatcactgtgacacct

SEQ ID NO: 25817 - DNA, 405 bp, Zea mays
  Clone ID: LIB3154-003-Q1-K1-E3
acccacgcgtccgcagaaacacaccaagcgaagcacattagcaacaacctaacaacaatggctaccaagatatgatccctccttgcgcttcttgcgctttttgcgagcgcaacaaatgcgttcattattccacaatgctcacttgctccaagttccattattacacagttcctcccaccagttacttcaatgggcttcgaacacccagctgtgcaagcctataggctacaacaagcaattgcggcgagcgtcttacaacaaccaatttcccagttgcaacaacaatccttggcacatctaacaatacaaaccatcgcaacgcaacagcaacaacaattcctaccagcactgaaccacctagccatggtgaaccctgccgcctacttgcaacagcagttgcttgca

SEQ ID NO: 25818 - DNA, 419 bp, Zea mays
  Clone ID: LIB3154-003-Q1-K1-E4
ccaagcgaagcgcactagcaacaacctaacaacaatggctaccaagatattagccctccttgcgcttcttgcccttttagtgagcgcaacaaatgcgttcattattccacagtgctcacttgctcctagtgccattattccacagttcctcccaccagttacttcaatgggcttcgaacatccagccgtgcaagcctacaggctacaactagcgcttgcggcgagcgtcttacaacaaccaattgcccaattgcaacaacaatccttggcacatctaaacctacaaaccatcgcaacgcaacagcaacaacagtttctgccatcactgagccacctagccgtggtgaaccctgtcgcctacttgcaacagcagctacttgcatccaacccacttgctctggcgaacgtagctgcatacc

SEQ ID NO: 25819 - DNA, 402 bp, Zea mays
  Clone ID: LIB3154-003-Q1-K1-E5
caatcataattcatcttagtagtataggcaccaaatcaaatctgcaacatcaattatctgactccaaaaaccatgaagctggtgcttgtggttcttgctttcattgctttaacatcaagtgtattttgtacacagacaggcggctgcagctgtggtcaacaacaaagccatgagcagcaacatcatccacaacaacatcatccacaaaaacaacaacatctaccaccaccacaacatcaccagctgcagcatcacccaacaccatcaagttcacatgcaaccacaaaaacatcagcagcatcaagacgttgatgttcaacaacaacaacaacaaccttagcaccaacaacatcaacaacatcagttcctacaacaacatgaatgtgaaggccaacaacaaca

SEQ ID NO: 25820 - DNA, 384 bp, Zea mays
  Clone ID: LIB3154-003-Q1-K1-F1
agaccattagctttatctactccagagcgcagaagaacccgatcgacaccatgagggtgttgctcgttgccctcgctctcctggctctcgctgcgagcgccacctccacgcatacaagcggcggctgcggctgccagccaccgccgccggttcatctaccgccgccggtgcatctgccacctccggttcacctgccacctccggtgcatctcccaccgccggtccacctgccgccgccggtccacctgccaccgccggtccatgtgccgccgccggttcatctgccgccgccaccatgccactaccctactcaaccgccccggcctcagcctcatccccagccacacccatgcccgtgccaacagccgcatccaagcccgtgcc

SEQ ID NO: 25821 - DNA, 408 bp, Zea mays
  Clone ID: LIB3154-003-Q1-K1-F10
cagacacctccgccacctccaccctcgaatcgttccccaccatggcgtcgcagggatcctccgtcttcgccgcactcgagcaggccccggaggaccccatcctcggagtgaccgttgcctacaacaaggatcccagccccgtgaaggtcaacctcggggtcggcgcctaccggaccgaggaagggaagcccctagtgctgaacgtggtcaggcgcgccgagcaaatgttgatcaataatccgtcacgtgtcaaggagtacctaccaatcaccggtctggctgaattcaataagctgagcgctaagcttatctttggcgctgacagccctgctattcaggagaatagggttgctaccgtgcagtgcctatcgggtactggttctttaagagtcggaggtgaatttcttg

SEQ ID NO: 25822 - DNA, 382 bp, Zea mays
  Clone ID: LIB3154-003-Q1-K1-F11
gtagtagaagatcagcagccgctgtagtatatgaaagaagattaactactggaggatgcgacataattgttctattatagcaccaaaaaaaaataaactagtggccgttgtacaacaacgtgactgctgaaacaacggtgtcactaaacaaaataatcttgtagcacatcatccttttgtcagcaggtgtcataataaagaggagggcagcaatgatcgttcttaacaacagctgagcatgaatgatggatggtgggacccgtgttgcagcgcatcattaaccgcggctgttgtggtgactacccgcatgacgactactatagttagcagcgtagtagcggctgcttttgctgctttcttttctttttttgtcgcgacggtc

SEQ ID NO: 25823 - DNA, 394 bp, Zea mays
  Clone ID: LIB3154-003-Q1-K1-F3
tttgagcattcagaaacacaccaagcgaagcgcactagcaacgacctaacaacaatggctaccaagatattagccctccttgcgcttcttgccctttttgtgagcgcaacaaatgcgttcattattccacaatgctcacttgctcctagtgccattattccacagttcctcccaccagttacttcaatgggcttcgaacacctagctgtgcaagccaacatgcaacaacaagcgcttgcggcgagcgtcttacaacaaccaattgcccaattgcaacaacaatccttgccacatctaacaatacaagccatcacaacgcaacagcaacaacagttcctaccagcactgagccacctagccatggtgaaccctgccgcctacttgcaagagcagc

SEQ ID NO: 25824 - DNA, 412 bp, Zea mays
  Clone ID: LIB3154-003-Q1-K1-F5
ttgagaccaactagcaacatagaaagcacaatagtgtaccaacaatggcagccaaaatattttgcctccttatgctccttggtctttctgcaagtgctgctacggcgaccattttcccgaaatgctcgcaagctcctatagcttcccttcttcccccgtacctctcaccagcggtgtcttcggtatgtgaaaacccaattcttcaaccctacaggatccaacaggcaatcacagctggcatcttacctttatcacccttgttcctccaacaatcatcagccctattacatcagttacctttggtgcatttattggcacaaaacatcagggcacaacaactacaacaacttgtgctagcaaaccttgctgcctactctcagcaacagcagtttcttccattcaaccaactagc

SEQ ID NO: 25825 - DNA, 394 bp, Zea mays
  Clone ID: LIB3154-003-Q1-K1-F6
ctggacgtcagcctagcaattagctcatcgactccagattggagaactcgacaccatgaaggtgctgatcgttgcccttgctctcctggcgctcgctgcgagcgccgcctccagtacaagcggcggctgtggctgccagacaccaccgtttcatctaccgcctccgttctatatgccgcctccgttctatctgccgccgcagcagcagccgcagccatggcaataccccactcaaccaccgcagctaagcccgtgccagcagttcggatcctgcggcgtcggcagcgtcggcagcccgttcctgggccagtgcgtcgagttcctgaagcaccagtgcagcccggcggcgacgccctacggctcgccacagtgccaggcgctgcagcagcagtgc

SEQ ID NO: 25826 - DNA, 394 bp, Zea mays
  Clone ID: LIB3154-003-Q1-K1-F7
atttagaccaactagcaacatataaagcacaatagtgtaccaacaatggcagccaaaatattttgcctccttatgctccttggtatttctgcaagtgctgctacggcgaccattttcccgcaatgctcacaagctcctatagcttcccttcttcccccgtacctctcaccagcggtgtcttcggtatgtgaaaacccaattcttcaaccctacaggatccaacaggcaatcgcagctggcatcttacctttatcacccttgttcctccaacaatcatcagccctattacagcagttacctttggtgcatttattggcacaaaacatcagggcacaacaactacaacaacttgtgctagcaaaccttgctgcctactctcagcaacagcagtttc

SEQ ID NO: 25827 - DNA, 350 bp, Zea mays
  Clone ID: LIB3154-003-Q1-K1-F8
attttcagccttaacaaacacaccaagctaagcgcactatcaacaccctaactacaatggctaccaagatattagcccttcttgcgcttttagcccttttagtgagcgcaacaaatgcgttaattatttcacagggctcaattgctactagtgcaaatattctacaactacttacaccaattactttaatgggtttagaacatccagcctagcaagtatacatgctacaactagcgcttgcggtaagcgtattacaacaaccaattgcacaactgcaacagcaatatttggcacatctaaacctacaaaccataccaacgcaacagcaactacagtttctgacatcactg

SEQ ID NO: 25828 - DNA, 394 bp, Zea mays
  Clone ID: LIB3154-003-Q1-K1-F9
ggtcttcagaccattagctttatctactccagagcgcagaagaacccgatcgacaccatgagggtgttgctcgttgccctcgctctcctggctctcgctgcgagcgccacctccacgcatacaagcggcggctgcggctgccagccaccgccgccggttcatctaccgccgccggtgcatctgccacctccggttcacctgccacctccggtgcatctcccaccgccggtccacctgccgccgccggtccacctgccaccgccggtccatgtgccgccgccggttcatctgccgccgccaccatgccactaccctactcaaccgccccggcctcagcctcatccccagccacacccatgcccgtgccaacagccgcatccaagcccgtgccagc

SEQ ID NO: 25829 - DNA, 394 bp, Zea mays; identical to SEQ ID NO: 17872
  Clone ID: LIB3154-003-Q1-K1-G10

SEQ ID NO: 25830 - DNA, 409 bp, Zea mays
  Clone ID: LIB3154-003-Q1-K1-G12
ctagcaacatagaaagcacaatagtgtaccaacaatggcagctaaaatattttgcctccttatgctccttggtctttctgcaagtgctgctacggcgaccattttcccacaatgctcacaagctcctatagcttcccttcttcccccgtacctctcaccaacggtgtcttcggtatgtgaaaacccaattcttcaaccctacaggatccaacaggcaatcgcagctggcatcttacctttatcacccttgttcctccaacaatcatcagccctattacagcagttacctttggtgcatttattggcacaaaacatcagggcacaacaactacaacaacttgtgctagcaaaccttgctgcctactctcagcaacagcagtttcttccattcaaccaactagctgcattg

SEQ ID NO: 25831 - DNA, 420 bp, Zea mays
  Clone ID: LIB3154-003-Q1-K1-G2
caactagcaacatagaaagcacaatagtgtaccaacaatggcagccaaaatattttgcctccttatgctccttggtctttctgcaagtgctgctacggcgaccattttcccgaaatgctcgcaagctcctatagcttcccttcttcccccgtacctctcaccagcggtgtcttcggtatgtgaaaacccaattcttcaaccctacaggatccaacaggcaatcacagctggcatcttacctttatcacccttgttcctccaacaatcatcagccctattacatcagttacctttggtgcatttattggcacaaaacatcagggcacaacaactacaacaacttgtgctagcaaaccttgctgcctactctcagcaacagcagtttcttccattcaaccaactagctgcattgaactctgc

SEQ ID NO: 25832 - DNA, 411 bp, Zea mays
  Clone ID: LIB3154-003-Q1-K1-G3
agaccattagctttatctactccagagcgcagaagaacccgatcgacaccatgagggtgttgctcgttgccctcgctctcctggctctcgctgcgagcgccacctccacgcatacaagcggcggctgcggctgccagccaccgccgccggttcatctaccgccgccggtgcatctgccacctccggttcacctgccacctccggtgcatctcccaccgccggtccacctgccgccgccggtccacctgccaccgccggtccatgtgccgccgccggttcatctgccgccgccaccatgccactaccctactcaaccgccccggcctcagcctcatccccagccacacccatgcccgtgccaacagccgcatccaagcccgtgccagctgcagggaacctgcggcgttggca

SEQ ID NO: 25833 - DNA, 360 bp, Zea mays
  Clone ID: LIB3154-003-Q1-K1-G5
gcattagatacaattacttcaaagcgcacaagagcgcgaacgacaccatgcggcagcaggagggtggcgttggtctcctgggttttgctgggagtgccagctagagccatacaaacggatactggcggtggctgccactgccagccactgatgtagcgtcatctacgcatgtgggagcatctgttaacttgcgatcacctgtgcatttccgagcatctgtcaacgtggggccacctgtcgacgtgggaccacctgtcaatgtgccgccatgtgctgatgtggggtcatcagcatgcgactacattactctaccgtactgaactgagcctgattcagagtcatacccatgcacatgcaaac

SEQ ID NO: 25834 - DNA, 180 bp, Zea mays
  unsure at all n locations
  Clone ID: LIB3154-003-Q1-K1-G6
gtccgaatctactgctaggagctggactcataaatatgcaatgggctgacaagctattggtctctcgtagacctaaagcacgtactgccttctgtaactgaaaccagatgtctaaattaatttgtccattcgtgcatcgaacttttgatatataatggaaggagaaacattgatagttna

SEQ ID NO: 25835 - DNA, 242 bp, Zea mays
  Clone ID: LIB3154-003-Q1-K1-G7
atccgagtaaatactcttttattggggccacataaaataaattagtgggcggttttttaacaccgtgctggtgggaaaaccgcggggctaaacaaaataaacttgtttgaaaaaatacctttttttggaggggtgattataaagaagagggccccgaacgttcctttttacaaaattttcgccctctttgtgtgtaaaggggccccccctttgtagcgttatataaagcggggggggtgggg

SEQ ID NO: 25836 - DNA, 394 bp, Zea mays; identical to SEQ ID NO: 25828
  Clone ID: LIB3154-003-Q1-K1-H10

SEQ ID NO: 25837 - DNA, 398 bp, Zea mays
  Clone ID: LIB3154-003-Q1-K1-H12
attgagaccaacaagcaacatataaagtgtaatacagtagcaacaatagagcaacaatggcggccaagatattttccatccttatgctccttgctctttctgcatgtgttgctaacgcgaccatttttcctcaatactcacaagctcctatagctgcccttcttcccccataccttccatcaatgaccgcttcagtatgtgaaaacccagcccttcaaccctacaggctccaacaagcaatcgcaacaagcaacttacctttatcacccctgttctttcaacaatcgccagccctatctttggtgcagtcattggtacaaaccatcagggcacaacagctgcagcaactcgtgctaccagtgatcagccaagtagctctggcaaacctttctccctac

SEQ ID NO: 25838 - DNA, 369 bp, Zea mays
  Clone ID: LIB3154-003-Q1-K1-H3
aacaattgttgcaacagattgtaccagctctgactcaactagctgtggcaaaccctgttgcctacttgcaacagctgcttccattcaaccaactgactctgtcgaactctgctgcgtacctacaacagcgacaacagttacttaatccattggtagtggctaacccattggtcgccgccttcctacagcagcaacaattgctgccatacaaccagttctctttgatgaatcctgtcttgtcgaggcagcaacccatcgttggaggtgccatcttttagattacatatgagatgtactcgataatggtgccctcataccgacgtgtgtttcctagaaataatcaatatattgattgagatttatctcgat

SEQ ID NO: 25839 - DNA, 393 bp, Zea mays
  Clone ID: LIB3154-003-Q1-K1-H7
ggacgtcagcctagcaattagctcatcgactccagattggagaactcgacaccatgaaggtgctgatcgttgcccttgctctcctggcgctcgctgcgagcgccgcctccagtacaagcggcggctgtggctgccagacaccaccgtttcatctaccgcctccgttctatatgccgcctccgttctatctgccgccgcagcagcagccgcagccatggcaataccccactcaaccaccgcagctaagcccgtgccagcagttcggatcctgcggcgtcggcagcgtcggcagcccgttcctgggccagtgcgtcgagttcctgaagcaccagtgcagcccggcggcgacgccctacggctcgccacagtgccaggcgctgcagcagcagtgct

SEQ ID NO: 25840 - DNA, 395 bp, Zea mays
  Clone ID: LIB3154-003-Q1-K1-H8
gggtcttcagaccattagctttatctactccagagcgcagaagaacccgatcgacaccatgagggtgttgctcgttgccctcgctctcctggctctcgctgcgagcgccacctccacgcatacaagcggcggctgcggctgccagccaccgccgccggttcatctaccgccgccggtgcatctgccacctccggttcacctgccacctccggtgcatctcccaccgccggtccacctgccgccgccggtccacctgccaccgccggtccatgtgccgccgccggttcatctgccgccgccaccatgccactaccctactcaaccgccccggcctcagcctcatccccagccacacccatgcccgtgccaacagccgcatccaaacccgtgccagc

SEQ ID NO: 25841 - DNA, 404 bp, Zea mays
  Clone ID: LIB3154-004-Q1-K1-A10
attttgagcattcagaaacacaccaagcgaagcacattagcaacaacctaacaacagatgggtaccaagatattatccctccttgcgcttcttgcgctttttgcgagcgcaacaaatgcgttcattattccacaatgctcacttgctccaagttccattattacacagttcctcccaccagttacttcaatgggcttcgaacacccagctgtgcaagcctataggctacaacaagcaattgcggcgagcgtcttacaacaaccaatttcccagttgcaacaacaatccttggcacatctaacaatacaaaccatcgcaacgcaacagcaacaacaattcctaccagcactgagccacctagccatggtgaaccctgccgcctacttgcaacagcagttgcttgc

SEQ ID NO: 25842 - DNA, 404 bp, Zea mays
  unsure at all n locations
  Clone ID: LIB3154-004-Q1-K1-A11
ttcgaacacctagctgtgcaagcctacaggctacaacaagcgcttgcggcgagcgtcttacaacaaccaattaaccaattgcaacaacaatccttggcacatctaaccatacaaaccatcgcaacacaacagcaacaacagttcctaccagcactgagccaactagatgtggtgaaccctgtcggctacttgcaacaacaggtgcttgcattcaacccacttgctctggcaaacgtagctgcataccaacaacaacaacaattgcaacagtttctggcagcgctcaatcaactagccatggtgaaccctgtcgnctacctacaacagcaacaactgctttcatctagccctctcgttgtgggtaatgcacctacatacctgcaacaacaattgctgcaacagat

SEQ ID NO: 25843 - DNA, 379 bp, Zea mays
  Clone ID: LIB3154-004-Q1-K1-A4
ggaccttcaaacaattttcttcatcacctcaaaagaccccaaaaaccccatcgaggccgtgggggggtgccttgtttccctggctttccgggctaagcctgaaatccccacatacaagcatacaatcggggtgtgagcctcccacccaccgtcatctactgatgtaccggcatctgtgaattttgcgatcacctgctaacttggcagcatctgtgaatgtcggaccacctgtcgacgtggggccacctgtcaacgtggcaccatgtgtccatgtgccgtcatctgttgatgtgacgatgccactatgctactaaactactcaagcgtcagggtcatagccagatacacagatacacgtatgaacatgcgaataaaagca

SEQ ID NO: 25844 - DNA, 408 bp, Zea mays
  Clone ID: LIB3154-004-Q1-K1-A5
cagcattcagaaacacaccaagcgaagcgcactagcaacaacctaacaacaatggctaccgagaggttagccctccttgcgcttcttgcccttttagtgagcgcaacaaatgcgttcattattccacagtgctcacttgctcctagtgccattattccacagttcctcccaccagttacttcaatgggcttcgaacatccagccgtgcaagcctacaggctacaactagcgcttgcggcgagcgtcttacaacaaccaattgcccaattgcaacaacaatccttggcacatctaaacctacaaaccatcgcaacgcaacagcaacaacagtttctgccatcactgagccacctagccgtggtgaaccctgtcgcctacttgcaacagcagctacttgcatccaaccca

SEQ ID NO: 25845 - DNA, 388 bp, Zea mays
  Clone ID: LIB3154-004-Q1-K1-A9
ccaacatgcaacgtggaatgcggtatccactatcaacaatcaatcaccaccggggaccgagatattcttattctttatgctccttgctcttgctgcatgagctgctcacgcgacaattattgctcacagcttacaagctcctatagctttccttcatacctcatacctatgatcaatgatagctgtaaaatccgaaaactcaaatcttatacgctataagctgcaacaagcaatcgcagcatgcaacatacatttatgaccctagaatcaacaatcgtctgtcctatgtttggagcagtcctagccacaaaccatcagggcacagcagctgtagcgcttcgtgctatctgtgatcaaccatatagctatggcaaaccttactctctac

SEQ ID NO: 25846 - DNA, 391 bp, Zea mays
  Clone ID: LIB3154-004-Q1-K1-B1
gtccaactactcaacatataaacgcccactaattctaccaacaatcgccagccaaaacattgagggtgcggtgatgctcctcgttgctttctgcaagtgctgctacggcgaccatcttcaccacaacgctcacaagctcctatatcttaccttcttcccccgtacctcttaccagcggcgtctactgtgtgtgaaaacccaatttttcaaccctatatgatccaacaggcaatcgcaacttgcatcttacctttatcacccttgttcctccaacaatcatcagccctattacagcagctacctctgcagcatttattggcacaaaacatcagggcacaacaactacaacaacttgtgctagcaaaccttgctgcctactcttagcaacaac

SEQ ID NO: 25847 - DNA, 403 bp, Zea mays
  Clone ID: LIB3154-004-Q1-K1-B3
ggctggcgggaagcgtttaacaccacccgtttgcctaattacaacaccaatcctgggcgggtttggccatacaaaccatcgcaccacaactagagcaacagtttgtgcccgcattgagccaactagccgcagtgaaccctgtctcctacttgcaacagcaactgcttgcatccaacccacttgctctggcgaacacagccgcataccagcaacaactacagttgcaacagtttctaccagctcttagtcaactagccatggtgaaccctgccacatacctgcaacagcaacaactgctttcatctagcccactcgctgtgggcaatgcggctacatacctgcaacagcagctgctacaacagatcgtaccggctcttagtcagctagttgtggcgaaccctac

SEQ ID NO: 25848 - DNA, 404 bp, Zea mays
  Clone ID: LIB3154-004-Q1-K1-B4
agacccccaccagctagcagccgcctcttgttaaggcctttcttctttaaccttggccaagccggcttcttccggtccgaactccgtctgcttaatctgagcgtccgggaggacaaaacacgcggcgaggaccaggatggcgattgtgcgggaggaggcagtggacacgtccatcagcccaagggtgagcgcgctgcggccgtccaaaaccatggccatcaccgatcaggccatggcgctgcggcaggccggcgtgccggttatcggtctagccgcgggggagccagacttcgacacgccgcccgcgatcgcggaggccgggatggatgcaattaggaatggttatacaagatacactcctaatgctgggactttggagctgaggaaggctatttgtactaaac

SEQ ID NO: 25849 - DNA, 404 bp, Zea mays
  Clone ID: LIB3154-004-Q1-K1-B6
atcattttagctgttgatacaaaaagaagttattggccgaaataaccctagagccgagggatctggtggcgcaaacaaacaaaagaatagtgccaaagttcactgaaatcttccccgtggaggacgcgaactacccttacagcgccttcatcgcgtcggtccggaaagacgtgatcaaacactgcaccgaccataaagggatcttccagcccgtgctgccaccggagaagaaggtcccggagctatggttctacacagagctcaaaactaggaccagctccatcacgctcgccatacgcatggacaacctgtacctcgtgggcttcaggaccccgggcggggtgtggtgggagttcggcaaggacggcgacacccacctcctcggcgacaaccccaggtggctc

SEQ ID NO: 25850 - DNA, 284 bp, Zea mays
  Clone ID: LIB3154-004-Q1-K1-B7
taaacattaaaaaacacaccaagtctaacctcattaacaacaacctaacaacaagggctacggagatattatccatacttgcgcttctggcgctcctttctagcgcatcaaagcttacttactcttccatacagcttaatagctctaatttccattatcacacattaaattcaatggcctactttaaacaacttcgaacatggaaaaaccctggcctatccgatataactcgcttttgaggacatcctcttttaacaacctgttttaaaattgaaaaggccctc

SEQ ID NO: 25851 - DNA, 400 bp, Zea mays
  Clone ID: LIB3154-004-Q1-K1-B8
ctgggtcttcagaccattagctttatctactccagagcgcagaagaacccgatcgacacgatgagggtgttgctcgttgccctcgctctcctggctctcgctgcgagcgccacctccacgcatacaagcggcggctgcggctgccagccaccgccgccggttcatctaccgccgccggtgcatctgccacctccggttcacctgccacctccggtgcatctcccaccgccggtccacctgccgccgccggtccacctgccaccgccggtccatgtgccgccgccggttcatctgccgccgccaccatgccactaccctactcaaccgccccggcctcagcctcatccccagccacacccatgcccgtgccaacagccgcatccaagcccgtgccagctgc

SEQ ID NO: 25852 - DNA, 418 bp, Zea mays
  Clone ID: LIB3154-004-Q1-K1-C11
gcggccgccctttttttttttttttttttttttaaaaaatcttaaaaattttttatgaatagtttacgtggatatggttgtaagccgttgtaacgcacggtcaaccgactagtatacaacaatgtatcggtttccacagaccccctcggtgaatatcgacccaccggtgtctgcaaacaacattccagacattccagtttctcgtacaaaatggggaaaagaaaaaaaaaggcaaagtgggcaagccatacatgacatctgccaaaaaaaaacacccaagcagccccactgtaaaaaggactactaccaaactggttgtcaaccctgacaaacacaaagtggagacatcaaccaggaccacaccatcctcaacatcaagatcaccacaccctcaagcaactcccatgtgtcctctcta

SEQ ID NO: 25853 - DNA, 402 bp, Zea mays
  Clone ID: LIB3154-004-Q1-K1-C12
gaccattagctttatctactccagagcgcataagaacccgatcgacaccatgagggtgtggctcgttgccctcgctctcctggctctcgctgcgagcgccacctccacgcatacaagcggcggctgcggctgccagccaccgccgccggttcatctaccgccgccggtgcatctgccacctccggttcacctgccaccttcggtgcatctcccaccgccggtccacctgccgccgccggtccacctgccaccgccggtccatgtgccgccgccggttcatctgccgccgccaccatgccactaccctactcaaccgccccggcctcagcctcatccccagccacacccatgcccgtgccaacagccgcatccaagcccgtgccagctgcagggaacctgcgg

SEQ ID NO: 25854 - DNA, 409 bp, Zea mays
  unsure at all n locations
  Clone ID: LIB3154-004-Q1-K1-C2
cattagctttatctactccagagcgcagattaaccttatcgacaccatgagggtgttgcgcgttggcctcgctctcctggctctcgctgcgagcgccacctccacgcatacaagcggcggctgcggctgccagccaccgccgccggttcatctaccgccgccggtgcatctgccacctacggttcacctgccacctccggtgcatctaccaccgccggtccacctgccgccgccggtccacctgccaccgacggtccatgtgccgccgccggttcatctgccgccgccaccatgccactaccctactcaaccgccccggcctcagcctcattcccagccacacccatgcccgtgccaacagccgcatncaagcccgtgccagctgcagggaacctgcggcgttggcagc

SEQ ID NO: 25855 - DNA, 404 bp, Zea mays
  Clone ID: LIB3154-004-Q1-K1-C4
cttcaaaccattaccttaatttcctccaattcgcaaaaaaccccgaccgacaccatgagggggtggttcgttgccctcgttctcctggctctcgctgcgagcgccacctccacgcatacaagcggcggctgcggctgccagccaccgccgccggttcatctaccgccgccggtgcatctgccacctccggttcacctgccacctccggtgcatctcccaccgccggtccacctgccgccgccggtccacctgccaccgccggtccatgtgccgccgccggttcatctgccgccgccaccatgccactaccctactcaaccgccccggcctcagcctcatccccagccacacccatgcccgtgccaacagccgcatccaagcccgtgccagctgcagggaacctg

SEQ ID NO: 25856 - DNA, 397 bp, Zea mays
  Clone ID: LIB3154-004-Q1-K1-D11
gtgcagctgagggaaccgcaccggcagtgtacgtgtgcgttgccaaataaagctgcgactggtcaccgctcgattgtcgtcgcagccgccctcccgccggagatgggtgcgccggcgctgtcgtccgtcgtcgtggtggccacggcggcagtggtttgcctgtgcggggcctttgcgcgggcgcaggacatggacagcgagtgggcgcggccgccctaccgcgggttcttcggcgccccggccgggtcgctgctgccgcagtcggacgtggacctgctggagttcccgctgaacctggagtacctggagacggagttcttctgctggtccgctctggggtacggcctcgacgccatcgacgccaacctcaccggcggcgggccgccctccatcggcg

SEQ ID NO: 25857 - DNA, 402 bp, Zea mays
  Clone ID: LIB3154-004-Q1-K1-D12
gtcgaagatggagtcgccggaggcgtgctcttccggggaggcgtcccctgcctcgccgcgtccgctggcggcggcggcggagcgcccgtccgaggcggcggcgctgcgggcgctcgtcgaccgggtgcgcgccggggaggtggacgccgcccgcgaggtgcgccgcctcaccagggcgtccgcgaggcaccggcgcaagctcgccgcggccgtcgacccgctcgtcgccatgctccgctccgccgcgcccgaggctggggaggcccgcgctgctcgcgctgctcaacctcgccgtcagggacgagagaaataaaaccaagatagtggatgctggcgcacttgagcccctgcttggctacttgcaatcaagtgatccaaatttgcaggagtatgcgactgctg

SEQ ID NO: 25858 - DNA, 401 bp, Zea mays
  Clone ID: LIB3154-004-Q1-K1-D3
tgtatttgcactcatgcatcacaaaacattcttctatcagtaccatcaatcatcattcagtgttaggagtataggcaccaaatcaaatctgcaacatcaattatctaactccaaaaaccatgaagctggtgcttgtggttcttgctttcattgctttagtatcaagtgtttcttgtacacagacaggcggctgcagctgtggtcaacaacaaagccatgagcagcaacatcatccacaacaacatcatccacaaaaacaacaacatcaaccaccaccacaacatcaccagcagcagcaacaccaacaacaacaagttcacatgcaaccacaaaaacatcagcaacaacaagaagttcatgttcaacaacaacaacaacaaccgcggcaccaacaacaacaa

SEQ ID NO: 25859 - DNA, 221 bp, Zea mays
  Clone ID: LIB3154-004-Q1-K1-D5
atttttgttggcatgcggaacctctcgaggttcaatgcttaggtaccagtctatcagaggtggtggctaatatataatgccacctagatctaattgactgtctcgcgagcgacaaaaatgcgactaggaaaaaacatggctcactcgatcttaattgcattgtatcacatgcccttttagcaagttgtcgaatgacctaagagcacccaactgatcgagct

SEQ ID NO: 25860 - DNA, 400 bp, Zea mays
  Clone ID: LIB3154-004-Q1-K1-D7
cacaccattagctatatctactccagagcgcaaaagaacccgatcgacaccatgggggtggtgctcgttgccctcgctctcctggctctcgctgcgagcgccacctacacgcatacaagcggcgggtgcgggtgacagccaccgccgccggttcatataccgccgccggtgcatctgccacctccggttcacctgccacctgcggtgcatctcacaccgccggtacacctgccggcgccggtacacctgacaccggcggtacatgtgccgccgccggtttatgtgccggcgacaccatgccactactctactaaaccgccccggtctgagtcttatccacagacacacccatgcccgtgccaacagccgtatacaagcccgtgccatctgcagggaacct

SEQ ID NO: 25861 - DNA, 406 bp, Zea mays
  Clone ID: LIB3154-004-Q1-K1-D8
gaccattagctttatctactccagagcgcataagaacccgatcgacaccatgagggtggggctcgttgccctcgctctcctggctctcgctgcgagcgccacctccacgcatacaagcggcggctgcggctgccagccaccgccgacggttcatctaccgccgccggtgcatctgccacctccggttcacctgccacctccggtgcatctcccaccgccggtccacctgccgccgccggtccacctgccaccgccggtccatgtgccgccgccggttcatctgccgccgccaccatgccactaccctactcaaccgccccggcctcagcctcatacccagccacacccatgcccgtgccaacagccgcatccaagcccgtgccagctgcaaggaacctgcggcgtt

SEQ ID NO: 25862 - DNA, 400 bp, Zea mays
  Clone ID: LIB3154-004-Q1-K1-E10
caactagcaacatagaaagcacaatagtgtaccaacaatggcagccaaaatatttggcctgcttatgctccttggtctttctgcaagtgctgctacggcgaccattttcccgaaatgctcgcaagctcctatagcttcccttcttcccccgtacctctcaccagcggtgtcttcggtatgtgaaaacccaattcttcaaccctacaggatccaacaggcaatcacagctggcatcttacctttatcacccttgttcctccaacaatcatcagccctattacatcagttacctttggtgcatttattggcacaaaacatcagggcacaacaactacaacaacttgtgctagcaaaccttgctgcctactctcagcaacagcagtttcttccattcaaccaa

SEQ ID NO: 25863 - DNA, 401 bp, Zea mays
  Clone ID: LIB3154-004-Q1-K1-E12
gcaacatagaaagtggaatacagtatcaacaatagagcaacaatggcggccaagatatttgccatccttatgctccttgctctttctgcatgtgttgctaacgcgaccatttttcctcaatactcacaagctcctatagctgcccttcttcccccataccttccatcaatgaccgcttcagtatgtgaaaacccagcccttcaaccctacaggctccaacaagcaatcgcaacaagcaacttacctttatcacccctgttctttcaacaatcgccagccctatctttggtgcagtcattggtacaaaccatcagggcacaacagctgcagcaactcgtgctaccagtgatcagccaagtagctctggcaaacctttctccctactctcagcaacaacaatt

SEQ ID NO: 25864 - DNA, 228 bp, Zea mays
  Clone ID: LIB3154-004-Q1-K1-E3
tgggttttgacaccattagctttatctacttattacgcaaaaaaaccccatccaccccgtgggggtgttgctcgatgccctcgctctcctggctctcgctgggagcgccaccttcacgcatacaagcgggggttgtgggtgccaaccaccgccgccggtttatttaccgccgccggtgcatttgccaccttcggttcacctgccaccttcggtgcattttccaccgcc

SEQ ID NO: 25865 - DNA, 60 bp, Zea mays
  Clone ID: LIB3154-004-Q1-K1-E4
ggttaccttccccttccttccaaggtcttggttcttttatagggtcacctaaattcaatt

SEQ ID NO: 25866 - DNA, 364 bp, Zea mays
  Clone ID: LIB3154-004-Q1-K1-E5
atgcttacaaaaaaaaaccaagcgaagcgttttgttttcaccctaacataattgcatgggaggcgatgagctttccttgccttgctcgccttgccattgagcgcagcacatccgttgattatttcatagcgctgagttgattttatcgcaatgatttcatagcacatcccatcagatactttactgggctgggatcatacaatcgagcaagcctacaggatacaattcgcgctggccgtgagcgtagcacatcaccccatcgaacagttgcaacaacactactaggcacatctcatcttacaaaacataccatcgcaacagaaccaacagattcttgtcatgacttaaccaactaacctaggcg

SEQ ID NO: 25867 - DNA, 406 bp, Zea mays
  Clone ID: LIB3154-004-Q1-K1-E6
gaaacacaccaagcgaagcgcactaccaactacctaacaacaatggctaccaagatattagccctgcttgcgcttcttgccctttttgtgagcgcaacaaatgcgttcattattccacaatgctcacttgctcctagtgccattattccacagttcctcccaccagttacttcaatgggcttcgaacacctagctgtgcaagccaacatgcaacaacaagcgcttgcggcgagcgtcttacaacaaccaattgcccaattgcaacaacaatccttgccacatctaacaatacaagccatcacaacgcaacagcaacaacagttcctaccagcactgagccacctagccatggtgaaccctgccgcctacttgcaagagcagctgcttgcatccaacccacttgctt

SEQ ID NO: 25868 - DNA, 404 bp, Zea mays
  Clone ID: LIB3154-004-Q1-K1-E7
agaccattagctttatctactccatagcgtagaagaacccgatcgacaccatgagggtggggctcgttgccctcgctctcctggctctcgctgcgagcgccacctccacgcatacaagcggcggctgcggctgccagccaccgccgccggttcatctaccgccgccggtgcatctgccacctccggttcacctgccacctccggtgcatctcccaccgccggtccacctgccgccgccggtccacctgccaccgccggtccatgtgccgccgccggttcatctgccgccgccaccatgccactaccctactcaaccgccccggcctcagcctcatccccagccacacccatgcccgtgccaacagccgcatccaagcccgtgccagctgcagggaacctgcggc

SEQ ID NO: 25869 - DNA, 402 bp, Zea mays
  Clone ID: LIB3154-004-Q1-K1-E9
tttgagcattcaaaaacacaccacgctttttacattaccaacaacctaacaacagtgggtgccaagatattattgctccttgcgctctttgcgctatctgcgagcgcaacaaatgcgttcattattgcacaatgcttacttgctccaagttccattattacacagttcctcccaccagatacttcaatgggcttcgaacacccagctgtgcaagcctataggctacaacaagcaattgcggctagcgtcttacaacaaccaatttgccagatgcaacaacaatccttgtcacatttaacaatacaaaccatcagaacgcaccagcaacaacaattgctaccagcactgaaccacctatccatggtgaaccctgccggctacttgcaacagcagttgcttgca

SEQ ID NO: 25870 - DNA, 401 bp, Zea mays
  Clone ID: LIB3154-004-Q1-K1-F12
tgggtcttcagaccattagctttatctactccagagcgcagaagaacccgatcgacaccgtgagggtgttgctcgttgccctcgctctcctggctctcgctgcgagcgccacctccacgcatacaagcggcggctgcggctgccagccaccgccgccggttcatctaccgccgccggtgcatctgccacctccggttcacctgccacctccggtgcatctcccaccgccggtccacctgccgccgccggtccacctgccaccgccggtccatgtgccgccgccggttcatctgccgccgccaccatgccactaccctactcaaccgccccggcctcagcctcatccccagccacacccatgcccgtgccaacagccgcatccaagcccgtgccagctgcag

SEQ ID NO: 25871 - DNA, 382 bp, Zea mays
  Clone ID: LIB3154-004-Q1-K1-F4
ggggccgaccacgcgtcggaagaaccttaaaagggggattccattgccttaatttggccaccaagggcacccaccatgtgtggggtccttatcctcctggctcttgtggcttgcgtggctaacgcgccaatttgccctcaaggctcacaagctcctatagtttccctttttcccccatacctgccatcaatgatagctgaagactgtgaaaacccaccttttcagctctatcggctccaacaagcaatcgcagcacgcaacatacctttatcacactagtttcaacaattgtcagccctatctttggtgcagccattggtacagaccatcagggcacagcagctgcagcaacttgtgctacctgtgatcaaccaagtagatc

SEQ ID NO: 25872 - DNA, 400 bp, Zea mays
  Clone ID: LIB3154-004-Q1-K1-F7
cgcaaattgcaccaagaaatccatcgagaggccgtcgacaggggaattaatggcgtcgtcgtctagcagcagccaccgccgcctcatcctcgcagccgccgtcctgctctccgtgctcgcggctgccagcgccagcgccgggacctcctgcgtgccggggtgggccatcccgcacaacccgctcccgagctgccgctggtacgtgaccagccggacctgcggcatcgggccgcgcctcccgtggccggagctgaagaggagatgctgccgggagctggcggacatcccggcgtactgccgttgcacggcgctgagcatcctcatggacggcgcgatcccgccgggcccggacgcgcagctggagggccgcctagaggacctgccgggctgcccgcgggag

SEQ ID NO: 25873 - DNA, 384 bp, Zea mays
  unsure at all n locations
  Clone ID: LIB3154-004-Q1-K1-G1
caaccatggccttcaaaatattttggcctcctaatcctcctgggccgttttgcaagtcctgttacggcacccattttcccgcattgctcgcaggctccaatagcttccttttttcccccgtacctttaaccagcggtgtcttcggtttgtgaaaacccaattcttcaaccctacaggatccaacaggcaatcgcagctggcatcttacccttatcacncttgttctncaacaatcatcagccctattacaacagttacctttggtgcatttattggcacanaacatcagggcacaacaactacaacaacttgtgctagcaaaccttgctgcctactctcagcaacagcagtttcttccattcaaccaactaagttcattgaact

SEQ ID NO: 25874 - DNA, 405 bp, Zea mays
  Clone ID: LIB3154-004-Q1-K1-G5
gaccattaccttaatctactccaaaccgctaaaaaccccgaccgacaccatgagggtgtggctggtggccctcgttctcctggctctcgctgcgagcgccacctccacgcatacaagcggcggctgcggctgccagccaccgccgccggttcatctaccgccgccggtgcatctgccacctccggttcacctgccacctccggtgcatctcccaccgccggtccacctgccgccgccggtccacctgccaccgccggtccatgtgccgccgccggttcatctgccgccgccaccatgccactaccctactcaaccgccccggcctcagcctcatccccagccacacccatgcccgtgccaacagccgcatccaagcccgtgccagctgcagggaacctgcggcgt

SEQ ID NO: 25875 - DNA, 403 bp, Zea mays
  Clone ID: LIB3154-004-Q1-K1-G6
accataaaaggcacattactgtaccaccattggcagccaaaatatttggcctccttaggctcgtgggtatttctgcaagtgctgctacggcgaccattttcccgcaatgctcacaagctcctatagcttcccttcttcccccgtacctctcaccagcggtgtcttcggtatgtgaaaacccaattcttcaaccctacaggatccaacaggcaatcgcagctggcatcttacctttatcacccttgttcctccaacaatcatcagccctattacagcagttacctttggtgcatttattggcacaaaacatcagggcacaacaactacaacaacttgtgctagcaaaccttgctgcctactctcagcaacagcagtttcttccattcaaccaactagctgcatt

SEQ ID NO: 25876 - DNA, 402 bp, Zea mays
  Clone ID: LIB3154-004-Q1-K1-G8
caaagcggcagtgcgtagagaggatcgtcgatacagaacagcatgaagatggtcatcgttctcgtcgtgtgcctggctctgtcagctgccagcgcctctgcaatgcagatgccctgcccctgcgcggggctgcagggcttgtacggcgctggcgccggcctgacgacgatgatgggcgccggcgggctgtacccctacgcggagtacctgaggcagccgcagtgcagcccgctggcggcggcgccctactacgccgggtgtgggcagacgagcgccatgtaccagccgctccggcaacagtgctgccagcagcagatgaggatgatggacgtgcagtccgtcgcgcagcagctgcagatgatgatgcagcttgagcgtgccgctgccgccagcagcagcctg

SEQ ID NO: 25877 - DNA, 404 bp, Zea mays
  Clone ID: LIB3154-004-Q1-K1-G9
caacaagcaacatagaaagtggaatccagtttcaacaatagagcaacaatggcgaccaaggtattttccctccttatgctccttgctctttctgcatgtgttgctaacgcgacaattttccctcaatgctcacaagctcctatagcttcccttcttcccccataccttccatcaatgatagcttcagtatgtgaaaacccagctcttcaaccctataggctccaacaagcaatcgcagcaagcaacatacctttatcacccttgtttcaacaatcgccagccctatctttggtgcagtcattggtacaaaccatcagggcacagcagctgcagcaactcgtgctacctgtgatcaaccaagtaactctggcaaacctttctccctactctcagcaacaacaatt

SEQ ID NO: 25878 - DNA, 401 bp, Zea mays
  Clone ID: LIB3154-004-Q1-K1-H11
cagaccattagctttatctactccagagcgcagaagaacccgatcgacaccatgagggtgtggctcgttgccctcgctctcctggctctcgctgcgagcgccacctccacgcatacaagcggcggctgcggctgccagccaccgccgccggttcatctaccgccgccggtgcatctgccacctccggttcacctgccacctccggtgcatctcccaccgccggtccacctgccgccgccggtccacctgccaccgccggtccatgtgccgccgccggttcatctgccgccgccaccatgccactaccctactcaaccgccccggcctcagcctcatccccagccacacccatgcccgtgccaacagccgcatccaagcccgtgccagctgcagggaacctg

SEQ ID NO: 25879 - DNA, 425 bp, Zea mays
  unsure at all n locations
  Clone ID: LIB3154-004-Q1-K1-H4
cgggattccaggcacgcgccacgcgcacgcaacatanaaagtggaatccagttccaccattagagcaccattggcggccaagagattgtccatccttatgctccttgctctttctgcatgtgttgctaacgcgaccatttttcctcaatactcacaagctcctatagctgcccttcttcccccataccttccatcaatgaccgcttcagtatgtgaaaacccagcccttcaaccctacaggctccaacaagcaatcgcaacaagcaacttacctttatcacccctgttctttcaacaatcgccagccctatctttggtgcagtcattggtacaaaccatcagggcacagcagctgcagcaactcgtgctacctgtgatcaaccaagtagctctggcaaacctttctccctactctcagcaacaac

SEQ ID NO: 25880 - DNA, 401 bp, Zea mays
  Clone ID: LIB3154-004-Q1-K1-H5
tcgaagaccattacctttatctactctatttcttgcacgctgttggccaatgttggagcaaggcaggcctcccagacagcggtgaaaagcccttcgtttttaagcttcttcagccaagttacgaaggttccaagcctgaagacctccaagaaactggatgtctccgccatggctgtatacaaggtgaagcttgtcgggcctgaaggtgaagagcacgagtttgatgctccagacgacgcctacatccttgacgcagccgagactgccggtgtggagttgccatactcgtgccgtgctggggcttgctccacctgtgccggcaaaatcgagtctggttcggttgaccagtcggatgggtccttccttgatgacgggcagcaggaggaaggttatgtgctgac

SEQ ID NO: 25881 - DNA, 63 bp, Zea mays
  Clone ID: LIB3154-004-Q1-K1-H6
cgattattaccgcgtgctggcggcgacgtaatacttctattatggcgccacctaaattcaatt

SEQ ID NO: 25882 - DNA, 405 bp, Zea mays
  Clone ID: LIB3154-004-Q1-K1-H9
gcaacatagaaagcacaatagtgtaccaacaatggcagccaaaatattttgcctgcttatgctccttggtatttctgcaagtgctgctacggcgaccattttcccgcaatgctcacaagctcctatagcttcccttcttcccccgtacctctcaccagcggtgtcttcggtatgtgaaaacccaattcttcaaccctacaggatccaacaggcaatcgcagctggcatcttacctttatcacccttgttcctccaacaatcatcagccctattacagcagttacctttggtgcatttattggcacaaaacatcagggcacaacaactacaacaacttgtgctagcaaaccttgctgcctactctcagcaacagcagtttcttccattcaaccaactagctgcatt

SEQ ID NO: 25883 - DNA, 281 bp, Zea mays
  Clone ID: LIB3154-005-Q1-K1-A1
gccattatctcatttacttcatattggacaaattgacaccatgaacgcgctgaacgtgggcctggttttcctggcgctcgttgcgagcgccgcctacactacaagcagtagatgtggctgctatacaccaccgatacatctaccgcatccactctatatgccgtatacgctctatctgccgtatcagcagcagcagcagccatggcaatactcgacttaaccacactaactaaacccgttccaacagttccaatccttccgattcctgcagcgtcggcagc

SEQ ID NO: 25884 - DNA, 134 bp, Zea mays
  Clone ID: LIB3154-005-Q1-K1-A12
tcgccgtccgactagtgtctagatacgcgagcagcgacggtctagaggatgagaggcttaccgtacgcggtgctatgcgaacgtcatatgctctttctatagctgtcaccataaattacatattcactaggcca

SEQ ID NO: 25885 - DNA, 392 bp, Zea mays
  Clone ID: LIB3154-005-Q1-K1-A2
ccctcttttagatttcttatgagttatagttcaataataaagttttttgtctgatgtttgtggcttcccagaaataagaaagtacatttctaaaaaaaaaaaaaaaaaaaaaaaaaaaaaaaaaaaaaaaaaaaaaaaaaaaaaaaaaaaaaaaattaaaaaaaaaaaaaaaaaaaaaaaaaaaaaaaaaaaaaaaaaaaaaaaaaaaaaaaagggggcgcccgttttaaaaaatcaaagtttacttacccgtccttccaaagtaatattttttttatagggccaccaaaatcaaattcactgcccgcgttttaaaaacgtgggaactggaaaaaccttggcgtaaccaaattaaatcgctttgaaaaaaatccccttttcccaagttggct

SEQ ID NO: 25886 - DNA, 427 bp, Zea mays
  Clone ID: LIB3154-005-Q1-K1-A3
cagacacctccgccacctccaccctcgaatcgttccccaccatggcgtcgcagggatccggcgtcttcgccgcactcgagcaggccccggaggaccccatcctcggagtgaccgttgcctacaacaaggatcccagccccgtgaaggtcaacctcggggtcggcgcctaccggaccgaggaagggaagcccctagtgctgaacgtggtcaggcgcgccgagcaaatgttgatcaataatccgtcacgtgtcaaggagtacctaccaatcaccggtctggctgaattcaataagctgagcgctaagcttatctttggcgctgacagccctgctattcaggagaatagggttgctaccgtgcagtgcctatcgggtactggttctttaagagtcggaggtgaatttcttgcaaggcactatcacgagcg

SEQ ID NO: 25887 - DNA, 417 bp, Zea mays
  Clone ID: LIB3154-005-Q1-K1-A4
gcaacatagaaagcacaatagtgtaccaacaatggcagccaaaatattttgcttccttatgctccttggtctttctgcaagtgctgctaccgcaaccattttcccacaatgctcacaagctcctatagcttcctttcttcccccatacctctcaccagcggtgtcttcagtatgtgaaaacccaattcttcaaccctacaggatccaacaggcaatcgcagcaggcatcttacctttatcacccttgttcctccaacaaccgtcagccctattacagcagttacctttggtgcatttgttggcacaaaacatcaaggcacaacaactacaacaacttgtgctaggaaaccttgctgcctactctcagcaacagcagtttcttccattcaaccaactggctgcattgaactctgctgc

SEQ ID NO: 25888 - DNA, 399 bp, Zea mays
  Clone ID: LIB3154-005-Q1-K1-A5
cagcattcagaaacacaccaagcgaagcgcactagcaacaacctaacaacaatggctgcggagatattagccctccttgcgcttcttgcccttttagtgagcgcaacaaatgcgttcattattccacagtgctcacttgctcctagtgccattattccacagttcctcccaccagttacttcaatgggcttcgaacatccagccgtgcaagcctacaggctacaactagcgcttgcggcgagcgtcttacaacaaccaattgcccaattgcaacaacaatccttggcacatctaaacctacaaaccatcgcaacgcaacagcaacaacagtttctgccatcactgagccacctagccgtggtgaaccctgtcgcctacttgcaacagcagctacttgca

SEQ ID NO: 25889 - DNA, 436 bp, Zea mays
  unsure at all n locations
  Clone ID: LIB3154-005-Q1-K1-A6
ccgtccgccaactttagcaacatagaaagcaccaatagtgtaccaacaattggcagcccaaaatattttgcgcggcttatgctaccttggntctttctgcaagtgcctgctaccggcgacccattttcccgaaatgctcgcaagctcctatagcttcccttcttcccccgtacctctcaccagcggtgtcttcggtatgtgaaaacccaattcttcaaccctacaggatccaacaggcaatcacagctggcatcttacctttatcacccttgttcctccaacaatcatcagccctattacatcagttacctttggtgcatttattggcacaaaacatcagggcacaacaactacaacaacttgtgctagcaaaccttgctgcatactctcagcaacatcagtttcttccattcaaccaactggctgcattgaactc

SEQ ID NO: 25890 - DNA, 270 bp, Zea mays
  Clone ID: LIB3154-005-Q1-K1-A9
ctgggtcttcatactcattagctttatctactccagagggctgaataacccgatcgacaccatgagggtgttgctcgttgccctcgctctcctggctctcgctgcgagcgccacctccacgcatacaagcggaggctgcggctgccagccaccgtcgccggttcatctaccgccgcctgtgcatctgccaccttcggttcacctgccacctccggtgcatcttccaccaacggtccacctgccgtcgtcagatcacctgccaccgccagt

SEQ ID NO: 25891 - DNA, 431 bp, Zea mays
  Clone ID: LIB3154-005-Q1-K1-B1
tatcagtaccatcaatcatcattcatcttagtagtataggcaccaaatcaaatctgcagcgtggattatctaactccaaaaaccatgaagctggtgcttgtggttcttgctttcattgctttagtatcaagtgtttcttgtacacagacaggcggctgcagctgtggtcaacaacaaagccatgagcagcaacatcatccacaacaacatcatccacaaaaacaacaacatcaaccaccaccacaacatcaccagcagcagcaacaccaacaacaacaagttcacatgcaaccacaaaaacatcagcaacaacaagaagttcatgttcaacaacaacaacaacaaccgcagcaccaacaacaacaacaacaacagcaccaacaacaacatcaatgtgaaggccaacaacaacatcaccaacaatcacaagg

SEQ ID NO: 25892 - DNA, 227 bp, Zea mays
  Clone ID: LIB3154-005-Q1-K1-B11
gcggcagtacgttttgaggatcgtctaacagtacagggggaagatggtcatcgttctcgtcttgtgcctggctctgtcagctgccagcgcctctgcaatgcatatgccctgcccctgcgcggggcttcagggcttgtacagcgctggcaccggcctgactacgatgatgggcgcctgctggctgtacccctactcggagtacctgaggcagccgcagtgcatcccgc

SEQ ID NO: 25893 - DNA, 418 bp, Zea mays
  Clone ID: LIB3154-005-Q1-K1-B2
gaccattagctttatctactccagagcgcagaagaacccgatcgacaccatgagggtgttgctcgttgccctcgctctcctggctctcgctgcgagcgccacctccacgcatacaagcggcggctgcggctgccagccaccgccgccggttcatctaccgccgccggtgcatctgccacctccggttcacctgccacctccggtgcatctcccaccgccggtccacctgccgccgccggtccacctgccaccgccggtccatgtgccgccgccggttcatctgccgccgccaccatgccactaccctactcaaccgccccggcctcagcctcatccccagccacacccatgcccgtgccaacagccgcatccaagcccgtgccagctgcaaggaacctgcggcgttggcagcaccccg

SEQ ID NO: 25894 - DNA, 410 bp, Zea mays
  Clone ID: LIB3154-005-Q1-K1-B5
gggcacagcagctgcagcaactcgtgctacctgtgatcaaccaagtagctctggcaaacgtttctccctactctcagcaacaacaatttcttccattcaaccaactgtctacattgaaccgtgctgcttatttgcagcaacaactattaccattcagccagctagctactgcctactctcagcaacaacaacttcttccatttaaccaattggccgcactgaaccccgctgcttatttgcagcagcaaatactactaccatttagccagctagctgcagcaagccgtgcttccttcttgacacagcaacagttgctgcctttctaccagcagtttgcggctaaccccgcaaccctcttacaactacaacaattgttgccctttgtccaacttgctttgacaaacccagca

SEQ ID NO: 25895 - DNA, 398 bp, Zea mays
  Clone ID: LIB3154-005-Q1-K1-B6
atccagatcaacaaagcgtcagtgcgtagatcggatcgaagaacagaacagcatgaagggggtgattggttttgtcaggtgcctggctctgtcaaatgccaacgcctttgcaatgcacatgccttgcccctgcgcgcggctgtagggcttgtactggcgatgacgacggcctgacgacgattatgggcgcacgcggactgcaccactacgccgaatacctgacgcatgcgcagtgcaccctactagccgcggtgccctactacgaccgctgtgtacaaaccagcgccatgtaccagccgctacgacaacattactatcatcaacatatgatgatgatggacgtacatgccgatgatcatcaacttcaaacgatgatgcagcttgagcatgccgctgtc

SEQ ID NO: 25896 - DNA, 420 bp, Zea mays
  Clone ID: LIB3154-005-Q1-K1-B7
gagaccaacaagcaacatagaaagtggaatacagtagcaacaatagagcaacaatggcgggcaagatattttccatccttatgctccttgctctttctgcatgtgttgctaacgcgaccatttttcctcaatactcacaagctcctatagctgcccttcttcccccataccttccatcaatgaccgcttcagtatgtgaaaacccagcccttcaaccctacaggctccaacaagcaatcgcaacaagcaacttacctttatcacccctgttctttcaacaatcgccagccctatctttggtgcagtcattggtacaaaccatcagggcacaacagctgcagcaactcgtgctaccagtgatcagccaagtagctctggcaaacctttctccctactctcagcaacaacaatttcttccat

SEQ ID NO: 25897 - DNA, 414 bp, Zea mays
  Clone ID: LIB3154-005-Q1-K1-B8
atcgcagcaagcaacatacctttatcgcccttgttgtgtcaacaatcgccagccctatctgtggtgcagtcattggtacaaaccatcagggcacaacagctgcagcaactcgtgctacctgtgatcaaccaagtagctctggcaaacctttctccctactctccgcaacaacaatttcttccattcaaccaactgtctacactgaaccctgctgcttatttgcagcaacaactattaccatttagccagctagctactgcctactctcaacaacaacaacttcttccatttaaccaattggccgcactgaaccccgctgcttatttgcagcagcaaatactactaccatttagccagctagctacagcaagccgtgcttccttcttgacacaacaacagttgctgccgttctac

SEQ ID NO: 25898 - DNA, 223 bp, Zea mays
  Clone ID: LIB3154-005-Q1-K1-B9
gaccaactagcaacatagaaagcacaataatgtaccgacaatggcagctaaaatattttgccctccttatgctccttgggctttctgcaagtgctggtaccgcgacccttttcccaccatggctaccagcccccattgccttccttttttccccgttccctttacccaccggggcctccggtttgtgaaaacccaattcttcaaccttacaggacccaccagg

SEQ ID NO: 25899 - DNA, 269 bp, Zea mays
  Clone ID: LIB3154-005-Q1-K1-C10
ataccaactagcaacttacatagtgaagtacactaggagcatcttagcaccaatgggagccaagatttttgccctccttgccctccttgctctttcagcaagcgctgctacctcgacttttattccacaatgctcacaacaatacctctctccggcgacagccgtgggatttcaatacccaactatacaatcctacatggtacaagaggccatccaagcaagcatcttacggtcattagcattaaccctccaacaaccatatgctctat

SEQ ID NO: 25900 - DNA, 270 bp, Zea mays
  Clone ID: LIB3154-005-Q1-K1-C12
gatcggcctccctcccccaagatcctccactcgatgcgcggacaaaccaacaaatccatccatcgcacatggacgcgttcttctcggcctcctccgcgtcggcgccctacggctacggcgccggcggatggagctacgactcgctcaagaacttccgccagatcacccccgccgtccagacccacctgaagctcgtctacctcaccctgtgcgcggcgctggcctcgtcggcggtgggcgcttacctgcacgtggtctggaacatcggcg

SEQ ID NO: 25901 - DNA, 420 bp, Zea mays
  Clone ID: LIB3154-005-Q1-K1-C3
cagcctaacaattagctcatcgactccagattggagaactcgacaccatgaaggtgctgatcgttgcccttgctctcctggcgctcgctgcgagcgccgcctccagtacaagcagcggctgtggctgccaaacaccaccgtttcatctaccgactccgttctatatgccgcctccgttctatctgccgccgcaacagcagccgcagccatggcaatacctcactcaaccaccgcagctaagcccgtgccagcagatcggatcctgcggcgtccgcagcgtccgcagcccgttcctgggccagtgcgtcgagttcctgaggcaccaatgcagcccggcggcgacgccctacggctcgccacattgccaggcgctgcagcagcagtgctgccaccagatcatgcaggtggagccgctgcacc

SEQ ID NO: 25902 - DNA, 397 bp, Zea mays
  Clone ID: LIB3154-005-Q1-K1-C5
caacaagcaatagcagcaggcaacatacctttatcaccctggttacaacaatcgacagcggtatctttggtgcagacattggtacaaaccatcacggcacaggatctgcagaaactcgtgctacctgggatcaaccaagtaactgtggcaaacctttctccatactctcaacaacaacaatttcttgcatgcaaccaactgtctacatagaaccgtgctgtttatttggagcaacaactatgaccattcagccagctagctactgtctactattagcaacaacaacttcttgcatttaaccaattggacacactgaacccagatgcttatttgcagcagcaaatactactaccatataaacagctagctgcaacaagccgtgcttacttcttgacac

SEQ ID NO: 25903 - DNA, 417 bp, Zea mays
  Clone ID: LIB3154-005-Q1-K1-C6
attttgagcattcagaaacacaccaagcgaagctacctagcaacgacttaacaacaatgggtaccaatatattagccctccttgcgcttcttgccctttttgtgagcgcaacaaatgcgttcattattccacaatgctcacttgctcctagtgccattataccacagttcctccgaccagttacttcaatgggcttcgaacacctagctgtgcaagcctacaggctacaacaagcgcttgcggcgagcgtcttacaacaaccaattaaccaattgcaacaacaatccttggcacatctaaccatacaaaccatcgcaacacaacagcaacaacagttcctaccagcactgagccaactagatgtggtgaaccctgtcgcctacttgcaacagcaggtgcttgcatccaacccacttg

SEQ ID NO: 25904 - DNA, 407 bp, Zea mays
  Clone ID: LIB3154-005-Q1-K1-C7
gcaaccattagctttatctactccaagcgcagaacaacccgacgacaccatgagggggtgctcgtgccctcgctctcctgctctcgctgcgagcgccacctccacgcatacaagcggcggtgggctgccagccaccgccgccggttcatctaccgcacgcgggcatctgccacctccggtcacctgccacctcgggcatctcccaccgcggccacctgccgccgccggtccacctgccaccgcggccatgtgccgccgccggttcatctgccgccgccaccatgccactaccctactcaaccgccccggcctcagcctcatccccagccacacccatgcccgtgccaacagccgcatccaagcccgtgccagctgcagggaacctgcggcgttggcagcaccccgat

SEQ ID NO: 25905 - DNA, 266 bp, Zea mays
  Clone ID: LIB3154-005-Q1-K1-C9
cgcaaattgcaccatgaaatccatcgagaggccgtgggcaggggaattaatggcgtcgtcgtctagcagcagccaccgccgcctcatcctcgcagccgccgtcctgctctccgtgctcgcggctgccagcgccagcgccgggacctcctgcgtgccggggtgggccatcccgcacaacccgctcccgagctgccgctggtacgtgaccagccggacctgcggcatcgggccgcgcctcccgtggccggagctgaagaggagatgct

SEQ ID NO: 25906 - DNA, 419 bp, Zea mays
  Clone ID: LIB3154-005-Q1-K1-D1
cagaaacacaccaagcgaagctacctagcaacgacttaacaacaatggctaccaagatatgagccctccttgcgcttcttgccctttttgtgagcgcaacaaatgcgttcattattccacaatgctcacttgctcctagtgccattataccacagttcctccgaccagttacttcaatgggcttcgaacacctagctgtgcaagcctacaggctacaacaagcgcttgcggcgagcgtcttacaacaaccaattaaccaattgcaacaacaatccttggcacatctaaccatacaaaccatcgcaacacaacagcaacaacagttcctaccagcactgagccaactagatgtggtgaaccctgtcgcctacttgcaacagcaggtgcttgcatacaacccacttgctctggcaaacgta

SEQ ID NO: 25907 - DNA, 144 bp, Zea mays
  Clone ID: LIB3154-005-Q1-K1-D12
tcgcagtccgctatgttctatgatcgtcgagcagagccagctctagagagatcgcaaagcttatcgtatcgcgtagcatagcgacagtcattatgcttcttctatagtagtcatcctaatattcatattcactaggcgcagtca

SEQ ID NO: 25908 - DNA, 418 bp, Zea mays
  unsure at all n locations
  Clone ID: LIB3154-005-Q1-K1-D2
gccgagggtctcggcggcccagctggtgactctcgggctatcactcctctgcgctgtcgccggcccggccgccgcgcagaactgcggctgccagccaaacgtatgctgcagcaagtttggctactgcggcacgaccgacgagtactgcggcgacgggtgccagtcgggcccgtgccgctcgggcggcggcggcagcagtggcggcggtggtgcgaacgtggctagcgtcgtcaccggctccttcttcaacggcatcaagagccaggccgggagcgggtgcgagggcaagaacttctacacccggagcgcgttcctgagcgccgtcaaggcgtacccaggcttcgcccatggcgggtcgcaggtgcagggcaagcgcgagatcgccgncttcttcgcgcacgccacgcacgagaccggg

SEQ ID NO: 25909 - DNA, 418 bp, Zea mays; identical to SEQ ID NO: 16622
  Clone ID: LIB3154-005-Q1-K1-D4

SEQ ID NO: 25910 - DNA, 345 bp, Zea mays
  Clone ID: LIB3154-005-Q1-K1-D5
ggccattcctcttcaagaggggatcatcagattgggcttattattccttattactccaggcaaggatcggagttgctctaatgactgaaccatggctggacaatggcaggacacatgtgacaggagcaaggagagctggtcgtcattgcaggtcccgcggtggcattcctgaagccacaggggaagaccggggctcagttccctcgccggcgatgttcgcagcgtcgcctaacgtgtgcccggcgtccacgggcgcgacccggggagccgatccaagtcgtcggcggccgaaactgccaatccgcgccacttggcgccggcgtccgggcagaggccgctgggagc

SEQ ID NO: 25911 - DNA, 420 bp, Zea mays
  Clone ID: LIB3154-005-Q1-K1-D7
ggagaaccctgcgagcatcctagtgactcccatggctccggccatgtcggcgcagcggggaggaatcaccttcagcaacctgtttgtccgtcgggctggcccaggcagcacggagctgaccgtggagggaaggccatccgaccagctgggcaggagaaacctcactgacagccccgtatttgacggccgtggccctgacgccagcctcgtggctcgcgtacagggagtcgctacccagatgggcgacgtgcgccagttgtacaccgtcgtgttccaagagaggccgctcaagggctccacgctcgtcaccgaaggcgcgatgacggaagggtcagacgagtgggcgatctacggcggaactggagtgttcgcgatggcgagaggcgtcataaggagaacgtttattgctgacacgagcgg

SEQ ID NO: 25912 - DNA, 258 bp, Zea mays
  Clone ID: LIB3154-005-Q1-K1-E11
attgagaccaactagcaacatagaaagcacaatagtgtaccaacaatggcagccaaaatattttgcctccttatgctccttggtctttctgcaagtgctgctacggcgaccattttcccgcaatgctcgcaagctcctatagcttcccttcttcccccgtacctctcaccagcggtgtcttcggtatgtgaaaacccaattcttcaaccctacaggatccaacaggcaatcgcagctggcatcttacctttatcaccc

SEQ ID NO: 25913 - DNA, 417 bp, Zea mays
  Clone ID: LIB3154-005-Q1-K1-E2
ataccaactagcaacatacatagtgaagtacactagcaacatcttagcaccaatgggagcgaagatttttgccctccttgccctccttgctctttcagcaagcgctgctacctcgacttttattccacaatgctcacaacaatacctctctccggcgacagccgtgggatttcaatacccaactatacaatcctacatggtacaagaggccatccaagcaagcatcttacggtcattagcattaaccctccaacaaccatatgctctattgcaacagccatccttagtgcatctgtatctccaaagaatcgcggcacaacaactacaacaacagttgctaccaacaatcaatcaagtagttgcagcgaaccttgctgcttacctccagcaacaacagtttcttccattcaatcaact

SEQ ID NO: 25914 - DNA, 413 bp, Zea mays
  Clone ID: LIB3154-005-Q1-K1-E4
gggcacaacagctgcagcaactcgtgctacctgtgatcaaccaagtagctctggcaaacctgtctccctactctccgcaacaacaatttcttccattcaaccaactgtctacactgaaccctgctgcttatttgcagcaacaactattaccatttagccagctagctactgcctactctcaacaacaacaacttcttccatttaaccaattggccgcactgaaccccgctgcttatttgcagcagcaaatactactaccatttagccagctagctacagcaagccgtgcttccttcttgacacaacaacagttgctgccgttctaccagcagtttgcggctaaccccgcaaccctcttacaactacaacaattgttgccctttgtccaacttgctttgacaaacccagcagcc

SEQ ID NO: 25915 - DNA, 416 bp, Zea mays
  Clone ID: LIB3154-005-Q1-K1-E6
gcttcagtatgtgaaaacccagctcttcaaccctataggctccaacaagcaatcgcagcaggcaacatacctttatcacccttgtttcaacaatcgccagccctatctttggtgcagtcattggtacaaaccatcagggcacagcagctgcagcaactcgtgctacctgtgatcaaccaagtagctctggcaaacctttctccctactctcagcaacaacaatttcttccattcaaccaactgtctacattgaaccgtgctgcttatttgcagcaacaactattaccattcagccagctagctactgcctactctcagcaacaacaacttcttccatttaaccaattggccgcactgaaccccgctgcttatttgcagcagcaaatactactaccatttagccagctagctgcagc

SEQ ID NO: 25916 - DNA, 364 bp, Zea mays
  Clone ID: LIB3154-005-Q1-K1-E8
aaaaaaaaaaaaaaaaaaaaaggggcggccgctcgcgatctagaacctctcagcaacatcggtttcttccattcaaccaactggctgcattgaactctgctgcttatttgcaacaacaattaccattcagccagctatttgctgcctacccccagcaattttttccattcaaccaactgacagctttgaactctcctgcttatttacagcagcaacaactactaccattcatccagctagctggtgtgagccctgctaccttcttgacacaaccacaaatgttgggggtctaccagcacgctgcgcctaacgctggcaccctcttacaaatgaaacaatagatgtcattcaaccaacctgcttt

SEQ ID NO: 25917 - DNA, 253 bp, Zea mays
  Clone ID: LIB3154-005-Q1-K1-E9
agaccattaactttatctactccagagcgcagaagaacccgatcgacaccatgagggtgttgctcgttgccctctctcttctggctctcgcttctagcgccacctgcacgcatacaagctgcagctgcggctggcagccaccaccgacggttcatctaccgtctacggtgcatctgccatctgcgattcacctgccacctgcgatgcatcttgcatcgccggtccacctgccacctgcggtccaccttccacc

SEQ ID NO: 25918 - DNA, 420 bp, Zea mays
  Clone ID: LIB3154-005-Q1-K1-F1
attgagaccaactagcaacatagaaagcacaatagtgtaccaacaatggcagccaaaatgttttgcctccttatgctccttggtctttctgcaagtgctgctacggcgaccattttcccgcaatgctcgcaagctcctatagcttcccttcttcccccgtacctctcaccagcggtgtcttcggtatgtgaaaacccaattcttcaaccctacaggatccaacaggcaatcgcagctggcatcttacctttatcacccttgttcctccaacaatcatcagccctattacaacagttacctttggtgcatttattggcacaaaacatcagggcacaacaactacaacaacttgtgctagcaaaccttgctgcctactctcagcaacagcagtttcttccattcaaccaactaggttcattg

SEQ ID NO: 25919 - DNA, 258 bp, Zea mays
  Clone ID: LIB3154-005-Q1-K1-F11
ttctatatcgatagcgagcggtctatatgaaccaaggatacttacgcacgcatgcatcctaattcctattttatagattgacctaaattaaattaactgaccggccgtttacaaccaacggactgactaaacaatgccggtacccaacttaattaatttgcttgacatacatctttcttcagctagcttaattaataacaaacaggcaccgatcgatcttccttacaaacaggcaccctgaatgaataatgaaacgca

SEQ ID NO: 25920 - DNA, 414 bp, Zea mays
  Clone ID: LIB3154-005-Q1-K1-F2
attttcagcattcagaaacacaccaagcgaagcgcactagcaacaacctaacaacaatggctaccaagatattagccctccttgcgcttcttgcccttttagtgagcgcaacaaatgcgttcattattccacagtgctcacttgctcctagtgccattattccacagttcctcccaccagttacttcaatgggcttcgaacatccagccgtgcaagcctacaggctacaactagcgcttgcggcgagcgtcttacaacaaccaattgcccaattgcaacaacaatccttggcacatctaaacctacaaaccatcgcaacgcaacagcaacaacagtttctgccatcactgagccacctagccgtggtgaaccctgtcgcctacttgcaacagcagctacttgcatccaacccac

SEQ ID NO: 25921 - DNA, 420 bp, Zea mays
  Clone ID: LIB3154-005-Q1-K1-F3
atttagaccaactagcaacatagaaagcacaatagtgtaccaacaatggcagccaaaatattttgcctccttatgctccttggtatttctgcaagtgctgctacggcgaccattttcccgcaatgctcacaagctcctatagcttcccttcttcccccgtacctctcaccagcggtgtcttcggtatgtgaaaacccaattcttcaaccctacaggatccaacaggcaatcgcagctggcatcttacctttatcacccttgttcctccaacaatcatcagccctattacagcagttacctttggtgcatttattggcacaaaacatcagggcacaacaactacaacaacttgtgctagcaaaccttgctgcctactctcagcaacagcagtttcttccattcaaccaactagctgcattg

SEQ ID NO: 25922 - DNA, 420 bp, Zea mays
  Clone ID: LIB3154-005-Q1-K1-F5
gcaacatagaaagcacaatattgtaccaataatggcagccaaaatattttgcctcattgtgctccttggtctttctgcaagtgctgctacggcgagcattttcccgcaatgctcacaagctcctatagcttcccttcttcccccatacctctcaccagcgatgtcttcagtatgtgaaaatccaattcttctaccctacaggatccaacaggcaatcgcagcaggcatcttacctttatcacccttgttcctccaacaatcatcagccctattacagcagttacctttggtgcatttattggcacaaaacatcagggcacaacaactacaacaactcgtgctagcaaaccttgctgcctactctcagcaacagcagttacctttggtgcatttgttggcacaaaacatcatggcacaaca

SEQ ID NO: 25923 - DNA, 414 bp, Zea mays
  Clone ID: LIB3154-005-Q1-K1-F6
aatattttgagcattcaaaaacacaccaagcgaagcgcactagcaacgacctaacaacggtggctaccaagatattagccctccttgcgcttgttgcccttgttgggagcgcaacaaatgcgttcattattccacaatgcttacttgctcctagtgccattattccacagttcctaccaccagttacttcaatgggcttagaacacctagctgtgcaagccaacatgcaacaacaagcgcttgcggggagcgtattacaacaaccaattgcccaattgcaacaacaatccttgccacatataacaatacaagccatcacaacgcaacagcaacaacagttactaccagtactgagccacctagtcatggtgaaccctgccgactacttgcaagagcagctgcttgcatacaacc

SEQ ID NO: 25924 - DNA, 416 bp, Zea mays
  Clone ID: LIB3154-005-Q1-K1-F8
caacaagcaacatagaaagtggaatccagtagcaacaatagagcaacaatggcgaccaagatattttccctccttatgctccttgctctttctgcatgtgttgctaacgcgacaattttccctcaatgctcacaagctcctatagcttcccttcttcccccataccttccatcaatgatagcttcagtatgtgaaaacccagctcttcaaccctataggctccaacaagcaatcgcagcaagcaacatacctttatcacccttgtttcaacaatcgccagccctatctttggtgcagtcattggtacaaaccatcagggcacagcagctgcagcaactcgtgctacctgtgatcaaccaagtagctctggcaaacctttctccctactctcagcaacaacaatttcttccattcaa

SEQ ID NO: 25925 - DNA, 240 bp, Zea mays
  Clone ID: LIB3154-005-Q1-K1-G11
caggagagttcaatgctgccattcagccagctagctggtgtgagccctgctaccttcttgatacaaccaccagttgttgccgttctaccagcacgctgcgcctaacgctggcaccctcttacaactgcaacaattgctgccattcaaccaacttgctttgacaaacccagcagcgttctaccaacaacccatcattggtggtgccctctttcagatttctcatgagttatagatcaataa

SEQ ID NO: 25926 - DNA, 417 bp, Zea mays
  Clone ID: LIB3154-005-Q1-K1-G2
ctgggtcttcagaccattagctttatctactccagagcgcagaagaacccgatcgacacgatgagggtgttgctcgttgccctcgctctcctggctctcgctgcgagcgccacctccacgcatacaagcggcggctgcggctgccagccaccgccgccggttcatctaccgccgccggtgcatctgccacctccggttcacctgccacctccggtgcatctcccaccgccggtccacctgccgccgccggtccacctgccaccgccggtccatgtgccgccgccggttcatctgccgccgccaccatgccactaccctactcaaccgccccggcctcagcctcatccccagccacacccatgcccgtgccaacagccgcatccaagcccgtgccagctgcaaggaacctgcggcgtt

SEQ ID NO: 25927 - DNA, 405 bp, Zea mays
  Clone ID: LIB3154-005-Q1-K1-G3
aactgctcatcgcctcatcgacatataccttgctcgcaccacacgcgaaaccgaacaagcgagtgcaggcattgacgatactcacgccggcgaccgatgggatcggagggtgagatcaccggcccgctcctcgcgtcgggcagccggcgccccggcgccggatgcggtgcccccgcggcgggagcaggtgactgctcggtggctggcggacagcgccgctctgggggtgctcttttgcctcattacacacaagctcaacctcaccgtcgggatcattccctcgctcaacgtacccgcggggctgatcggctacttactggtccgaacctggacggaggcgctcgataagttcggcgtcgacttcaagcccttcaccaagcatgacaacaccgacattcagacatg

SEQ ID NO: 25928 - DNA, 397 bp, Zea mays
  Clone ID: LIB3154-005-Q1-K1-G5
aaaaaaaaaaacccacccacgcctacggttctagatccccagcatccactatatattttccaacccaacctacacctacatacctcgtcatttttaaaactatactctcacctaaaaccaattcacatcccatcgtataacaacatcctcactcctaaaaccctcaccttacccaacttaatctacttccaacacatccccctttaaccaactaccattatatcaaatactcccacacccatcctccttcccaacaatttcccaacctcaatcaataataacactccccctgtaatcattcattaaccccacatcttttcatccttacacacatacttacctctacactccccaactccctaactccagatcctttccctttatttccttcctttca

SEQ ID NO: 25929 - DNA, 418 bp, Zea mays
  Clone ID: LIB3154-005-Q1-K1-G6
gctagctgcagcaagccgtgcttccttcttgacacagcaacagttgctgcctttctaccggcagtttgcggctaaccccgcaaccctcttacaactacaacaattgttgccctttgtccaacttgctttgacaaacccagcagcctcctaccaacaacacatcattggtggtgccctcttttagattgcttattagttgtaattcaataataaagttttttggatgatgtatgtggccaaccagaaataagaagttacatttccagattctaatgtgaaaaaaaaaaaaaaaaaaaaaaaaaaaaaaaaaaaaaaaaaaaaaaaaaaaaaaaaaaaaaaaaaaaaaaaaaaaaatttaaaaaagggggggagggtttaaaagatcaaaagttaaaaaacgggggcttgcaaaataaaa

SEQ ID NO: 25930 - DNA, 419 bp, Zea mays
  Clone ID: LIB3154-005-Q1-K1-G7
ttttattccacaatgctcacaacaatacctctctccggcgacagccgtgggatttcaagacccaactatacaatcctacatggtacaagaggccatccaagcaagcatcttacggtcattagcattaaccctccaacaaccatatgctctattgcaacagccatccttagtgcatctgtatctccaaagaatcgcggcacaacaactacaacaacagttgctaccaacaatcaatcaagtagttgcagcgaaccttgctgcttacctccagcaacaacagtttcttccattcaatcaactagatggggtgaaccctgctatctacttgcaggcacaacagctactaccatttaaccaacttgtcgggagcccttatgccttcttactgcaacaacagcttctaccattccatctgcaag

SEQ ID NO: 25931 - DNA, 294 bp, Zea mays
  Clone ID: LIB3154-005-Q1-K1-H1
ctaattctagatcgtgaacagccggtgtagacgatctaaactaaccaacgcgaccatgcggggcattagatgttatatagcgtcaattaaattaaataaactgaatcgagtgttacaacgtttacactgggaaaactgtgaaaatactgaacttaatcaacttaaacgacatgcaccttatgccagttggcgtaattgccaaaatgcccaaaacgatcgcacttatcaacatttgcacaagctgaatggccaatgtgacgcacgctacacccgctcattaagcgcattaagcgc

SEQ ID NO: 25932 - DNA, 199 bp, Zea mays
  Clone ID: LIB3154-005-Q1-K1-H10
tccgggaggctatgggacgcgacaaacagagggaatggcatgtctcgcggtgcctgctctgcagtgcacgccttgatgcaatgccctgccctgccggctgcaggtgacggcctggcccgctacacgatatggcgccggggcttcccctaccgagactgagaccgatgacccgtggggcgccctatacccttgggcagac

SEQ ID NO: 25933 - DNA, 268 bp, Zea mays
  Clone ID: LIB3154-005-Q1-K1-H12
cacggatctcgttcggccatcgggactgtacaagggcgagagggagaagagaacagcggattcatcaccgccaggcgtcaggtcagagtgtgttaagacaagatggtggcgaatggcgacgcacctgctagagggagtgcggcggcagctgcaagcctgcgcaggcgtaagaccacaagcggtgctgctgctggcggaggtggtgccagctcgatgctccagttttacaccgatgaggctgcgggccgcaaaatgtcaccaaacaccg

SEQ ID NO: 25934 - DNA, 421 bp, Zea mays
  Clone ID: LIB3154-005-Q1-K1-H2
gcacaatagtgtaccaacaatggcagccaaaatattttgcttccttatgctccttggtctttctgcaagtgctgctaccgcaaccattttcccacaatgctcacaagctcctatagcttcctttcttcccccatacctctcaccagcggtgtcttcagtatgtgaaaacccaattcttcaaccctacaggatccaacaggcaatcgcagcaggcatcttacctttatcacccttgttcctccaacaaccgtcagccctattacagcagttacctttggtgcatttgttggcacaaaacatcaaggcacaacaactacaacaacttgtgctaggaaaccttgctgcctactctcagcaacagcagtttcttccattcaaccaactggctgcattgaactctgctgcttatttgcaacaacaa

SEQ ID NO: 25935 - DNA, 420 bp, Zea mays
  Clone ID: LIB3154-005-Q1-K1-H3
cagaaacacaccaagcgaagcacattagcaacaacctaacaacaatggctaccaagatattatccctccttgcgcttcttgcgctttttgcgagcgcaacaaatgcgttcattattccacaatgctcacttgctccaagttccattattacacagttcctcccaccagttacttcaatgggcttcgaacacccagctgtgcaagcctataggctacaacaagcaattgcggcgagcgtcttacaacaaccaatttcccagttgcaacaacaatccttggcacatctaacaatacaaaccatcgcaacgcaacagcaacaacaattcctaccagcactgagccacctagccatggtgaaccctgccgcctacttgcaacagcagttgcttgcatcaaacccacttgctctggcaaacgtag

SEQ ID NO: 25936 - DNA, 419 bp, Zea mays
  Clone ID: LIB3154-005-Q1-K1-H6
ttgagaccaactagcaacatagaaagcacaatagtgtaccaacaatggcagccaaaagattttgcctccttatgctccttggtctttctgcaagtgctgctacggcgaccattttcccgaaatgctcgcaagctcctatagcttcccttcttcccccgtacctctcaccagcggtgtcttcggtatgtgaaaacccaattcttcaaccctacaggatccaacaggcaatcacagctggcatcttacctttatcacccttgttcctccaacaatcatcagccctattacatcagttacctttggtgcatttattggcacaaaacatcagggcacaacaactacaacaacttgtgctagcaaaccttgctgcctactctcagcaacagcagtttcttccattcaaccaactagctgcattg

SEQ ID NO: 25937 - DNA, 420 bp, Zea mays
  Clone ID: LIB3154-005-Q1-K1-H8
cgacctaacaacaatggctaccaagatattagccctccttgcgcttcttgccctttttgtgagcgcaacaaatgcgtgcattattccacaatgctcacttgctcctagtgccattattccacagttcctcccaccagttacttcaatgggcttcgaacacctagctgtgcaagccaacatgcaacaacaagcgcttgcggcgagcgtcttacaacaaccaattgcccaattgcaacaacaatccttgccacatctaacaatacaagccatcacaacgcaacagcaacaacagttcctaccagcactgagccacctagccatggtgaaccctgccgcctacttgcaagagcagctgcttgcatccaacccacttgctctggcgaacgtagttgcaaaccatcaacaacaacagctacaaca

SEQ ID NO: 25938 - DNA, 185 bp, Zea mays
  Clone ID: LIB3154-005-Q1-K1-H9
caacaattgttgccctttgtccaacttgcttttacaaacccagcagcctcctgacgcgacaacacatcattggtggcgccctcttttagattgcttattagctgcaattcaataataaagtttcttggatgatgtatgtggccaaccagaaataagaagttacatttccagattcagattacaaa

SEQ ID NO: 25939 - DNA, 389 bp, Zea mays
  Clone ID: LIB3154-006-Q1-K1-A6
tgagaccaactagcaacatataaagcacaatattgtaccaataatggcagccaaaatatggtgcctcattatgctccttggtctttctgcaagtgctgctacggcgagcattttcccgcaatgctcacaagctcctatagcttcccttcttcccccatacctctcaccagcgatgtcttcagtatgtgaaaatccaattcttctaccctacaggatccaacaggcaatcgcagcaggcatcttacctttatcacccttgttcctccaacaatcatcagccctattacagcagttacctttggtgcatttattggcacaaaacatcagggcacaacaactacaacaactcgtgctagcaaaccttgctgcctactctcacaacaacagtt

SEQ ID NO: 25940 - DNA, 309 bp, Zea mays
  Clone ID: LIB3154-006-Q1-K1-A8
acccacgcgcgaggcacgcgtccggctctagagagacagcggcttgtctgctcggtcgcgcggcgccccggctggggtgtgggctgcaccggtgagcggcctccagcccctcggcggctcggcacagaccggcagcccatcgcgcgagggcgtgcgtaggccctcggcgcgggcgcggctgcacgagcatggccggcgcgggggcacggccggcgcggctccccggcatccaagcggccccgcggcggtgcgggcagcaccggcgtgcggccctcggacccttggcggctcggcgcatgcgcgcccacc

SEQ ID NO: 25941 - DNA, 416 bp, Zea mays
  unsure at all n locations
  Clone ID: LIB3154-006-Q1-K1-A9
ccggngtggagacccaggcgtgcgcgaagcttcagaaacacaccaagcgaagcgcactagcaacaacctaacaacaatggctaccaagatattatccctccttgcgcttcttgcgctttttgcgagcgcaacaaatgcgtccattattccacaatgctcacttgctcctagttccattattccacagttcctcccaccagttacttcaatggccttcgaacacccagctgtgcaagcctataggctacaacaagcgattgcggcgagcgtcttacaacaaccaattgcccaattgcaacaacaatccttggcacatctaacaatacaaaccatcgcaacgcaacagcaacaacagttcctaccagcactgagccacctagccatggtgaaccctgtcgcctacttgcaacagcagc

SEQ ID NO: 25942 - DNA, 208 bp, Zea mays
  Clone ID: LIB3154-006-Q1-K1-B1
cgcgacgaccaggctcgtctctgcgatcggtgtctacctgcgccaactttagtctggttgcagcagcaggacgggtactacatatatatatgcaagataaaggtcttatatatatgtcatatgacctatcatggtcttatatgttcgatcgtcgtcgtgtctgtatgtacatacatggttgtcaaataaagctctttgcattttgatc

SEQ ID NO: 25943 - DNA, 389 bp, Zea mays
  Clone ID: LIB3154-006-Q1-K1-B10
gaccaactagcaacatagaaagcacaatattgtaccaacaatggcagccaaaatattttgcctccttatgctccttggtctttctgcaagtgctgctacggcgaccattttcccgcaatgctcgcaagctcctatagcttcccttcttcccccgtacctctcaccagcggtgtcttcggtatgtgaaaacccaattcttcaaccctacaggatccaacaggcaatcgcagctggcatcttacctttatcacccttgttcctccaacaatcatcagccctattacaacagttacctttggtgcatttattggcacaaaacatcagggcacaacaactacaacaacttgtgctagcaaaccttgctgcctactctcagcaacagcagtttc

SEQ ID NO: 25944 - DNA, 382 bp, Zea mays
  unsure at all n locations
  Clone ID: LIB3154-006-Q1-K1-B11
gggnggaccaagccgtccgatggagaccaacaggcaacataaaaagtgttaatccagtatcaacaatagagcaacaatggcgaccaagagattttccctccttatgctccttgctctttctgcatgtgttgctaacgcgacaattttccctcaatgctcacaagctcctatagcttcccttcttcccccataccttccatcaatgatagcttcagtatgtgaaaacccagctcttcaaccctatatgctccaacaagcaatcgcagcaagcaacatacctttatcacccttgtttcaacaatcgccagccctatctttggtgcagtcattggtacaaaccatcagggcacagcagctgcagcaactcgtgctacctgtgatc

SEQ ID NO: 25945 - DNA, 344 bp, Zea mays
  Clone ID: LIB3154-006-Q1-K1-B2
gaccaactagcaacatagaaagcacaatagtgtaccaacaatggcagccaaaatattttgcttccttatgctcctgggtctttctgcaagtgctgctaccgcaaccattttccaacaatgctcacaagctcctatagcttcctttcttcccccatacctctcaccagcggtgtcttcagtatgtgaaaacccaattcttcaaccctacaggatccaacaggcaatcgcagcaggcatcttacctttatcacccttgttcctccaacaaccgtcagccctattacagcagttacctttggtgcatttgttggcacaaaacatcaaggcacaacaactacaaacac

SEQ ID NO: 25946 - DNA, 344 bp, Zea mays
  Clone ID: LIB3154-006-Q1-K1-B4
cttcactccgaggatcggagtgaaaggagcactagctactggcagcatggtgagtctgtgtctgcaggcgaagaggcctcgggtgggggcggcgccactggttgtggcgaaccagatgggggcgttcgaggtgctgccccaggagctgatcctctccgtgctcaccgacctgtcgtcggccgcggacaagcccgccgacctcttcaacgtcatgcttgtgtgccaggagttctgcaggctggtgactaacccgcacgtgatccgggcggcgtcagtaagctgcgtgtccgtgctccctaccaggtggtgcacagctcccgtaccgatcctcctattctgcggtg

SEQ ID NO: 25947 - DNA, 329 bp, Zea mays
  Clone ID: LIB3154-006-Q1-K1-B5
ctattctctaggaagcaagggaatcacatctccatggcacccaaaatgtttgcattgttggcgctcctagctctttgtgcaaccgccactagtgctacccatatgccagggcacttgtcaccactactgatgccattggctaccatgaacccatggatgcagtactgcatgaagcaacagggggttgccaacttgctagcgtggccgaccctgatgctgcagcaactgttgaccttaccgattcagccgtgccagatgccaatgatgatgccaggtatgatgccaccgatgacaatgatgccgatgccgaatatgatgccatcgatgat

SEQ ID NO: 25948 - DNA, 395 bp, Zea mays
  Clone ID: LIB3154-006-Q1-K1-B6
gagaccaactagcaacatagaaagcacaatagtgtaccaacaatggcagccaaaatattgggcttccttatgctccttggtctttctgcaagtgttgctaccgcaaccattttcccacaatgctcacaagctcctatagcttcccttcttcccccatacctctcaccagcggtgtcttcaatgtgtgaaaacccaattgttcaaccctacaggatccaacaggcaatcgcaacaggcatcttaccattatcacccttgttcctccaacaaccgtcagccctattacagcagttacctttggtccatttggtggcacaaaacatcaaggcacaacaactacaacaacttgtgctagcaaaccttgctgcatactctcagcaacatcagtttctttc

SEQ ID NO: 25949 - DNA, 112 bp, Zea mays
  Clone ID: LIB3154-006-Q1-K1-B7
acccacgcgtgcgctaagttgtagatagtaagcgtacgttctttacgatccatgtttacgttcccatgcatgggacgccttcgtgctactatagagctacctaattgcaata

SEQ ID NO: 25950 - DNA, 402 bp, Zea mays
  unsure at all n locations
  Clone ID: LIB3154-006-Q1-K1-B8
tctcgctttggatcgattggtttcgtacctggtgagggactgagggtctcggagtggatggatttgggattctgttcgaagatttgcggaggggggcaatggcgaccgcggggaaggtgatcaagtgcaaagctgcggtggcatgggaggccggcaagccactgtcgatcgaggaggtggaggtagcgcctccgcaggccatggaggtgcgcgtcaagatcttcttcacctcgctctgccacaccgacgtctacttctgggaggccaaggggcagactcccgtgttccctcggatctttggccacgaggctggaggtatcatananagtgttggagaaggtgtgactgacgtagcttcgggcgaccatgtccttcctgtgttcactggggagtgcaaggagt

SEQ ID NO: 25951 - DNA, 313 bp, Zea mays
  Clone ID: LIB3154-006-Q1-K1-C12
attcaaccaactatctacattgaactctacttctaatttacaacaccaacaactacaattcagccacctaccaaaccctaccctcaccaatctcaatcatccaaccaactatccccatttaactatcctgcttattaacaaaaacaacaactactaccattcatccaactagctgctctaagcccatctacctttttgatacaccctcaactgttgcacttctaccaacactcttcgcctaacgctgccaccctacttacaacttcaacaattgctttcattcaaccaactttcttttacaaacccaacattt

SEQ ID NO: 25952 - DNA, 90 bp, Zea mays
  Clone ID: LIB3154-006-Q1-K1-C2
catttggacccaattgccaccatgtaaggataattgcgttcctaccacgggcggccaaacaggggggcctcctgatgttcctagaccttt

SEQ ID NO: 25953 - DNA, 375 bp, Zea mays
  unsure at all n locations
  Clone ID: LIB3154-006-Q1-K1-C3
gggagacccaggcggacgcagcattcatgatcagcatagcggcacttcttcaaaggatcgtcatcaattacataacgacgaaagtcatcgttctcgtgctgggcctggctttgtcagttgccagcgcctctgcaatgcagatgcnctgcccctgcgcggggctgcagggcttgtacagggctggacccggctgacacgatgatgggcgccggcggctgtaccctacgcgagtacctgaggcagcgagtgcacccgtgcggcgggccctatacccggtgtggcagagagcccatgtacaccgttcggacaggctgcagcacaataggatgatgacgtcagtcgtccgcacagctgagatatgatgcactgagcgtg

SEQ ID NO: 25954 - DNA, 392 bp, Zea mays
  Clone ID: LIB3154-006-Q1-K1-C4
ccaactagcaacatagaaagcacaatagtgtaccaacaatggcagctaaaatattttgcctccttatgctccttggtctttctgcaagtgctgctacggcgaccattttcccacaatgctcacaagctcctatagcttcccttcttcccccgtacctctcaccaacggtgtcttcggtatgtgaaaacccaattcttcaaccctacaggatccaacaggcaatcgcagctggcatcttacctttatcacccttgttcctccaacaatcatcagccctattacagcagttacctttggtgcatttattggcacaaaacatcagggcacaacaactacaacaacttgtgctagcaaaccttgctgcctactctcagcaacagcagtttctttca

SEQ ID NO: 25955 - DNA, 384 bp, Zea mays
  Clone ID: LIB3154-006-Q1-K1-C6
gacgaaatctgacccgggccacactccgctgctccgccatggcgatccgctccaaggccgggatctcgctgctgctcgcgctgaccgtcgctctctccgcccgggcggaggaggagcccgccgccgcggcggagggcgaggccgtgctcaccctcgacgtcgacagcttcgacgaggccgtcgccaagcaccccttcatggtcgtcgagttctacgccccctggtgtgggcactgcaagaaacttgctccagagtatgagaatgcggccaaggcacttagcaagcatgacccaccgattgttctcgctaaggttgatgctaacgaggagaagaacaggccgcttgctaccaagtacgagatccaagggttcccaaccatcaaga

SEQ ID NO: 25956 - DNA, 416 bp, Zea mays
  Clone ID: LIB3154-006-Q1-K1-C9
gggagacccaggcgtgcgtcatcattcatcttagtagtataggcaccaaatcaaatctgcaacatcaattatctaacggcaaaaacgatgaagctggtgcttgtggttcttgctttcattgctttagtatcaagtgtttcttgtacacagacaggcggctgcagctgtggtcaacaacaaagccatgagcagcaacatcatccacaacaacatcatccacaaaaacaacaacatcaaccaccaccacaacatcaccagcagcagcaacaccaacaacaacaagttcacatgcaaccacaaaaacatcagcaacaacaagaagttcatgttcaacaacaacaacaacaaccgcagcaccaacaacaacaacaacaacagcaccaacaacaacatcaatgtgaaggccaacaacaaca

SEQ ID NO: 25957 - DNA, 368 bp, Zea mays
  unsure at all n locations
  Clone ID: LIB3154-006-Q1-K1-D10
cttcagaccattagctttatctactccagagcgcagaagaacccgatcgacaccatgagggtgttgctcgttgccctcgctctcctggctctcgctgcgagcgccacctccacgcatacaagcggcggctgcggctgccagccaccgccgccggttcatctaccgccgccggtgcatctgccacctgcggttcacctgccacctgcggtgcatctaccaccgccggtccacctgccgccgccggtccacctgccaccgncggtccatgtgccgccgccggttcatctgccgncgccaccatgccactaccctactcaaccgccccggcctcagcctcatccccagccacacccatgcccgtgccaaca

SEQ ID NO: 25958 - DNA, 254 bp, Zea mays
  unsure at all n locations
  Clone ID: LIB3154-006-Q1-K1-D11
cgagcgcaacaaangcgnncannannccacaangcncacnngcnccaagnnccannannacacagnnccncccaccagnnacnncaangggcnncgaacacccagcngngcaagccnanaggcnacaacaagcaanngcggcgagcgncnnacaacaaccaannncccagnngcaacaacaanccnnggcacancnaacaanacaaaccancgcaacgcaacagcaacaacaannccnaccagcacngagccac

SEQ ID NO: 25959 - DNA, 380 bp, Zea mays
  Clone ID: LIB3154-006-Q1-K1-D2
caaagcggcagtgcgtaaagaggatcgtccaacagaacagcatgaagatggtcatcgttctcgtcgtgtgcctggctctgtcagctgccagcgcctctgcaatgcagatgccctgcccctgcgcggtgctgcagggcttgtacggcgctggcgccggcctgacgacgatgatgggcgccggcgggctgtacccctacgcggagtacctgaggcagccgcagtgcagcccgctggcggcggcgccctactacgccgggtgtgggcagacgagcgccatgtaccagccgctccggcaacagtgctgccagcagcagatgaggatgatggacgtgcagtccgtcgcgcagcagctgcagatgatgatgcatgttgagcgtgcc

SEQ ID NO: 25960 - DNA, 394 bp, Zea mays
  Clone ID: LIB3154-006-Q1-K1-D3
agcaaaccttgctgcctactctcagcaacagcagttacctttggtgcatttgttggcacaaaacatcagggcacaacaactacaacaactcgtgctagcaaaccttgctgcctactctcagcaacaacagtttctgccattcaaccaactagctgcattgaactctgctgcttatttgcagcaacaacaactactaccattcagccagctagctgctgcctacccccggcaatttcttccattcaaccaactggcagcattgaactctcatgcttatgtacaacaacaacaactactaccattcagccagctagctgctgtgagccctgctgccttcttgacacagcaacatttgttgccgttctacctgcacactgcgcctaacgttggcacc

SEQ ID NO: 25961 - DNA, 388 bp, Zea mays
  Clone ID: LIB3154-006-Q1-K1-D4
gggcacaacaactacaacaacttgtgctagcaaaccttgctgcctactctcagcaacagcagtttcttccattcaaccaactagctgcattgaactctgcttcttatttgcaacaacaacaactaccattcagccagctacctgctgcctacccccagcaatttcttccattcaaccaactggcagcattgaactctcctgcttatttacagcagcaacaactactaccattcagccagctagctggtgtgagccctgctaccttcttgatacaaccacagttgttgccgttctaccagcacgctgcgcctaacgctggcaccctcttacaactgcaacaattgctgccattcaaccaacttgctttgacaaacccagcagcgttcta

SEQ ID NO: 25962 - DNA, 391 bp, Zea mays
  Clone ID: LIB3154-006-Q1-K1-D6
cagcctagcaattagctcatcgactccagattggagaactcgacaccatgaaggtgctgagcgttgcccttgctctcctggcgctcgctgcgagcgccgcctccagtacaagcggcggctgtggctgccagacaccaccgtttcatctaccgcctccgttctatatgccgcctccgttctatctgccgccgcagcagcagccgcagccatggcaataccccactcaaccaccgcagctaagcccgtgccagcagttcggatcctgcggcgtcggcagcgtcggcagcccgttcctgggccagtgcgtcgagttcctgaggcaccagtgcagcccggcggcgacgccctacggctcgccacagtgccaggcgctgcagcagcagtgcttgca

SEQ ID NO: 25963 - DNA, 375 bp, Zea mays
  Clone ID: LIB3154-006-Q1-K1-D7
agaccaacaagcaacatagaaagtggaatccagtagcaacaatagagcaacaatggcgaccaagatattttccctccttatgctccttgctctttctgcatgtgttgctaacgcgacaattttccctcaatgctcacaagctcctatagcttcccttcttcccccataccttccatcaatgatagcttcagtatgtgaaaacccagctcttcaaccctataggctccaacaagcaatcgcagcaagcaacatacctttatcacccttgtttcaacaatcgccagccctatctttggtgcagtcattggtacaaaccatcagggcacagcagctgcagcaactcgtgctacctgtgatcaaccaagtagctctggc

SEQ ID NO: 25964 - DNA, 419 bp, Zea mays
  unsure at all n locations
  Clone ID: LIB3154-006-Q1-K1-D8
cggggcgacccacgcgtgcgcaagaaagctatgccatcccgcgggacgagaccccaccgccgctggacacaagggcgccgacccctcgcaaaaactacgccttcatgtccaaggagccggagaagatccaccacatccggcacggccggcctcagttacatggctggaccggagaggcagcacctcagcagcagcagccgcagcaggtgcgtcaccaacagtacgtgcaacaccacaggcagtactcggccgggccgcagacctactacgagccgagctgcgatgcaacgaaggagatcgtcttcggagccgtgcaggaaggggacaccagccgccgtcccgtggagatcaaggccgtgaaccatggngacgcggcgccgtacgagcagaacgggctgcgattccgcagtagttatagc

SEQ ID NO: 25965 - DNA, 389 bp, Zea mays
  Clone ID: LIB3154-006-Q1-K1-E10
ccaactagcaacatagaaagcacaatagtgtaccaacaatggcagccaaaatattttgcctccttatgctccttggtctttctgcaagtgctgctacggcgaccattttcccgcaatgctcgcaagctcctatagcttcccttcttcccccgtacctctcaccagcggtgtcttcggtatgtgaaaacccaattcttcaaccctacaggatccaacaggcaatcgcagctggcatcttacctttatcacccttgttcctccaacaatcatcagccctattacaacagttacctttggtgcatttattggcacaaaacatcatggcacaacaactacaacaacttgtgctagcaaaccttgctgcctactctcagcaacagcagtttctt

SEQ ID NO: 25966 - DNA, 369 bp, Zea mays
  Clone ID: LIB3154-006-Q1-K1-E11
tccgattgagaccaacaagcaacatagaaagtgtaatacagtttcaacaatagagcaacaatggcggccaagagattttccatccttatgctccttgctctttctgcatgtgttgctaacgcgaccatttttcctcaatactcacaagctcctatagctgcccttcttcccccataccttccatcaatgaccgcttcagtatgtgaaaacccagcccttcaaccctacaggctccaacaagcaatcgcaacaagcaacttacctttatcacccctgttctttcaacaatcgccagccctatctttggtgcagtcattggtacaaaccatcagggcacaacagctgcagcaactcgtgctaccagtgatc

SEQ ID NO: 25967 - DNA, 395 bp, Zea mays
  Clone ID: LIB3154-006-Q1-K1-E4
ggtcttcagaccattagctttatctactccagagcgcagaagaacccgatcgacaccatgagggtgttgctcgttgccctcgctctcctggctctcgctgcgagcgccacctccacgcatacaagcggcggctgcggctgccagccaccgccgccggttcatctaccgccgccggtgcatctgccacctccggttcacctgccacctccggtgcatctcccaccgccggtccacctgccgccgccggtccacctgccaccgccggtccatgtgccgccgccggttcatctgccgccgccaccatgccactaccctactcaaccgccccggcctcagcctcatccccagccacacccatgcccgtgccaacagccgcatccaagcccgtgccagct

SEQ ID NO: 25968 - DNA, 359 bp, Zea mays
  Clone ID: LIB3154-006-Q1-K1-E5
caacaagcaacatacaaagtggactccagtgccaccaatggagcaacaatggcgaccatgatattgctcctcgttatgctcgttggtcttgctgcatgtgctgctaacgcgacaagcttacatgaatgcttacatgctcctattgcttccctccttccatcataccttgcatcaatgatagcataagcatgtgaaaacccatctatgcaaccctataggctccaacaagcaatcatagcatgcaacatacctttatcacccttgtttgaacaatcgccagccctatctttggtgcagacattggtacaaaccatcagggcacagcatctgctgcaactggtgctacctgtgatcaacca

SEQ ID NO: 25969 - DNA, 386 bp, Zea mays
  Clone ID: LIB3154-006-Q1-K1-E9
aacatagaaagcacaatagtgtaccaacaatggcagccaaaatattttgcctccttatgctccttggtctttctgcaagtgctgctacggcgaccattttcccgcaatgctcgcaagctcctatagcttcccttcttcccccgtacctctcaccagcggtgtcttcggtatgtgaaaacccaattcttcaaccctacaggatccaacaggcaatcgcagctggcatcttacctttatcacccttgttcctccaacaatcatcagccctattacaacagttacctttggtgcatttattggcacaaaacatcagggcacaacaactacaacaacttgtgctagcaaaccttgctgcctactctcagcaacagcagtttcttccattc

SEQ ID NO: 25970 - DNA, 354 bp, Zea mays
  Clone ID: LIB3154-006-Q1-K1-F10
cgcaaattgcaccaagaaatccatcgagaggccgtcgacaggggaattaatggcgtcggcgtctagcagcagccaccgccgcctcatcctcgcagccgccgtcctgctctccgtgctcgcggctgccagcgccagcgccgggacctcctgcgtgccggggtgggccatcccgcacaacccgctcccgagctgccgctggtacgtgaccagccggacctgcggcatcgggccgcgcctcccgtggccggagctgaagaggagatgctgccgggagctggcggacatcccggcgtactgccggtgcacggcgctgagcatcctcatggacggcgcgatcccgccgggcccggacgc

SEQ ID NO: 25971 - DNA, 252 bp, Zea mays
  Clone ID: LIB3154-006-Q1-K1-F11
ggtcttcagaccattagctttatctactccagagcgcagaagaacccgagcgacaccatgagggtgttgctcgttgccctcgctctcctggctctcgctgcgagcgccacctccacgcatacaagcggcggctgcggctgccagccaccgtcgccggttcatctaccgtcgccagtgcatctgccacctacgggtcacctgccacctgcggtgcatatcccaccgccggtccacctggcgacggcggtccac

SEQ ID NO: 25972 - DNA, 359 bp, Zea mays
  Clone ID: LIB3154-006-Q1-K1-F12
cagaccattagctttatctactccagagctcagaagaacccgatcgacaccatgagggtgttgctcgttgccctcgctctcctggctctcgctgcgagcgccacctccacgcatacaagcggcggctgcggctgccagccaccgccgccggttcatctaccgccgccggtgcatctgccacctccggttcacctgccacctccggtgcatctcccaccgccggtccacctgccgccgccggtccacctgccaccgccggtccatgtgccgccgccggttcatctgccgccgccaccatgccactaccctactcaaccgccccggcctcagcctcatccccagccacacccatgcccgtg

SEQ ID NO: 25973 - DNA, 398 bp, Zea mays
  Clone ID: LIB3154-006-Q1-K1-F4
gggtcttcagaccattagctttatctactccagagcgcagaagaacccgatcgacaccatgagggtgttgctcgttgccctcgctctcctggctctcgctgcgagcgccacctccacgcatacaagcggcggctgcggctgccagccaccgccgccggttcatctaccgccgccggtgcatctgccacctacggttcacctgccacctccggtgcatctcccaccgccggtccacctgccgccgccggtccacctgccaccgacggtccatgtgccgccgccggttcatctgccgccgccaccatgccactaccctactcaaccgccccggcctcagcctcatccccagccacacccatgcccgtgccaacagccgcatccaagcccgtgccagctgc

SEQ ID NO: 25974 - DNA, 368 bp, Zea mays
  Clone ID: LIB3154-006-Q1-K1-F5
accattagctttatctactccagagcgcataagaacccgatcgacaccatgagggtgttgctcgttgccctcgctctcctggctctcgctgcgagcgccacctccacgcatacaagcggcggctgcggctgccagccaccgccgccggttcatctaccgccgccggtgcatctgccacctccggttcacctgccacctccggtgcatctcccaccgccggtccacctgccgccgccggtccacctgccaccgccggtccatgtgccgccgccggttcatctgccgccgccaccatgccactaccctactcaaccgccccggcctcagcctcatccccagccacacccatgcccgtgccaacagccgca

SEQ ID NO: 25975 - DNA, 386 bp, Zea mays
  Clone ID: LIB3154-006-Q1-K1-G1
gtgaaacaatacaggtagtccgcaggttttcacttcctgatgttaatacgtatgacctgggaaacaatgacggtatctttcgattcccaagagtttcttgtgctacaaataatgcagaagatgcagatgttgacccttgtattgcagaacttcctccaaagccacttcttgagaaacttggccgggagcttcgacgccggctgggtcttagactgtttaacatagatatgattagagaacatggaagaaaggaccggtactatgtcattgacatcaactattttcctggatatggcaagatgccaggatatgagcacatattcactgacttcctgctaagcctcgtgcaaagcaagtacaagaggctaagtgggagctgaagcgta

SEQ ID NO: 25976 - DNA, 318 bp, Zea mays
  unsure at all n locations
  Clone ID: LIB3154-006-Q1-K1-G11
gggtcttcagaccattagctttatctactccagagcgcagaagaacccgatcgacaccatgagggtgttgctcgttgccctcgctctcctggctctcgctgcgagcgccacctccacgcatacaagcggcggctgcggctgccagccaccgccgccggttcatctaccgccgccggtgcatctgccacctccggttcacctgccacctccggtgcatctcccaccgccggtccacctgccgccgccggtccacctgccaccgccggtccatgtgccgccgccggttcatctgccgncgncaccatgccactaccctac

SEQ ID NO: 25977 - DNA, 402 bp, Zea mays
  unsure at all n locations
  Clone ID: LIB3154-006-Q1-K1-G7
gcaacatcttagcaccaatggcagccaagatttttgccctccttgccctccttgctctttcagcaagtgttgctaccgcgactattattccacaatgctcacaacaatacctctctccggtgacagccgcgagatttgaatacccaactatacaatcctacaggctacaagaggccatcacagcaagcatcttacggtcgttagcattgactgcccaacaaccatatgccctattgcaacaaccatccttagtgaatctatatctccaaagaatcgcagcacaacaactacaacagcagttgcttccaacaatcaatcaagtagttgcagcgaaccttgctgcttacctccagcaacaacaatntcttccattcaatcaactagctggggtgaaccttgctg

SEQ ID NO: 25978 - DNA, 384 bp, Zea mays
  Clone ID: LIB3154-006-Q1-K1-H10
gctagcagcattaacagcacactagcgtaccaacaatggcagccaaaatattttgcgtgcttatgctcctcggtctttctgcaagtgctgctaccgcaaccattttcccacaatgctcacaagctcctatagcttcctttcttcccccatacctctcaccagcggtgtcttcagtatgtgaaaacccaattcttcaaccctacaggatccaacaggcaatcgcagcaggcatcttacctttatcacccttgttcctccaacaaccgtcagccctattacagcagttacctttggtgcatttgttggcacaaaacatcaaggcacaacaactacaacaacttgtgctaagaaaccttgctgcctactctcagcaacagcagtttc

SEQ ID NO: 25979 - DNA, 53 bp, Zea mays
  Clone ID: LIB3154-006-Q1-K1-H11
acgcgtgcgagatgtataccgtaagcgtacagctctagactgaccatctttac

SEQ ID NO: 25980 - DNA, 371 bp, Zea mays
  Clone ID: LIB3154-006-Q1-K1-H3
ggtcttcagaccattagctttatctactccagagcgcagaagaacccgatcgacaccatgagggtgttgctcgttgccctcgctctcctggctctcgctgcgagcgccacctccacgcatacaagcggcggctgcggctgccagccaccgccgccggttcatctaccgccgccggtgcatctgccacctccggttcacctgccacctccggtgcatctcccaccgccggtccacctgccgccgccggtccacctgccaccgccggtccatgtgccgccgccggttcatctgccgccgccaccatgccactaccctactcaaccgccccggcctcagcctcatccccagccacacccatgcccgtgccaaca

SEQ ID NO: 25981 - DNA, 330 bp, Zea mays
  Clone ID: LIB3154-006-Q1-K1-H4
ccagctagcagcattaacagcacactaatcgtcaatggctgccaagatatgatccctgcgtgcgcttcttgcgctttttgcgagcgcaacaaatgcgtccattattccacaatgctcacttgctcctagttccattattccacagttcctcccaccagttacttcaatggccttcgaacacccagctgtgcaagcctataggctacaacaagcgattgcggcgagcgtcttacaacaaccaattgcccaattgcaacaacaatccttggcacatctaacaatacaaaccatcgcaacgcatcagcaacaacagttcctaccagcactgag

SEQ ID NO: 25982 - DNA, 134 bp, Zea mays
  Clone ID: LIB3154-006-Q1-K1-H7
actcaacagtgttctaccaacaacccatcattggtggtgccctcttttagattgcttatgagttatagttcaataatgaagttttttggatgatgtttgtggcgtcccagaaataagaaagtacatttctagat

SEQ ID NO: 25983 - DNA, 335 bp, Zea mays
  Clone ID: LIB3154-007-Q1-K1-A1
ccaccataaaaggcacaatagtgtaccaacaatggcagccaaaatattttgcctccttatgctccttggtatttctgcaagtgctgctacggcgaccattttcccgcaatgctcacaagctcctatagcttcccttcttcccccgtacctctcaccagcggtgtcttcggtatgtgaaaacccaattcttcaaccctacaggatccaacaggcaatcgcagctggcatcttacctttatcacccttgttcctccaacaatcatcagccctattacagcagttacctttggtgcatttattggcacaaaacatcagggcacaacaactacaacaac

SEQ ID NO: 25984 - DNA, 58 bp, Zea mays
  Clone ID: LIB3154-007-Q1-K1-A12
atgcgaggtcatatctattgtatagtggcacctaaatacaggtcactggccgacaacg

SEQ ID NO: 25985 - DNA, 350 bp, Zea mays
  Clone ID: LIB3154-007-Q1-K1-A3
gcgccacgcgtccgctggacgtagcctacaattagctcatcgactccagattggagaactcgacaccatgaaggtgctgatcgttgcccttgctctcctggcgctcgctgcgagcgccgcctccagtacaagcggcggctgtggctgccagacaccaccgtttcatctaccgcctccgttctatatgccgcctccgttctatctgccgccgcagcagcagccgcagccatggcaataccccactcaaccaccgcagctaagcccgtgccagcagttcggatcctgcggcgtcggcagcgtcggcagcccgttcctgggccagtgcgtcgagttcctgaggcaccagtgca

SEQ ID NO: 25986 - DNA, 375 bp, Zea mays
  Clone ID: LIB3154-007-Q1-K1-A6
agccttccgaaaagcggcagggcgtaaagaggatcgtcgaacagaacagcatgaagatggtcatcgttctcggcgtgtgcctggctctgtcagctgccagcgcctctgcaatgcagatgccctgcccctgcgcggggctgcagggcttgtacggcgctggcgccggcctgacgacgatgatgggcgccggcgggctgtacccctacgcggagtacctgaggcagccgcagtgcagcccgctggcggcggcgccctactacgccgggtgtgggcagacgagcgccatgtaccagccgctccggcaacagtgctgccagcagcagatgaggatgatggacgtgcagtccgtcgcgcagcagctgcagatgatgatgc

SEQ ID NO: 25987 - DNA, 353 bp, Zea mays
  Clone ID: LIB3154-007-Q1-K1-A8
cagaccattagctttatctactccagagcgcagaagaacccgatcgacaccatgagggtgttgctcgttgccctcgctctcctggctctcgctgcgagcgccacctccacgcatacaagcggcggctgcggctgccagccaccgccgccggttcatctaccgccgccggtgcatctgccacctccggttcacctgccacctccggtgcatctcccaccgccggtccacctgccgccgccggtccacctgccaccgccggtccatgtgccgccgccggttcatctgccgccgccaccatgccactaccctactcaaccgccccggcctcagcctcatccccagccacacccatg

SEQ ID NO: 25988 - DNA, 385 bp, Zea mays
  Clone ID: LIB3154-007-Q1-K1-B1
tcggaggttggcaacattgcttcttcgaaaaagaaaaggggttcctgccgccggcccggacaagaaggatctattccatgtcgtccacaaggtgcccgccggcgacagcccgtacgtcgtagccaagcacctccagctcgtggagaagcaaccggatgtggcgatcgtgtggttctggaaggcaatcaactcaggggacagggtggacagcgccctgaaggacatggccatggtgatgaagcagcaggaccgttccgaggaggcaatcgaggccatcaggtccttcaggcacctctgctccaagcaggctcaggaatccctcgacaacctcctcattgacctctacaagaaatgcgggaaaagtgaggagcagatcgagctcctg

SEQ ID NO: 25989 - DNA, 388 bp, Zea mays
  Clone ID: LIB3154-007-Q1-K1-B10
gaccaactagcaacatagaaagcacaatattttaccaacaatggcagccaaaatatttggcctccttatgctccttggtctttctgcaagtgctgctacggcgaccattttcccgaaatgctcgcaagctcctatagcttcccttcttcccccgtacctctcaccagcggtgtcttcggtatgtgaaaacccaattcttcaaccctacaggatccaacaggcaatcacagctggcatcttacctttatcacccttgttcctccaacaatcatcagccctattacatcagttacctttggtgcatttattggcacaaaacatcagggcacaacaactacaacaacttgtgctagcaaaccctgctgcctactctcagcaacagcagttt

SEQ ID NO: 25990 - DNA, 318 bp, Zea mays; identical to SEQ ID NO: 25976
  unsure at all n locations
  Clone ID: LIB3154-007-Q1-K1-B12

SEQ ID NO: 25991 - DNA, 385 bp, Zea mays
  Clone ID: LIB3154-007-Q1-K1-B2
cgtcccggtttatctacctcaaaaccgcaaaaaacccttatcgtcaccatgagggtgttgctcgttgccctcgctctcctggctctcgctgcgagcgccacctccacgcatacaagcggcggctgcggctgccagccaccgccgccggttcatctaccgccgccggtgcatctgccacctccggttcacctgccacctccggtgcatctcccaccgccggtccacctgccgccgccggtccacctgccaccgccggtccatgtgccgccgccggttcatctgccgccgccaccatgccactaccctactcaaccgccccggcctcagcctcatccccagccacacccatgcccgtgccaacagccggatccaagcccgtgccagc

SEQ ID NO: 25992 - DNA, 407 bp, Zea mays
  Clone ID: LIB3154-007-Q1-K1-B3
ccgggccgaccacgcgtccggaccattagctttatctactccagagcgcataagaacccgatcgacaccatgagggtgttgctcgttgccctcgctctcctggctctcgctgcgagcgccacctccacgcatacaagcggcggctgcggctgccagccaccgccgccggttcatctaccgccgccggtgcatctgccacctccggttcacctgccacctccggtgcatctcccaccgccggtccacctgccgccgccggtccacctgccaccgccggtccatgtgccgccgccggttcatctgccgccgccaccatgccactaccctactcaaccgccccggcctcagcctcatccccagccacacccatgcccgtgccaacagccgcattcaagcccgtgccagct

SEQ ID NO: 25993 - DNA, 414 bp, Zea mays
  Clone ID: LIB3154-007-Q1-K1-B4
agccttccgattttggacccgactcgaacttaaaccctagagccgcagccccggtcgctccaccgaccccaaatctcaaatcagcgggagggaactcgcacgcgaaggctgaactcatggctcgcgtctacgttgggaacctggatccgcgtgtcacggcgcgggagatcgaggacgagttccggacgtttggggttctgaggagtgtatgggttgctaggaaaccaccagggtttgccttcattgactttgatgaccgcagggatgcacaagatgccattcgtgaattggatggtaagaatggttggagggttgagctgtcaactaaagttggtggtggccgtggccgagaccgtaacggttctgatatgaagtgctatgagtgtggtgaagctggccactttgcacgtgaat

SEQ ID NO: 25994 - DNA, 182 bp, Zea mays
  Clone ID: LIB3154-007-Q1-K1-B6
agccttccgttgtattaataatgtaatggagccgctgactttttacctagctcgctagtttactcatttagcggcgatgagtaacgtagtgtcacccatcaccatgggtggcagtgtgagcaatgacctgaatgaaccattgaaatggaaaggaataatatataaggaaaaaagatgattgg

SEQ ID NO: 25995 - DNA, 245 bp, Zea mays
  unsure at all n locations
  Clone ID: LIB3154-007-Q1-K1-B7
caaactgctggtagaacggaagcaattgtggctaaccccgcaacccttttacaactgcaacagttgctgccctttgtccaacttgctttgacaaacccagcagccttctaccaacaacacatcattggcggtgccctcttttagattgcttattagttgtcattcaataatgaagttttttggctgatgtatgtggcctcctagaaataagaagttatatttccaaaaaaaaaaaaatttnnnnt

SEQ ID NO: 25996 - DNA, 414 bp, Zea mays
  unsure at all n locations
  Clone ID: LIB3154-007-Q1-K1-B8
agaccattagctttatctactccagagcgcagaagaacccgatcgacaccatgagggtgttgctcgttgccctcgctctcctggctctcgctgcgagcgccacctccacgcatacaagcggcggctgcggctgccagccaccgccgccggttcatctaccgccgccggtgcatctgccacctccggttcacctgccacctccggtgcatctcccaccgccggtccacctgccgccgccggtccacctgccaccgccggtccatgtgccgccgccggttcatctgccgccgccaccatgccactaccctactcaaccgccccggcctcagcctcatccccagccacacccatgcccgtgccaacagccgcatccaagcccgtgccagctgcanggaacctgcngcgttggcagca

SEQ ID NO: 25997 - DNA, 248 bp, Zea mays
  Clone ID: LIB3154-007-Q1-K1-B9
cccacgcgtccgctgggtcttcagaccattttctttatctactccagagcgcataagaacccgatcgacaccatgagggtgttgctcgttgccctcgctctcctggctctcgctgcgagcgccacctccacgcatacaagcggcggctgcggctgccagccaccgccgccggttcatctaccgccgccggtgcatctgccacctccggttcacctgccacctccggtgcatatcccaccgacggtcca

SEQ ID NO: 25998 - DNA, 346 bp, Zea mays
  Clone ID: LIB3154-007-Q1-K1-C1
cttcgccaagccatttcctcttcaagaggggatcattccaattggcttatttattccatatcgctcaagacccggatcgacactattatggagttgcttgaaccctctcgctctcctgtgtctcggtcgacgatggtgactaggagcaaggagagctggtcgtcattgcaagtcccggcggtggcattcccttggaagccacgaggtggcaagaccggcggcctcgagttccctcgccgggcgatgttcgccagcgtcggacttaacgtgtgcccgggcgttccagcggggcgcgacccgcgggagcccgatcccaatgtcgtccgggcggtcgacaactgctaca

SEQ ID NO: 25999 - DNA, 376 bp, Zea mays
  unsure at all n locations
  Clone ID: LIB3154-007-Q1-K1-C11
gtggcttcccagaaataagaaagtacattttttaaaaaaaaaaaaaaaaaaaaaaaaaggggaatcttttaaaaaaaaaattaaaaaaaaaaaaaaaaaaaaaaaaaaaaaaaaaaaaaaaaaaattttaggaaaaaaaaaaaaaaaaaaaataaaaaaaaaaaaaaaaaaaaaaaaaaaaaaaaaaaaaaaaaggggtgnnnnnangggggggggcttttttagggttcaaattttttctccgggttgtttgaaattttttgttttttttttggggcccctaaattaattttttgggccgtgtttttaaaaaattttttttgggaaaaccttggtttttccaaatataatttctttgtaaaaattcctttttttt

SEQ ID NO: 26000 - DNA, 419 bp, Zea mays
  Clone ID: LIB3154-007-Q1-K1-C4
agccttccgaaacccaccaggcaccttttaaagtggattttatgttcaacaatcgagcatcaatggcgacgagagatattttccctccatatgctcctagctctctctgcatgtgttgctaacgcgacaattttccctcaatgctcacaagctcctatagcttcccttcttcccccataccttccatcaatgatagcttcagtatgtgaaaacccaactcttcaaccctataagctccaacaagcaatcgcagcaagcaacatacctttatcacccttgttataacaatcgccagccctatctgtggtgcactcattggtacataccatcagggcacagcaactgcagcaactcgtgctacctgtgatcaaccaagtagctctggcagactcttcttcctactatcagcaacaacaaat

SEQ ID NO: 26001 - DNA, 278 bp, Zea mays
  unsure at all n locations
  Clone ID: LIB3154-007-Q1-K1-C8
ggaaaagggggccgacccacgcgttcgattttaaccaacaagcatcttatttagaggtatacagnccccacactcgtgcaggggaggcggtcaattatattttacattcttatacaaccagctcactctcatgtgttgcataacgcgaccaactgtacaaacatactcacaaactcatataactgcccttctacccaatacctttcatcaaggagccgttaatatgagaaaacccaacccatcaaccttacaagcattaacacagcaattaataacaa

SEQ ID NO: 26002 - DNA, 369 bp, Zea mays
  Clone ID: LIB3154-007-Q1-K1-D12
gcgaagcacattagcaacaacctaacaacattggctaccaagatattatccctccttgcgcttcttgcgctttttgcgagcgcaacaaatgcgttcattattccacaatgctcacttgctccaagttccattattacacagttcctcccaccagttacttcaatgggcttcgaacacccagctgtgcaagcctataggctacaacaagcaattgcggcgagcgtcttacaacaaccaatttcccagttgcaacaacaatccttggcacatctaacaatacaaaccatcgcaacgcaacagcaacaacaattcctaccagcactgagccacctagccatggtgaaccctgccgcctacttgcaacagcag

SEQ ID NO: 26003 - DNA, 313 bp, Zea mays
  Clone ID: LIB3154-007-Q1-K1-D2
caaacccttaaccttatctaccttccaaacccctaaaaatcccgaccgacaccatgagggtggggctcgttgccctcgctctcctggctctcgctgcgagcgccacctccacgcatacaagcggcggctgcggctgccagccaccgccgccggttcatctaccgccgccggtgcatctgccacctccggttcacctgccacctccggtgcatctcccaccgccggtccacctgccgtcgccggtccacctgccaccgccggtccatgtgccgccgccggttcatttgccgtcgtcaccatgccactactctac

SEQ ID NO: 26004 - DNA, 369 bp, Zea mays
  Clone ID: LIB3154-007-Q1-K1-D6
ccacccgtccgattgagaccaacaagcatcattcaaagtgttttttagtaccaacaatcgagcatcagtggcgggcaatatattttcccttcttatgctccacgctctttccgcatgtgttgctaacgcgacaattttccctcaatgctcacaagctcctatagcttcccttcttcccacataccttccatcaatgatagcttcagtatgtgaaaacccagctcttcaaccctataggcttcaacaagcaattgcagcatgcaacatacctttatcacccttggttgaacaatctgcagccctatctttggtgcagtcattggtacaaaccatcacgtcacagtagctgcagcaactcttgctacctgt

SEQ ID NO: 26005 - DNA, 365 bp, Zea mays
  Clone ID: LIB3154-007-Q1-K1-D9
attgagaccaacaagcaacatagaaagtggtatacagtaccaacaatcgagcagcgggggcggccaatatattttccatccttatgctccttgctctttctgcatgtgttgctaacgcgaccatttttcctcaatactcacaagctcctatagctgcccttcttcccacataccttccatcaatgaccgcttcagtatgtgaaaacccatcccttcaaccctacaggcttcaacaagcaatcgcaacaagcaacttacctttatcacccctgttctttaaacaatcgccagccctatctttggtgcagtcattggtacaaaccatcagggcacaacagctgcatcaactcgtgctaccagtgatc

SEQ ID NO: 26006 - DNA, 404 bp, Zea mays
  unsure at all n locations
  Clone ID: LIB3154-007-Q1-K1-E11
ggtcttcagaccattagctttatctactccagagcgcagaagaacccgatcgacaccatgagggtgttgctcgttgccctcgctctcctggctctcgctgcgagcgccacctccacgcatacaagcggcggctgcggctgccagccaccgccgccggttcatctaccgccgccggtgcatctgccacctccggttcacctgccacctccggtgcatctcccaccgccggtccacctgccgccgccggtccacctgccaccgccggtccatgtgccgccgccggttcatctgccgccgccaccatgccactaccctactcaaccgccccggcctcagcctcatccccagccacacccatgcccgtgccaacagccgcatccaagcccgtgccagctgcanggaac

SEQ ID NO: 26007 - DNA, 250 bp, Zea mays
  Clone ID: LIB3154-007-Q1-K1-E12
atgcgcctgcggggctattttatagtgatactgaaacccaaattaatggcagtggctttacaactacaacactgggactaccatgacgttacccatcattaatcgtattgcagtagatgcacatttccctatctgcagctatagcgataacgaccagaccgatagcgattgccaatagctacacaacctcaatcgcaaatgcaacacgcactctagctgatcattaacctcaagcgcagtggttgttacg

SEQ ID NO: 26008 - DNA, 304 bp, Zea mays
  Clone ID: LIB3154-007-Q1-K1-E2
caaaaaaaaaaaaaaaaaaatataattaaaattttttttttttaaaaaaaaaaaaaaaaaggccggcccggtttaaaaaaaaaaaattttccaaacccaaccatccggcccccccgcttaaaaaaacccaaccctacaatcccttccatccaccgtcttattacatctataggaccaccaaaaaccaattcactgcccatctttataaaccttcatcacatgaaaaacccggccgttaccaaattaaataactttccaaaacatatctcttttcccaacagttttaaaaccaaaaaggcccaaa

SEQ ID NO: 26009 - DNA, 289 bp, Zea mays
  Clone ID: LIB3154-007-Q1-K1-E3
aatcagcaaagcgccagtccgtacagaggtttgtcgagcataacagcatgaagatggtcatcgatctcgtcgtgtgcctggctctgtcagctgccagcgcctgtgcaatgcagatgccctgcccctgcgcggcgctgcagggcttgtacggcgctggccccggcctgaccacgattatcggcgccgacgggctgtacccctacgcggagtacctgaggcagcctgagtgcagcccgctggcggcggctccctactacgcctgatgagggcagacgagcgccatgtacca

SEQ ID NO: 26010 - DNA, 391 bp, Zea mays
  Clone ID: LIB3154-007-Q1-K1-E5
gctttatctactccagagcgcagaagaacccgatcgacaccatgagggtgtcgctcgctggcggggctctcctggctctcgctgcgagcgccacctccacgcatacaagcggcggctgcggatgccagccaccggcggcggttcatctaccgccgccggtgcatctgccacctccggttcacctgccacctccggtgcatttcccaccgccggtccacctgccgccgccggtccacctgccaccgccggtccatgtgccgccgccggttcatctgccgccgccaccatgccactaccctactcaagcgactaggcctcagactcatcccgagccacacccatgcccgtgccaacagccggatccaagcccgtgccagctgcaaggaacctg

SEQ ID NO: 26011 - DNA, 351 bp, Zea mays
  Clone ID: LIB3154-007-Q1-K1-E6
agccttccgattgaaaccacctaccaccattcaaagccgttttgtgaaccaacaatcgccgtcaggctgttgggcctttttatgctttttggtcgctctgcaagtgctgctacggtcaccattgctccgaaatgctcgcaagctcctatagcttctctatttccgccggacctatcaccagcggtgtcttccgtatgtgaaaacccacttctacaacccttcaggatccaacaggcaattacagctggcgtgttacttttatcacccttgttcctacaacaatcatcagccctgttacatcacttaccttcggagcatttattggcacaaaagactacggctcatcaccta

SEQ ID NO: 26012 - DNA, 344 bp, Zea mays
  Clone ID: LIB3154-007-Q1-K1-E7
gaatacattagcaacaattgagcaacaatggcggccaaaatattttacatccttgggctgcttgctctttctgcatgtgttgctaacgcgaccatttttcctcaatactcacaagctcctatagctgcccttcttccgccatacctttcatcaatgaccgcttcagcatgtgaaaacccatcccttgaacactacacgcttcaacaagcaatcgcaacaagcaacttacctttatcacccgtgttctttcaacaatcgccagccctatcttcggcgcaatcattggtacaaaccatcagggcataacagctgcaacaactcgtgctaccagtgatcagccaact

SEQ ID NO: 26013 - DNA, 312 bp, Zea mays
  Clone ID: LIB3154-007-Q1-K1-E8
cagaccattaactctatctactccacagcgcagacaaacccgatcgacaccatgagggggttgctcgttgccctcgctctcctggctctcggtgagagcgccacctgcacgcatacaagcggcgggtgcagctgccagccaccgccgtctgttcatctaccgtcgacggtgcatttgacagctccggttaacctgcacacctccagtgcatatacgcaacgacaggcaactgccgccggcggttcacctgacaccatcggtccatgtgccgacgacggttcatctgatcgagccaccatgccaataccatac

SEQ ID NO: 26014 - DNA, 316 bp, Zea mays
  Clone ID: LIB3154-007-Q1-K1-E9
attcaaaataacaccaagcgaagctcactgtatacaacctaacaacactggctggggggagattatctctccttgcgcttcttgcgcttttcgcgagcgcagcaaatgcaacaatcataccagaatgttaagttgattctaattccattatttcacagttccttccaccagacatttcaatggtctgggaacacccaactgagcaagcctatctgctacaacaagcgattgccgcgagcgttgtacaataacaaatcgctctatgtcaacaccaattctaagctgatctaacaatacagaccatggcatcgtaaca

SEQ ID NO: 26015 - DNA, 353 bp, Zea mays
  Clone ID: LIB3154-007-Q1-K1-F1
tcgagccattgcagcaagcaacatacccttatcggccttggtggggcaaccaacggcaggcctatttttggggccagcaatgggtccaaacaatcagggcacaacagctgcagcaactcgtgctacctgtgatcaaccaagtagctctggcaaacctttctccctactctccgcaacaacaatttcttccattcaaccaactgtctacactgaaccctgctgcttatttgcagcaacaactattaccatttagccagctagctactgcctactctcaacaacaacaacttcttccatttaaccaattggccgcactgaaccccgctgcttatttgcagcagcaaatactacta

SEQ ID NO: 26016 - DNA, 350 bp, Zea mays
  Clone ID: LIB3154-007-Q1-K1-F11
aaaaaaaaaaaaaaaaaaaaaaaaaaatattttaaaaaaaaaaaaaaaaaaaaaaacaaaagggaaaatataaaaaaaacttaaacaaaaaaaaaaaaaaaaaaaatgaacaaaaaaaaaaaataaaaaaaataaaaaggggggggccttttaaaaggtccaaatttttttaccccttaattccaattttttatctttttttttgggcccccaaattccattcccttgcccgacctttaacaccgttggaactggaaaaaccttgggctccccaaattaatttcctttgaaaacattccctttttcacaaattgggttattacaaaaaaggcccccccgttctccctttc

SEQ ID NO: 26017 - DNA, 105 bp, Zea mays
  Clone ID: LIB3154-007-Q1-K1-F12
gacaacatccaacgcagcagtcatattttcaacaacgtcgcagcatgcgaggggctttgctcctagtgccacctgcaagcactgcaacagccaccattttacagc

SEQ ID NO: 26018 - DNA, 358 bp, Zea mays
  Clone ID: LIB3154-007-Q1-K1-F2
cgggacccacctaccaccttaaaaggcccatttttgtctcaacaatggcagccaaaatatttggcctccttatgctccttggtctttctgcaagtgctgctacggcgaccattttcccacaatgctcacaagctcctatagcttcccttcttcccccgtacctctcaccagcggtgtcttcggtatgtgaaaacccaattcttcaaccctataggatccaacaggcaatcgcagctggcatcttacctttatcacccttgttcctccaacaatcatcagccctattacagcagttacctttggtgcatttattggcacaaaacatcagggcacaacaactacaacaacttgtgctagc

SEQ ID NO: 26019 - DNA, 320 bp, Zea mays
  Clone ID: LIB3154-007-Q1-K1-F6
gcggaggttgtggctgccagacagcaccgtttgatataccgactgcgctgtatatgccgcctgcgttctatctgccggcgcagagcccgccgtagacatggcaataccgcattcaaccaccagaactaagcccgcgccagcagttccgatcctgcggccgcggtagcgtcagaaggccgttcctgggccagtgcgtaaagttgctgaggcaccagcgcagcccggaggtgacaccctacgactcgccacagtgccaggcgctgtgatagcagtgctgccaccagatcaagcaggtggagccgatgcacaggtaccaggcg

SEQ ID NO: 26020 - DNA, 56 bp, Zea mays
  Clone ID: LIB3154-007-Q1-K1-F7
aaaacaatcaacatgaaaagaggcttaccgtattaacaacaactcaacaacggggg

SEQ ID NO: 26021 - DNA, 268 bp, Zea mays
  Clone ID: LIB3154-007-Q1-K1-F8
caaacaataaaaaacactctaagcttagcgtattaaaaacaacaacaacaacatggggcaggggaatttgggggctttctttggctgacccacgcttacagacccggcaatacacggacatatctttccattagggtcacttaaatctaaatcactgatcgtacatttacaactacattgattgggaaaaccctgtctaacaccaactaaatcacctcgacatacatcaccattggcgcagatggagtaatttacaacagcctatcac

SEQ ID NO: 26022 - DNA, 342 bp, Zea mays
  Clone ID: LIB3154-007-Q1-K1-F9
cccacgcgtccgcgcaacccttgcagccccaatccctcacagcaaccatggctggcgcgcaggagtccctctctctggtgggcacgatgcgcggccacaacggcgaggtgacggcgatcgcgaccccgatcgacaactcgccgttcatcgtctcctcctcccgcgacaagtccctgctggtgtgggacctgaccaacccggtccactccaccccggaatccggcgccaccgccgactacggcgtccccttccgccgcctcaccggccactcccacttcgtccaggacgtcgtcctcagttccgacggccagttcgccctttccggctcctgggatggagagc

SEQ ID NO: 26023 - DNA, 309 bp, Zea mays
  Clone ID: LIB3154-007-Q1-K1-G1
cttcggagaccattaaccttatttacttcctaacgcaaaagaacccggaacaccccctgaagggtgtgggtggttgccctcgctctcctggctctggctgcgagcgccaactccacgcatccaacctgcagctgcggctggcagccaccaccgacggttcatctaccatcgacggtgcatctgccatctgcggtttacctgtcacctgcggtgcatcttgcatcgccggtccacctgccacctgcggtccacctgccaccggcggtccatgtgccatcggcggttcatctgtcatctgcaccatgccac

SEQ ID NO: 26024 - DNA, 57 bp, Zea mays
  Clone ID: LIB3154-007-Q1-K1-G10
gaccaacatccagcgcagcccgctcagttgttccaaaccaacgtccgcgcgcatgcg

SEQ ID NO: 26025 - DNA, 347 bp, Zea mays
  Clone ID: LIB3154-007-Q1-K1-G12
attttgagcattcagaaacacaccaagcgaagcacattagcaacaacctaacaacaatggctaccaagatattatccctccttgcgcttcttgcgctttttgcgagcgcaacaaatgcgttcattattccacaatgctcacttgctccaagttccattattacacagttcctcccaccagttacttcaatgggcttcgaacacccagctgtgcaagcctataggctacaacaagcaattgcggcgagcgtcttacaacaaccaatttcccagttgcaacaacaatccttggcacatctaacaatacaaaccatcgcaacgcaacagcaacaacaatttctaccagca

SEQ ID NO: 26026 - DNA, 308 bp, Zea mays
  Clone ID: LIB3154-007-Q1-K1-G2
acccactagccaccttaaaaggcccattagtgtaccaccaatggcagccaaaatatttggcgtccttatgctccttggtatttctgcaagtgctgctacggcgaccattttcccgcaatgctcacaagctcctatagcttcccttcttcccccgtacctctcaccagcggtgtcttcggtatgtgaaaacccaattcttcaaccctacaggatccaacaggcaatcgcagctggcatcttacctttatcacccttgttcctccaacaatcatcagccctattacagcagttacctttgggtgcattta

SEQ ID NO: 26027 - DNA, 408 bp, Zea mays
  Clone ID: LIB3154-007-Q1-K1-G3
cgccaacccggccacggatcggggctgccgtttgttgccgccggcgctggcgccgacaccgatgggctccgccgatcgcagtaagatcgacgggatcgtggtgccggagaaaggcgccaggagctgcgtcgaatgccgcgccaccaccacgcccatgtggcgcagtggcccgaccgggcccaggtcactttgcaacgcttgcgggattcggtaccgaaagaagaggaggcaagagcttggcctagaccacaataagcagcagcagcagcaacaacaaaataatggcgagacgaagactggagtaaaagacagctctagcaacagcagtagcagcgggagcagcaactttcacgtggtgcagaaacggaggctcctaatggaagtgaggaggctgctctgctgctgatg

SEQ ID NO: 26028 - DNA, 131 bp, Zea mays
  Clone ID: LIB3154-007-Q1-K1-G4
gaccaacatccagcgcagcccgctcagttgtatcccaccaacgtccgcgtgcatgcgatggcacctcatgctcctagtgccacctgaatgcactgcaccggccaccattttacagcaacgcgactgagcta

SEQ ID NO: 26029 - DNA, 353 bp, Zea mays
  Clone ID: LIB3154-007-Q1-K1-G6
gtcagactaacaattagctcatcgactccagattggacaactcgacaccatggaggtgctgatcgctgtccttgctctgctggcgctcgctagcagcgcctcctgcacaacaagcggctgctgttgctaccaaacaccaccgtatcatctaccgcctccgtattatatgccgcctccgtattatctgccgccgcagcagcagccgcaatcatggtaataccctaatcaaccaccgctaataagcccctaccagcagttatgatcctgcggcgtcagcagcgtcagcagcccgttcctgcaccactgcgtgtagttgctgaagcaccactgcaccccggcggcgacgtactact

SEQ ID NO: 26030 - DNA, 360 bp, Zea mays
  Clone ID: LIB3154-007-Q1-K1-G7
tgagcattcagaaacacaccaagcgaagcgcactagcaacgacctaacaacaatggctaccaagatattagccctccttgcgcttcttgccctttttgtgagcgcaacaaatgcgttcattattccacaatgctcacttgctcctagtgccattattccacagttcctcccaccagttacttcaatgggcttcgaacacctagctgtgcaagccaacatgcaacaacaagcgcttgcggcgagcgtcttacaacaaccaattgcccaattgcaacaacaatccttgccacatctaacaatacaagccatcacaacgcagcagcaacaacagttcctcccagcactgagccacctagccat

SEQ ID NO: 26031 - DNA, 393 bp, Zea mays
  unsure at all n locations
  Clone ID: LIB3154-007-Q1-K1-G8
tgagcattcagaaacacaccaagcgaagcgcactagcaacgacctaacaacaatggctaccaagatattagccctccttgcgcttcttgccctttttgtgagcgcaacaaatgcgttcattattccacaatgctcacttgctcctagtgccattattccacagttcctcccaccagttacttcaatgggcttcgaacacctagctgtgcaagccaacatgcaacaacaagcgcttgcggcgagcgtcttacaacaaaccaattgcccaattgcaacaacaatccttgccacatctaacaatacaagccatcacaacgcaacagcaacaacagttcctaccagcactgagccacctagccatggtgaaccctgccgnctacttgcaagagcagc

SEQ ID NO: 26032 - DNA, 358 bp, Zea mays; identical to SEQ ID NO: 19067
  Clone ID: LIB3154-007-Q1-K1-G9

SEQ ID NO: 26033 - DNA, 353 bp, Zea mays
  Clone ID: LIB3154-007-Q1-K1-H1
tccaatggaacccacttgccaccttaaaaggcccattgttttcccaccattggcagccaaaatatttggcctcctaatgctcctgggtctttctgcaagtgctgctacggcgaccattttcccgcaatgctcgcaagctcctatagcttcccttcttcccccgtacctctcaccagcggtgtcttcggtatgtgaaaacccaattcttcaaccctacaggatccaacaggcaatcgcagctggcatcttacctttatcacccttgttcctccaacaatcatcagccctattacaacagttacctttggtgcatttattggcacaaaacatcagggcacaacaactacaacaac

SEQ ID NO: 26034 - DNA, 334 bp, Zea mays
  unsure at all n locations
  Clone ID: LIB3154-007-Q1-K1-H2
ntccgccaccaagcaaaataaaagggggattccagtaccaccattagaccaccaatggcgaccaagagattgtccctccttatgctcctggctctttctgcatgtgttgctaacgcgacaattttccctcaatgctcacaagctcctatagcttcccttctttccccataccttccatcaatgatagcttcagtatgtgaaaacccagctcttcaaccctataggctccaacaagcaatcgcagcaagcaacatacctttatcacccttgtttcaacaatcgccagccctatctttggtgcagtcattggtacaaaccatcagggcacagcagc

SEQ ID NO: 26035 - DNA, 331 bp, Zea mays
  Clone ID: LIB3154-007-Q1-K1-H4
atttgcactcatgcatcacaaaacatccttctatcagtaccatcaatcatcattcatcttagtagtataggcaccaaatcaaatctgcaacatcaattatctaactccaaaaaccatgaagctggtgcttgtggttcttgctttcattgctttagtatcaagtgtttcttgtacacagacaggcggctgcagctgtggtcaacaacaaagccatgagcagcaacatcatccacaacaacatcatccacaaaaacaacaacatcaaccaccaccacaacatcaccagcagcagcaacaccaacaacaacaagttcacatgcaaccacaaaaa

SEQ ID NO: 26036 - DNA, 112 bp, Zea mays
  Clone ID: LIB3154-007-Q1-K1-H7
catcattggtggtgccctcttttagattgcttattagatgtaattcaataataaagttttttggatgatgtatgtggccaaccagaaataaaaagttacatttccagattct

SEQ ID NO: 26037 - DNA, 348 bp, Zea mays
  unsure at all n locations
  Clone ID: LIB3154-008-Q1-K1-A1
caacaagcaacatagaaagtggaatccagtatcaacaatagagcaacaatggagaccaagatattttccctccttatgctccttgctctttctacatgtgttgctaacgcgacaattttccctcaatgctcacaagctcctatagcttccctttttcccccataccttccatcaattatagcttcagtatgtgaaaacccagctcttcaaccatataggcttcaacaagcaatcgcagcaagcaacatacctttatcgcccttgttgtgtcaacaatcgccagccctatctttggtgcagtcattggtacaaaccatcanggcacaacagctgcagcaactcgtgcta

SEQ ID NO: 26038 - DNA, 285 bp, Zea mays
  Clone ID: LIB3154-008-Q1-K1-A10
gaccattagctttatctactccagagcgcagaagaacccgatcgacaccatgagggtgttgctcgttgccctcgctctcctggctctcgctgcgagcgccacctccacgcatacaagcggcggctgcggctgccagccaccgccgccggttcatctaccgccgccggtgcatctgccacctccggttcacctgccacctccggtgcatctcccaccgccggtccacctgccgccgccggtccacctgccaccgccggtccatgtgccgccgccggttcatctgcc

SEQ ID NO: 26039 - DNA, 301 bp, Zea mays
  Clone ID: LIB3154-008-Q1-K1-A2
gctttatctactccagagcgcagaagaacccgatcgacaccatgagggtgttgctcgttgccctcgctctcctggctctcgctgcgagcgccacctccacgcatacaagcggcggctgcggctgccagccaccgccgccggttcatctaccgccgccggtgcatctgccacctccggttcacctgccacctccggtgcatctcccaccgccggtccacctgccgccgccggtccacctgccaccgccggtccatgtgccgccgccggttcatctgccgccgccaccatgccactaccctac

SEQ ID NO: 26040 - DNA, 381 bp, Zea mays
  Clone ID: LIB3154-008-Q1-K1-A3
gatcagcaaagcggcagggcgtaaagaggatcgtcgaacagaacagcatgaagatggtcatcgttctcgtcgtgtgcctggctctgtcagctgccatcgcctctgcaatgcagatgccctgcccctgcgcggggctgcagggcttgtacggcgctggcgccggcctgacgacgatgatgggcgccggcgggctgtacccctacgcggagtacctgaggcagccgcagtgcagcccgctggcggcggcgccctactacgccgggtgtgggcagacgagcgccatgtaccagccgctccggcaacagtgctgccagcagcagatgaggatgatggacgtgcagtccgtcgcgcagcagctgcagatgatgatgcacattgagc

SEQ ID NO: 26041 - DNA, 397 bp, Zea mays
  Clone ID: LIB3154-008-Q1-K1-A4
gaccaactagcaacatagaaagcacaatagtgtaccaacaatggcagccaaaatattttgccgccttatgctccttggtctttctgcaagtgctgctacggcgaccattttcccgaaatgctcgcaagctcctatagcttcccttcttcccccgtacctctcaccagcggtgtcttcggtatgtgaaaacccaattcttcaaccctacaggatccaacaggcaatcacagctggcatcttacctttatcacccttgttcctccaacaatcatcagccctattacatcagttacctttggtgcatttattggcacaaaacatcagggcacaacaactacaacaacttgtgctagcaaaccttgctgcctactctcagcaacagcagtttcttccattc

SEQ ID NO: 26042 - DNA, 384 bp, Zea mays
  unsure at all n locations
  Clone ID: LIB3154-008-Q1-K1-A6
aactagcaacatagaaagcacaatagtgtaccaacaatggcagctaaaatattttgcctccgtatgctccttggtctttctgcaagtgctgctacggcgaccattttcccacaatgctcacaagctcctatagcttcccttcttcccccgtacctctcaccaacggtgtcttcggtatgtgaaaacccaattcttcaaccctacaggatccaacaggcaatcgcagctggcatcttacctttatcacccttgttcctccaacaatcatcagccctattacagcagttacctttggtgcatttattggcacaaaacaatagggcacaacaactacaacaactngtgctagcaaaccttgctgcctactctcagcaacagcagttt

SEQ ID NO: 26043 - DNA, 399 bp, Zea mays
  Clone ID: LIB3154-008-Q1-K1-A8
gagcattcagaaacacaccaagcgaagcgcactagcaacgacctaacaacaatggctaccaagatattagccctccttgcgcttcttgccctttttgtgagcgcaacaaatgcgttcattattccacaatgctcacttgctcctagtgccattattccacagttcctcccaccagttacttcaatgggcttcgaacacctagctgtgcaagccaacatgcaacaacaagcgcttgcggcgagcgtcttacaacaaccaattgcccaattgcaacaacaatccttgccacatctaacaatacaagccatcacaacgcaacagcaacaacagttcctaccagcactgagccacctagccatggtgaaccctgccgcctacttgcaagagcagctgcttgca

SEQ ID NO: 26044 - DNA, 399 bp, Zea mays
  Clone ID: LIB3154-008-Q1-K1-B1
gatcgatcgaggcacaagcccaacaacctctctctcgctctctctctctctatccgtgactgccatggagccgccggcgagctttctgcgcgaccaaggcggcggaggaggagcagaggagcaaagcggcacccagctggagcacgaggaggatgtcccctgcgtgctggacatgttcgtgcacgaggcgcggggcacccacaagaccatccgcgtctacggggaccaccaggacgtgtacgcgaggctggcgctgacgtcggcgcccgacgccggcgccagcgcgcgcctcggcgagcgcctcccgccactgcgcgtcgcccgcggaaggctggccgaggacgtgctcaagtgcgagctctggatgcgcagcggtggcgtcccggacgaccagctcct

SEQ ID NO: 26045 - DNA, 246 bp, Zea mays
  Clone ID: LIB3154-008-Q1-K1-B12
cttcttcccatcatttttggtgccctcttttagattccagatgagttatagttcaatactaaaattttctgtctgctgtctgcggcttcccataaattaaatagccttgttcccacttcaaaataactagagaaaccctgttcaaaaacaaatttatgaactttcaacaacaacattttttctctaattaggatattttctaataatctctaaaacaatttttgagggccgcccctttaaaaagtt

SEQ ID NO: 26046 - DNA, 403 bp, Zea mays
  Clone ID: LIB3154-008-Q1-K1-B3
gcaacatagaaagtggaatacagtatcaacaatagagctacaatggcggccaagatattttgcatccttatgctccttgctctttctgcatgtgttgctaacgcgaccatttttcctcaatactcacaagctcctatagctgcccttcttcccccataccttccatcaatgaccgcttcagtatgtgaaaacccagcccttcaaccctacaggctccaacaagcaatcgcaacaagcaacttacctttatcacccctgttctttcaacaatcgccagccctatctttggtgcagtcattggtacaaaccatcagggcacaacagctgcagcaactcgtgctaccagtgatcagccaagtagctctggcaaacctttctccctactctcagcaacaacaatttt

SEQ ID NO: 26047 - DNA, 362 bp, Zea mays
  Clone ID: LIB3154-008-Q1-K1-B4
gcaaattgcaccaagaaatccatcgagaggccgtcgacaggggaattaatggcgtcgtcgtgtagcagcagccaccgtcgcctcatcctcgcagccgccggcctgctctccgtgctcgcggctgccagcgccagcgccgggacctcctgcgtgccggggtgggccatcctgcacaacccgctcccgagctgccgatggtacgtgaccagccggacctgcggcatcaggccgagcctcccgtggccggagctgaagaggagatgctgccgggagctggcggacatcccggcgtactgccggtgcacggcgctgagcatcctcatggacggcgcgatcccgccgggcccggacgcgcagctgga

SEQ ID NO: 26048 - DNA, 206 bp, Zea mays
  Clone ID: LIB3154-008-Q1-K1-B5
attttcagcattcagaaacacaccaagcgaagcgcactagcaacaacctaacaacaatggctgccaagatattagccctccttgcgcttcttgcccttttagtgagcgcaacaaatgcgttcattattccacagtgctcacttgctcctagtgccattattccacagttcctcccaccagttacttcaatgggctttgaaacatca

SEQ ID NO: 26049 - DNA, 390 bp, Zea mays
  Clone ID: LIB3154-008-Q1-K1-B6
gctttatctactccagagcgcagaagaaccctatcgacaccatgagggtgttgctcgttgccctcgctctcctggctctcgctgcgagcgccacctccacgcatacaagcggcggctgcggctgccagccaccgccgccggttcatctaccgccgccggtgcatctgccacctccggttcacctgccacctccggtgcatcttccaccgccggtccacctgccgccgccggtccacctgccaccgccggtccatgtgccgccgccggttcatctgccgccgccaccatgccactaccctactcaaccgcccaggcctaagcctgatccccagccacacccatgctcgtgccaacagccgtattcaagcccgtgccagctgtatggaacct

SEQ ID NO: 26050 - DNA, 394 bp, Zea mays
  Clone ID: LIB3154-008-Q1-K1-B7
caactagcaacatagaaagcacaatagtgtaccaacaatggcagctaaaatattttgcctccttatgctccttggtctttctgcaagtgctgctacggcgaccattttcccacaatgctcacaagctcctatagcttcccttcttcccccgtacctctcaccaacggtgtcttcggtatgtgaaaacccaattcttcaaccctacaggatccaacaggcaatcgcagctggcatcttacctttatcacccttgttcctccaacaatcatcagccctattacagcagttacctttggtgcatttattggcacaaaacatcagggcacaacaactacaacaacttgtgctagcaaaccttgctgcctactctcagcaacagcagtttcttccattc

SEQ ID NO: 26051 - DNA, 399 bp, Zea mays
  Clone ID: LIB3154-008-Q1-K1-B8
caactagcaacatagaaagcacaatagtgtaccaacaatggcagctaaaatattttgcctcggtatgctccttggtctttctgcaagtgctgctacggcgaccattttcccacaatgctcacaagctcctatagcttcccttcttcccccgtacctctcaccaacggtgtcttcggtatgtgaaaacccaattcttcaaccctacaggatccaacaggcaatcgcagctggcatcttacctttatcacccttgttcctccaacaatcatcagccctattacagcagttacctttggtgcatttattggcacaaaacatcagggcacaacaactacaacaacttgtgctagcaaaccttgctgcctactctcagcaacagcagtttcttccattcaacca

SEQ ID NO: 26052 - DNA, 402 bp, Zea mays
  Clone ID: LIB3154-008-Q1-K1-C1
cagaaacacaccaagcgaagcgcactagcaacgacctaacaacaatggctaccaagatattagccctccttgcgcttcttgccctttttgtgagcgcaacaaatgcgttcattattccacaatgctcacttgctcctagtgccattattccacagttcctcccaccagttacttcaatgggcttcgaacacctagctgtgcaagccaacatgcaacaacaagcgcttgcggcgagcgtcttacaacaaccaattgcccaattgcaacaacaatccttgccacatctaacaatacaagccatcacaacgcaacagcaacaacagttcctaccagcactgagccacctagccatggtgaaccctgccgcctacttgcaagagcagctgcttgcatccaacccac

SEQ ID NO: 26053 - DNA, 396 bp, Zea mays
  Clone ID: LIB3154-008-Q1-K1-C3
attttgagcattcagaaacacaccaagcgaagcacattatcaacaacctaacaacaatggctgccaagatattatccctccttgcgcttcttgcgctttttgcgagcgcaacaaatgcgtccattattccacaatgctcacttgctcctagttccattattccacagttcctcccaccagttacttcaatggccttcgaacacccagctgtgcaagcctataggctacaacaagcgattgcggcgagcgtcttacaacaaccaattgcccaattgcaacaacaatccttggcacatctaacaatacaaaccatcgcaacgcaacagcaacaacagttcctaccagcactgagccacctagccatggtgaaccctgtcgcctacttgcaacagcagc

SEQ ID NO: 26054 - DNA, 388 bp, Zea mays
  Clone ID: LIB3154-008-Q1-K1-C4
agaccaactagcaacatagaaagcacaatagtgtaccaacaatggcagccaaaatattttgcctccttatgctccttggtctttctgcaagtgctgctacggcgaccattttcccgaaatgctcgcaagctcctatagcttcccttcttcccccgtacctctcaccagcggtgtcttcggtatgtgaaaacccaattcttcaaccctacaggatccaacaggcaatcacagctggcatcttacctttatcacccttgttcctccaacaatcatcagccctattacatcagttacctttggtgcatttattggcacaaaacatcagggcacaacaactacaacaacttgtgctagcaaaccttgctgcctactctcagcaacagcagtt

SEQ ID NO: 26055 - DNA, 399 bp, Zea mays
  Clone ID: LIB3154-008-Q1-K1-C5
agcaaagcggcagtgcgtagagaggatcgtctaacagaacagcatgaagatggtcatcgttctcgtcgtgtgcctggctctgtcagctgccagcgcctctgcaatgcagatgccctgcccctgcgcggggctgcagggcttgtacggcgctggcgccggcctgacgacgatgatgggcgccggcgggctgtacccctacgcggagtacctgaggcagccgcagtgcagcccgctggcggcggcgccctactacgccgggtgtgggcagacgagcgccatgtaccagccgctccggcaacagtgctgccagcagcagatgaggatgatggacgtgcagtccgtcgcgcagcagctgcagatgatgatgcagcttgagcgtgccgctgccgccagcagcag

SEQ ID NO: 26056 - DNA, 401 bp, Zea mays
  Clone ID: LIB3154-008-Q1-K1-C7
tagctgttgatacaaagagaagggaatggccgagataaccctagagccgagtgatcttatggcgcaaacaaacaaaagaatagtgccaaagttcactgaaatcttccccgtggaggacgcgaactacccttacagcgccttcatcgcgtcggtccggaaagacgtgatcaaacactgcaccgaccataaagggatcttccagcccgtgctgccaccggagaagaaggtcccggagctatggttctacacagagctcaaaactaggaccagctccatcacgctcgccatacgcatggacaacctgtacctcgtgggcttcaggaccccgggcggtgtgtggtgggagttcggcaaggacggcgacacccacctcctcggcgacaaccccaggtggctcggct

SEQ ID NO: 26057 - DNA, 272 bp, Zea mays
  Clone ID: LIB3154-008-Q1-K1-D10
atctttaccatcaattatctttcatcttagtagtataggcgccagttcaattctgcaacatcaattatctaactccaaaaaccatgaagctggtgcttgtggttcttgctttcattgctttagtatcaagtgtatcttgttcacagacaggcggctgctactgtggtcaacaacaaagccatgcgctgcaacatcatccacaacttcattatccactaaaacaactacatcaaccaccacctcaacatcacctgctgttgctactccaacaa

SEQ ID NO: 26058 - DNA, 278 bp, Zea mays
  Clone ID: LIB3154-008-Q1-K1-D11
cccaacaccacctctcctgctatctccgtagcctccggggcgtcgagcatctatcatgtctgcctactgcagaaagtacaacgatgagcccatcaagaatgctgcctacattgacacccctagcatgggtatccttgctgctaatgactccactggcaccattggctagcgcctttccagcatcaatgtcaagaacgttgaagagaaccgacgcaccctacctgagctcctattctgctgccctggtgctctgcagtacatcaaccgtgtgatcctat

SEQ ID NO: 26059 - DNA, 286 bp, Zea mays
  Clone ID: LIB3154-008-Q1-K1-D12
cagatcagcaaagcggcagtgcgtagagaggatcgtcgaacagaacagcatgaagatggtcatcgttctcgtcgtgtgcctggctctgtcagctgccagcgcctctgcaatgcagatgccctgcccctgcgcggggctgcagggcttgtacggcgctggcgccggcctgacgacgatgatgggcgccggcgggctgtacccctacgcggagtacctgaggcagccgcagtgcagcccgctggcggcggcgccctactacgccgggtgtgggcagacgagcgccatg

SEQ ID NO: 26060 - DNA, 400 bp, Zea mays
  Clone ID: LIB3154-008-Q1-K1-D2
attagctttatctactccagagcgcagaagaacccgatcgacaccatgagggtgttgctcgttgccctcgctctcctggctctcgctgcgagcgccacctccacgcatacaagcggcggctgcggctgccagccaccgccgccggttcatctaccgccgccggtgcatctgccacctccggttcacctgccacctccggtgcatctcccaccgccggtccacctgccgccgccggtccacctgccaccgccggtccatgtgccgccgccggttcatctgccgccgccaccatgccactaccctactcaaccgccccggcctcagcctcatccccagccacacccatgcccgtgccaacagccgcatccaagcccgtgccagctgcagggaacctgcggcg

SEQ ID NO: 26061 - DNA, 407 bp, Zea mays
  Clone ID: LIB3154-008-Q1-K1-D3
agcaagcgctgctacctcgacttttattccacaatgctcacaacaatacctctctccggcgacagccgtgggatttcaatacccaactatacaatcctacatggtacaagaggccatccaagcaagcatcttacggtcattagcattaaccctccaacaaccatatgctctattgcaacagccatccttagtgcatctgtatctccaaagaatcgcggcacaacaactacaacaacagttgctaccaacaatcaatcaagtagttgcagcgaaccttgctgcttacctccagcaacaacagtttcttccattcaatcaactagatggggtgaaccctgctatctacttgcaggcacaacagctactaccatttaaccaacttgtcgggagcccttatgccttcttac

SEQ ID NO: 26062 - DNA, 400 bp, Zea mays
  Clone ID: LIB3154-008-Q1-K1-D5
tggacgtcagcctagcaattagctcatcgactccagattggagaactcgacaccatgaaggtgctgatcgttgcccttgctctcctggcgctcgctgcgagcgccgcctccagtacaagcggcggctgtggctgccagacaccaccgtttcatctaccgcctccgttctatatgccgcctccgttctatctgccgccgcagcagcagccgcagccatggcaataccccactcaaccaccgcagctaagcccgtgccagcagttcggatcctgcggcgtcggcagcgtcggcagcccgttcctgggccagtgcgtcgagttcctgaggcaccagtgcagcccggcggcgacgccctacggctcgccacagtgccaggcgctgcagcagcagtgctgccacc

SEQ ID NO: 26063 - DNA, 393 bp, Zea mays
  Clone ID: LIB3154-008-Q1-K1-D7
ggccgccatcccgcagctcatggagatggtggaggacgtgcagatcgttctgctgggcacgggcaagaagaagttcgagcgcatgctcatgagcgccgaggagaagttcccaggcaaggtgcgcgccgtggtcaagttcaacgcggcgctggcgcaccacatcatggccggcagccgacgtgctcgccgtcaccagccgcttcgagccctgcggccttatccagctgcaggggatgcgatacggaacgccctgcgcctgcgcgtccaccggtggactcgttgacaccatcatcgaaggcaagaccgggttccacatgggcctcctcagcgtcgactgtaacgtcgtggagccggcggacgtcaagaaagagggcaccacattgcagcgcgcca

SEQ ID NO: 26064 - DNA, 397 bp, Zea mays
  Clone ID: LIB3154-008-Q1-K1-D8
agaaagcacaatagtgtaccaacaatggcagtcaaaatattttgcctccttatgctccttgggatttctgcaagtgctgctacggcgaccattttcccgcaatgctcacaagctcctatagcttcccttcttcccccgtacctctcaccagcggtgtcttcggtatgtgaaaacccaattcttcaaccctacaggatccaacaggcaatcgcagctggcatcttacctttatcacccttgttcctccaacaatcatcagccctattacagcagttacctttggtgcatttattggcacaaaacatcagggcacaacaactacaacaacttgtgctagcaaaccttgctgcctactctcagcaacagcagtttcttccattcaaccaaactgctgcat

SEQ ID NO: 26065 - DNA, 406 bp, Zea mays
  Clone ID: LIB3154-008-Q1-K1-E1
gcaacatagaaagcacaatagtgtaccaacaatggcagctaaaatattttgcctccttatgctccttggtctttctgcaagtgctgctacggcgaccattttcccacaatgctcacaagctcctatagcttcccttcttcccccgtacctctcaccaacggtgtcttcggtatgtgaaaacccaattcttcaaccctacaggatccaacaggcaatcgcagctggcatcttacctttatcacccttgttcctccaacaatcatcagccctattacagcagttacctttggtgcatttattggcacaaaacatcagggcacaacaactacaacaacttgtgctagcaaaccttgctgcctactctcagcaacagcagtttcttccattcaaccaactagctgcattg

SEQ ID NO: 26066 - DNA, 284 bp, Zea mays
  Clone ID: LIB3154-008-Q1-K1-E10
cgcaaattgcaccatgaaatccatcgagagcccgtcgacgggggaattaatggcgtcgtcgtctagcaccatccaccgccgcctcatcctcgcagccgccgtcctgctctccgtgctcgcggctgccagcgccagcgccgggacctcctgcgtgccggggtgggccatcccgcacaacccgctccctagctgccgctggtacgtgaccagccggacctgcggcatcgggccgcgcctcccgtggccggagctgaagaggagatgctgccgggagctggcggaca

SEQ ID NO: 26067 - DNA, 277 bp, Zea mays
  Clone ID: LIB3154-008-Q1-K1-E11
tgggtcttcagaccattagctttatctactccagagcgcagaagaacccgatcgacaccatgagggtgttgctcgttgccctcgctctcctggctctcgctgcgagcgccacctccacgcatacaagcggcggctgcggctgccagccaccgccgccggttcatctaccgccggcggtgcatctgccacctccggttcacctgccacctccggtgcatctcccaccgccagtccacctgccgacgccggtccacctgccaccgacggtccatgtgcc

SEQ ID NO: 26068 - DNA, 285 bp, Zea mays
  Clone ID: LIB3154-008-Q1-K1-E12
ggacttcagcctagctattagctcatcgactccagattggggaactcgacaccatgaaggtgctgatcgttgcccttgctctcctggcgctcgctgcgagcgccacctccagtacaagcggcggctgtggctgccagacaccaccgtttcatctaccgcctccgttctatatgccgcctccgttctatctgccgccgcagcagcagccgcagccatggcaataccccactcaaccaccgcagctaagcccgtgccagcagttcggatcctgcggcgtctgcagcg

SEQ ID NO: 26069 - DNA, 403 bp, Zea mays
  Clone ID: LIB3154-008-Q1-K1-E3
gcaacatagaaagcacaatattgtaccaataatggcagccaaaatattttgcctcattatgctccttggtctttctgcaagtgctgctacggcgagcattttcccgcaatgctcacaagctcctatagcttcccttcttcccccatacctctcaccagcgatgtcttcagtatgtgaaaatccaattcttctaccctacaggatccaacaggcaatcgcagcaggcatcttacctttatcacccttgttcctccaacaatcatcagccctattacagcagttacctttggtgcatttattggcacaaaacatcagggcacaacaactacaacaactcgtgctagcaaaccttgctgcctactctcagcaacagcagttacctttggtgcatttgttggcacaa

SEQ ID NO: 26070 - DNA, 367 bp, Zea mays
  unsure at all n locations
  Clone ID: LIB3154-008-Q1-K1-E4
tgagaccaactagcaacatagaaagcacaatattgtaccaacaatggcagccaaaatattttgcctccttatgctccttggtctttctgcaagtgctgctacggcgaccattttcccgaaatgctcgcaagctcctatagcttcccttcttcccccgtacctctcaccagcggtgtcttcggtatgtgaaaacccaattcttcaaccctacaggatccaacaggcaatcacagctggcatcttacctttatcacccttgttcctccaacaatcatcagccctattacatcagttacctttggtgcatttattggcacanaacatcanggcacaacaactacaacaacttgtgctagcaaaccttgct

SEQ ID NO: 26071 - DNA, 400 bp, Zea mays
  Clone ID: LIB3154-008-Q1-K1-E5
gcaattagctcatcgactccagattggagaactcgacaccatgaaggtgctgatcgttgcccttgctctcctggcgctcgctgcgagcgccgcctccagtacaagcggcggctgtggctgccagacaccaccgtttcatctaccgcctccgttctatatgccgcctccgttctatctgccgccgcagcagcagccgcagccatggcaataccccactcaaccaccgcagctaagcccgtgccagcagttcggatcctgcggcgtcagcagcgtcggcagcccgttcctgggccagtgcgtcgagttcctgaggcaccagtgcagcccggcggcgacgccctacggctcgccacagtgccaggcgctgcagcagcagtgctgccaccagatcatgcaagtg

SEQ ID NO: 26072 - DNA, 336 bp, Zea mays
  Clone ID: LIB3154-008-Q1-K1-E6
attgagaccacatcgcaagatgaatcgaggtttcccatcccagcaacagcgccggcgggggggtcatgatattttacgttcttatgcttctcggtctgtgtggatgacgcgacaacgctacaataatgcttacatgctcacaaacttctattgcttccctcattcctccattccatgaatgcttgattacgtagaaaatccaaaaacccaactctataaccctatacgcgcaaacacgcaatgcaacatagctacatcactctatcaccaataatcgaacactctatcttcgtatctgtcatgcggacatagcaacaaaccacagcggctcagcaa

SEQ ID NO: 26073 - DNA, 287 bp, Zea mays
  Clone ID: LIB3154-008-Q1-K1-E9
aacacaccaagcgaagcgcactagcaacaacctaacaacaatggctaccaagatattagccctccttgcgcttcttgcccttttagtgagcgcaacaaatgcgttcattattccacagtgctcacttgctcctagtgccattattccacagttcctcccaccagttacttcaatgggcttcgaacatccagccgtgcaagcctacaggctacaactagcgcttgcggcgagcgtcttacaacaaccaattgcccaattgcaacaacaatccttggcacatctaaacc

SEQ ID NO: 26074 - DNA, 98 bp, Zea mays
  Clone ID: LIB3154-008-Q1-K1-F1
aaaaaaaaaaaaaaaaaaaaaaaaaaaaaaaatataaaaaataaaaaaaaaaaaaaaaaaaaaagaaaaaaaaaaaaaaaaaaaaaaaaaaaaaaaag

SEQ ID NO: 26075 - DNA, 287 bp, Zea mays
  Clone ID: LIB3154-008-Q1-K1-F10
attgagaccaactagcaacatagaaagcacaatagtgtaccaacaatggcagccaaaatattttgcctccttatgctccttggtctttctgcaagtgctgctacggcgaccattttcccgaaatgctcgcaagctcctatagcttcccttcttcccccgtacctctcaccagcggtgtcttcggtatgtgaaaacccaattcttcaaccctacaggatccaacaggcaatcacagctggcatcttacctttatcacccttgttcctccaacaatcatcagccctatt

SEQ ID NO: 26076 - DNA, 288 bp, Zea mays
  Clone ID: LIB3154-008-Q1-K1-F11
gagcattcagaaactcaccaagcgaagcgcactagcaacggcctatcaacaatggctaccaagatattatccctccttgcgcttcttgcgctttttgcgagcgcaacaaatgcgtccattattccacaatgctcacttgctcctagttccattattccacagttcctcccaccagttacttcaatggccttcgaacacccagctgtgcaagcctatatgctacaacaagcgattgcggcgagcgtcttacaacaaccaattgtccaattgcaacaacaatccttggca

SEQ ID NO: 26077 - DNA, 286 bp, Zea mays
  Clone ID: LIB3154-008-Q1-K1-F12
attgagaccaactagcaacatagaaagcacaatagtgtaccaacaatggcagccaaaatattttgcctccttatgctccttggtctttctgcaagtgctgctacggcgaccattttcccgaaatgctcgcaagctcctatagcttcccttcttcccccgtacctctcaccagcggtgtcttcggtatgtgaaaacccaattcttcaaccctacaggatccaacaggcaatcacagctggcatcttacctttatcacccttgttcctccaacaatcatcagccctat

SEQ ID NO: 26078 - DNA, 383 bp, Zea mays
  Clone ID: LIB3154-008-Q1-K1-F3
gagaccaacaagcaacatagaaagtggaatctagtagcaacaatagagcaacaatggcgaccaagatattttccctccttatgctccttgctctttctgcatgtgttgctaacgcgacaattttccctcaatgctcacaagctcctatagcttcccttcttcccccataccttccatcaatgatagcttcagtatgtgaaaacccagctcttcaaccctataggctccaacaagcaatcgcagcaagcaacatacctttatcacccttgtttcaacaatcgccagccctatctttggtgcagtcattggtacaaaccatcagggcacagcaactgcagcaactcgtgctacctgtgatcaaccaagtagctttggcaaacctt

SEQ ID NO: 26079 - DNA, 401 bp, Zea mays
  Clone ID: LIB3154-008-Q1-K1-F6
agaccattagctttatctactccagagcgcataagaacccgatcgacaccatgagggtgttgctcgttgccctcgctctcctggctctcgctgcgagcgccacctccacgcatacaagcggcggctgcggctgccagccaccgccgccggttcatctaccgccgccggtgcatctgccacctccggttcacctgccacctccggtgcatctcccaccgccggtccacctgccgccgccggtccacctgccaccgccggtccatgtgccgccgccggttcatctgccgccgccaccatgccactaccctactcaaccgccccggcctcagcctcatccccagccacacccatgcccgtgccaacagccgcatccaagcccgtgccagctgcagggaacctgc

SEQ ID NO: 26080 - DNA, 197 bp, Zea mays
  Clone ID: LIB3154-008-Q1-K1-F7
ataccaaatcgctagcctacactttatattttattaagcccactcgcccccacaagggaggtgttggttttcctatagggcctgccaataccaactcactccccatccattcatacaaacggcactggaaacacactgccatttcctatcttaaatccatcgacacacatgcatttttcaccttctgatgaaataac

SEQ ID NO: 26081 - DNA, 389 bp, Zea mays
  Clone ID: LIB3154-008-Q1-K1-G5
agaccaactagcaacatagaaagcacaatagtgtaccaacaatggcagccaaaatattttgcttccttatgctccttggtctttctgcaagtgctgctaccgcaaccattttcccacaatgctcacaagctcctatagtttcctttcttcccccatacctctcaccagcggtgtcttcagtatgtgaaaacccaattcttcaaccctacaggatccaacaggcaatcgcagcaggcatcttacctttatcacccttgttcctccaacaaccgtcagccctattacagcagttacctttggtgcatttgttggcacaaaacatcaaggcacaacaactacaacaacttgtgctaggaaaccttgctgcctactctcagcaacagcagttt

SEQ ID NO: 26082 - DNA, 400 bp, Zea mays
  unsure at all n locations
  Clone ID: LIB3154-008-Q1-K1-G7
attgataccaactagcaacatacatagtgaagtacactagcaacatcttagcaccaatgggagccaagatttttgccctccttgccctccttgctctttcagcaagcgctgctacctcgacttttattccacaatgctcacaacaatacctctctccggcgacagccgtgggatttcaatacccaactatacaatcctacatggtacaagaggccatccaagcaagcatcttacggtcattagcattaaccctccaacaaccatatgctctattgcaacagccatccttagtgcatctgtatctccaaagaatcgcggcacaacaactacaacaacagttgctaccaacaatcaatcaagtagttgcagcgaaccttgctgcttacctncagcaacaaca

SEQ ID NO: 26083 - DNA, 255 bp, Zea mays
  Clone ID: LIB3154-008-Q1-K1-H12
gcaaaccagaacagcgtagagaggatccgcaaacaggagggccggacaaagcaccttgaacacggccagcgccctcctctggcacctggcaccgcctgctgccagcacatgccctacgcatacgccctgccccagcgctgggacggcgctctcgcacggctcacgaccatgactgacgacgacgatcggcacccgcacgctgtacccctacgccaagcacatgacacacccgtagcgcaggccgcctactacggc

SEQ ID NO: 26084 - DNA, 381 bp, Zea mays
  Clone ID: LIB3154-008-Q1-K1-H3
aactagcaacatagaaagcacaatagtgtaccaacaatggcagccaaaatattttgcttccttatgctccttggtctttctgcaagtgttgctaccgcaaccattttcccacaatgctcacaagctcctatagcttcccttcttcccccatacctctcaccagcggtgtcttcaatgtgtgaaaacccaattgttcaaccctacaggatccaacaggcaatcgcaacaggcatcttaccattatcacccttgttcctccaacaaccgtcagccctattacagcagttacctttggtccatttggtggcacaaaacatcagggcacaacaactacaacaacttgtgctagcaaaccttgctgcatactctcagcaacatcag

SEQ ID NO: 26085 - DNA, 242 bp, Zea mays
  Clone ID: LIB3154-008-Q1-K1-H5
taccaactagcaacatacatagtgaagtacactagcaacatcttagcaccaatgggagccaagatttttgccctccttgccctccttgctctttcagcaagcgctgctacctcgacttttattccacaatgctcacaacaatacctctctccggcgacagccgtgggatttcaatacccaactatacaatcctacatggtacaagaggcatccaagcaagcatcttacgggcattagcatta

SEQ ID NO: 26086 - DNA, 359 bp, Zea mays
  unsure at all n locations
  Clone ID: LIB3154-008-Q1-K1-H6
gcgnaccaactaccaacacacatanttttggactttaacaacatcttancaccaatggcagccagtattttttcccttcttgccctccttactctttcagcaagcgcttttacctcaacttttattccacaatgctcacaacaatacctctctacggtgacagccgtgggatttcaatacccaactatacaatcctacatggtacaagaggccatccaagcaagcatcttacggtcattagcattaaccctctaacaaccatatgctctattgcaacaatcatccttagtgcatttgtttcttcaaagaatcgttgcacatacaactacaacaacagtagctaccaacaattaattaag

SEQ ID NO: 26087 - DNA, 401 bp, Zea mays
  Clone ID: LIB3154-008-Q1-K1-H7
attttcagcattcagaaacacaccaagcgaagcgcactagcaacaacctaacaacaatggctgccaagatattagccctccttgcgcttcttgcccttttagtgagcgcaacaaatgcgttcattattccacagtgctcacttgctcctagtgccattattccacagttcctcccaccagttacttcaatgggcttcgaacatccagccgtgcaagcctacaggctacaactagcgcttgcggcgagcgtcttacaacaaccaattgcccaattgcaacaacaatccttggcacatctaaacctacaaaccatcgcaacgcaacagcaacaacagtttctgccatcactgagccacctagccgtggtgaaccctgtcgcctacttgcaacagcagctactt

SEQ ID NO: 26088 - DNA, 331 bp, Zea mays
  Clone ID: LIB3154-008-Q1-K1-H8
acttgaacattcaaaaactcatcaagcatatctcactcaccacaacctaacaacaatcgctgaaaattttttatccttccttgcactttctgccctcaagactatctccacaaatgcttatattactctacacagatcaatttctcatattgccaacatcacacagattttaataccagtcacttcaatgggttatgaacaaccagaccctcaagcctacaatctacaactaattatcattaatagcgtattaaatctaccaattatttaatcactaaaactaagcttgttacatttaaacctacataccatctcaacagatccaacacca

SEQ ID NO: 26089 - DNA, 379 bp, Zea mays
  unsure at all n locations
  Clone ID: LIB3154-010-Q1-K1-A7
acgcgtccgaactagcaacatagaaagcacaatagtgtaccaacaatgcagccaanatatttgcctcttatgctcttgtcttctgaaggctgtacgggacatttcgactgctaaactctatgctcctcttcccgccttacacgggttcggtggaaccatctcaccttagaccacagcatgagtgcattacttatcacctgtctcacaatatagctatcagagtacttgggcttatcgacaacataggccacacacacaactggttcaacctgtgcacctagacacagtctcatcacaatagtgatgacttgtctattgacacacacacatcagcagtactgtgctcncagattctcatcacactgcagttacttctgta

SEQ ID NO: 26090 - DNA, 305 bp, Zea mays
  Clone ID: LIB3154-010-Q1-K1-A8
tcccggtcacccacgcgtcgggacgcgtggggccatggagaaccctccgagcatcctatgactcccatggctccggccatgtcggcgcagttcacaagaatcaccttcagcaacctgtttgtccgtcgggctggcccaggcagcacggagctgaccgtggagggaaggccatccgaccagctgggcaggagaaacctcactgacagccccgtatttgacggccgtggccctgacgccagcctcgtggctcgcgtacagggagtcgctacccagatgggcgacgtgcgccagttgtacaccgtcgt

SEQ ID NO: 26091 - DNA, 394 bp, Zea mays
  unsure at all n locations
  Clone ID: LIB3154-010-Q1-K1-B1
cgtncgatggagaccaactagcaacatagaaagcacaatagtgtaccaaccaatggcagccaaaatatttgcctccttatgctccttggtctttctgcaagtgctgctacggcgaccattttcccgaaatgctcgcangctcctatagcttcccttcttcccccgtacctctcaccagcggtgtcttcggatgtgaaacccaattttaaccctcaggaccacaggaatacagtgcattaccttatacctgtctcacaatatagctatcatagtccttgtgctatgccaacataggcacactcacactggctcactgtctcttagacaggtctcatacactgtgtgattgttatgaacacacacatacagtctgtctccagatttcatacatgaa

SEQ ID NO: 26092 - DNA, 228 bp, Zea mays
  Clone ID: LIB3154-010-Q1-K1-B4
attattccacagtgctcacttgctcctagtgccattattccacagttcctcccaccagttacttcaatgggcttcgaacatccagccgtgcaagcctacaggctacaactagcgcttgcggcgagcgtcttacaacaaccaattgcccaattgcaacaacaatccttggcacatctaaacctacaaaccatcgcaacgcaacagcaacaacagtttctgccatcactg

SEQ ID NO: 26093 - DNA, 324 bp, Zea mays
  unsure at all n locations
  Clone ID: LIB3154-010-Q1-K1-B6
gagaccaactagcaacatagaaagcacaatagngnaccaacacaggcagccaaaatattttgcctccttatgctccttggtctttctgcaagtgctgctacggcgaccatgttcccgaaatgctcgcaagctcctatagcttcccttcttcccccgtacctctcaccagcggtgtcttcggtattgaaaacccaattttcaccctaaggatcaacagcatacagtggatttacttataccctgtctcacatatagctatacatagtcttgggctatgccaacatagaacactcaactggagaactgtgtcttaacagattcata

SEQ ID NO: 26094 - DNA, 261 bp, Zea mays
  unsure at all n locations
  Clone ID: LIB3154-010-Q1-K1-B7
caactagcaacatagaaagcacaatagtgtaccaacaatggcagccaaaatattntgcctccttatgctccttggtctttctgcaagtgctgctacggcgaccattttcccgaaatgctcgcaagctcctatagcttcccttcttcccccgtacctctcaccagcggtgtcttcggtatgtgaaaacccaattcttaaccctacggatccaaaggcatacagtggatttacttataccctgtctaacatatagctatacat

SEQ ID NO: 26095 - DNA, 417 bp, Zea mays
  unsure at all n locations
  Clone ID: LIB3154-010-Q1-K1-C3
ttattccacaatgctcactcgctccaagttccattattacacagttcctcccaccagttacttcaatgggcttcgaacacccagctgtgcaagcctataggctacaacaagcaattgctgcgagcgtcttacaacaaccaatttctcagttgcaacaacaatccttggacatctacaatactaccatcgaacgcacagcacaacaattctaccagactgaccacctagcatggtgaccctgccgctacttgaacagcagtgcttgataaacccacttgctctggcaacgagttgaaaccagcacacaacagctgaacagttctgcagcgctagcaactagcctggtgaccctgccgctacctacacagcaacaactgctttaattagcccgctcgctgnggcaatgcacctacatac

SEQ ID NO: 26096 - DNA, 62 bp, Zea mays
  unsure at all n locations
  Clone ID: LIB3154-010-Q1-K1-C4
acgcgtncgccaactagcaacatagaaagcacaatagtgtaccaacaatggcagctaaaata

SEQ ID NO: 26097 - DNA, 472 bp, Zea mays
  unsure at all n locations
  Clone ID: LIB3154-010-Q1-K1-C7
annnccagcatncagaaacacaccaagcgaagcgcactagcaacaacctaacaacaatggctaccaagatattagccctccttgcgcttcttgcccttttagtgagcgcagcagatgcgttcattattccacagtgctcacttgctcctagtgccattattccacagttcctcccaccagttacttcaatgggcttcgaacatccagccgtgcaagcctacaggctacaactagcgctggcggcgagcgtcttacaacaaccaattgcccaattgcaacaacaatccttggcacatctaaacctacaaaccatcgcaacgcaacagcaacaacagtttctgccatcactgagccacctagccgtggtgaaccctgtcgcctacttgcaacagcagctactngcatccaacccacttgctctggcgaacgtagctgcataccagcaacaacaacgtctgcaacagtttatgcc

SEQ ID NO: 26098 - DNA, 94 bp, Zea mays
  Clone ID: LIB3154-010-Q1-K1-D5
gacgcgccctgtacgccataagcgcggggtgtggggtaccgcacggaccgtacatgcaggctaccccgtcttgttttcttctttgcagcgcgtt

SEQ ID NO: 26099 - DNA, 67 bp, Zea mays
  Clone ID: LIB3154-010-Q1-K1-D8
cggcgtctgagatccagctacgtacgctgcatgcacgtcatactctctatagtgcacctaaatcaat

SEQ ID NO: 26100 - DNA, 379 bp, Zea mays
  unsure at all n locations
  Clone ID: LIB3154-010-Q1-K1-E1
acgcgtncgtgtttagatcgcgagcggccgccttttttttttttttttttttttttgaatcgaagttgacataatctatagctacatgaaacgcagtcgtttttgttcacgcgcaagataccctagatttacatgtcagtggatcggagcacagccaacaagcacatatgctgcgtaatgcaggaaaggacctacttggtttcagtacacaaaagcacacagcggactggtagtctagcgagagtcgatccaagatctgaagaactcgtggagctatttggtgtgtggaggaatcataaaagggctactgattgcgttacctaagctagatctgttagaagctataactgcaaaactaaacctgagattctagatctac

SEQ ID NO: 26101 - DNA, 274 bp, Zea mays
  unsure at all n locations
  Clone ID: LIB3154-010-Q1-K1-E3
acanaacccatccatcattntagctgttgatacaaagagaagggaatggccgagataaccctagagccgagtgatcttatggcgcanacaaacaaaagaatagtgccaaagttcactgaaatcttccccgtggaggacgcgaactacccttacagcgccttcatcgcgtcggtccggaaagacgtgatcaaacactgcaccgaccataaagggatcttccagcccgtgctgccaccggagaagaaggtcccggagctatggtttacacagagct

SEQ ID NO: 26102 - DNA, 182 bp, Zea mays
  Clone ID: LIB3154-010-Q1-K1-E4
ctactatactatactctaggaagcaaggacaccaccgccatggcagccaagatgctcgcattgttcgctctcctagctgcttgtgcaagcgccactagtgcgacccatattccacggcacttgccaccagtcatgccattgggtaccatgaacccatgcatgcagtactgcatgatgcaaca

SEQ ID NO: 26103 - DNA, 346 bp, Zea mays
  Clone ID: LIB3154-010-Q1-K1-E7
aacacaccaagcgaagcgcactagcaacaacctaacaacaatggctaccaagatattagccctccttgcgcttcttgcccttttagtgagcgcaacaaatgcgttcattattccacagtgctcacttgctcctagtgccattattccacagttcctcccaccagttacttcaatgggcttcgaacatccagccgtgcaagcctacatgctacaactagcgcttgcggcgagcgtcttacaacaaccaattgcccaattgcaacaacaatccttggcacatctaaacctacaaaccatcgcaacgcaacagcaacaacagtttctgccatcactgagccacctagcc

SEQ ID NO: 26104 - DNA, 219 bp, Zea mays
  unsure at all n locations
  Clone ID: LIB3154-010-Q1-K1-E8
accgcgactattattccacaatgctcacaacaatacctctctccggtgacagccgcgagattngaatacccaactatacaatcctacaggctacaagaggccatcacagcaggcatcttacggtcgttagcattgactgtccaacaaccatatgccctatngcaacaaccatccttagtgaatctatatctncaaagaatncgcagacaacaactacaa

SEQ ID NO: 26105 - DNA, 304 bp, Zea mays
  unsure at all n locations
  Clone ID: LIB3154-010-Q1-K1-F1
gccacgcgtcgagacatagcttattactnagagcgcagaaaacccgacgacaccatgagggtgtgctcgttgcctcgctctcctgctctcgctggagcccacctcacgcatacaagcggcggtgcggctgcagccaccgccgccggtcatctaccgccgccgggcatctgccacctccggttcacctgccacctccggtgcatctcccaccgccggtccacctgccgccgccggtccacctgccaccgccggtccatgtgccgccgccggttcatctgccgccgccaccatgccactaccctac

SEQ ID NO: 26106 - DNA, 115 bp, Zea mays
  Clone ID: LIB3154-010-Q1-K1-F3
acgcgccctgtacggccattaacgcggggtgtggggtaccgcacgtgccgtacattgcaggcctacgccgtctttgttcttcttcttttgcagtcgcgcttcccgaagttaatgg

SEQ ID NO: 26107 - DNA, 462 bp, Zea mays
  unsure at all n locations
  Clone ID: LIB3154-010-Q1-K1-F5
tgagcattcagaaacacaccaagcgaagctacctagcaacgacttaacaacaatggctaccaagatattagccctccttgcgcttcttgcccttnttgtgagcgcaacagatgcgttcattattccacaatgctcacttgctcctagtgccattataccacagttcctccgaccagttacttcaatgggcttcgaacacctagctgtgaagcctaaggctcaaaagcgctggggaggctacacaccataacaatgaacacaatctggcattacatcaacatgacacacagacacagtcacacatgacatgagggactgcctatgacaaggtgtcacatgttgaagctgtcacacacacatgaagttgaggtatatactggactcctacaaaacactgtattacttgtggatgctctctacacatggcatgcattgtatgtggaactgtcatgaatgtataca

SEQ ID NO: 26108 - DNA, 437 bp, Zea mays
  unsure at all n locations
  Clone ID: LIB3154-010-Q1-K1-F6
attgagtaccaactagtcaacattagaaagcacaatagntgtactcaacaagtggcnnagctaaaatatttttgctctcncnnntatgctccttcggtncatttctgcaaangtgcctgcgtacgnngcgactcatttttctccaccaatggcttcacatagctctctattagcttccacttcttcccccgtacctctcaccaacggtgtcttcggtatgtgaaaacccaatcttaaccctacggaccaacggaatcgactggctttacttatacctgtctccatataccataacagtcttggatatgcaaatagcacatcaatgtgacttctataaagttatacatttatttttaaaatctacttttctcaattatacatatattttagaattctcattgacttcttaacattctcctcatgctataatttaatta

SEQ ID NO: 26109 - DNA, 200 bp, Zea mays
  unsure at all n locations
  Clone ID: LIB3154-010-Q1-K1-G2
attcagaaacacaccaagcgaagcgcactagcaacaacctaacaacaatggctaccaagatattatccctccttgcgcttcttgcgctntntgcgagcgcaacanatgcgtccattattccacaatgctcacttgctcctagttccattattccacagttcctcccaccagttacttcaatggccttcgaacacccagct

SEQ ID NO: 26110 - DNA, 317 bp, Zea mays
  unsure at all n locations
  Clone ID: LIB3154-010-Q1-K1-G3
aggacgcgtggcgtttgagcattcagaaacacaccaagcgaagcacattagcaacaacctaacaacaatggctaccaagatatgatccctccttgcgcttcttgcgcttgttgcgagcgcaacanatgcgttcattattccacaatgctcactagctccaagttccattattacacagttcctcccaccagttacttcaatgggcttcgaacacccagctgtgcaagcctataggctacaacaagcaattgcggcgagcgtcttacaacaaccaatttcccagttgcaacaacaatcctttgcacatctaacaatac

SEQ ID NO: 26111 - DNA, 226 bp, Zea mays
  unsure at all n locations
  Clone ID: LIB3154-010-Q1-K1-G4
cacgcgtnncgatgagaccaacangcaacatagaaagtggaatacagtagcaacaatagagcaacaatggcggccaagatattttccatccttatgctccttgctctntctgcatgtgttgctaacgcgaccattttttcctcaatactcacaagctcctatagctgcccttcttccnccataccttccatcaatgaccgcttcagtatgtgaaaacccagccctt

SEQ ID NO: 26112 - DNA, 366 bp, Zea mays
  unsure at all n locations
  Clone ID: LIB3154-010-Q1-K1-G5
cagcattcagaaacacaccaagcgaagcgcactagcaacaacctaacaacaatggctaccaagatattagccctccttgcgcttcttgcccttttagtgagcgcaacanatgcgttcattattccacagtgctcacttgctcctagtgccattattccacagttcctcccaccagttacttcaatgggcttcgaacatccagccgtcaagcctcaggctcaacagcgctgggcagcgttacacaccaatgcaatgacacaatctgccattactaaacatgaccacacacacagttgctatacacaccgggactgcctatgacacactatgatcacatgttgcacggtgtcacacacacgtgaatat

SEQ ID NO: 26113 - DNA, 299 bp, Zea mays
  unsure at all n locations
  Clone ID: LIB3154-010-Q1-K1-G8
caacaagcaacatagaaagtggaatccagtagcaacaatagagcaacaatggcgaccaagatattttccctccttatgctccttgctctntctgcatgtgttgctaacgcgacaattttccctcaatgctcacaagctcctatagcttcccttcttcccccataccttccatcaatgatagcttcagtatgtgaaaacccagctcttcaaccctataggctccaacaagcaatcgcagcangcaacatanccttatcaccctngtttcaacaatcgccagccctatctttggtgcagtc

SEQ ID NO: 26114 - DNA, 289 bp, Zea mays
  unsure at all n locations
  Clone ID: LIB3154-010-Q1-K1-H2
cgccgccacgcgtcgggtcttagacatagcttatcactcagagcgcagaaaacccgtcgcaccatgaggggttgctcgtgcctgctctcctggcttcgtgnagcgcagctcaccatacaacggcggtgggctgcagccaccgcgcggtcattaccgccgcggtgcatctgcacctcggttacctgcacctccggtcatctccaccgcggtcacctgccgcgccggccacctgcaccgccggccatgtgccgccgcggtcatctgccgccgcaccatgccactaccctac

SEQ ID NO: 26115 - DNA, 324 bp, Zea mays
  unsure at all n locations
  Clone ID: LIB3154-010-Q1-K1-H4
atgctcctgtcttctgcaaggctgctcggnaccatttcgcgcatgtcgaagctctatgcttcctcttccccgacctctcaccagcggtgtctcggttgtgaaacccaattcttcaaccctcaggatcaacaggcaatncagctggcatctaccttatcaccctgtcctcaacaatatcagcctatacaacagtaccttggtgcattatgcacnaacatatggccncaactacacaactggcagcnacctgctgctacttagcacagagttcttcatcaccacangtcatgacttgtctattgacacacactcatagcagtctgt

SEQ ID NO: 26116 - DNA, 389 bp, Zea mays
  unsure at all n locations
  Clone ID: LIB3154-010-Q1-K1-H8
agcaacatagaaagcacaatagngnnaccaacaaggcagnccaaaaatnnngcctccnnangctcctnggncnnnctgcaagtgctgctacggcgaccattttcccgaaatgctcgcaagctcctatagcttcccttcttcccccgtacctctcaccagcggtgtcttcggtatgtgaaaacccaattcttcaaccctacggatcaacaggcaatacagctggcatttacttataccctngttctcaaaatatcagctatacatattacttgtgattatgcacaaaatcaggaacactcacactggtacaactgtgctattagacaagtctcatacacactatgattgttatgaacaataatacatcttgtccaattatacatgatatt

SEQ ID NO: 26117 - DNA, 410 bp, Zea mays
  Clone ID: LIB3154-011-Q1-K1-A10
ctcgcatgcctgtgcacttctccatcaccaccactgggtcttcagaccattagctttatctactccagagcgcagaagaacccgatcgacaccatgagggtgttgctcgttgccctcgctctcctggctctcgctgcgagcgccacctccacgcatacaagcggcggctgcggctgccagccaccgccgccggttcatctaccgccgccggtgcatctgccacctccggttcacctgccacctccggtgcatctcccaccgccggtccacctgccgccgccggtccacctgccaccgccggtccatgtgccgccgccggttcatctgccgccgccaccatgccactaccctactcaaccgccccggcctcagcctcatccccagccacacccatgcccgtgccaacagcc

SEQ ID NO: 26118 - DNA, 416 bp, Zea mays
  Clone ID: LIB3154-011-Q1-K1-A11
gcacaatagtgtaccaacaatggcagctaaaatattttgcctccttatgctccttggtctttctgcaagtgctgctacggcgaccattttcccgcaatgctcgcaagctcctatagcttcccttcttcccccgtacctctcaccagcggtgtcttcggtatgtgaaaacccaattcttcaaccctacaggatccaacaggcaatcgcagctggcatcttacctttatcacccttgttcctccaacaatcatcagccctattacaacagttacctttggtgcatttattggcacaaaacatcagggcacaacaactacaacaacttgtgctagcaaaccttgctgcctactctcagcaacagcagtttcttccattcaaccaactaggttcattgaactctgcttcttatttgcaac

SEQ ID NO: 26119 - DNA, 418 bp, Zea mays
  Clone ID: LIB3154-011-Q1-K1-A12
tatgtatttgcactcatgcatcacaaaacatccttctatcagtaccatcaatcatgattcatcttagtagtataggcaccaaatcaaatctgcaacatcaattatctaactccaaaaaccatgaagctggtgcttgtggttcttgctttcattgctttagtatcaagtgtttcttgtacacagacaggcggctgcagctgtggtcaacaacaaagccatgagcagcaacatcatccacaacaacatcatccacaaaaacaacaacatcaaccaccaccacaacatcaccagcagcagcaacaccaacaacaacaagttcacatgcaaccacaaaaacatcagcaacaacaagaagttcatgttcaacaacaacaacaacaaccgcagcaccaacaacaacaacaacaacagcaccaac

SEQ ID NO: 26120 - DNA, 403 bp, Zea mays
  Clone ID: LIB3154-011-Q1-K1-A3
attttaagcattcaaaaccacaccaagcgaagcgcactaccaacaacctaacaacaatggctaccaagatattagccctccttgcgcttcttgcccttttagtgagcgcaacaaatgcgttcattattccacagtgctcacttgctcctagtgccattattccacagttcctcccaccagttacttcaatgggcttcgaacatccagccgtgcaagcctacaggctacaactagcgcttgcggcgagcgtcttacaacaaccaattgcccaattgcaacaacaatccttggcacatctaaacctacaaaccatcgcaacgcaacagcaacaacagtttctgccatcactgagccacctagccgtggtgaaccctgtcgcctacttgcaacagcagctacttgc

SEQ ID NO: 26121 - DNA, 162 bp, Zea mays
  Clone ID: LIB3154-011-Q1-K1-A8
gtgactgtgcaaagcagtgcagtatatgtaggtgaagggggtgctatcgattcgttcattctttgtacgcgatgtcgatttatttacctcaatcgaaatatttgttcgtggcattccagatgggaagtggcccaatataattgagtctgaaaacgtgcgccc

SEQ ID NO: 26122 - DNA, 413 bp, Zea mays
  Clone ID: LIB3154-011-Q1-K1-A9
caacaacaacaacagcaccaacaacaacatcaatgtgaaggccaacaacaacatcaccaacaatcacaaggccatgtgcaacaacacgaacagagccatgagcaacaccaaggacagagccatgagcaacaacatcaacaacaattccagggtcatgacaagcagcaacaaccacaacagcctcagcaatatcagcagggccaggaaaaatcacaacagcaacaatgtcattgccaggagcagcaacagactacaaggtgcagctataactactatagcagtagctcaaatctaaaaaattgtcatgaattcctaaggcagcagtgcagccctttggtaatgccttttctccaatcacgtttgatacaaccaagtagctgccaggtattgcagcaacaatgttgtcatgatct

SEQ ID NO: 26123 - DNA, 246 bp, Zea mays
  Clone ID: LIB3154-011-Q1-K1-B1
ggtccggaatgcccaagccttcgggtctagaacgggagccggccgttttaaaggttccagcttaccttccccttccttccaaggtattactttttttttggggcaacttaaatcaaattaattggcggcggtttaccacctcgtgacctggaaaacccttgcggtacccaacttaattggcttggaacacaatccccttttggcaggttgcgttataaccaaaaaggcccgaacgatcggcctttc

SEQ ID NO: 26124 - DNA, 404 bp, Zea mays
  Clone ID: LIB3154-011-Q1-K1-B10
attggtggagccctctagcagatttcttatgagatataggccaacaatcacgtgcgtgatatgatgtatgtggcttcccagaaataataaagtccatttctaaaccgaaaaaaaacaacaaaaagactgaaaaaacggcgcggccgacctaacgaaccaagcttacatacccttccatgctacgcagtagctgtaatatcgaggaacctaaatccagttcactctccgcaacatttacaacatcctgactggaaaaacccacgcgctccccaacttaacattaatcgcgcacattcccgtttctacacccagcgtaacagctaaaatggccagcccgatagcccttgctaacagttgttcatcctgaatggctaatggcacgcgccctgtatcggcccattaag

SEQ ID NO: 26125 - DNA, 381 bp, Zea mays
  Clone ID: LIB3154-011-Q1-K1-B11
ggaccattagatcaatatatttaagaacgcaaaagaacacaatagacagcatgagggcgttgcggggtggcttggctctcttggttttcggtgtgagcgtgacatcgacacatacaagcatacgatgggggtgtgaggcagcgacgcagggtcatctactgatgtaggtgcatctgtgaatttgggatcacctgttaacttgggagcatctgtgaatgtcggaccacctgtcgacgtgggtccacctgtcaacgtgggaccatgtgccgatgtgcgttcatctgttgatgtgacgatgccactatgctactaaactactcaagcgtcagggtcatagccagatacacagatgcacgtgtgaacaggcgaatagaagcatgt

SEQ ID NO: 26126 - DNA, 408 bp, Zea mays
  Clone ID: LIB3154-011-Q1-K1-B3
gaccaactagcaacatagaaagcacaatagtgtaccaacaatggcagccaaaatattttgcttccttatgctccttggtctttctgcaagtgttgctaccgcaaccattttcccacaatgctcacaagctcctatagcttcccttcttcccccatacctctcaccagcggtgtcttcaatgtgtgaaaacccaattgttcaaccctacaggatccaacaggcaatcgcaacaggcatcttaccattatcacccttgttcctccaacaaccgtcagccctattacagcagttacctttggtccatttggtggcacaaaacatcagggcacaacaactacaacaacttgtgctagcaaaccttgctgcatactctcagcaacatcagtttcttccattcaaccaactggc

SEQ ID NO: 26127 - DNA, 375 bp, Zea mays
  unsure at all n locations
  Clone ID: LIB3154-011-Q1-K1-B5
caccttaaaaggcccattattgtcccaccattggcagccaaaatattgggcctcctaatgctcctgggtatttctgcaagtgctgctacggcgaccattttcccgcattgctcacaagctcctatagcttcccttcttcccccgtacctctcaccagcggtgtcttcggtatgtgaaaacccaattcttcaaccctacaggatccaacaggcaatcgcagctggcatcttacctttatcacccttgttcctccaacaatcatcagccctattacagcagttacctttggtgcatttattggcacaaaacatcanggcacaacaactacaacaacttgtgctagcaaaccttgctgcctactctcagcaacagcag

SEQ ID NO: 26128 - DNA, 385 bp, Zea mays
  Clone ID: LIB3154-011-Q1-K1-B7
cagaaacacaccaagcgaagcacattatcaacaacctaacaacaatggctaccaagatattatccctccttgcgcttcttgcgctttttgcgagcgcaacaaatgcgttcattattccacaatgctcacttgctccaagttccattattacacagttcctcccaccagttacttcaatgggcttcgaacacccagctgtgcaagcctataggctacaacaagcaattgcggcgagcgtcttacaacaaccaatttcccagttgcaacaacaatccttggcacatctaacaatacaaaccatcgcaacgcaacagcaacaacaattcctaccagcactgagccacctagccatggtgaaccctgccgcctacttgcaacagcagtt

SEQ ID NO: 26129 - DNA, 410 bp, Zea mays
  Clone ID: LIB3154-011-Q1-K1-B8
caactagcaacatacatagtgaagtacagtagcaacatcttagcaccaatggcaggcaagatttttgccctccttgccctccttgctctttcagcaagtgttgctaccgcgactattattccacaatgctcacaacaatacctctctccggtgacagccgcgagatttgaatacccaactatacaatcctacaggctacaagaggccatcacagcaagcatcttacggtcgttagcattgactgtccaacaaccatatgccctattgcaacaaccatccttagtgaatctatatctccaaagaatcgcagcacaacaactacaacagcagttgcttccaacaatcaatcaagtagttgcagcgaaccttgctgcttacctccagcaacaacaatttcttccattcaatca

SEQ ID NO: 26130 - DNA, 416 bp, Zea mays
  Clone ID: LIB3154-011-Q1-K1-C10
cgcaaattgcaccaagaaatccatcgagaggccgtcgacaggggaattaatggcggggtcgtctagcagcagccaccgccgcctcatcctcgcagccgccgtcctgctctccgtgctcgcggctgccagcgccagcgccgggacctcctgcgtgccggggtgggccatcccgcacaacccgctcccgagctgccgctggtacgtgaccagccggacctgcggcatcgggccgcgcctcccgtggccggagctgaagaggagatgctgccgggagctggcggacatcccggcgtactgccggtgcacggcgctgagcatcctcatggacggcgcgatcccgccgggcccggacgcgcagctggagggccgcctagaggacctgccgggctgcccgcgggaggtgcagaggggattcg

SEQ ID NO: 26131 - DNA, 396 bp, Zea mays
  Clone ID: LIB3154-011-Q1-K1-C12
gctttatctactccagagcgcagaagtacccgatcgacaccatgagggtgttgctggttgccctcgctctcctggctctcgctgcgagcgccacctccacgcatacaagcggcggctgcggctgccagccaccgccgccggttcatctaccgccgccggtgcatctgccacctccggttcacctgccacctccggtgcatctcccaccgccggtccacctgccggggccggttcagcggccaccgccggtccatgtgcctcctccgggtcatctgccgccgccaccaggccactaccctactcaacctccccttcctcatcctcattcccagccacacccatgctcgtgccaacagccgtattcaagcctttgccagctgcagggaacctgctgcg

SEQ ID NO: 26132 - DNA, 153 bp, Zea mays
  Clone ID: LIB3154-011-Q1-K1-C4
agccttcggaattattttggcggcttatatgaaaaaccaacgccttaaaacgaccccaaccgaacggtccaggcccaaccggatgggcaatggaacctgcccaacccgcttcggtttcttctttccccgccggccaatggcggcccctttttg

SEQ ID NO: 26133 - DNA, 415 bp, Zea mays
  unsure at all n locations
  Clone ID: LIB3154-011-Q1-K1-C5
gcaccatacatagtgaagtccagaaccaccattttaccaccaatggcagccaagattttggcgctccttgccctccttgctctttcagcaagtgttgctaccgcaactattattccacaatgctcacaacaatacctatctacggtgacagccgcgagatttgaatacccaactatacaatcctacaggctacaagaggccatcacagcaagcatcttacggtcgttagcattgactgtgcaacaaccatatgccctattgcaacaaccatccttagtgaatctatatctccaaagaatcgcagcacaacaactacaacagcagttgcttccaacaatcaaatcaagtagttgcagcgaaccctgctgcttacctncagcaacaacaatttcttccattcaatcaactaacctgg

SEQ ID NO: 26134 - DNA, 388 bp, Zea mays
  Clone ID: LIB3154-011-Q1-K1-C6
ccaactagcaccatagaaggcacattattgtcccaacaatggcagccaaaatatttggcttccttatgctccttggtctttctgcaagtgctgctaccgcaaccattttcccacaatgctcacaagctcctatagcttcctttcttcccccatacctctcaccagcggtgtcttcagtatgtgaaaacccaattcttcaaccctacaggatccaacaggcaatcgcagcaggcatcttacctttatcacccttgttcctccaacaaccgtcagccctattacagcagttacctttggtgcatttgttggcacaaaacatcaaggcacaacaactacaacaacttgtgctaggaaaccttgctgcctactctcagcaaacagcagtttc

SEQ ID NO: 26135 - DNA, 411 bp, Zea mays
  Clone ID: LIB3154-011-Q1-K1-C7
caactagcaacatacatagtgaagtacactagcaacatcttagcaccaatgggagccaagatttttgccctccttgccctccttgctctttcagcaagcgctgctacctcgacttttattccacaatgctcacaacaatacctctctccggcgacagccgtgggatttcaatacccaactatacaatcctacatggtacaagaggccatccaagcaagcatcttacggtcattagcattaaccctccaacaaccatatgctctattgcaacagccatccttagtgcatctgtatctccaaagaatcgcggcacaacaactacaacaacagttgctaccaacaatcaatcaagtagttgcagcgaaccttgctgcttacctccagcaacaacagtttcttccattcaatcaa

SEQ ID NO: 26136 - DNA, 417 bp, Zea mays
  Clone ID: LIB3154-011-Q1-K1-D12
attttgagcattcagaaacacaccaagcgaagcgcactagcaacgacctaacaacaatggctaccaagatattagccctccttgcgcttcttgccctttttgtgagcgcaacaaatgcgttcattattccacaatgctcacttgctcctagtgccattattccacagttcctcccaccagttacttcaatgggcttcgaacacctagctgtgcaagccaacatgcaacaacaagcgcttgcggcgagcgtcttacaacaaccaattgcccaattgcaacaacaatccttgccacatctaacaatacaagccatcacaacgcaacagcaacaacagttcctaccagcactgagccacctagccatggtgaaccctgccgcctacttgcaagagcagctgcttgcatccaacccacttg

SEQ ID NO: 26137 - DNA, 391 bp, Zea mays
  unsure at all n locations
  Clone ID: LIB3154-011-Q1-K1-D3
gctacagcaagccgtgcttccttcttgacacaacaacagttgctgccgttctaccagcagttggcggctaaccccgcaaccctcttacaactacaacaattgttgccctttgtccaacttgctttgacaaacccagcagcctcctaccaacaacacatcattggtggtgccctcttttagattgcttattagatgtaattcaataataaagttttttggatgatgtatgtggccaaccagaaataaaaagttacatttccagattcttaannnaaaaanaaaaaaaaaaaaaaaaaaaaaaaaaaaaaaaaaaaaaaaaaaaaaaaaaaaaaaaaaaaaaaaaaaaaaaaaaaaaatttttttttttttnnaaaaaaaaaaaaaaaaataa

SEQ ID NO: 26138 - DNA, 231 bp, Zea mays
  Clone ID: LIB3154-011-Q1-K1-D4
tcgggcacatttttaactttctgaagcctagggagccagggcaccgccggcaagggagccgaaatggttgcattggtagctcttctagctatttgcgcaagcgccactcatgtgacccatattttagggcccttgccaccaattgtgcccatgggtaccatgaaaccatgcctgcaggactgacaggggccacacgggcttgtcagctttatggcccttacgctcctgaaa

SEQ ID NO: 26139 - DNA, 319 bp, Zea mays
  Clone ID: LIB3154-011-Q1-K1-D9
gccagatgctgggaacctgcgtcgagttcatgacgcataacctgagccagagcgtgaagttctagtggtatcatcacagccagacggtgacgccctactgttggcatcagctcaagcaggtgcagccgcagtaccgccaccagctgatgtaggtgtagccgctgcaccgcatccaggagatcttggcgtagagcctccagttcatgctgctgcagcaggcgcaaatcgcgcagcaactgacgctgatgtgcgggctgatagagcagaatctgagcgcgaactgtggtctgcacgatgcgactcacatgcacatactatg

SEQ ID NO: 26140 - DNA, 412 bp, Zea mays
  Clone ID: LIB3154-011-Q1-K1-E10
actagatctagagcgggcgctgtcgatgtagcagattcacgctcacgtgcgcgcgcatgcaaagttatagtattgcgataccgaaacctaaattaatggcagtggccgtacaactacaacactgggactgccaaaaccctgccgaaaccaatcttaatggactagatgcacatttcgctttctggagttgtagtaataaggaacaggccgatagcgattgccattactaacacatgctcaatctgaatggggactggcactctccctgtacattaacatcaagcgctgtggttgttacgctcaccctcaccgttacagttgcaattgccatagcgctagctcctgttgctttctttcctttctttctcgtcatggtcacgtgctttggctgtccagctctagctctaaagct

SEQ ID NO: 26141 - DNA, 405 bp, Zea mays
  Clone ID: LIB3154-011-Q1-K1-E11
gaccaacaagcaacatagaaagtggaatccagtagcaacaatagagcaacaatggcgaccaagatattttccctccttatgctccttgctctttctgcatgtgttgctaacgcgacaattttccctcaatgctcacaagctcctatagcttcccttcttcccccataccttccatcaatgatagcttcagtatgtgaaaacccagctcttcaaccctataggctccaacaagcaatcgcagcaagcaacatacctttatcacccttgtttcaacaatcgccagccctatctttggtgcagtcattggtacaaaccatcagggcacagcagctgcagcaactcgtgctacctgtgatcaaccaagtagctctggcaaacctttctccctactctcagcaacaacaa

SEQ ID NO: 26142 - DNA, 372 bp, Zea mays
  unsure at all n locations
  Clone ID: LIB3154-011-Q1-K1-E2
cggccccttggcccgaactactgaaagcgacaaacctggctttttccagggatcggattcggatcaccatgccgtccaccgtgaactccgcgtccttcgaccagaacctggacctcgccaagcaatgctcgcgagaggccgccctcgcagggttcaaggcagcagctgtcgcgaccgtcgcctctgcagttcccacccctggttagcgtcaggatgctgccatggggccaagccaacatcaaccccgcttgccaggccctcatcgtctncacagttgctggcatggcgtacttcatcgcggcggacaagaagatcctctcgctggcgaggcagcactcgtacgagaacgcgccggagcacctcaaggacacc

SEQ ID NO: 26143 - DNA, 411 bp, Zea mays
  Clone ID: LIB3154-011-Q1-K1-E8
attttcagcattcagaaacacaccaagcgaagcgcactagcaacaacctaacaacgatggctaccaagatattagccctccttgcgcttcttgcccttttagtgagcgcaacaaatgcgttcattattccacagtgctcacttgctcctagtgccattattccacagttcctcccaccagttacttcaatgggcttcgaacatccagccgtgcaagcctacaggctacaactagcgcttgcggcgagcgtcttacaacaaccaattgcccaattgcaacaacaatccttggcacatctaaacctacaaaccatcgcaacgcaacagcaacaacagtttctgccatcactgagccacctagccgtggtgaaccctgtcgcctacttgcaacagcagctacttgcatccaacc

SEQ ID NO: 26144 - DNA, 105 bp, Zea mays
  Clone ID: LIB3154-011-Q1-K1-F10
acaacgggacgcgcactgtacccacccattaagcgcgcatgttgtcgtggatacgctcagagcgaccgatacacttgacagcgtgctatcactgagtcatttagc

SEQ ID NO: 26145 - DNA, 418 bp, Zea mays
  Clone ID: LIB3154-011-Q1-K1-F11
agcaacatagaaagcacaatagtgtgccaacaatggcagtcaaaatattgagcctccttatgctccttggtctttctgcatgtgctgctacggcgaccattttcccagaaatgctcgcaggctcctatagcttcccttcttcctccgtacctatcaccagcggtgtctaaggtatgtgaaaacccaattcttcaaccctacaggatccaacaggcaatcacagctggcatcttacctttatcaccctagttcctccaacaatcatcagccctattacatcagttacctttggtgcatttattgtcacaaaacatcaaggcacaacaactacaacaacttgtgctagcaaaccttgctgcctactctcagcaacagcagttacttccattcaaccaactagctgcattgaactctgctt

SEQ ID NO: 26146 - DNA, 410 bp, Zea mays
  unsure at all n locations
  Clone ID: LIB3154-011-Q1-K1-F2
ggcccaagccgtccgaacctggcaccatccatagggaagtccagtaccaccatttaaccaccaagggcagccaaaattttggccctccttgccctcctggctctttaagcaggtgttgctaccgcgactattattccacaatgctaacaacaatacctttttccggtgacagccgcaagattggaatccccaactatacaatcctacaggctacaagaggccatcacagcaagcatcttacggtcgttagcattgactgtccaacaaccatatgccctattgcaacaaccatncttagtgaatctatatctncaaagaatcgcagcacaacaactacaacagcagttgcttccaacaatcaaatcaagagttgcagcgaaccttgcttgttacctncagcaacaacaatt

SEQ ID NO: 26147 - DNA, 98 bp, Zea mays
  Clone ID: LIB3154-011-Q1-K1-F3
ccggtcttgaacggcagccggccgttttaaaggatccaggctaccgtccccttccttgcgacgtcttaccttttttttagggccacctaaattcaatt

SEQ ID NO: 26148 - DNA, 355 bp, Zea mays
  Clone ID: LIB3154-011-Q1-K1-F4
ttgagcattcaaaaacacaccaagcgaagcgcactaccaacgacctaacaacaatggctaccaggatattagccctccttgcgcttcttgccctttttgtgagcgcaacaaatgcgttcattattccacaatgctcacttgctcctagtgccattattccaaagttcctcccaccagttacttcaatgggcttcgaacacctagctgtgcaagccaacatgcaacaacaagcgcttgcggcgagcgtcttacaacaaccaattgcccaattgcaacaacaatccttgccacatctaacaatacaagccatcacaacgcaacagcaacaacagttcctaccagcactgagccacct

SEQ ID NO: 26149 - DNA, 420 bp, Zea mays
  Clone ID: LIB3154-011-Q1-K1-F6
aaccaacgcaaatggcaccaagaaatccatcgagaggccgccgacaggggaattaagggcgtggtcgtttagcagcagccaccgccgcctaatcctcgcagccgccgtcctgctctccgtgctcgcggctgccagcgccagcgccgggacctcctgcgtgccggggtgggccatcccgcacaacccgctcccgagctgccgctggtacgtgaccagccggacctgcggcatcgggccgcgcctcccgtggccggagctgaagaggagatgctgccgggagctggcggacatcccggcgtactgccggtgcacggcgctgagcatcctcatggacggcgcgatcccgccgggcccggacgcgcagctggagggccgcctagaggacctgccgggctgcccgcgggaggtgcagaggggatt

SEQ ID NO: 26150 - DNA, 413 bp, Zea mays
  Clone ID: LIB3154-011-Q1-K1-F7
ctgggtcttcagaccattagctttatctactccagagcgcagaagaacccgatcgacaccatgagggtgttgctcgttgccctcgctctcctggctctcgctgcgagcgccacctccacgcatacaagcggcggctgcggctgccagccaccgccgccggttcatctaccgccgccggtgcatctgccacctccggttcacctgccacctccggtgcatctcccaccgccggtccacctgccgccgccggtccacctgccaccgccggtccatgtgccgccgccggttcatctgccgccgccaccatgccactaccctactcaaccgccccggcctcagcctcatccccagccacacccatgcccgtgccaacagccgcatccaagcccgtgccagctgcaaggaacctgcgg

SEQ ID NO: 26151 - DNA, 407 bp, Zea mays
  Clone ID: LIB3154-011-Q1-K1-F8
gaaacacaccaagcgaagcgcactagcaacaacctaacaacaatggctaccaagatattatccctccttgcgcttcttgcgctttttgcgagcgcaacaaatgcgtccattattccacaatgctcacttgctcctagttccattattccacagttcctcccaccagttacttcaatggccttcgaacacccagctgtgcaagcctataggctacaacaagcgattgcggcgagcgtcttacaacaaccaattgcccaattgcaacaacaatccttggcacatctaacaatacaaaccatcgcaacgcaacagcaacaacagttcctaccagcactgagccacctagccatggtgaaccctgtcgcctacttgcaacagcagctgcttgcatccaacccacttgctct

SEQ ID NO: 26152 - DNA, 413 bp, Zea mays
  Clone ID: LIB3154-011-Q1-K1-F9
gcaacatacaaagcacaatactgtaccaacaatggcagccaaaatattgcgcctgcttatgctccttgggctctctgcaagcgctgctacagcgaccattttgccgcaatgctcgcaagctgctatagctttccttcttccaccgtacctctcaccagcggtgtcttcggtatgtgaaaacccaattcttcaaccctacaagatccaacaggcaatcgcagctggcatcttacctttatcacccttgttcctgcaacaatcatcagccctattacaacagttacctttggtgcatttattggcacaaaacatcagggcacaacaactacaacaacttgtgctagcaaaccttgctgcctactctcagcaacagcagtttcttgcattcaaccaactaagttcatcgaactctg

SEQ ID NO: 26153 - DNA, 408 bp, Zea mays
  Clone ID: LIB3154-011-Q1-K1-G10
gggaatcacatcgccatggcagccaagatgttagcattgtttgcgctgctagctgtgtgtgcaaccgccactagtgctacccatatcccagggcactggtcaccactactgatgccattggctaccatgaacccatggatgcagtactgcatgaagcaacagggggttgccaacttgctagcgtggccgaccctgatgctgcagcaactgttggccttaccgcttcagtcgagccagatgccaatgatgatgccaggtatgatgccaccgatgacaatgatgccgatgccgaatatgatgccatcgatgatggtgccgactatgatgtcaccaataacgatagctagtatgatgccaccgatgatgatgccatacatggcttcaccaatgatgatgccgagtatgatg

SEQ ID NO: 26154 - DNA, 392 bp, Zea mays
  Clone ID: LIB3154-011-Q1-K1-G11
attgagaccaactagcaacatagaaagcacaatagtgtaccaacaatggcagccgaaatattttgcttccttatgctccttggtctttctgcaagtgctgctaccgcaaccattttcccacaatgctcacaagctcctatagcttcctttcttcccccatacctctcaccagcggtgtcttcagtatgtgaaaacccaattcttcaaccctacaggatccaacaggcaatcgcagcaggcatcttacctttatcacccttgttcctccaacaaccgtcagccctattacagcagttacctttggtgcatttgttggcacaaaacatcaaggcacaacaactacaacaacttgtgctaggaaaccttgctgcctactctcagcaacagcagtt

SEQ ID NO: 26155 - DNA, 421 bp, Zea mays
  Clone ID: LIB3154-011-Q1-K1-G12
agaccattagctttatctactccagagcgcagaagaacccgatcgacaccatgagggtgttgctcgttgccctcgctctcctggctctcgctgcgagcgccacctccacgcatacaagcggcggctgcggctgccagccaccgccgccggttcatctaccgccgccggtgcatctgccacctccggttcacctgccacctccggtgcatctcccaccgccggtccacctgccgccgccggtccacctgccaccgccggtccatgtgccgccgccggttcatctgccgccgccaccatgccactaccctactcaaccgccccggcctcagcctcatccccagccacacccatgcccgtgccaacagccgcatccaaacccgtgccagctgcaaggaacctgcggcgttggcagcaccccgat

SEQ ID NO: 26156 - DNA, 249 bp, Zea mays
  Clone ID: LIB3154-011-Q1-K1-G3
gttcggcctgcagggcccctgatctcgcgcgtggtgcaaagatgttgggacatctgcttatatatgctgtttcgtttatgtgatatggacaagtatgtgtagctgcttgcttgtgctagtgtaatgtagtgtagtggtggccagtggcacaacctaataagcgcatgaactaattgcttgcgtgtgtagttaagtaccgatcggtaattttatattgcgagtaaataaatggacctgtagtggtggagt

SEQ ID NO: 26157 - DNA, 306 bp, Zea mays
  Clone ID: LIB3154-011-Q1-K1-G4
ttactcaaaagcgcaaaaaaacccgaccgacaccaggagggggtggctggttgccttcgttttcctggttttggttggaagcgccacctccacgcatacaagcgggggttgcggttgccagccaccgccgccggttcatctaccgccgccggtgcatttgccacctccggttaacctgccacctccggtgcatttccaaccgccggtccacctgccgccgccggtccacctgccaccgccggtccatgtgccgccgccggttcatctgccgccgccaccatgccactaccctactcaaccgccccg

SEQ ID NO: 26158 - DNA, 252 bp, Zea mays
  unsure at all n locations
  Clone ID: LIB3154-011-Q1-K1-G5
ccaaaccgacaaaaaaaccccgaccgacaccatgaggggtgtgtgctcgttgnccctcgcttctcctggcttctcgctgcaagcgccacctccacgcatacaaccggcggctgcggctgccagccaccgccgccggttcatctaccgccgccggtgcatctgccacctccggttcacctgccacctccggtgcatctcccaccgccggtccacctgccgccgccggtccacctgccaccgnncggtcatgtg

SEQ ID NO: 26159 - DNA, 380 bp, Zea mays
  Clone ID: LIB3154-011-Q1-K1-G7
tgagaccaactatcaacagaaaaagcacattccagcaccgacaatggcagccaagagatttcgtatgcttatgctccttggtctatgtgcaagtgctgctaccgtgaccattaaacgcaaatgcgctcaagctgctatagtttttcttctttacctgtaactatcagcagctgtgtcttgtgaatgcgaaaacctaaaactttaaccgtacaagatcgaacaggcaattacagttggaattttatcattatcactcttgctactataacaatcattattactattacatcatttacctcatgtacatttatagacactaaagatacaggcacaacaactactagagctagcgctagcagatgttgatgcttactatcagc

SEQ ID NO: 26160 - DNA, 420 bp, Zea mays
  Clone ID: LIB3154-011-Q1-K1-G9
catcaatcatcattcatcttagtagtataggcaccaaatcaaatctgcggcatcaagtatctaactccaaaaaccatgaagctggtgcttgtggttcttgctttcattgctttagtatcaagtgtttcttggacacagaccggccgctgcagctgtggtcaacaaccaagccatgagccgcaacattattcacaacaacattattcacaaaaacaacaacattaaccaccaccacaacattaccagcagcagcaacaccaacaacaacaagttcacatgcaaccacaaaaacatcagcaacaacaagaagttcatgttcaacaacaacaacaacaaccgcagcaccaacaacaacaacaacaacagcaccaacaacaacatcaatgtgaaagccaacaacaacatcaccaacaatcacaa

SEQ ID NO: 26161 - DNA, 354 bp, Zea mays
  Clone ID: LIB3154-011-Q1-K1-H12
tatcacctttttatccccaatggggcccaagacctctggccgacactgggcggctttggttttttaccatggctttcttgcttttctttgatagcgccacctccacgcatacaagcggcggctgcggctgccagccaccgccgccggttcatctaccgccgccggtgcatctgccacctccggttcacctgccacctccggtgcatcttccaccgccggtccacctgccgccgccggtccacctgccaccgccggtccatgtgccgccgccggttcatctgccgccgccaccatgccactaccctactcaaccgccccggcctcagcctcatccccagccacacccatgcccgt

SEQ ID NO: 26162 - DNA, 373 bp, Zea mays
  Clone ID: LIB3154-011-Q1-K1-H3
tgaaaggcacattagtgtcccaccaatggcagccaaaatatttggcctccttatgctccttggtctttctgcaagtgctgctacggcgaccattttcccgaaatgctcgcaagctcctatagcttcccttcttcccccgtacctctcaccagcggtgtcttcggtatgtgaaaacccaattcttcaaccctacaggatccaacaggcaatcacagctggcatcttacctttatcacccttgttcctccaacaatcatcagccctattacatcagttacctttggtgcatttattggcacaaaacatcagggcacaacaactacaacaacttgtgctagcaaaccttgctgcctactctcagcaacagcagttt

SEQ ID NO: 26163 - DNA, 332 bp, Zea mays
  Clone ID: LIB3154-011-Q1-K1-H6
gttaaaccaatcaccattttaactccaatgggacccaagatcctggccctcctggcgcgtccttgctctttcaccaagcgctgctacctcgacttttattccacaatgctcacaacactacctgtctccggcgacagccgcgggatttcaatacccaactatacaatcctacatggtacacgaggccatccaagcaagcatcttacggtcattagcgttaaccctccaacaaccatatgctctattgcaacagccatccttagtgcatctgtatctccaaagaatcgcggcacaacaactacaacaacagttgctaccaacaatcaatcaag

SEQ ID NO: 26164 - DNA, 414 bp, Zea mays
  Clone ID: LIB3154-011-Q1-K1-H7
cagaccattagctttatctactccagagcgcagaagaacccgatcgacaccatgagggtgttgctcgttgccctcgctctcctggctctcgctgcgagcgccacctccacgcatacaagcggcggctgcggctgccagccaccgccgccggttcatctaccgccgccggtgcatctgccacctccggttcacctgccacctccggtgcatctcccaccgccggtccacctgccgccgccggtccacctgccaccgccggtccatgtgccgccgccggttcatctgccgccgccaccatgccactaccctactcaaccgccccggcctcagcctcatccccagccacacccatgcccgtgccaacagccgcatccaagcccgtgccagctgcagggaacctgcggcgttggcagc

SEQ ID NO: 26165 - DNA, 416 bp, Zea mays
  Clone ID: LIB3154-011-Q1-K1-H9
attgataccaactagcaacatacatattgaagtacactagcaacatcggagcaccaatgggagccaagatttttgccctccttgccctccttgctctttcagcaagcgctgctacctggacttttattccacaatgctcacaacaatacctctctccggcgacagccgtgggatttcaatacccaactatacaatcctacatggtacaagaggccatccaagcaagcatcttacggtcattagcattaaccctccaacaaccatatgctctattgcaacagccatccttagtgcatctgtatctccaaagaatcgcggcacaacaactacaacaacagttgctaccaacaatcaatcaagtagttgcagcgaaccttgctgcttacctccagcaacaacagtttcttccattcaat

SEQ ID NO: 26166 - DNA, 287 bp, Zea mays
  unsure at all n locations
  Clone ID: LIB3154-013-Q1-K1-A1
gtggacctaagactaacaatatgctcatcaactcgagaaaggagaactcgacaccgtgcaggtgctgatcgttgctcttgctgtgctggctctcagtgccagctccagctcaagtacaagctgtggctgtcactgacaaacaccacatttacatctaccgccttatatgtatatgccgncttatctgtatctgccgccgcagcagcagccatagccatagcaatatcaaactcaaccactgaagctaagcccgtaccagcaattctgatcctgcggcatcggcagca

SEQ ID NO: 26167 - DNA, 265 bp, Zea mays
  Clone ID: LIB3154-013-Q1-K1-A10
caagcaacatagtaagtggaatacagtagcaacgatagagcaacaatggcggccaagatattttccatccttatgctccttgctctttctgcatgtgttgctaacgcgaccatttttcctcaatactcacaagctcctatagctgcccttcttcccccataccttccatcaatgaccgcttcagtatgtgaaaacccagcccttcaaccctacaggctccaacaagcaatcgcaacaagcaacttacctttatcacccctgttct

SEQ ID NO: 26168 - DNA, 265 bp, Zea mays
  Clone ID: LIB3154-013-Q1-K1-A11
caactagcaacatagaaagcacaatagtgtaccaagaatggcagccaaaatattttgcttccttatgctccttggtctttctgcaagtgttgctaccgcaaccattttcccacaatgctcacaagctcctatagcttcccttcttcccccatacctctcaccagcggtgtcttcaatgtgtgaaaacccaattgttcaaccctacaagatccaacaggcaatcgcaacaggcatcttaccattatcacccttgttcctccaacaa

SEQ ID NO: 26169 - DNA, 356 bp, Zea mays
  Clone ID: LIB3154-013-Q1-K1-A3
attgagaccaactagcaacatagaaagcacaatattgtaccaataatggcagccaaaatggtttgcctcattatgctccttggtctttctgcaagtgctgctacggcgagcattttcccgcaatgctcacaagctcctatagcttcccttcttcccccatacctctcaccagcgatgtcttcagtatgtgaaaatccaattcttctaccctacaggatccaacaggcaatcgcagcaggcatcttacctttatcacccttgttcctccaacaatcatcagccctattacagcagttacctttggtgcatttattggcacaaaacatcagggcacaacaactacaacaactcgtgct

SEQ ID NO: 26170 - DNA, 406 bp, Zea mays
  Clone ID: LIB3154-013-Q1-K1-A4
attagctttatctactccagagcgcagaataacccgatcgacaccatgagggtgttgctcgttgccctcgctctcctggctctcgctgcgagcgccacctccacgcatacaagcggcggctgcggctgccagccaccgccgccggttcatctaccgccgccggtgcatctgccacctccggttcacctgccacctccggtgcatctcccaccgccggtccacctgccgccgccggtccacctgccaccgccggtccatgtgccgccgccggttcatctgccgccgccaccatgccactaccctactcaaccgccccggcctcagcctcatccccagccacacccatgcccgtgccaacagccgcatccaagcccgtgccagctgcagggaacctgcggcgttggca

SEQ ID NO: 26171 - DNA, 384 bp, Zea mays
  Clone ID: LIB3154-013-Q1-K1-A5
ggagaaaggtttgccagagctactctcagtaacaacaatttcttccattcaaccagctgtgtacactgaaccctgctgcttatttgcagcaacaacaactactaccattcagccagctagctactgcctactctcagcagcaacaatttcttccatttaaccaattcgccgcactgaacccctctgcttatttccagcagcaaatactactaccatttggccagctagctacaacaagccccgcttccttcttgacacaacaacaattgcttccgttctaccagcagtttgtggctaaccccgcaacccttttacaactgcaacagttgcttgcctttgtccaacttgctttgacaaacccagcagccttctaccaacaacaca

SEQ ID NO: 26172 - DNA, 267 bp, Zea mays
  Clone ID: LIB3154-013-Q1-K1-A9
gcattcagaaacacaccaagcgaagcgcactagcaacaacctaacaacaatggctaccaagatattagccctccttgcgcttcttgcccttttagtgagcgcaacaaatgcgttcattattccacagtgctcacttgctcctagtgccattattccacagttcctcccaccagttacttcaatgggcttcgaacatccagccgtgcaagcctacaggctacaactagcgcttgcggcgagcgtcttacaacaaccaattgcccaatt

SEQ ID NO: 26173 - DNA, 376 bp, Zea mays
  unsure at all n locations
  Clone ID: LIB3154-013-Q1-K1-B1
tagcaacatagaaagcacaatagtgtaccaacaatggcagccaaaatattttgcctcctgatgctccttggtctttctgcaagtgctgctacggcgaccattttcccgaaatgctcgcaagctcctatagcttcccttcttcccccgtacctctcaccagcggtgtcttcggtatgtgaaaacccaattcttcaaccctacaggatccaacaggcaatcacagctggcatcttacctttatcacccttgttcctccaacaatcatcagccctattacatcagttacctttggtgcatttattggcacaaaacatcagggcacaacaactacaacaactngtgctagcanaccttgctgcctactctcagcaacagc

SEQ ID NO: 26174 - DNA, 129 bp, Zea mays
  Clone ID: LIB3154-013-Q1-K1-B10
tcgcagtccgagttctaagatcagctgagcgagccagctctagagagattccagagcttatcgtacagcgtagcatagcgatcagtcatatgcttcttctatagtagtcatcctaatattcatattcat

SEQ ID NO: 26175 - DNA, 152 bp, Zea mays
  Clone ID: LIB3154-013-Q1-K1-B11
cctcctgcaggttaccggatccggcaattgcccggggtcgaccgcacgccgtccgagttctagatcgtctgagcgagccagctctagagagatcgcagagcttatcgtacagcgtagccatagcgatcagtcatatgctttcttctataagt

SEQ ID NO: 26176 - DNA, 268 bp, Zea mays
  Clone ID: LIB3154-013-Q1-K1-B12
catcctatcatttagctcatagtctacaaataggaggactggacaccctgaaagtgctcatcgctgcccttgctctcctggcgatcgctgcgagcaccacctgcagtacaagcggctgctatagatgacagacacaaccaccgcatctaccgtatatgctgtatatgccgtatctgtcctatctgccgccgcagcagcaatcgcaatcatggaattaccccactcaaccaccgcagctcaaccagtgccaatacttcggatcctgcag

SEQ ID NO: 26177 - DNA, 184 bp, Zea mays
  Clone ID: LIB3154-013-Q1-K1-B6
gatctagatctctagcatgaaccctggcttgtccaggctgccacccatctgcgggggtggcattttttatattacatatgaaacgtaatcgattatggtgccctcataccgacatgtgtttgactgaaataatcaatatattgcttgacatatatctctatcaacacatacccctttcgccagc

SEQ ID NO: 26178 - DNA, 372 bp, Zea mays
  Clone ID: LIB3154-013-Q1-K1-C1
cggcagtgcgtagagaggatcgtcgaacagaacagcatgaagatggtcatcgttctcgtggtgtgcctggctctgtcagctgccagcgcctctgcaatgcagatgccctgcccctgcgcggggctgcagggcttgtacggcgctggcgccggcctgacgacgatgatgggcgccggcgggctgtacccctacgcggagtacctgaggcagccgcagtgcagcccgctggcggcggcgccctactacgccgggtgtgggcagacgagcgccatgtaccagccgctcccgcaacagtgctgccagcagcaaatgaggatgatggacgtgcagtccgtcccgcagcagctgcagatgatgatgcagcttgagcgt

SEQ ID NO: 26179 - DNA, 267 bp, Zea mays
  Clone ID: LIB3154-013-Q1-K1-C10
gcaacatagaaagtggaatccagtagcaacaatagagcaacaatggcgaccaagatattttccctccttatgctccttgctctttctgcatgtgttgctaacgcgacaattttccctcaatgctcacaagctcctatagcttcccttcttcccccataccttccatcaatgatagcttcagtatgtgaaaacccagctcttcaaccctataggctccaacaagcaatcgcagcaagcaacatacctttatcacccttgtttcaacaa

SEQ ID NO: 26180 - DNA, 269 bp, Zea mays
  Clone ID: LIB3154-013-Q1-K1-C12
gggtcttcagtctcattagctttatctactccagagggcagatgaacccgatcgacaccatgagggtgttgctcgttgccctcgctctcctggctctcgctgcgagcgccacctccacgcatacaagcggcggctgcggctgccagccaccgccgccggttcatctaccgccgccggtgcatctgccacctccggttcacctgccacctccggtgcatctcccaccgccggtccacctgccgccgccggtccacctgccaccgccggtc

SEQ ID NO: 26181 - DNA, 391 bp, Zea mays
  Clone ID: LIB3154-013-Q1-K1-C2
ctagcaacatagaaagcacaatagtgtaccaacaatggcagctaaaatattttgcctcctgatgctccttggtctttctgcaagtgctgctacggcgaccattttcccacaatgctcacaagctcctatagcttcccttcttcccccgtacctctcaccaacggtgtcttcggtatgtgaaaacccaattcttcaaccctacaggatccaacaggcaatcgcagctggcatcttacctttatcacccttgttcctccaacaatcatcagccctattacagcagttacctttggtgcatttattggcacaaaacatcagggcacaacaactacaacaacttgtgctagcaaaccttgctgcctactctcagcaacagcagtttcttccattc

SEQ ID NO: 26182 - DNA, 410 bp, Zea mays
  Clone ID: LIB3154-013-Q1-K1-C3
agcacaatagtgtaccaacaatggcagccaaaatattttgcctccttatgctccttggtgtttctgcaagtgctgctacggcgaccattttcccgcaatgctcacaagctcctatagcttcccttcttcccccgtacctctcaccagcggtgtcttcggtatgtgaaaacccaattcttcaaccctacaggatccaacaggcaatcgcagctggcatcttacctttatcacccttgttcctccaacaatcatcagccctattacagcagttacctttggtgcatttattggcacaaaacatcagggcacaacaactacaacaacttgtgctagcaaaccttgctgcctactctcagcaacagcagtttcttccattcaaccaactagctgcattgaactctgcttcttat

SEQ ID NO: 26183 - DNA, 194 bp, Zea mays
  Clone ID: LIB3154-013-Q1-K1-C4
ccaactagcaacatacatagtgaagtacactagcaacatcttagcaccaatgggagccaagatttttgccctccttgccctccttgctctttcagcaagcgctgctacctcgacttttattccacaatgctcacaacaatacctctctccggcgacagccgtgggatttcaatacccaactatacaatcctaca

SEQ ID NO: 26184 - DNA, 358 bp, Zea mays
  Clone ID: LIB3154-013-Q1-K1-C5
attcataaacacaccaagcggagcgcactagtaacgacctaacaacaacggctgcgaagaggttagccctccttgcggtgcttgccgtttttgtgagcggcacaaatgcggtgattattatacaatgctgacttgttgctagtggcgttattacacaactgctcccaccagctacttcaatggggtgcgaacacctagctgttgaagccgacatgctgcaacaagcggttgttgcgagcggcttacaacaaccacattgcgaattgttgcaacaatccttgtcgcatcttacaatactagccgtcataacgcagcagcagcaacagttgctaccagcactgatgcacctagtcatggt

SEQ ID NO: 26185 - DNA, 411 bp, Zea mays
  Clone ID: LIB3154-013-Q1-K1-C6
caactagcaacatagaaagcacaatagtgtaccaacaatggcagccaaaatattttgcctccttatgctccttggtctttctgcaagtgctgctacggcgaccattttcccgaaatgctcgcaagctcctatagcttcccttcttcccccgtacctctcaccagcggtgtcttcggtatgtgaaaacccaattcttcaaccctacaggatccaacaggcaatcacagctggcatcttacctttatcacccttgttcctccaacaatcatcagccctattacatcagttacctttggtgcatttattggcacaaaacatcagggcacaacaactacaacaacttgtgctagcaaaccttgctgcctactctcagcaacagcagtttcttccattcaaccaactagctgcatt

SEQ ID NO: 26186 - DNA, 340 bp, Zea mays
  Clone ID: LIB3154-013-Q1-K1-C7
ggacgtcagcctagcaattagctcatcgacttcagatcggacaactccacaccatggaggtgctgatcgttgccctggctctcctggcgctcgctgagagcgccgcctccaagacaagcggcggctgtggctgccagacaccaccgatttatctaccgtctccgtactatatgccgcctccagtctatctgacgccgcagcagcagccgcagacatggcaataccacactcaaccaccgcagataagcccttgccagcagttcggatcctgccgagtcggcagcgtcggcagcccgttcctgggccagtgcgtcgagttcctgaggcaccagtgcagccc

SEQ ID NO: 26187 - DNA, 381 bp, Zea mays
  Clone ID: LIB3154-013-Q1-K1-D1
caacaagcaacatagaaagtggaatccagttgcaacaatagagcaacaatggcgaccaagagattttccctccttatgctccttgctctttctgcatgtgttgctaacgcgacaattttccctcaatgctcacaagctcctatagcttcccttcttcccccataccttccatcaatgatagcttcagtatgtgaaaacccagctcttcaaccctataggctccaacaagcaatcgcagcaggcaacatacctttatcacccttgtttcaacaatcgccagccctatctttgtgcagtcattgtacaaccatcaggcacagcactgagcactctgctactgtgatcacagtagcttgcaaccttctctacttagcacacaat

SEQ ID NO: 26188 - DNA, 411 bp, Zea mays
  Clone ID: LIB3154-013-Q1-K1-D3
tagcaacatagaaagcacaatagtgtaccaacaatggcagccaaaatattttgcttccttatgctccttggtctttctgcaagtgctgctaccgcaaccattttcccacaatgctcacaagctcctatagcttcctttcttcccccatacctctcaccagcggtgtcttcagtatgtgaaaacccaattcttcaaccctacaggatccaacaggcaatcgcagcaggcatcttacctttatcacccttgttcctccaacaaccgtcagccctattacagcagttacctttggtgcatttgttggcacaaaacatcaaggcacaacaactacaacaacttgtgctaggaaaccttgctgcctactctcagcaacagcagtttcttccattcaaccaactggctgcattgaac

SEQ ID NO: 26189 - DNA, 265 bp, Zea mays
  unsure at all n locations
  Clone ID: LIB3154-013-Q1-K1-D4
accattagctttatctactccagagcgcattataacccgatcgacaccatgcgggcgatgctcgttgccctcgctctcctggctctcgctgcgagcgccacctccacgcatacaagcggcggatgcggctgacagccaccgtcgccggttcatctaccgccgacggtgcatctgccacctncagttcacctgccacctccggtgcatctaccaccgccggtccacctgccgccgccagtccaccttgcaccggcggtacatgtgc

SEQ ID NO: 26190 - DNA, 404 bp, Zea mays
  Clone ID: LIB3154-013-Q1-K1-D7
gaccattagctttatctactccagagcgcataagaacccgatcgacaccatgagggtgttgctcgttgccctcgctctcctggctctcgctgcgagcgccacctccacgcatacaagcggcggctgcggctgccagccaccgccgccggttcatctaccgccgccggtgcatctgccacctccggttcacctgccacctccggtgcatctcccaccgccggtccacctgccgccgccggtccacctgccaccgccggtccatgtgccgccgccggttcatctgccgccgccaccatgccactaccctactcaaccgccccggcctcagcctcatccccagccacacccatgcccgtgccaacagccgcatccaagcccgtgccagctgcagggaacctgcggcg

SEQ ID NO: 26191 - DNA, 58 bp, Zea mays
  Clone ID: LIB3154-013-Q1-K1-D8
accattagctttatctaacacacattgcttaacgacctaaccgcaaccgtgcgggggt

SEQ ID NO: 26192 - DNA, 369 bp, Zea mays
  Clone ID: LIB3154-013-Q1-K1-E1
cagcaaagcggcagtgcgtagagaggatcgtcgaacagaacagcatgaagatggtcatcgttctcgtcgtgtgcctggctctgtcagctgccagcgcctctgcaatgcagatgccctgcccctgcgcggggctgcagggcttgtacggcgctggcgccggcctgacgacgatgatgggcgccggcgggctgtacccctacgcggagtacctgaagcagccgcagtgcagcccgctggcggcggcgccctactacgccgggtgtgggcagacgagcgccatgtaccagccggtccggcaacagtgctgccagcagcaaatgaggatgatggacgtgcagtccgtcgcgcaacagctgcagatgatgatgc

SEQ ID NO: 26193 - DNA, 271 bp, Zea mays
  Clone ID: LIB3154-013-Q1-K1-E10
aacacaccaagttaagcacattagcaacaacctaacgacaatggctaccaagatattatccctccttgcgcttcttgcgctttttgcgagcgcaacaaatgcgttcattattccacaatgctcacttgctccaagttccattattacacagttcctcccacgcagttacttcaatgggcttcgaacacccagctgtgcaagcctataggctacaacaagctattgcggcgagcgtcttacaacatccaatttcccagttgcaacaacaata

SEQ ID NO: 26194 - DNA, 392 bp, Zea mays
  Clone ID: LIB3154-013-Q1-K1-E2
aatccatcgcccataatattttgagcattcaaaaacacacaaagggaagtgcactagcaggttcctaacaacaatggctaccaagatattagccctccttgcgctcctttccctttcagtgagcgcaacaactgcattcattattccacaatgctcacttgctcctaatgccattattccacagttcctcccatcagttacatcaatgggcatcgaacaccctattgtgcaagcctataggctacaacaagcgcttgcggcgagcgtcttacaacaaccgtttgcccaattacaacaacaatccttggcacatctaaccatacaaaccatcgcaacacaactagagcaacagtttgtgcccgcattgagccaactagccgcagtgaaccctg

SEQ ID NO: 26195 - DNA, 333 bp, Zea mays
  Clone ID: LIB3154-013-Q1-K1-E3
gagaccaacaagcaacatagaaagtggaatccagtagcaacaatagagcaacaatggtgagcaagatattttccctccttatgcttcttgctctttctgcatgtgttgctaacgcgacaattttccctcaatgctcacaagctcctatagcttcccttcttcccccataccttccatcaatgatagcttcagtatgtgaaaacccaactcttcaaccctataagctccaacaagcaatcgcagcaagcaacatacctttatcacccttgtttcaacaatcgccagccctatctttggtgcagtcattggtacaaaccatcagggcacagcagc

SEQ ID NO: 26196 - DNA, 402 bp, Zea mays
  Clone ID: LIB3154-013-Q1-K1-E4
attgataccaactagcaacatacatagtgttttacagtagcaacatcttagcacggatggcagccaagatttttgccctccttgccctccttgctctttcagcaagtgttgctaccgcaactattattccacaatgctcacaacaatacctctctccggtgacagccgcgagatttgaatacccaactatacaatcctacaggctacaagaggccatcacagcaagcatattacggtcgttagcattgactgtccaacaaccatatgccctattgcaacaaccatccttagtgaatctatatctgcaaagaatcgcagcacaacaactacaacagcagttgcttccaacaatcaatcaagtatttgcagcgaaccttgctgcttacctccagcaacaacaat

SEQ ID NO: 26197 - DNA, 334 bp, Zea mays
  Clone ID: LIB3154-013-Q1-K1-E5
ctgcgtacacggcaccgcttttcctgtcatttctaaagtgagagtgaagcaacgagggggagacaaggcgaaatggggaagggaacgcaacgcaacgaagcgacggcggcgggcggcgaggtggaggagaacataacagcgtggctggtttccaagaacaccccccagatcatgcccttcaagctaccgtccggcgggccttatgatgtccgcgtgcgcatgacagcaatgcggatttgctgcagcgatgtgcactacccaacggagatgcgcatcgcacacttcactgtgaaggaaccgatggtgatcggacacgactgcactgccctggcct

SEQ ID NO: 26198 - DNA, 407 bp, Zea mays
  Clone ID: LIB3154-013-Q1-K1-E7
gcattcagaaacacaccaagcgaagcgcactagcaacaacctaacaacaatggctggcaagatattatccctccttgcgcttcttgcgctttttgcgagcgcaacaaatgcgtccattattccacaatgctcacttgctcctagttccattattccacagttcctcccaccagttacttcaatggccttcgaacacccagctgtgcaagcctataggctacaacaagcgattgcggcgagcgtcttacaacaaccaattgcccaattgcaacaacaatccttggcacatctaacaatacaaaccatcgcaacgcaacagcaacaacagttcctaccagcactgagccacctagccatggtgaaccctgtcgcctacttgcaacagcagctgcttgcatccaacccac

SEQ ID NO: 26199 - DNA, 59 bp, Zea mays
  Clone ID: LIB3154-013-Q1-K1-F10
tttatcgccgcagcacatattcccttttccagctgtcgtgttatcgaaaagaggcgctc

SEQ ID NO: 26200 - DNA, 142 bp, Zea mays
  Clone ID: LIB3154-013-Q1-K1-F11
tacgcacgcatgctacatcattactattatattatggcacctaactataattaaccggccggcgagcgccaacaacgcgactattataacaaagccgtcacttaccaaaatagccttgctgcacaacctccttccttcagct

SEQ ID NO: 26201 - DNA, 229 bp, Zea mays
  Clone ID: LIB3154-013-Q1-K1-F12
ggttcgcacactcacaccacacgatctgatctagaggaaatcgtccggtcgtccccttcaatatacaattcttttctttaaccataccctgcccgactataatcttacacgtggagtggtgtgacaccactgccttcgctacggccaagacccaatacatggcagggatggcctccgaccagaacaggatcatcttatcttgcatacaaatcaaggacaggaccgcccc

SEQ ID NO: 26202 - DNA, 350 bp, Zea mays
  Clone ID: LIB3154-013-Q1-K1-F2
atgcagcagctcaaggcctggctcaaggccatgaagaagcagctggaagcgacccgccggcgcgaagcgcgcggctgaggccggggccgcccggatctcagggcgcccggcgcggcccggcgggcacgatcttcatcagcggcgcggccggcttggccgcggcgtccgcgcgcggccggatcatccacgggaagaagcgccacagatacaggccgaaccccagcgcccaagcgcaggccgaggcgtgcagcaaccccgccgtggcgccggttggcatcaaggcggccaggcgcagcagcgccgccaggatcaccaaggcgtagctcagcaccatgctgcggtcggcgcgc

SEQ ID NO: 26203 - DNA, 386 bp, Zea mays
  Clone ID: LIB3154-013-Q1-K1-F3
caactagcaacatagaaagcacaatagtgtaccaacaatggcagccaaaatattttgcttggttatgctccttggtctttctgcaagtgctgctaccgcaaccattttcccacaatgctcacaagctcctatagcttcctttcttcccccatacctctcaccagcggtgtcttcagtatgtgaaaacccaattcttcaaccctacaggatccaacaggcaatcgcagcaggcatcttacctttatcacccttgttcctccaacaaccgtcagccctattacagcagttacctttggtgcatttgttggcacaaaacatcaaggcacaacaactacaacaacttgtgctaggaaaccttgctgcctactctcagcaacagcagtttc

SEQ ID NO: 26204 - DNA, 413 bp, Zea mays
  Clone ID: LIB3154-013-Q1-K1-F4
cagcattcaaaaacacaccaagcgaagcgcactagcaacaacctaacaacaatgggtgccaagatattagccctccttgcgcttcttgcccttttagtgagcgcaacaaatgcgttcattattccacagtgctcacttgctcctagtgccattattccacagttcctcccaccagttacttcaatgggcttcgaacatccagccgtgcaagcctacaggctacaactagcgcttgcggcgagcgtcttacaacaaccaattgcccaattgcaacaacaatccttggcacatctaaacctacaaaccatcgcaacgcaacagcaacaacagtttctgccatcactgagccacctagccgtggtgaaccctgtcgcctacttgcaacagcagctacttgcatacaacccacttgc

SEQ ID NO: 26205 - DNA, 95 bp, Zea mays
  Clone ID: LIB3154-013-Q1-K1-F6
ctgggtcttcagaccattagctttatctactccagagcgcagaagaacccgatcgacaccatgagggtgttgctcgttgccctcgctctcctggc

SEQ ID NO: 26206 - DNA, 306 bp, Zea mays
  Clone ID: LIB3154-013-Q1-K1-F8
cccacgcgtccgcccacgcgtccggtcagtctagcaattagctcatcgactccagattggagaactcgacaccatgaaggtgctgatcgttgcccttgctctcctggcgctcgctgcgagcgccgcctccagtacaagcggcggctgtggctgccagacaccaccgtttcatctaccgcctccgttctatatgccgcctccgttctatctgccgccgcagcagcagccgcagccatggcaataccccactcaaccaccgcagctaagcccgtgccagcagttcggatcctgcggcgtcggcagcgt

SEQ ID NO: 26207 - DNA, 265 bp, Zea mays
  Clone ID: LIB3154-013-Q1-K1-F9
aacacaccaagctaagcacattagcaacaacctaacaacaatggctaccaagatattatccctccttgcgcttcttgcgctttttgcgagcgcaacaaatgcgttcattattccacaatgctcacttgctccaagttccattattacacagttcctcccaccagttacttcaatgggcttcgaacacccagctgtgcaagcctataggctacaacaagcaattgcggcgagcgtcttacaacaaccaattttccagttgcaacaa

SEQ ID NO: 26208 - DNA, 406 bp, Zea mays
  Clone ID: LIB3154-013-Q1-K1-G1
caacaagcaacatagaatgtggaatccagttgcaacaatagagcaacaatggcgaccaagagattttcccttcttatgctccgtgctatttctgcatgtgttgctaacgcgacaatttttcctcaatgctcacaaggctctatagcttaccttcttcccccataccttccaataatgatagcttcagtatgtgaaaacccagctcttgaaccctataggctccaacaagcaatcgcagcaagcaacatacctttatcaccctggtttcaacaatcgccagacctatctgtggtgcaactcattgtacaaaccatcagggcacatcagctgcagcaactcgtgctacctgtgatcaaccaagtagcgtatgcagacctttcttcctactatcagcaacaacaatttc

SEQ ID NO: 26209 - DNA, 262 bp, Zea mays
  Clone ID: LIB3154-013-Q1-K1-G10
tagcaacattgttagcacaatagtgttccaacaggggcagctaaaatattttgcctccttatgctccttggtctttctgcaagtgctgctacggcgaccattttcccacaatgctcacaagctcctatagcttcccttcttcccccgtacctctcaccaacggtgtcttcggtatgtgaaaacccaattcttcaaccctacaggatccaacaggcaatcgcagctggcatcttacctttatcacccttgtttctccaacaat

SEQ ID NO: 26210 - DNA, 232 bp, Zea mays
  Clone ID: LIB3154-013-Q1-K1-G11
cttcgcaacttgcaacattaaaagcacatttttgtaccaacaatggccaacccaaaatatttgcttcctatgctccttggtctttctgcaagtgttgctaccgcaaccattttcccacaatgctcacaagctcctatagcttcccttcttcccccatacctctcaccagcggtgtcttcaatgtgtgaaaacccaattgttcaaccctacaggatccaacaggcaatcgcac

SEQ ID NO: 26211 - DNA, 367 bp, Zea mays
  unsure at all n locations
  Clone ID: LIB3154-013-Q1-K1-G2
ctgggtcttcagaccattagctttatctactccagagcgcagaagaacccgatcgacaccatgagggtgttgctcgttgccctcgctctcctggctctcgctgcgagcgccacctccacgcatacaagcggcggctgcggctgccagccaccgccgccggttcatctaccgccgccggtgcatctgccacctccggttcacctgccacctccggtgcatctnccaccgccggtccacctgccgccgccggtccacctgccaccgccggtccatgtgccgccgccggttcatctgccgccgccaccatgccactaccctactcaaccgccccggcctcagcctcatccccagccacacccatgcccgt

SEQ ID NO: 26212 - DNA, 409 bp, Zea mays
  Clone ID: LIB3154-013-Q1-K1-G3
attgagaccaacaagcaacatagaaagtggaatccagtagcaacaatagagcaacaatggcgaccaagatattttccctccttatgctccttgctctttctgcatgtgttgctaacgcgacaattttccctcaatgctcacaagctcctatagcttcccttcttcccccataccttccatcaatgatagcttcagtatgtgaaaacccagctcttcaaccctataggctccaacaagcaatcgcagcaagcaacatacctttatcacccttgtttcaacaatcgccagccctatctttggtgcagtcattggtacaaaccatcagggcacagcagctgcagcaactcgtgctacctgtgatcaaccaagtagctctggcaaacctttctccctactctcagcaacaaca

SEQ ID NO: 26213 - DNA, 351 bp, Zea mays
  Clone ID: LIB3154-013-Q1-K1-G4
gagaccaactagcaacatagaaagtacaattgtgtaccaacaatggcagccaaagagattgggcttccttatgctccttggtctttctgcaagtgttgctaccgcaaccattttcccacaatgctcacaagctcctatagcttcccttcttcccccatacctctcaccagcggtgtcttcaatgtgtgaaaacccaattgttcaaccctacaggatccaacaggcaatcgcaacaggcattttaccattatcacccttgtttctccaacaaccgtcagccctattacagcagttacctttggtccatttggtggcacaaaacattatggcacaacaactacaacaacttgt

SEQ ID NO: 26214 - DNA, 409 bp, Zea mays
  Clone ID: LIB3154-013-Q1-K1-G5
agctcctatagcttcccttcttcccccgtacctctcaccagcggtgtcttcggtatgtgagaaacccaattcttcaaccctacaggatccaacaggcaatcgcagctggcatcttacctttatcacccttgttcctccaacaatcatcagccctattacaacagttacctttggtgcatttattggcacaaaacatcagggcacaacaactacaacaacttgtgctagcaaaccttgctgcctactctcagcaacagcagtttcttccattcaaccaactaagttcattgaactctgcttcttatttgcaacaacaacaactaccattcagccagctacctgctgcctacccccagcaatttcttccattcaaccaactagcagcattgaactctcctgcttatttaca

SEQ ID NO: 26215 - DNA, 372 bp, Zea mays
  Clone ID: LIB3154-013-Q1-K1-G6
agcaagtgttgctaccgcgactattattccacaatgctcacaacaatacctctctccggggacagccgcgagatttgaatacccaactatacaatcctacaggctacaagaggccatcacagcaagcatcttacggtcgttagcattgactgtccaacaaccatatgccctattgcaacaaccatccttagtgaatctatatctccaaagaatcgcagcacaacaactacaacagcagttgcttccaacaatcaatcaagtagttgcagcgaaccttgctgcttacctccagcaacaacaatttcttccattcaatcaactagctggggtgaaccttgctgcttacttgcaggcacaacaactactaccatt

SEQ ID NO: 26216 - DNA, 349 bp, Zea mays
  unsure at all n locations
  Clone ID: LIB3154-013-Q1-K1-G8
cattagctttatctactccagagcgcagaagaacccgatcgacaccatgagggtgttgcggggtgccctcgctctcctggctctcgctgcgagcgccacctccacgcatacaagcggcggctgcggttgccatccaccgccgccggttcatctaccgtcgccggtgcatctgccacctccggttcacctgccacctccggtgcatttcccaccgccggtccacctgacgtcgccggtccagctgacaccgccggtccatgtgccgtcgccggttcatttgacgtcgccaccatgccactaccctactcaaccgacccggcctgagcctnatccccagccacacccatgc

SEQ ID NO: 26217 - DNA, 190 bp, Zea mays
  Clone ID: LIB3154-013-Q1-K1-G9
attttcagcattcagaaacacaccaagcgaagcgcactagcaacaacctaacaacaatggctaccaagatattagccctccttgcgcttcttgcccttttagtgagcgcaacaaatgcgttcattattccacagtgctcacttgctcctagtgccattattccacagttcctcccaccagttacttcaat

SEQ ID NO: 26218 - DNA, 404 bp, Zea mays
  Clone ID: LIB3154-013-Q1-K1-H1
gtgcaagccaacatgcaacaacaagcgcttgcggcgagcgtcttacaacaaccaattgcccaattgcaacaacaatccttgccacatctaacaatacaagccatcacaacgcaacagcaacaacagttcctaccagcactgagccacctagccatggtgaaccctgccgcctacttgcaagagcagctgcttgcatccaacccacttgctctggcgaacgtagttgcaaaccagcaacaacaacagctacaacagtttctgccaacgctcagtcaactagccatggtgaaccctgccgcctacgtacaacaacaacaactgctttcatctagcccgctcgctgtgggcaatgcacctacatacctgcaacaacaattgttgcaacagattgtaccagctctgac

SEQ ID NO: 26219 - DNA, 390 bp, Zea mays
  Clone ID: LIB3154-013-Q1-K1-H2
gaaacacaccaagcgaagcgcactagcaacaacctaacaacaatggctaccaagatattagccctccttgcgcttcttgcccttttagtgagcgcaacaaatgcgttcattattccacagtgctcacttgctcctagtgccattattccacagttcctcccaccagttacttcaatgggcttcgaacatccagccgtgcaagcctacaggctacaactagcgcttgcggcgagcgtcttacaacaaccaattgcccaattgcaacaacaatccttggcacatctaaacctacaaaccatcgcaacgcaacagcaacaacagtttctgccatcactgagccacctagccgtggtgaaccctgtcgcctacttgcaacagcagctacttgca

SEQ ID NO: 26220 - DNA, 149 bp, Zea mays
  Clone ID: LIB3154-013-Q1-K1-H3
ttgataccaactagcaacatacatagtgaagtacactagcaacatcttagcaccaatgggagccaagatttttgccctccttgccctccttgctctttcagcaagcgctgctacctcgacttttattccacaatgctcacaacaatacc

SEQ ID NO: 26221 - DNA, 341 bp, Zea mays
  Clone ID: LIB3154-013-Q1-K1-H4
caactagcaacatagaaagcacaatagtgtaccaacaatggcagccaaaatattttgcctccttatgctccttggtctttctgcaagtgctgctacggcgaccattttcccgcaatgctcgcaagctcctatagcttcccttcttcccccgtacctctcaccagcggtgtcttcggtatgtgaaaacccaattcttcaaccctacaggatccaacaggcaatcgcagctggcatcttacctttatcacccttgttcctccaacaatcatcagccctattacaacagttacctttggtgcatttattggcacaaaacatcaaggcacaacaactacaacaac

SEQ ID NO: 26222 - DNA, 408 bp, Zea mays
  Clone ID: LIB3154-013-Q1-K1-H5
gggtcttcagaccattagctttatctactccagagcgcagaagaacccgatcgacaccatgagggtgttgctcgttgccctcgctctcctggctctcgctgcgagcgccacctccacgcatacaagcggcggctgcggctgccagccaccgccgccggttcatctaccgccgccggtgcatctgccacctccggttcacctgccacctccggtgcatctcccaccgccggtccacctgccgccgccggtccacctgccaccgccggtccatgtgccgccgccggttcatctgccgccgccaccatgccactaccctactcaaccgccccggcctcagcctcatccccagccacacccatgcccgtgccaacagccgcatccaagcccgtgccagctgcatggaacctg

SEQ ID NO: 26223 - DNA, 372 bp, Zea mays
  unsure at all n locations
  Clone ID: LIB3154-013-Q1-K1-H6
agaccaacaagcaacatagaaagtggaattcagttgcaacaatagagcaacaatggagacggagatattttccctccttatgctccttgctctttctacatgtgttgctaacgcgacaattttccctcaatgctcacaagctcctatagcttccctttttcccccataccttccatcaattatagcttcagtatgtgaaaacccagctcttcaaccatataggcttcaacaagcaatcgcagcaagcaacatacctttatcgcccttgttgtgtcaacaatcgccagccctatctttggtgcagtcattggtacaaaccatcanggcacaacagctgcagcaactcgtgctacctgtgatcaaccaagtagc

SEQ ID NO: 26224 - DNA, 388 bp, Zea mays
  Clone ID: LIB3154-013-Q1-K1-H7
gtcagcctagcaattagctcatcgactccagattggagaactcgacaccatgaaggtgctgatcgttgcccttgctctcctggcgctcgctgcgagcgccgcctccagtacaagcggcggctgtggctggcagacaccaccgtttcatctaccgcctccgttctatatgccgcctccgttctatctgccgccgcagcagcagccgcagccatggcaataccccactcaaccaccgcagctaagcccgtgccagcagttcggatcctgcggcgtcggcagcgtcggcagcccgttcctgggccagtgcgtcgagttcctgaggcaccagtgcagcccggcggcgatgccctacggctcgccacagtgccaggcgctgcagcagcagtgc

SEQ ID NO: 26225 - DNA, 359 bp, Zea mays
  unsure at all n locations
  Clone ID: LIB3154-014-Q1-K1-A1
attagctttatctactccagagcgcagaataacccgatcgacaccatgagggtgttgctcgttgccctcgctctcctggctctcgctgcgagcgccacctccacgcatacaagcggcggctgcggctgccagccaccgccgccggttcatctaccgccgccggtgcatctgccacctccggttcacctgccacctccggtgcatctcccaccgccggtccacctgccgccgccggtccacctgccaccgccggtccatgtgccgccgccggttcatctgccgccgccaccatgccactaccctactcaaccgcccggnctagcctatcccagcacacccatgccgtgcaacagcgatca

SEQ ID NO: 26226 - DNA, 102 bp, Zea mays
  unsure at all n locations
  Clone ID: LIB3154-014-Q1-K1-A10
cagaaacacaccaagcgaagcgcacnagcaacgaccgaacagcaaaggcnaccaagacannagcccaccccgcgcaacnagcccnnnnggggagcgcaacaa

SEQ ID NO: 26227 - DNA, 262 bp, Zea mays
  Clone ID: LIB3154-014-Q1-K1-A11
aattagctcatcgactccagattggagaactcgacgccatgaaggtgctgatcgttgcccttgctctcctggcgctcgctgcgagcgccgcctccagtacaagcggcggctgtggctgccagacaccaccgtttcatctaccgcctccgttctatatgccgcctccgttctatctgccgccgcagcagcagccgcagccatggcaataccccactcaaccaccgcagctaagcccgtgccagcagttcggatcctgcggcgt

SEQ ID NO: 26228 - DNA, 235 bp, Zea mays
  unsure at all n locations
  Clone ID: LIB3154-014-Q1-K1-A12
annnngagcanncagaaacacaccaagcgaagcacgggagcaacaaccnaacaacaanggcnaccaaganannancccnccnggcgccccnagcgcnnnnagcgagcgcaacaaaagcgnncannannccacaangcncacnngcnccaagnnccaaaannacacagnnccncccaccagnnacnnncaagggcnncgaacacccagcngngcaagccnanaggcnacaacaagc

SEQ ID NO: 26229 - DNA, 327 bp, Zea mays
  Clone ID: LIB3154-014-Q1-K1-A2
gccacctagaaagatcaaaagcgcactaacgttcgtacacaagctatcaagacatcttgcgctcgggggcttttttgcatgtgctgatacgctgatactgttaccatattgctcacaagctcacatacttctattgcttccctcgtacctctgaacatctgagcatcggggttttgaaaacccgaaaattcaattcttcaagattccacgagccaacacgccatgcctgctagcattataactctattaccctcgacaatcctacaatcatttacactatttccccatggagcatttatgggttcataggctcaaggcattacggct

SEQ ID NO: 26230 - DNA, 261 bp, Zea mays
  Clone ID: LIB3154-014-Q1-K1-A6
caacaagcaacatagaaagtggaatccagtagcaacaatagagcaacaatggcgaccaagggattttccctccttatgctccttgctctttctgcatgtgttgctaacgcgacaattttccctcaatgctcacaagctcctatagcttcccttcttcccccataccttccatcaatgatagcttcagtatgtgaaaacccagctcttcaaccctataggctccaacaagcaatcgcagcaagcaacatacctttatcaccc

SEQ ID NO: 26231 - DNA, 314 bp, Zea mays
  Clone ID: LIB3154-014-Q1-K1-A7
ggaccattagatcaatatacttcagtactcaaaagaacccgatagacaccatgagggcgtgggggggtggcttggttctcttggttttctgtgtgagcgtgagatcgacacatacaagcatacgatgggggtgtgaggcagcgacgcacggtcatctactgatgtacgggcatctgtgaatttgggatcacctgttaacttgggagcatctgcgaatgtcggaccacctgtcgacgtggggccacctgtcaacgtgggaccatgtgtcgatgtgcggtcatctgttgatgtgacgatgcactatgctactaact

SEQ ID NO: 26232 - DNA, 378 bp, Zea mays
  Clone ID: LIB3154-014-Q1-K1-A8
aattagctcatcgactccagattggagaactcgacaccatgaaggtgctgatcgtggccgtggctctcctggcgctcgctgcgagcgccgcctccagtacaagcggcggctgtggctgccagacaccaccgtttcatctaccgcctccgttctatatgccgcctccgttctatctgccgccgcagcagcagccgcagccatggcaataccccactcaaccaccgcagctaagcccgtgccagcagttcggatcctgcggcgtcggcagcgtcggcagcccgttcctgggccagtgcgtcgagttcctgaggcaccagtgcagcccggcggcgacgccctacggctcgccacagtgccaggcgctgcagcagcagtgct

SEQ ID NO: 26233 - DNA, 269 bp, Zea mays
  Clone ID: LIB3154-014-Q1-K1-A9
attttcagcattcagaaacacaccaagcgaagcgcagtagcaacaacctaacaacaatggctaccaagatattagccctccttgcgcttcttgcccttttagtgagcgcaacaaatgcgttcattattccacagtgctcacttgctcctagtgccattattccacagttcctcccaccagttacttcaatgggcttcgaacatccagccgtgcaagcctacaggctacaactagcgcttgcggcgagcgtcttacaacaaccaattgcc

SEQ ID NO: 26234 - DNA, 266 bp, Zea mays
  Clone ID: LIB3154-014-Q1-K1-B11
ggtttggctgctgctgtccttggtgatagattctagtggtggattgacccaattggtgcaattgttcttgcagtgtacacgatttcaaactggtctggaacagtgtgggaaaatgcagtatcgctggtaggtgaatcagctcctccagaaatgcttcagaagttgacatatctggctatcagacaccatcctcagattaagcgtgttgacaccgttcgagcatacacctttggggtgctttactttgttgaggttgacattgagct

SEQ ID NO: 26235 - DNA, 266 bp, Zea mays
  Clone ID: LIB3154-014-Q1-K1-B2
catccatcgaccgatcgatcgccacagacaacaccacccggcgaggcgacacgacagccgagggggggaaggaataaactcactgccagccagggaagggggagaactgtactgctccgtagaccagtgcgcgcaccgcccggcagggctgctcatctcgtacacgaccagtggattaattggcatggctgctctggccacatctcagctcgacgcaacgcccgccgggctgggcgtacccgacgccttcacgttccggcgccgcg

SEQ ID NO: 26236 - DNA, 323 bp, Zea mays
  unsure at all n locations
  Clone ID: LIB3154-014-Q1-K1-B3
cagaccattagctttatctactccagagcgcagaagaacccgatcgacaccatgagggtgttgctcgttgccctcgctctcctggctctcgctgcgagcgccacctccacgcatacaagcggcggctgcggctgccagccaccgccgccggttcatctaccgccgccggtgcatctgccacctccggttcacctgccaccctccggtgcatctcccaccgccggtccacctgccgncgccggtccacctgccaccgncggtccatgtgccggcgcccgttcatcttgccgccgncaccatgccactaccctactcaaaccgcc

SEQ ID NO: 26237 - DNA, 317 bp, Zea mays
  unsure at all n locations
  Clone ID: LIB3154-014-Q1-K1-B5
ggtcttcagaccattagctttatctactccagagcgcagaagaacccgatcgacaccatgagggtgttgctcgttgccctcgctctcctggctctcgctgcgagcgccacctccacgcatacaagcggcggctgcggctgccagccaccgccgccggttcatctaccgccgccggtgcatctgccacctccggttcacctgccacctccggtgcatcttccaccgccggtccacctgccgccgccggtccacctgccaccgccggtccatgtgccgccgccggttcatctgncgnncgcaccatgccactaccctac

SEQ ID NO: 26238 - DNA, 341 bp, Zea mays
  Clone ID: LIB3154-014-Q1-K1-B6
caactagcaacatagaaagcacaatattgtaccaacaatggcagccaaaatatttggcctgcttatgctccttggtctttctgcaagtgctgctacggcgaccattttcccgaaatgctcgcaagctcctatagcttcccttcttcccccgtacctctcaccagcggtgtcttcggtatgtgaaaacccaattcttcaaccctacaggatccaacaggcaatcacagctggcatcttacctttatcacccttgttcctccaacaatcatcagccctattacatcagttacctttggtgcatttattggcacaaaacatcaaggcacaacaactacaacaac

SEQ ID NO: 26239 - DNA, 305 bp, Zea mays
  Clone ID: LIB3154-014-Q1-K1-B8
gcattcaaaaacacaccaagcgaagtgcactagcaacaacctaacaacaatggctgcgaggatattatccctccttgcgctacttgcgcttaatgcgagcgcaacaaatgcgtacattattccacaatgctaacttgctcctagttccattatttcacagttcctcccaccagttacttcaatggtcttcgaacacccaactgtgcaagcctataggctacaacaagcgattgcggcgagcgtattacaacaaccaattgcccaattgcaacaacaatacttggcacatctaacaatacaaacca

SEQ ID NO: 26240 - DNA, 255 bp, Zea mays
  Clone ID: LIB3154-014-Q1-K1-C11
gttattatcccatggttaatcacaattacacaaacgtatggctacactcaaaacttaggtatgaggaggggattgttattatcacattgttattatcccaatcagcacattaaatacacaagagctacactctcacccccattctcacacttgtaggtgagagatacttaatgccttgtgttcttgagtcttgcaagttcttgtgcttctattttgggttttcaagctcactctcacccgcattctcacacttgt

SEQ ID NO: 26241 - DNA, 275 bp, Zea mays
  Clone ID: LIB3154-014-Q1-K1-C3
ctgggtcttcagaccattagctttatctactccagagcgcagaagaacccgatcgacaccatgagggtgttgctcgttgccctcgctctcctggctctcgctgcgagcgccacctccacgcatacaagcggcggctgcggctgccagccaccgccgccggttcatctaccgccgccggtgcatctgccacctccggttcacctgccacctccggtgcatctcccaccgccggtccacctgccgccgccggtccacctgccaccgccggtccatgt

SEQ ID NO: 26242 - DNA, 318 bp, Zea mays
  Clone ID: LIB3154-014-Q1-K1-C4
attagaaggggagcggccagacgagacgatccaagcttcccgtccctgccatgcgacagggtaggtattgtgtcacgtaacctcaattcaatggactgggcgttgcaacacaacgactggactgacaaaaccgtgacccaactcaattgaatcgcattgcatcacattctcctctgctcaggtggcatcatagaggacaggaccgaaccgactgcccaacacaacagcagcccaaactgaatatggaatgggacgcgcactggagcatgaaattcagcgcgtgtggtgtggacgttacgcgcaacctgaacactacac

SEQ ID NO: 26243 - DNA, 220 bp, Zea mays
  Clone ID: LIB3154-014-Q1-K1-C5
attagctttatctactccagagcgcagaagaacccgatcgacaccatgagggtgttgctggttgccctcgctctcctggctctcgctgcgagcgccacctccacgcatacaagcggcggctgcggctgccagccaccgccgccggttcatctaccgccgccggtgcatctgccaccttcggttcacctgccacctccggtgcatcttccaccgccggtcc

SEQ ID NO: 26244 - DNA, 110 bp, Zea mays
  Clone ID: LIB3154-014-Q1-K1-D1
aagcaacatacaaaggcgacatcagaagcggcattcgagcaacactggcgggcaacaatggcggcctacatatgctccatgctcttgctgcatgcgttgcttacgcgacc

SEQ ID NO: 26245 - DNA, 242 bp, Zea mays
  Clone ID: LIB3154-014-Q1-K1-D10
aagcaacatactaaggggaattcagaagcggcattggggcgccactggcgggcaacatatgctccatacatatgctccatgctcatgctgcatgcgttgcttacgcgaccattttacccgaacactcacaagctactataacaggcctttatacccgatacctttcatcaatgaccgctataaatggcgaaaacacaatgctaaaaccctacaggctacaacaagcagttgcaacaagcaac

SEQ ID NO: 26246 - DNA, 96 bp, Zea mays
  Clone ID: LIB3154-014-Q1-K1-D12
gttatagatcgcgagcggtctatataaacgatccaggctgacgcacgcatgcatgcgacttcatatcttttatatagagctacctaaattcaattg

SEQ ID NO: 26247 - DNA, 315 bp, Zea mays
  Clone ID: LIB3154-014-Q1-K1-D2
gttgtagatcatcagcagccgctcttctagatgctacaagactaccgcctccatgctacgacgtagttgttctattatggcgcctaaaaacaataaactagtcgccgttgtacaacaacgtgactactaaaaaaacgctgtcaccaaacaaaataatcttgtagcacatcatccttttttcagctggtgtaataataaagaagagggcaccgatcatcgttcttaacaagagttgagcctgcatgatgaataatacgaccccccctgtagcgcattaatcaccgcgggtgttgtggttactacccgcatgatcac

SEQ ID NO: 26248 - DNA, 352 bp, Zea mays
  Clone ID: LIB3154-014-Q1-K1-D5
attcagaaacacaccaagcgaagcgcactagcaacgacctaacaacaatggctacgcaagagattagccctccttgcgcttcttgccctttttgtgagcgcaacaaatgcgttcattattccacaatgctcacttgctcctagtgccattattccacagttcctcccaccagttacttcaatgggcttcgaacacctagctgtgcaagccaacatgcaacaacaagcgcttgcggcgagcgtcttacaacaaccaattgcccaattgcaacaacaatccttgccacatctaacaatacaagccatcacaacgcaacagcaacaacagttcctaccagcactgagccacctag

SEQ ID NO: 26249 - DNA, 359 bp, Zea mays
  Clone ID: LIB3154-014-Q1-K1-D6
attcagaaacacaccaagcgaagcgcactatcaacgacctaacaacaatggctacgaagatattagccctccttgcgcttcttgccctttttgtgagcgcaacaaatgcgttcattattccacaatgctcacttgctcctagtgccattattccacagttcctcccaccagttacttcaatgggcttcgaacacctagctgtgcaagccaacatgcaacaacaagcgcttgcggcgagcgtcttacaacaaccaattgcccaattgcaacaacaatccttgccacatctaacaatacaagccatcacaacgcaacagcaacaacagttcctaccagcactgagccacctagccatggtg

SEQ ID NO: 26250 - DNA, 383 bp, Zea mays
  Clone ID: LIB3154-014-Q1-K1-D7
caacaagcaacatagaaagtggaatacagtatcaacaatcgagcaacaatggcggcgaaggtattttgcatccttatgctcctcgctctttctgcatgtgttgctaacgcgaccattttttctcaatactcacaagcttctatagctgcccttattaccccataccttacatcaatgaccgcttcagtatgtgaaaacccagctcttcaaccctacaggctccaacaagcaatcgcaacaagcaacttacctttatcacccctgttctttcaacaatcgccagccctatctttggtgcagtcattggtacaaaccatcacggcacaacagctgcagcaactcgtgctaccagtgatcagacaagtagctctggcaaacctttc

SEQ ID NO: 26251 - DNA, 59 bp, Zea mays
  unsure at all n locations
  Clone ID: LIB3154-014-Q1-K1-D9
acgcgacggcaaagcncnaccagagcgacaccgaaacccaaancacaggccgncggccg

SEQ ID NO: 26252 - DNA, 408 bp, Zea mays
  unsure at all n locations
  Clone ID: LIB3154-014-Q1-K1-E1
cgagaagttagtttccatggagaagaagcagaagaagcacgcacacgcgaggtcaaggagcttgaccggcggcgggctggcctccttcctcaggtccaccgtctcctccttctcctccgccttcccgcccagcggcaggaggtcctccttcaaccaccgcaacgccttctcgggccccatcgtcgtctccatcgtcccgccggaggctcgcggcggcggcggcaggaggaagcgcccggngtacgtgacgcccgagccgtcgtcgcccaaggtgtcctgcatcggccagatcaagcgcagcaactncaggcgccagaagaaggtcaccccgtcgtgcggcaaggcggcngcccctgcccgcttccgcgaggccgcagcggagacaagaagcctgcagcagacagcagc

SEQ ID NO: 26253 - DNA, 259 bp, Zea mays
  Clone ID: LIB3154-014-Q1-K1-E10
ctcaccagcggtttgttaggtctgtgaaaacccaacgctggaaccctacatgatccaacaggctatgccagctggcatttcaccttgatcagcctcggtgacccaacaatcataatgcctattagatcatatacctttggtgcatttattggaacaaaaaataacggcacatcaactacgacaactcgtgctagcaaaactttgctggtactatcaggaacagaaagttgttacattaaaccaactagctgcattgaac

SEQ ID NO: 26254 - DNA, 278 bp, Zea mays
  Clone ID: LIB3154-014-Q1-K1-E3
gcctagcaattagctcatcgactccagattggagaactcgacaccatgaaggtgctgatcgttgcccttgctctcctggcgctcgctgcgagcgccgcctccagtacaagcggcggctgtggctgccagacaccaccgtttcatctaccgcctccgttctatatgccgcctccgttctatctgccgccgcagcagcagccgcagccatggcaataccccactcaaccaccgcagctaagcccgtgccagcagttcggatcctgcggcgtcggcagcgt

SEQ ID NO: 26255 - DNA, 322 bp, Zea mays
  Clone ID: LIB3154-014-Q1-K1-E5
attttcagcattcagaaacacaccaagcgaagcgcactagcaacaacctaacaacaatgggtaccaagatattagccctccttgcgcttcttgcccttttagtgagcgcaacaaatgcgttcattattccacagtgctcacttgctcctagtgccattattccacagttcctcccaccagttacttcaatgggcttcgaacatccagccgtgcaagcctacaggctacaactagcgcttgcggcgagcgtcttacaacaaccaattgcccaattgcaacaacaatcctttgcacatctaaacctacaaaccattggaacgca

SEQ ID NO: 26256 - DNA, 394 bp, Zea mays
  Clone ID: LIB3154-014-Q1-K1-E6
attgagaccaactagcaacatagaaagcacaatagtgtaccaacaatggcagctaaaatgttttgcctccttatgctccttggtctttctgcaagtgctgctacggcgaccattttcccacaatgctcacaagctcctatagcttcccttcttcccccgtacctctcaccaacggtgtcttcggtatgtgaaaacccaattcttcaaccctacaggatccaacaggcaatcgcagctggcatcttacctttatcacccttgttcctccaacaatcatcagccctattacagcagttacctttggtgcatttattggcacaaaacatcaaggcacaacaactacaacaacttgtgctagcaaaccttgctgcctactctcagcaacagcagtttc

SEQ ID NO: 26257 - DNA, 245 bp, Zea mays
  Clone ID: LIB3154-014-Q1-K1-E7
gcaacatagaaagcacaatagtgtaccaacaatggcagccaaaatattttgcttccttatgctccttggtctttctgcaagtgctgctaccgcaaccattttccaacatgctcacagctctatgcttctttttcccatccttaccacgggctagttgtgaaccattttacctcagatcacaggcatcgagattactttacctgtctcacacgcagccataagagacttgtgattgtgacaacata

SEQ ID NO: 26258 - DNA, 267 bp, Zea mays
  Clone ID: LIB3154-014-Q1-K1-F10
tattgagaccaactagcaacatagaaagcacaatagtgtaccaacaatggcagccaaaatattttgcctccttatgctccttggtctttctgcaagtgctgctacggcgaccattttcccgcaatgctcgcaagctcctatagcttcccttcttcccccgtacctctcaccagcggtgtcttcggtatgtgaaaacccaattcttcaaccctacaggatccaacaggcaatcgcagctggcatcttacctttatcacccttgttcct

SEQ ID NO: 26259 - DNA, 345 bp, Zea mays
  Clone ID: LIB3154-014-Q1-K1-F2
cttgaccacaagaagaggcagaaggaagagaagacggcgatggaggaggagatggagaagctgaggcggcagcaagcagaggccgcgcgcatggagaaggagaaggaacgggagaagagagctaagcagcagcaacaggttgctatgcccggcctgaagaagggtgcgacttatctgaagcccaagagaatgggtctgtagataagacctgatataacttaactgtctccggtgattttgttactaggctgagggaacttgtaatgtgtagcctgctcaagcagcatgtaaaacaacacgtcaatgtgaatgtatacaacatcgacatgtgaaaaaatgaacaag

SEQ ID NO: 26260 - DNA, 313 bp, Zea mays
  Clone ID: LIB3154-014-Q1-K1-F3
ggatccaagattttcaagttctatgtgatcggagacaaggttttctacgccgctagagagtcaatgcccaacgcgcgcttcctgaagccgtcgacaggaggtgaagctcttacatttaatagtttgaagactcttccggtggctacgaatgagcagcgaccgcaaaccggctcggaagatggcaagctgttagatgccgatctggtagaagaggccgtaaaattactgaaggggctgcttgggcttacagtatttggattcgatgtcgtcattcaaaaggcaccggagaccatgtcatagtggacctgaacta

SEQ ID NO: 26261 - DNA, 362 bp, Zea mays
  Clone ID: LIB3154-014-Q1-K1-F5
ccagattggagaactcgacaccatgaaggtgctgatcgttgcccttgctctcctggcgcgcgctgcgagcgccgcctccagtacaagcggcggctgtggctgccagacaccaccgtttcatctaccgcctccgttctatatgccgcctccgttctatctgccgccgcagcagcagccgcagccatggcaataccccactcaaccaccgcagctaagcccgtgccagcagttcggatcctgcggcgtcggcagcgtcggcagcccgttcctgggccagtgcgtcgagttcctgaggcaccagtgcagcccggcggcgacgccctacggctcgccacagtgccaggcgctgcagcagcagtgct

SEQ ID NO: 26262 - DNA, 261 bp, Zea mays
  Clone ID: LIB3154-014-Q1-K1-F6
atcgactccagattggagaactcgacaccatgaaggtgctgatcgttgcccttgcggtcgtggcgctcgctgcgagcgccgcctccagtacaagcggcggctgtggctgccagacaccaccgtttcatctaccgcctccgttctatatgccgcctccgttctatctgccgccgcagcagcagccgcagccatggcaataccccactcaaccaccgcagctaaacccgtgccagcagttcggatcctgcggcgtcagcagcg

SEQ ID NO: 26263 - DNA, 292 bp, Zea mays
  Clone ID: LIB3154-014-Q1-K1-G1
ctcccgtgcccctcactgtttagtggcgacaactgggcgacagtcgccgccgccgcccggtaggggccgtgcccctggtctccatcttcggcgcttcgcccaccagatatgagcagctggcaattcgattttgaggccattatttgataacccgggacaagtgcactggttacctgaccattttagctttttgagatggctacacagttgccatgcttaacacagttaagtccacgcgctggtagttggataaaggatgtcggaaactgcaaggctactcctgatagggtag

SEQ ID NO: 26264 - DNA, 250 bp, Zea mays
  Clone ID: LIB3154-014-Q1-K1-G3
cagcattcagaaacacaccaagcgaagcgcactagcaacaacctaacaacaatggctaccgagatattagccctccttgcgcttcttgcccttttagtgagcgcaacaaatgcgttcattattccacagtgctcacttgctcctagtgccattattccacagttcctcccaccagttacttcaatgggcttcgaacatccagctgtgcaagcctacaggctacaactagcgcttgcggcgagcgttttac

SEQ ID NO: 26265 - DNA, 401 bp, Zea mays
  Clone ID: LIB3154-014-Q1-K1-G4
cttcagaccattagctttatctactccagagcgcataagaacccgatcgacaccatgagggtggggctcgttgccctcgctctcctggctctcgctgcgagcgccacctccacgcatacaagcggcggctgcggctgccagccaccgccgccggttcatctaccgccgccggtgcatctgccacctccggttcacctgccacctccggtgcatctcccaccgccggtccacctgccgacgccggtccacctgccaccgccggtccatgtgccgccgccggttcatctgccgccgccaccatgccactaccctactcaaccgccccggcctcagcctcatccccagccacacccatgcccgtgccaacagccgcatccaagcccgtgccagcttgcaggaac

SEQ ID NO: 26266 - DNA, 317 bp, Zea mays
  Clone ID: LIB3154-014-Q1-K1-H1
cagcattcagaaacacaccacgcgaagcgcactgtcctcaacctaacatcactggcttgcggggggtgagccctgcttgcgctgctcgccctgttagtgagcgcaacacatgcgatgattatatcacagcgctgagttgattctagtgtcattatatcacagttccttccaccagatactttaatgggcttggaacatacaatcgagccaggctagaggctacaactagagcttgccgtgagcgtattacaacaacccattgcacaattgcaacaacaatacttggcacatctcaacctacaaaacatagcaacgca

SEQ ID NO: 26267 - DNA, 273 bp, Zea mays
  unsure at all n locations
  Clone ID: LIB3154-014-Q1-K1-H10
gcagcgcgtaatgaggatcgccgaacagaacagcaggaagatggccatcggtctcgtggcgtgcctggctctgtcagctgccatcgcctatgtaatgcagatgccctgcccctgctcggggctgcatggcttgtactgcgctggctcccgcctgacgacgatgatgggcgcccgctgactgtacccctacgcggagtacctgacgcagacccactgcagcccgctggctgcagcgccctactacgccnggtgtggtcagacgagcgccatgta

SEQ ID NO: 26268 - DNA, 169 bp, Zea mays
  Clone ID: LIB3154-014-Q1-K1-H11
gtcagcctaacaattaggctcatcgactccagattgggagaactcgacaccatgaaggtgctgatcgttgcccttgctctcctggcgctcgctgcaagcgccggctccaaacaagcagggtgggctgcagacaccacgtgtattacgctcgtcattccgctcggaatct

SEQ ID NO: 26269 - DNA, 220 bp, Zea mays
  unsure at all n locations
  Clone ID: LIB3154-014-Q1-K1-H12
gaaacacaccaagcgaaacgcactagcaacaacctaacaacaatggctaccaagatattagccctccttgcgcttcttgcccttttagtgagcgcaacaaatgcgttcattattccacagtgctcacttgctcctagtgccattattccacagttcctcccaccagttacttcaatgggcttcgaacatccagccgtgcaagcctacagngctacaacta

SEQ ID NO: 26270 - DNA, 260 bp, Zea mays
  Clone ID: LIB3154-014-Q1-K1-H4
gagaccaacaagcaacatagaaaggggaatccagtagcaacaatagagcaacaatggcgggcaagatattttccctccttatgctccttgctctttctgcatgtgttgctaacgcgacaattttccctcaatgctcacaagctcctatagcttcccttcttcccccataccttccatcaatgatagcttcagtatgtgaaaacccagctcttcaaccctataggctccaacaagcaatcgcagcaagcaacataccttta

SEQ ID NO: 26271 - DNA, 259 bp, Zea mays
  Clone ID: LIB3154-014-Q1-K1-H5
attttgagcattcagaaacacaccaagcgaagcacattagcaacaacctaacaacaatggctaccaagatattatccctccttgcgcttcttgcgctttttgcgagcgcaacaaatgcgttcattattccacaatgctcacttgctccaagttccattattacacagatcctcccaccagttacttcaatgggcttcgaacacccagctgtgcaagcctataggctacaacaagcaattgcggcgagcgtcttacaaca

SEQ ID NO: 26272 - DNA, 197 bp, Zea mays
  Clone ID: LIB3154-014-Q1-K1-H6
atccaaatcagataagcggaagtgcgtagtgtggatcggttcacagaacagcatggcgaggggcatggctttcgtcttgtgccttgctttgttaacttgcatggcctctgcaatgcaaatgcccttgcccctgcccggggctggaaggcttggactgtactgggcccgggcctaccacaatgataggatccgggggg

SEQ ID NO: 26273 - DNA, 247 bp, Zea mays
  Clone ID: LIB3154-014-Q1-K1-H9
gcaacatagaaagcacaatagtgtaccaacaatggcggccgaaatattttgcctccttatgctccttggtctttctgcaagtgctgctacggcgaccattttcccgaaatgctcgcaagctcctatagcttcccttcttcccccgtacctctcaccagcggtgtcttcggtatgtgaaaacccaattcttcaaccctacaggatccaacaggcaatcacagctggcatcttacctttatcacccttg

SEQ ID NO: 26274 - DNA, 201 bp, Zea mays
  Clone ID: LIB3154-004-Q1-K1-B12
atgcgaggtggtatatcttttatattgtgacataaattcaatttactgtgcgcggttttacaccgcgttgactgtgaaaacactgtcgttacacaacttaatctccttgcagaacatatccctttctccagatgtcgtaatatcgaaaaggcgcgcaccgatcgcgcttttcaacagatgcgcacactgtatgtcgaatgt

SEQ ID NO: 26275 - DNA, 55 bp, Zea mays
  Clone ID: LIB3154-004-Q1-K1-D6
gagttttaatccccagccggccgttttagtggttccaactctccttccccttcct

SEQ ID NO: 26276 - DNA, 101 bp, Zea mays
  Clone ID: LIB3154-005-Q1-K1-A10
tttccagctgggtattgcgaaaggccgtccgatcgccttcccaaagttgccagctgatgggaatgggacgcccctgtacgggcattaagcgcagggtgtgg

SEQ ID NO: 26277 - DNA, 61 bp, Zea mays
  Clone ID: LIB3154-005-Q1-K1-F12
agactagtttctatgatctgcgagtcggcgcggtcctagagagatgccagagcgttatcgc

SEQ ID NO: 26278 - DNA, 305 bp, Zea mays
  Clone ID: LIB3154-005-Q1-K1-H1.R1
ctttggtaagtaggtaaaatacccgaaacgatcgcacttatcaacatttgcaacaatttaatcagtaatatggacgaatcctgataccggctatataagcgattaagtgtgcgggttagctagacactaaacttgtaaacttctaagcgcgtactttggttttcttcgctttctttcttgccatgttcgccaggtttgcccgttaagctctaaaacgtggaaatcctttaggtcccctatgtagtgctttaagggatttagagcacataaaacttaaaataattgattgttcacataggtcaata

SEQ ID NO: 26279 - DNA, 296 bp, Zea mays
  Clone ID: LIB3154-005-Q1-K1-H1.R2
ctcactctagatcgcgagcagccggagtagacgatccaagacgaaccaacgcgagcatgccacgcattagatgttctatagcgtcaattaagttaactacactgaccgcacgtggtacaacgtctacactgggaaaaccgtgaagacaccgaacttactcaacttgcaggacatgcaccttatgccagttggcgcaatagccaaaaggcccaaaacgaccgcacttaccaacatttgcacaagctgaacggccaaagggacgaacgctacacccgctcattaagcgcattaagcgc

SEQ ID NO: 26280 - DNA, 212 bp, Zea mays
  unsure at all n locations
  Clone ID: LIB3154-006-Q1-K1-D5
aattcccgggggtcggacccacgcccgtccnngctagttcttagatnncgcgagcgtgtccgctctatgatgganntccaagcnnttacgtacccgcgtgnncatgcgacngnntcatagctnnncttctattagtggtcacncnntaaattcannattcactggccnnngtcgttttaccaaacgtcnnngtgacttgggaaannnaccct

SEQ ID NO: 26281 - DNA, 57 bp, Zea mays
  unsure at all n locations
  Clone ID: LIB3154-006-Q1-K1-G5
aaggcccgcnnaccgatcgcnnccttcccnnnacagtttgcgcagccccctgaatgg

SEQ ID NO: 26282 - DNA, 74 bp, Zea mays
  Clone ID: LIB3154-007-Q1-K1-F10
gacgcactctgtagctttgcattaaacgccgctgttgtagtgggtactcacagcgaaaacgctacacttgacag

SEQ ID NO: 26283 - DNA, 65 bp, Zea mays
  unsure at all n locations
  Clone ID: LIB3154-007-Q1-K1-G11
ggaannaacggggcggcccacccacgcgtaaaaaaaaaaaaaaaaaagaaacggccctttttttt

SEQ ID NO: 26284 - DNA, 62 bp, Zea mays
  Clone ID: LIB3154-010-Q1-K1-A5
gtatacaaaggcccccgacgcttcacatgcagctgatgatgaccctgcgatagcggtgggtc

SEQ ID NO: 26285 - DNA, 58 bp, Zea mays
  Clone ID: LIB3154-011-Q1-K1-A1
ggccgttttaaaggttccagcttaacttccccttgcttgcaaggtattagtttttttt

SEQ ID NO: 26286 - DNA, 65 bp, Zea mays
  Clone ID: LIB3154-014-Q1-K1-C12
tagacccctagcggtctatatcgttggtgcacgctttcgaacgcccgggtgggacgtcacatgca

SEQ ID NO: 26287 - DNA, 386 bp, Zea mays
  Clone ID: LIB3154-002-Q1-K1-A7
agaccattagctttatctactccagagcgcagaagaacccgatcgacaccatgagggtgttggtcgttgccctcgctctcctggctctcgctgcgagcgccacctacacgcatacaagcggcggctgcggctgccagccaccgacgccggttcatttaccgacgccggtgcatctgccacctacggttcacctgccacctacggtgcatgtatcaccgacggtccacctgccggcgccggtccacctgccaccgcccgtccatgtgccggccgccggtcatttgtcggcggcaccatgccaataccctacttaaccgacccgggcttaatcttattcccagccacacccatgcccgtgccaacagacggattcaaacccgtgccag

SEQ ID NO: 26288 - DNA, 482 bp, Zea mays
  unsure at all n locations
  Clone ID: LIB3154-002-Q1-K1-A8
atttgcaacaacaacaactaccattcagccagctacctgttgcctacccccagcaatttcttccattcaaccaactggcagcattgaactctcctgcttatttacagcagcaacaactactaccattcagccagctagctggtgtgagccctgctaccttcttgacacaaccacagttgttgccgttctaccagcacgctgcgcctaacgctggcaccctcttacaactgcaacaattgctgccattcaaccaacttgctttgacaaacctagcagtgttctaccaacaacccatcattggtggtgccctcttttagatttcttatgagttatagttcaataataaagttttttgtctgatgtttgtggcttcccaaaaataagaaagtacatttctaaaaaaaaanaatnnntntaaaataaaatatataatttatttaatttatataattttattttttaataaatataatattattaat

SEQ ID NO: 26289 - DNA, 360 bp, Zea mays
  Clone ID: LIB3154-002-Q1-K1-A9
agaccattagctttatctactccagagcgcagaagaacccgatcgacaccatgagggtgttgggcgttgccctcgctctcctggctctcgctgcgagcgccacctccacgcatacaagcggcggctgcggctgccagccaccgccgccggttcatctaccgccgccggtgcatctgccacctccggttcacctgccacctccggtgcatctcccaccgccggtccacctgccgccgccggtccacctgccaccgccggtccatgtgccgccggcggttcatctgccgccgccaccatgccactaccctactcaacccgcccggcctcagcctcattcccagccacacccatgcccgtgcc

SEQ ID NO: 26290 - DNA, 347 bp, Zea mays
  Clone ID: LIB3154-002-Q1-K1-B1
cggacgcgtgggtgagcattcacaaacacaccaagcgaagcacattagcaacaacctagcggcaatggctaccaagaggtggtgcctccttgcgcttcttgcgctttttgcgagcgcaacaaatgcgttcattattccacaatgctcacttgctccaagttccattattacacagatcctcccaccagttactttaatgggcttctaacacccatctttgcaagcctataggctacaacaagcaattgctgcgatgcgtttacaacaaccaattttccagttgcaacatctattcttggcacatctaacatttccaaccattgcttcgcaatatcttcaacaatttc

SEQ ID NO: 26291 - DNA, 317 bp, Zea mays
  unsure at all n locations
  Clone ID: LIB3154-002-Q1-K1-B3
caacaagcaacagagaaagcggaaaccagnaccaacaaaagagcaacaanggcgaccaagggaggnacccaccgaaggcgggggggcacaaacagcaagcgnagcaaacgcgacaaaanacccccaaggcacacaagcaccaagagcgacccaacgaaccccagaccngacaacaaagaaagcaacaggaggggaaaacccaacacaacaacccgaaaagcnccaacaagcaaacgcagcaagcaacaaaccaaaaacacccgagaaacaacaaacgccagccccaacaaaggggcaggcaagggaacaaaccaaca

SEQ ID NO: 26292 - DNA, 325 bp, Zea mays
  Clone ID: LIB3154-002-Q1-K1-B7
catagcggcagtgcgtagagaggatcgtcgaacagaacagcatgaagatggtcatcgttctcgtggtgtgcctggctctgttagctgccaccacctctgcaatgcagatgccctgcccctgctcggcgctgcagggcttgtacggcgctggcgccggcctgacgactatgatgggcgccggcgggctgtacccctactcggagtacctgatgcagccgcagcgcagcacgctggcggcggcgccctactactacgggtgttgtcagacgagcgccatgtaccagccgcttcggcaacagtgctgccagcagcagatgatgatgat

SEQ ID NO: 26293 - DNA, 169 bp, Zea mays
  Clone ID: LIB3154-002-Q1-K1-C1
atgcgacgtaagtatcttggtatagtggcacgtaaagttaattcaatgatcgtcgctttacaacgtcaagattgtaaaaactctgtcgttacccaacataattcaccatgcagcgaatgcggcatgtgaaagctggagtcttaaacgatacaggatgcaacgatgcgat

SEQ ID NO: 26294 - DNA, 346 bp, Zea mays
  Clone ID: LIB3154-002-Q1-K1-C8
attttgagcattcagaaacacaccaagcgaagcacattagcaacaacctaacaacaatggctaccaagatattatccctccttgcgcttcttgcgctttttgcgagcgcaacaaatgcgttcattattccacaatgctcacttgctccaagttccattattacacagttcctcccaccagttacttcaatgggcttcgaacacccagctgtgcaagcctataggctacaacaagcaattgcggcgagcgtcttacaacaaccaatttcccagttgcaacaacaatccttggcacatctaacaatacaaaccatcgcaacgcaacagcacaacaattctaccgcact

SEQ ID NO: 26295 - DNA, 272 bp, Zea mays
  Clone ID: LIB3154-002-Q1-K1-D1
cggacgcgtgggtgttgccgttctacctgcacgctgcgcctaacgctggcaccctcttacaagggcaacaattgctgccattcaaccaacttgctttgacaaacccaacagcgttctaccaacaacccatcattggtggtgccctcttttagattgcttatgagttatagttcaataatgaagttttttggatgatgtttgtggcttcccagaaataagaaagtacatttctagattcttaaaaataaaaaaaaaataataaaatttttttt

SEQ ID NO: 26296 - DNA, 422 bp, Zea mays
  Clone ID: LIB3154-002-Q1-K1-D10
tttgcactcatccatcacaaaacattcttctatctattccatcattcatcattcatcttattgttatatgcaccaaatcagatgggcaacattaattatctaactccaaaaaccatgaatctggttcttgtggttcttgctttcattgcttaaatatcaagtgtttcttgttcacaaacatgctgctgcatctgtgttcaacaacaaaattcttagctttatcatcatccacatcatcttcatccataaaaacatcatcatctaccaccaccattacatcaccatcatcatcatctccaacatcatctagttcacatgcaaccacaataacatcatcaacaacatgaagtttatgttcatactacaacatcaacaacctgtttcacctaacactaacaacaacaacttctcctactacaaca

SEQ ID NO: 26297 - DNA, 471 bp, Zea mays
  Clone ID: LIB3154-002-Q1-K1-D11
caacaagcaacatagaaagtggaatccagtagcaacaatagagcaacaatggcgaccaagatattttccctccttatgctccttgctctttctgcatgtgttgctaacgcgacaattttccctcaatgctcacaagctcctatagcttcccttcttcccccataccttccatcaatgatagcttcagtatgtgaaaacccagctcttcaaccctataggctccaacaagcaatcgcagcaagcaacatacctttatcacccttgtttcaacaatcgccagccctatctttggtgcagtcattggtacaaaccatcagggcacagcagctgcagcaactcgtgctacctgtgatcaaccaagtagctctggcaaacctttctccctactctcagcaacaacaatttcttccattcaaccaactgtctacattgaaccgtgctgcttatttgcagcaacaactattaccattc

SEQ ID NO: 26298 - DNA, 51 bp, Zea mays
  Clone ID: LIB3154-002-Q1-K1-D5
cgttcacatcgtcaacaacatcaccaacatctcgaagtttatgttcaacat

SEQ ID NO: 26299 - DNA, 290 bp, Zea mays
  Clone ID: LIB3154-002-Q1-K1-D6
ctgactattaacaccatctactccatatagcacaaaaccccgaacaacaccatcaagacggtgagggtgttcctcgttgtcctggctctccttgctagcgctaccagcacccattcaacccgtacaagcggctgccagccatggcagccagttcatctatcgcatctaccgcatctggcacatctggtacacctggtacatctggtacatctggtacatctggtacagctggtgcagctggtgcagccggtacaactggtacatgtgctgcatgtggctcatctggttca

SEQ ID NO: 26300 - DNA, 437 bp, Zea mays
  Clone ID: LIB3154-002-Q1-K1-D7
cggacgcgtgggttcagaaacacaccaagcgaagcgcactagcaacaacctaacaacaatggctagcaagatattatccctccttgcgcttcttgcgctttttgcgagcgcaacaaatgcgtccattattccacaatgctcacttgctcctagttccattattccacagttcctcccaccagttacttcaatggccttcgaacacccagctgtgcaagcctataggctacaacaagcgattgcggcgagcgtcttacaacaaccaattgcccaattgcaacaacaatccttggcacatctaacaatacaaaccatcgcaacgcaacagcaacaacagttcctaccagcactgagccacctagccatggtgaaccctgtcgcctacttgcaacagcagctgcttgcatccaacccacttgctctagcaaacgtagttg

SEQ ID NO: 26301 - DNA, 395 bp, Zea mays
  Clone ID: LIB3154-002-Q1-K1-E11
gcggcggctacggtggtggtggcggcggctacggcggtggcaaccgtggcggcggctacggcagctccgacgggaactggaggaactgagcggtggggcccgcgcggccaagttatcctgttcgctaccgtgttgtttaccctagtccagagtgtttatcttcgttcgtctcgtgtttgttgttgcccatctgtgtttttgattgaaggtcgctctgtgtcagttgttagtgctgtgttcatcctcggctccagcagacccatgcatcaaccagcatggactgcggatcgatgggtgctgttacccccgtcaggctttattctaagttaaatcctaaggaaaaaaatggtgcttcttggtgctgcaaaaaaaaaaaaaaaatatataataattat

SEQ ID NO: 26302 - DNA, 342 bp, Zea mays
  Clone ID: LIB3154-002-Q1-K1-E3
caacaacatcaatgtgaaggccaacaacaacatcaccaacaatcacaaggccatgtgcaggagcacgaacagagccatgagcaacaccaaggacagagccatgagcaacaacatcaacaacaattccagggtcatgactagcatctacaaccacaacagcctcagcaatatcagcagggccaggaaaaatcacaacatcaacaatgtcattgccagtagcagcaacagactacaaggtgcagctataactactatagcagtagctcaaatctaaaaaattgtcatgaattcctaaagcagtagtgcagcccttaggtaatgccttatctccaatcacgtttg

SEQ ID NO: 26303 - DNA, 445 bp, Zea mays
  Clone ID: LIB3154-002-Q1-K1-E6
caagaaatccatcgagaggccgtcgacaggggaattaatggcgtcgtcgtctagcagcaggcagcgccgcctcatcctggcagccgccgtcctgctctccgtgctcgcggctgccagcgccagcgccgggacctcctgcgtgccggggtgggccatcccgcacaacccgctcccgagctgccgctggtacgtgaccagccggacctgcggcatcgggccgcgcctcccgtggccggagctgaagaggagatgctgccgggagctggcggacatcccggcgtactgccggtgcacggcgctgagcatccttatggacggcgcgatcccgccgggcccggacgcgcagctggagggcctgctagaggacctgccgggcctgccgcgggaggtgcagaggggattcgccgtcaccctcgtacggaggccgagtgcactctgccaccat

SEQ ID NO: 26304 - DNA, 423 bp, Zea mays
  Clone ID: LIB3154-002-Q1-K1-E7
agctcatcgactccagattggagaactcgacaccatgaaggtgctgatcgttgcccttgctcgcctggcgctcgctgcgagcgccgcctccagtacaagcggcggctgtggctgccagacaccaccgtttcatctaccgcctccgttctatatgccgcctccgttctatctgccgccgcagcagcagccgcagccatggcaataccccactcaaccaccgcagctaagcccgtgccagcagttcggatcctgcggcgtcggcagcgtcggcagcccgttcctgggccagtgcgtcgagttcctgaagcaccagtgcagcccggcggcgacgccctacggctcgccacagtgccaggcgctgcagcagcagtgctgccaccagatcaagcaggtggagccgctgcaccggtaccaggcgacata

SEQ ID NO: 26305 - DNA, 446 bp, Zea mays
  Clone ID: LIB3154-002-Q1-K1-E8
cacaacacaaccaaccacctcactcgatctctcatcactcgcaagtccagcgatcaccaaccagagctcggctccaagcctccaactccaacccaaggagacagatacgttcgcagatggcgggtgcagcgaaggcgtcgtggatggtggccatgagcgtgggcgccgtggaggcgctcaaggaccagggtggcctctgccgctggaactacgcgctgcggtccgtccaccgcaccgccaaggccaacgtccgcagcagcctcgccgcgcagcgggacaaggagctggccccggcggcggagtcgaagaggcggccgggcaaggccgccgcggaggaggggatgaggaccgtcatgtacctcagctgctggggacccaactaggaggactagctagggttcactgttcagttcattgctggtgctgggttcagttcagacctggct

SEQ ID NO: 26306 - DNA, 455 bp, Zea mays
  Clone ID: LIB3154-002-Q1-K1-E9
attggcacaaaacatcagggcacaacaactacaacaacttgtgctagcaaaccttgctgcctactctcagcaacagcagtttcttccattcaaccaactagctgcattgaactctgcttcttatttgcaacaacaacaactaccattcagccagctacctgctgcctacccccagcaatttcttccattcaaccaactggcagcattgaactctcctgcttatttacagcagcaacaactactaccattcagccagctagctggtgtgagccctgctaccttcttgatacaaccacagttgttgccgttctaccagcacgctgcgcctaacgctggcaccctcttacaactgcaacaattgctgccattcaaccaacttgctttgacaaacccagcagcgttctaccaacaacccaacattggtggtgccctcttttagatttcttatgagttat

SEQ ID NO: 26307 - DNA, 361 bp, Zea mays
  Clone ID: LIB3154-002-Q1-K1-F1
gtcttcagaccattagctttatctactccagagcgcagaagaacccgatcgacaccatgagggtgttgctcgttgccctcgctctcctggctctcgctgcgagcgccacctccacgcatacaagcggcggctgcggctgccagccaccgccgccggttcatctaccgccgccggtgcatctgccacctccggttcacctgccacctccggtgcatctcccaccgccggtccacctgccgccgccggtccacctgccaccgccggtccatgtgccgccgccggttcatctgccggcgccaccatgccactaccctactcaaccggcccggccttagccttatccccaggcacacccatgccc

SEQ ID NO: 26308 - DNA, 451 bp, Zea mays
  Clone ID: LIB3154-002-Q1-K1-F10
gcaacatagaaagcacaatattgtaccaataatggcagccaaaatattttgcctcattatgctccttggtctttctgcaagtgctgctacggcgagcattttcccgcaatgctcacaagctcctatagcttcccttcttcccccatacctctcaccagcgatgtcttcagtatgtgaaaatccaattcttctaccctacaggatccaacaggcaatcgcagcaggcatcttacctttatcacccttgttcctccaacaatcatcagccctattacagcagttacctttggtgcatttattggcacaaaacatcagggcacaacaactacaacaactcgtgctagcaaaccttgctgcctactctcagcaacagcagttacctttggtgcatttgttggcacaaaacatcagggcacaacaactacaacaactcgtgctagcaaaccttgct

SEQ ID NO: 26309 - DNA, 465 bp, Zea mays
  Clone ID: LIB3154-002-Q1-K1-F4
ggaatccagtagcaacaatagagcaacaatggcgaccaagatattttccctccttatgctccttgctctttctgcatgtgttgctaacgcgacaattttccctcaatgctcacaagctcctatagcttcccttcttcccccataccttccatcaatgatagcttcagtatgtgaaaacccagctcttcaaccctataggctccaacaagcaatcgcagcaagcaacatacctttatcacccttgtttcaacaatcgccagccctatctttggtgcagtcattggtacaaaccatcagggcacagcagctgcagcaactcgtgctacctgtgatcaaccaagtagctctggcaaacctttcttcctactctcagcaacaacaatttcttccattcaaccaactgtctacattgaaccgtgctgcttatttgcagcaacaactattaccattcagccagctagctac

SEQ ID NO: 26310 - DNA, 448 bp, Zea mays
  Clone ID: LIB3154-002-Q1-K1-F6
caactagcaacatagaaagcacaatagtgtaccaacaatggcagccaaaatattttgcctgggtatgctccttggtctttctgcaagtgctgctacggcgaccattttcccgcaatgctcgcaagctcctatagcttcccttcttcccccgtacctctcaccagcggtgtcttcggtatgtgaaaacccaattcttcaaccctacaggatccaacaggcaatcgcagctggcatcttacctttatcacccttgttcctccaacaatcatcagccctattacaacagttacctttggtgcatttattggcacaaaacatcagggcacaacaactacaacaacttgtgctagcaaaccttgctgcctactctcagcaacagcagtttcttccattcaaccaactaggttcattgaactctgcttcttatttgcaacaacaacaactacca

SEQ ID NO: 26311 - DNA, 168 bp, Zea mays
  Clone ID: LIB3154-002-Q1-K1-F9
cgggacgcacgctgtatcggaccattaatcgcgccgggcgttgagggcacccgcagtgggaccgatacacttgccaacgccttaactcgcgatccttttagtttccgccctttctttcttgtcacgttcgcctgttttccccgtcgagctctaaatccggggctctct

SEQ ID NO: 26312 - DNA, 469 bp, Zea mays
  Clone ID: LIB3154-002-Q1-K1-G10
attgagaccaactagcaacatagaaagcacaatagtgtaccaacaatggcagccaaaatattttgcttccttatgctccttggtctttctgcaagtgctgctaccgcaaccattttcccacaatgctcacaagctcctatagcttcctttcttcccccatacctctcaccagcggtgtcttcagtatgtgaaaacccaattcttcaaccctacaggatccaacaggcaatcgcagcaggcatcttacctttatcacccttgttcctccaacaaccgtcagccctattacagcagttacctttggtgcatttgttggcacaaaacatcaaggcacaacaactacaacaacttgtgctaggaaaccttgctgcctactctcagcaacagcagtttcttccattcaaccaactggctgcattgaactctgctgcttatttgcaacaacaactaccattcagtcagctagctg

SEQ ID NO: 26313 - DNA, 275 bp, Zea mays
  Clone ID: LIB3154-002-Q1-K1-G4
caacaacctccagacctatcttcgttgcaagcattgttacaaaccattaaggcacaacagcgtgtgcagcttgatgcatgctgcgagcaaccaattcacgtcgctgcataccgttatcattactctgcacagcaacaatgcttttaattcaaccaactgtctacactgaaccttactacttatgtgtagaaacaactataaccatatagtcatatagtatctgactaatctcaacaacaacaactgcatctattcaacctaacggtcgtacttaa

SEQ ID NO: 26314 - DNA, 450 bp, Zea mays
  Clone ID: LIB3154-002-Q1-K1-G6
cttcagaccattagctttatctactccagagcgcagaagaacccgatcgacaccatgagggtggtgctcgttgccctcgctctcctggctctcgctgcgagcgccacctccacgcatacaagcggcggctgcggctgccagccaccgccgccggttcatctaccgccgccggtgcatctgccacctccggttcacctgccacctccggtgcatctcccaccgccggtccacctgccgccgccggtccacctgccaccgccggtccatgtgccgccgccggttcatctgccgccgccaccatgccactaccctactcaaccgccccggcctcagcctcatccccagccacacccatgcccgtgccaacagccgcatccaagcccgtgccagctgcagggaacctgcggcgttggcagcaccccgatcctgggccagtgcgtcgagtttctg

SEQ ID NO: 26315 - DNA, 426 bp, Zea mays
  Clone ID: LIB3154-002-Q1-K1-H11
agctttatctactccagagcgcataagaacccgatcgacaccatgagggtgttgctcggtgccgtcgctctcctggctctcgctgcgagcgccacctccacgcatacaagcggcggctgctgctgccagccaccgccgccggttcatataccgccgccggtgcatatgccacctgcggttcacctgccacctccggtgcatgtcccaccgccggtccacctgacggcgccggtacacctgccaccggcggtacatgtgccggcgccggttcatgtgccggcgccaccatggcactaccctactcaaccgacccggccttagactcatccccagccacacccatgcccgtgccaacagccgcatgcaagcccgtgccagctgcaaggaacctgcggcgttggcaacaccccgatcctgggccaatgc

SEQ ID NO: 26316 - DNA, 446 bp, Zea mays
  Clone ID: LIB3154-002-Q1-K1-H5
gagcattcagaaacacaccaagcgaagcacattagcaacaacctaacaacaatggctaccaagagattatccctccttgcgcttcttgcgctttttgcgagcgcaacaaatgcgttcattattccacaatgctcacttgctcctagtgccattattccacagttcctcccaccagttacttcaatgggcttcgaacacccagctgtgcaagcctataggctacaacaagcaattgcggcgagcgtcttacaacaaccaatttcccagttgcaacaacaatccttggcacatctaacaatacaaaccatcgcaacgcaacagcaacaacagtttctgccagcactgagccacctagccatggtgaaccctgccgcctacttgcaacagcagttgcttgcatcaaacccacttgctctggcaaacgtagttgcaaaccaaccacaaca

SEQ ID NO: 26317 - DNA, 448 bp, Zea mays
  Clone ID: LIB3154-002-Q1-K1-H6
tagcaacatagaaagcacaatagtgtaccaacaatggcagccaaaatattttgcctccttatgctccttggtctttctgcaagtgctgctacggcgaccattttcccacaatgctcacaagctcctatagcttcccttcttcccccgtacctctcaccagcggtgtcttcggtatgtgaaaacccaattcttcaaccctataggatccaacaggcaatcgcagctggcatcttacctttatcacccttgttcctccaacaatcatcagccctattacagcagttacctttggtgcatttattggcacaaaacatcagggcacaacaactacaacaacttgtgctagcaaaccttgctgcctactctcagcaacaacagtttcttccattcaaccaactagctgcattgaactctgcttcttatttgcaacaacaacaactaccattca

SEQ ID NO: 26318 - DNA, 121 bp, Zea mays
  unsure at all n locations
  Clone ID: LIB3154-009-Q1-K1-A5
cagaccattagctntatctactccagagcgcagaagatacccgatcgacaccatgtgggtgtagctcgttgccctcgctctcctggctctcgctgcgagcgccacctccacgcatacaagc

SEQ ID NO: 26319 - DNA, 250 bp, Zea mays
  Clone ID: LIB3154-009-Q1-K1-A6
aggatacctagctgcctactctcagcaacagcagtttcttccattcaaccaactggctgcatagaactctgctagcttattgcaacaacaactaccattcagtcagctagctgctagcctaccccagcaatttcttccattcaaccaactggcagcattgaactctgctgcttaattacaacagcaacagctaccaccattcagccagctagctgatgtgagccctgttgccttcttgacacaacaacag

SEQ ID NO: 26320 - DNA, 366 bp, Zea mays
  unsure at all n locations
  Clone ID: LIB3154-009-Q1-K1-B2
cgacccacgcgtncgatttgagcattcagatcacaccaagcgaagcgcactagcaacgacctaacaacaatggctaccaagatattagccctccttgcgcttcttgccctntntgtgagcgcaacanatgcgtgcattattccacaatgctcactagctcctagtgccattattccacagttcctcccaccagttacttcaatgggcttcgaacacctagctgtgcaagccaacatgcaacatcaagcgctagcggcgagcgtctacaacaaccaatagccaatagaacaacaatccttgcacatctacaatacaagccatacaacgcacagcaacatcagtcctaccacactgaccacctaccat

SEQ ID NO: 26321 - DNA, 366 bp, Zea mays
  Clone ID: LIB3154-009-Q1-K1-B4
gagaccaactagcatcatagaaagcacaatagtgtaccaacaatggcagccaaaatattttgcttccttatgctccttggtctttctgcaagtgttgctaccgcaaccattttcccacaatgctcacaagctcctatagcttcccttcttcccccatacctctcaccagcggtgtcttcaatgtgtgaaaacccaattgtcaaccctcaggatcacaggaatcgacaggctttacatataccctgttctcacaccgcagctatacagagtccttgtcattgtgccaacataggcacactcacactggctcaactgtgatcttagactagtctcatcacacgtgatgattgtgtatgaacatcatac

SEQ ID NO: 26322 - DNA, 338 bp, Zea mays
  Clone ID: LIB3154-009-Q1-K1-B5
caagcaacatagaaagtggaatacagtagcaacaatagagcaacaatggcggccaagatattttccatccttatgctccttgctctttctgcatgtgttgctaacgcgaccatttttcctcaatactcacaagctcctatagctgcccttcttccccataccttccataatgaccgttcatatgtgaaacccacccttaaccctacaggctcacaagcaatgacaagcaatacttatacctgtcttaacatgcagctatttgtgagcatgtcaacataagaacagtgacactgtctcatatagcatagttgaactttctattagacacatttcataca

SEQ ID NO: 26323 - DNA, 143 bp, Zea mays
  Clone ID: LIB3154-009-Q1-K1-B6
ctgtctataggtacctaatcaagcctgccggcgttacaacgcatgactggagaccctgcgcacccactcaatcgctgagcacatccctgtcgcagctgcgactagcaaaggccgaccgacgccttgcacagtgccagctgaat

SEQ ID NO: 26324 - DNA, 414 bp, Zea mays
  unsure at all n locations
  Clone ID: LIB3154-009-Q1-K1-C3
acgcgnncgatgagaacaacagcaactaccatgtagccagctatctgctgcctacccncagcaatttcttccattcaaccaactgtcatgcttgaactctcctgcttatttacagcagcaacaactagtgccattcagccagctagctggtgtgagccctgctaccttcttgacacaaccacaattgttgccgttctaccagcacgctgcgcctaacgctggcaccctcttacaactgcaacaattagctgcattcaaccaacttgctttgacaaacccaacagcattctaccaacaacccatcattggtggtgccctctgttagatttcttatgagttatagctcaataataaagtttttcgtctgatgttagtggcttcccagaaataagaaagtacatttctagaacaaaa

SEQ ID NO: 26325 - DNA, 336 bp, Zea mays
  unsure at all n locations
  Clone ID: LIB3154-009-Q1-K1-C4
aactagcaacatacatagtgaagtacactagcaacatcttagcaccaatgggagccaagatttttgccctccttgccctccttgctctttcagcaagcgctgctacctcgactnttattccacaatgctcacaacaatacctctctccggcgacagccggggatttaataccactatacaatctacatgtcaagagcatcagcagcttacgcatacatacctcaacattgttatgaagatctagctgttcaatgggaacccacagtgtacaaaagtggactggtataacacgttctatattgggacgtatggcaattctacatggagttcttatga

SEQ ID NO: 26326 - DNA, 261 bp, Zea mays
  Clone ID: LIB3154-009-Q1-K1-C5
gtacattgatacaacacacaagacaaatatatatgataaaccactgggcatgtttgttggagctaacagccatctgcagtgtacaatgttaggatttgttttgttgggagatgaaacagtacagacttttgaatgggctttcaattcattcaaaacatgtatgggatgcgagggtccgagagttatgcttaagacaagatctacaatgccatgctctaaaactgattcaaacagtcacaacggttatggattcaacaatta

SEQ ID NO: 26327 - DNA, 276 bp, Zea mays
  Clone ID: LIB3154-009-Q1-K1-D2
cacagtctcacagtctcataggtcgacacctactgtcatgcacatgcacacaagcctagcgggagcgtctacaacaaccaatagcccaatagcaacaacaatccttgccacatctaacaatacaagccatcacaacgcatcagcaacaacagttcctaccagcactgagccacctagccatggtgaaccctgccgcctacttgcaagagcagctgctttgcattcaaacccactttgctctggcgaacgtagttgcaaaccagcaacaacaacagc

SEQ ID NO: 26328 - DNA, 276 bp, Zea mays
  Clone ID: LIB3154-009-Q1-K1-D4
atactgacagaggaggccagaggcgcgccgctgggcgatggagtggacttggcggcaaccttcgaacgatcgatcttggcgacgccgaggatgtcatggaggtctcaggaacgtacggcacatttgaaggcgccaccacgctgacctcgttcagaattctcaccagcagcatgacatgggggccatgtggcgtcgagaacaggacgcgtttctgcatcaccgcgccggtcggcagcagcatcgtgatgttctatggacgcgcgaccagcacgctcg

SEQ ID NO: 26329 - DNA, 390 bp, Zea mays
  Clone ID: LIB3154-009-Q1-K1-D7
tccaggtcgccaccgtcgatgaccacagacataaagggatcagtgcacatgagcacatgaaccagattttcctcttatgctctgctttctacatggtgtacgcacatttcctatgctacagctctatgttccttttcccatccttcataatatagtcagatgtaaaacccactctcaaccattggcttaacaagcatcgagcaagcacataccttatcgccttgtgtgtaacaatcgccagccctatcttggacagtcattggacataccatcaaggcacaacagctgcagcaactcgtgctacctgtgatcaaccaagtagctctggcaaacctttctccctactctccgcaacaacaatgtcttccattcaaccaactgtctacactg

SEQ ID NO: 26330 - DNA, 318 bp, Zea mays
  Clone ID: LIB3154-009-Q1-K1-D8
cacgcgtccgtgtctcagaccatagcttatctactccagagcgcagaagacccgacgacacagaggggtgctcgtgcctcctctctggctctgtggagcgcactcaccatacacggcggtgggtgcaccaccgcgcggtatctaccgcgcgggcattgcacctcggtcactgcacctcgggcattccacgcggtcactgcgcgcggtcactgcaccgcggccaggccgcgcggttattgcgcgcaccatccactactactaaccgcggctagctatccagcaaccatgccggcacagcgatcaacccggcactgagga

SEQ ID NO: 26331 - DNA, 270 bp, Zea mays
  Clone ID: LIB3154-009-Q1-K1-E1
tgcacgtatactcttctataggtacctaatcaattcactggccgcgttacacgtcggactggaaaccctgcgtacccactaatcgcttgacacatcccttcgcagtgcgtatacaaaggccgaccgatcgccttcaacagttgccacctgatgcaatggaccgccctgacgccataagccggcgtgtgtggtaccgcacggccgtcactgccaggcctaccccgtctttcgttttcttcttttgcacgtcgcggttccgtaacttaatgg

SEQ ID NO: 26332 - DNA, 119 bp, Zea mays
  unsure at all n locations
  Clone ID: LIB3154-009-Q1-K1-E2
agaccattagctntatctactccagagcgcagaagaacccgatcgacaccatgagggtgttgctcgttgccctcgctctcctggctctcgctgcgagcgccacctccacgcatacaagc

SEQ ID NO: 26333 - DNA, 243 bp, Zea mays
  Clone ID: LIB3154-009-Q1-K1-E4
cgcgtccgtctaacatacttatctactcagacgcagagaccgtcgcacatgaggtgtgtcgggccttgttctgctctgtcagcgcactaccatcagcgtgtgagtgcaccccgcgcggtcattaccgcgcgtcattgcactcggtactgcactcgggcattcacgcgtcactgcgcgcgtcactgcacgcgtcattgcgcgcagtattgcgcgcaccatcattctataacgcccgctagctat

SEQ ID NO: 26334 - DNA, 220 bp, Zea mays
  Clone ID: LIB3154-009-Q1-K1-E5
gcgtccgattcatccagctagctgctgtgagcccgctgccttctgacacacaacattagtgccgttctactgcacactgcgcctaacgttggcccctcttacaactgcacaattgctgcattcgaccaacttgctttgcaaacccacagtgttctaccaacaacccatattggtgggccctctttagattgctatgagttataggcaataataagttttt

SEQ ID NO: 26335 - DNA, 328 bp, Zea mays
  Clone ID: LIB3154-009-Q1-K1-E7
tctcacagtcttaatgctcaacatcaccggaagctacagtcactagcgctgggcagcgttacaacaccaattgccaattgaacaacaatccttggcacatctaaacctacaaaccatcgcaacgcaacagcaacaacagtttctgccatcactgagccacctagccgtggtgaaccctgtcgcctacttgcaacagcagctacttgcatccaacccactagctctggcgaacgtagctgcataccagcaacaacaacgtctgcaacatgttatgccagcgctcagtcaactagccatggtgaaccctgtcgcctacctacaacagcaa

SEQ ID NO: 26336 - DNA, 346 bp, Zea mays
  unsure at all n locations
  Clone ID: LIB3154-009-Q1-K1-E8
cagaaacacaccaagcgaagcgcactagcaacgacctaacaacaatggctaccaagatattagccctccttgcgcttcttgccctttttgtgagcgcaacanatgcgttcattattccacaatgctcactagctcctagtgccattattccacagttcctcccaccagttacttcaatgggcttcgaacacctagctgtgcaagccaacatgcaacaacaagcgctagcggcgagcgtcttacaacaaccaatngcccaattgcaacaacaatcctggccacatctaacaatacaagccatcacaacgcatcagcaacaacagttcctaccagcactgagccacct

SEQ ID NO: 26337 - DNA, 168 bp, Zea mays
  unsure at all n locations
  Clone ID: LIB3154-009-Q1-K1-F3
gaccacgcgtccgaccattagcntatctactgagagcgcagaagaacccgatcgacaccatgagggtgttgctcgttgccctcgctcttctggctctcgctgcgagcgccacctccacgcatacaagcggcggctgcggctgccagccaccgccgccggttcatctac

SEQ ID NO: 26338 - DNA, 133 bp, Zea mays
  Clone ID: LIB3154-009-Q1-K1-F4
acgcccctgtacggccataagcgcgcggtgtggggtaccgcacgtgccgtcactgccaggcctaccccgctctttgttcttcttcttttgcacgtcgcggtttccgcagcttaatcgggtccttaggtcgata

SEQ ID NO: 26339 - DNA, 249 bp, Zea mays
  unsure at all n locations
  Clone ID: LIB3154-009-Q1-K1-F5
aagcaacataganagtggaatccagtagcaacaatagagcaacattggcgaccaagatattttccctccttatgctccttgctctttctgcatgtgttgctaacgcgacaattttccctcaatgctcacaagctcctatagcttcccttcttcccccataccttccatcaatgatagcttcagtatgtaaaacccactcttaacctatagtcacaagcatcagaagaacatccttataccctgttaaca

SEQ ID NO: 26340 - DNA, 296 bp, Zea mays
  Clone ID: LIB3154-009-Q1-K1-G1
atctactccagagcgcagaagaacccgatcgacaccatgagggtgttgctcgttgccctcgctctcctggctctcgctgcgagcgccacctccacgcatacaagcggaggctgcggctagcagccaccagcgccggttcatctaccgccgccggtgcatctgccacctccggttcacctgccacctgcggtgcatctcccaccgccagtccacctgccagcagcggtccacctgccaccagcggtccatgtgccagccgcggttcatctagcagcagcaccatgccactaccctac

SEQ ID NO: 26341 - DNA, 92 bp, Zea mays
  Clone ID: LIB3154-009-Q1-K1-G2
ctacaccagaccaatttgctctgctctgtttagaggctgtctattatcacatgtacacatctttcgcacgcgggatcatccacttcatctct

SEQ ID NO: 26342 - DNA, 110 bp, Zea mays
  Clone ID: LIB3154-009-Q1-K1-G6
gcatgcagtatacttttataggtacctaatcaatcatggcgcgttacacgcggactggaaaacctgcgtaccactaatcgctgaacatcccttcgcagtgcgtatacaaa

SEQ ID NO: 26343 - DNA, 211 bp, Zea mays
  unsure at all n locations
  Clone ID: LIB3154-009-Q1-K1-G8
ctgagtcttcagaccattagctntatctactccagagcgcagaagaacccgatcgacaccatgagggtgttgctcagtgccctcgctctcctggctctcgctgcgagcgccacctccacgcatacaagcggcggctgcggctgccagccaccgccgccggttcatctaccgccgtcggtgcatctgccacctncggttcacctgccacctc

SEQ ID NO: 26344 - DNA, 93 bp, Zea mays
  Clone ID: LIB3154-009-Q1-K1-H2
ctcctagttccattattccacagttcctcccaccagttacttcaatggccttcgaacacccagctgtgcaagcctatatgctacaacaagcga

SEQ ID NO: 26345 - DNA, 216 bp, Zea mays
  Clone ID: LIB3154-009-Q1-K1-H7
gcgccactcacgcatacaagcggcggtagggctgcagccaccgcgcggttcattaccgcgcggtgcattgcacctcggttacctgcacctcggtgatctccaccgcggtcacctgccgcgcggtcacctgcaccgcggtcatgtgccgcgcggtcatttgcagcgcaccatgcactacctactaaccgcccagctaagctattccagcacaccatg

SEQ ID NO: 26346 - DNA, 356 bp, Zea mays
  unsure at all n locations
  Clone ID: LIB3154-010-Q1-K1-A10
cccacgcgttcgtacggctgcgagaagacgacagaagggctattttgttgtgcaaaactacaacgtnctttagtttagtancttttgatactttcatttccattttttctttngtgttacnaagtttcactgtctttgtgttttcgccagttggccggtcangatagcnaagatcgctcggatgaaattagcgaccttatctttacttagctcttattttaataaagatagtaaaggggactattaacctattacatgactatattatgtgttgattgtataaaggtgtaacatttacagggacgtgatggagtaaaacaaaggaagattgatttgctgtgcagtctgtgtgcaat

SEQ ID NO: 26347 - DNA, 287 bp, Zea mays
  unsure at all n locations
  Clone ID: LIB3154-010-Q1-K1-A11
gcgtncgacggctgcgagaagacgacagaagggagggataataaaaatgaatggatgattagaacaccaaatacacnaggatagtaacgatattntaaaaatatccaaaagacattatattatgtataatagnaaagaatctaattgggctttccgtgtagaaaaataggagactcccagaatccgaccagagttacttcatccaccgttattaaatactatagaaacgaataatccttaattttggaagcccctttatttacttaccanaaagactggatagaaca

SEQ ID NO: 26348 - DNA, 537 bp, Zea mays
  unsure at all n locations
  Clone ID: LIB3154-010-Q1-K1-A12
aacataacaggcggtaacaggtatccattacctaacanatcagcacctgtntacataacagtcggagatggtggaaatcaagaaggtcgtgcttcaatgttttaggatccacagccagaatattctgcttttcgagaagcaaagctacggacattccacaccttgagataaanaataggacccatgctatctaccactggaatcgcaatgatgatggcaagaaagtaccgactgactctnttgtactgcataatcagtactgtggacacaatcgcagaagaagaaaactgaagcattttctattgaaagttattgatgaagttgccagcatgtaatttgaagttgaagcactagcatanttggcgttttgaaaaggataaaaatgtgccccttgattaatatatgcagttcaatagtgtctgagtgagcgaaatgcangacgtnggaaatggttctatgtactatntggcttgtatgcttgtatttacaacgctataagaataataaatgagcttgcttggngaaaaataaaataag

SEQ ID NO: 26349 - DNA, 289 bp, Zea mays
  unsure at all n locations
  Clone ID: LIB3154-010-Q1-K1-B10
ctcttcttagcatatgtttcaatattccaagggccatgtngcttaattagttctggtttcctctgtcctcttgagttctatcagagatgggagtgcagggatcaccagctctttcgttcggccacagtggccaggagttgacattcccgtggatcatgaagtatntgcagctccaaagggttataatgcacctcaacaagtgcacatcacgcaaggtgactatgatgganaagcagtaatagtctcatgggtgaccccagatgaaccanggactcgccatgtgcaatat

SEQ ID NO: 26350 - DNA, 169 bp, Zea mays
  Clone ID: LIB3154-010-Q1-K1-B11
taccgagaagacgacagaaggtgatacaactacaagggaaagaagcagttatacaccctcgagaatggtgaaatccaggcaaaatataaaaccatttttttctctccgtccaaacggcagatccgatccgccctacaatcccctctcagttttctctcaggatccggga

SEQ ID NO: 26351 - DNA, 102 bp, Zea mays
  Clone ID: LIB3154-010-Q1-K1-C10
ctctcgtgaaacacaggtcgtgaaacacaggaaacgaactcttccgtcctctcactctgctgtgcttaggagggagggtagttggtggactatgtgcctcat

SEQ ID NO: 26352 - DNA, 333 bp, Zea mays
  unsure at all n locations
  Clone ID: LIB3154-010-Q1-K1-C11
cacgcgtncgnacggctgcgagaagacgacagaagggtgtgcggcggcatagttagattcttgtgaaagagtctacccctttcttttccttcttgtagatcgtgatggcggcgcagctaatccatgatcgagtagagatggagtgcttagagggagcctgngagaccctcgaaggcaacacgaggtgccgatttcggtgcaccactcgattcacggctacctctntggtgcatccagatgaacctgcacggacgcttcagcgcactgtggaatggatactacccacgcctacaccatatatctagtgagcccgccaatgatcaggtacgtcat

SEQ ID NO: 26353 - DNA, 364 bp, Zea mays
  unsure at all n locations
  Clone ID: LIB3154-010-Q1-K1-C12
atttatattttatatggtaatttatgataatattatttggcttaatgtatatgttataatanaataaaataattttaatataaactattatattaaatatntaacataatagtttataataaaatattagaataataatatttaaaatttattattaaattaataataaaatatctatattgtatatgttatctcttaaataaaataaaattccaataaatattagtttgtcaccgttcatggttgatatgcataattagatatttaaataattatattagactgattctataaaatattttttattttgaaaatattaggaactaaattttttgactaaactgattaatttcatataaatttc

SEQ ID NO: 26354 - DNA, 359 bp, Zea mays
  unsure at all n locations
  Clone ID: LIB3154-010-Q1-K1-C9
tcggctgcgagaagacgacnagagggcgatcgcaatgttaataatatggattgatgcttagtatctcttcctctcatgtatgtctatngcactattatattntgcttcagtggatatgaatgtacgctctcgctttgctcgttcacatgacctgcactccagagctgacagtagagtctgccagatggaaatcgcacatttgatgatgggggggccaaccgtataaataaaaacactgcgtgtcctaaaagaatcaattcactctttattaagtgaaagaatgtttgctacactcacaaagactcgggacaggtaaagaaaaaaaaggaggagcgttttaatttgaagttggtgaaata

SEQ ID NO: 26355 - DNA, 451 bp, Zea mays
  unsure at all n locations
  Clone ID: LIB3154-010-Q1-K1-D10
gcgagaagacgacangaggggaatatgggaatacctcacacgcgtgagaagaagcgttgtataatgaattgcggagaagaggaggaagtggaaggagacatggtgggaagaaaaggggtgcgcattgcgaaatcggacaatggcttttggaaaccctaaagtggtgaaaaaattgtatatagtgagaaggggagaggaaaaaggaggtgggagggacgaacgaaaaacgtaatacgggatgaaggaccggtatatgggggcacaaagacaaactccacgacaaatgataacccacaccaagaagagcgaggaataataaaaaggttgttttaaataaacatacttgaatgataccagacacatgtgttcacgtggttacagtcatacatgccacctcaattacgtgcaactaactatacgaactcatacacgttcttctttttctttttta

SEQ ID NO: 26356 - DNA, 156 bp, Zea mays
  Clone ID: LIB3154-010-Q1-K1-D11
catcacctttggcaacatgatatatctgttcatgttttatggttagtgcactgggcgtaattaataattgcattatgaaatatctgcactttacagttatgcctcaataccatcagcttatagtactcattgtctttgatctgtcataatagtgtt

SEQ ID NO: 26357 - DNA, 241 bp, Zea mays
  unsure at all n locations
  Clone ID: LIB3154-010-Q1-K1-D9
ggaaggagacatggtgggaganaagggttgcgcagtgcgaaatcggacaatggcttttggaaaccctaagggggtgaaaaaattgttatatagtgagaagagggagaggaagaaaggaaggtggggagggtacgatacgaagaagacgtagatgacgtggatggagaagggaccgtgtgataatgggggcagcgaaaagaccaaaaactcccaccgcaccaaacagggatgaacgcaacac

SEQ ID NO: 26358 - DNA, 368 bp, Zea mays
  unsure at all n locations
  Clone ID: LIB3154-010-Q1-K1-E10
acgcgtncgtaggctgcgagaagaccgacagaaggggaagaaggttctgttactaacatgtttacttccattgtcggtaatgtatttgggttcaaggccctgcgtgctctacgtctggaggatttgcgaatccctactgcttatattaaaactttccaaggtccgcctcatggcatccaagttgagagagataaattgaacaagtatggtcgtcccctattaggatgtactattaaacctaaattngggtatccgcaagaatatggagactgttataatgtttctggggactgtttacaaaaaaaaaaaaaaaaaaaaacgcgttaagacaactactacctctcacttactttttggaccaatatatg

SEQ ID NO: 26359 - DNA, 386 bp, Zea mays
  Clone ID: LIB3154-010-Q1-K1-E11
gcgtccgacggctgcggaagacgacagaagggggaggaatcctgaaaccttgcttggattaaattttatggtggcacatggcagggtagttgtcggcttgagaatggataaaagcatatctgacaaggatcagggagctcttgtagaaggttttgatttttgtttgccagaggttttgattcatgggtggttcttctgagtttgagacagagttgtactttggacagatatataaaatactgatcttcactccttccttccaaggtcagttaagtcattcctgttaaatttaatgtggtgtatcattggtatgcatacatataaggattcatcacataataaataattgattctttattggatattgagctacccagtggcatttt

SEQ ID NO: 26360 - DNA, 316 bp, Zea mays
  unsure at all n locations
  Clone ID: LIB3154-010-Q1-K1-E12
acgcgnncgacggctgcgagaagacgacagaagggcacacanacaaggaactggaggacatgaagaagaggctgaaggagatcgaggaggaagctagcgcccttcgcgaaatgcaggccaaggtcgagaaagagatgggcgctgttcaagattcgtcgggcacttccgcaactcaagctgaaaaggaggaagtggatgctcggtcaatctatgttggtaatgttgactatgcatgtacgcctgaagaagtccagcagcattttcagtcctgtggaactgtgaacagggtgacaantactgacagacaaattggtca

SEQ ID NO: 26361 - DNA, 222 bp, Zea mays
  unsure at all n locations
  Clone ID: LIB3154-010-Q1-K1-F10
catatactaggnngatttcactnnggaaaaganaatgtcccatactaatggattcgggtccacaacgatgggttcaaatgtacgagatcttgtagcacttaccaacgaggccctatcgattagtattatacaaaaaaaatccatcatagacactaatataatagatctgtcttcatagacaaacttggattccgatctcagtagacggtcagacatggacct

SEQ ID NO: 26362 - DNA, 338 bp, Zea mays
  unsure at all n locations
  Clone ID: LIB3154-010-Q1-K1-F11
tacggaagacgacangagggatattgaacgaattaattgacttttctttttgaaagtttcgttaccttntagggctttgatttcttctagtttttgaaatatgcttactatagttacattccaagactntgcatgtgtgtatggtgctactgttacttaactttcttaagcatgcttctttntttttttcatctacttggcttccttttatgttggcagatctaattccaaagctggaaggttgtgccatgtgccatgtgcacttaatacctctggaaggtttgccatgtgcacttaacattcaagactttgcagtntatctgacctacatgtatcat

SEQ ID NO: 26363 - DNA, 279 bp, Zea mays
  unsure at all n locations
  Clone ID: LIB3154-010-Q1-K1-G10
ctaaatttgggggtccatataatgacttcttaatctaatatatataataaggcgctgaatttaaatctaatgatcaatgcccatatatatcccacaaaatatggactctctatcactatcgtgcctaaaatatactgtagatacacaaatatattgaagcacagaccattatattaattgcctgatggtctgcttatatttatgctggactactnatcataatgcttaaattgctaagagatatggtttctatttagagtggggtacaatnggaaagat

SEQ ID NO: 26364 - DNA, 513 bp, Zea mays
  unsure at all n locations
  Clone ID: LIB3154-010-Q1-K1-H10
tcatgctaataataaaaaaagatatattattgcacatataaatcatgctaataaacataacatcnatttgcagtgaanaanataacatcattntaatctcatattcgattaattaagaaatacattaaanaatcactatattagcaatttcaaacaatcggttgtaattaaagggcacacattagtgcttgtttatagtcataatgacatgcataagaaactgtttctctgcatggtagtgtgaagctataataaagtatgtgtctttaaaaaacgtatgntgttatttcaaangtgatttatgatcatnttangtaatatgatcatntatcagctatactctatatacaatttaattaaatacaaaaagttattgcactctattaattgaacaataccatgaaatttcatttatatatattaaatgttacttatatatttaacatgtattttatgcagttatataaatatgtgatttaattactaaatttatctactttttaattccctagc

SEQ ID NO: 26365 - DNA, 115 bp, Zea mays
  unsure at all n locations
  Clone ID: LIB3154-010-Q1-K1-H11
tcgnccacgcgttcgtacggctgcgagaagacgacagaagnngccttgaatcattagaattgtcacggttggttgtgaaccagaacatannananaaaaaaaaantannatggga

SEQ ID NO: 26366 - DNA, 414 bp, Zea mays
  Clone ID: LIB3180-001-P1-M1-A1
tcgctccttttgctcggaacgcacacaccggccggtccccgatctccgatcccctcgtcgatccaaagatgcagatcttcgtcaagaccctcactggaaagactatcaccctcgaggtggagtcttctgacaccattgacaacgtcaaggccaagatccaggacaaggagggcatccccccggaccagcagcggctcatctttgctggcaagcagctcgaggacgggcgcacacttgccgactacaacatccagaaggagagcaccctccaccttgttctccgcctcaggggaggcatgcagatcttcgtcaagaccctcactggaaaagactatcaccctcgaggtggagtcttctgacaccatcgacaacgtcaaggccaagatccaggacaaggagggcattccttcagac

SEQ ID NO: 26367 - DNA, 401 bp, Zea mays
  Clone ID: LIB3180-001-P1-M1-A10
tcgaacaaccccgattgacaaattatggccaccgcaagagacttaaatagggggatgtgcacgcaccgacatcagcaccgcgtacttcatgcccgtctacttccacctcacgtctaaattccttggctacacagactacaggctcctactaaggctggtcttccaagacaaagacaactccaatacatcgacatacagatttgttgaccgatttaccaacatggtcatcacagcactaatcatttatgatcgtataccatcacgatatgcatcttacttctgattactcccatcagttgccacgatatgctcttgaagttggtctgactaactattcagctgtctactggactgaccttttgttagctggtcatgttctcacaaaccgtaatttatattat

SEQ ID NO: 26368 - DNA, 361 bp, Zea mays
  Clone ID: LIB3180-001-P1-M1-A11
cactattagatctagcaggcagaacatcattaaagatcacagtctttcacaaaaccacaactttaaaccaaaagacctaaaacactaatgtgcaatgcccactatgcagtattaagatttcaactaaagcagacctagcgatgttatttgcttcgagatacttggagaagcaatcaacatccatctatgacatttaaccggtcactaaggccctgtttggacagctccagctccagaaaattcggtagagttggtggagcaggtcattaggtgctccataaaatcgtggagttggagctgtaagccttcagaagacattttgtctttgataagtcatgcccccgcagtctaatcgggagca

SEQ ID NO: 26369 - DNA, 345 bp, Zea mays
  Clone ID: LIB3180-001-P1-M1-A12
atgagaacatatatcaaaccttccttgatcagcttgttgaggtatacaaacaagtccgaattggggatccgttggagaaaggcaccttactgggaccactgcacactcctgcttcaaaagagaactttttgaaaggcattcagactatcaaatctcagggagggaaaatcctttttggaggatctgccattgaatcagaaggaaactttgtgcaaccgacaattgtggaaattacaccttctgcaccagttgtgaaagaagaactctttggtcctgtcctttatgttatgaaatttcagaccttgaaagaagcaattgaaattaaataactctgttcctaaagga

SEQ ID NO: 26370 - DNA, 413 bp, Zea mays
  unsure at all n locations
  Clone ID: LIB3180-001-P1-M1-A3
tcggctgaccttattgccatgaaccacaccgatgttatcatcaccagcacattccaagaaatcgcgggaagcaaggacaccgtggngcagtacgagtcccacatcgcgttcactcttcctgggctctaccgtgtcgtccatggcatcgatgttttcgatcccaagttcaacattgtctctcctggagcagacatgagtgtttactacccgtatacggaaaccgacaagagactcactgccttccatcctgaaatcgaggagctcatctacagcgacgtcgagaactccgagcacaagttcgtgctgaaagacaagaagaagccgatcatcttctcgatggcgcgtctcgaccgcgtgaagaacatgacaggcctggtggagatgtacggcaggaacgcgcgcctgagggagct

SEQ ID NO: 26371 - DNA, 344 bp, Zea mays
  Clone ID: LIB3180-001-P1-M1-A4
ccaaggatggccagacccgtgagcatgctctccttgctttcacacttggtgtgaagcagatgatttgctgctgcaacaagatggatgctactacacccaagtattcaaaggcccgttatgatgagattgtgaaggaagtctcttcctacctgaagaaggttggatacaaccctgataagatctacttcgttccaatctctggttttgaaggtgacaacatgattgagaggtccaccaaccttgactggtacaagggcccaaccctacttgaggctctggacttgatcaatgagccaaagaggccttcagacaagccccctgcgtctccccctttaaggatgtgt

SEQ ID NO: 26372 - DNA, 131 bp, Zea mays
  Clone ID: LIB3180-001-P1-M1-A6
tcgtgtacgcgtgtcgtctattcgaactggcagctatggcttatgagaacgtccatatcaacataggcgatgtaggctacttgcgctacgatacgtatacaaccttatgacacctggtctacaaactggag

SEQ ID NO: 26373 - DNA, 417 bp, Zea mays
  Clone ID: LIB3180-001-P1-M1-A7
tcgaagtcaaatgatctccagcagaaattacgtcacctgaattatgaactgaaagagttaaggtatcgggtagaaataaaaaatccttatgccacacaaagtagatggatgaaaaatgaccaagtaagcaatagttcaggactcgtggagaatcagcagcgtgctatgcccacagcctcagagcatcttgaagaggctgaacaggttaatgttggagttaacctgaacaaccctgctgaaggggttcctgctgcactattggatgtgggtaaaccttgcagtactgacaatggcatatccagcacatctgttattgaaggaaataaatctttggggctttcagaacaaccatcaaagataattactgaccagactgatcgggactctatttgccgaggatccaatagttgcgagaaa

SEQ ID NO: 26374 - DNA, 343 bp, Zea mays
  unsure at all n locations
  Clone ID: LIB3180-001-P1-M1-A8
tcgctcgcaactgaagaccaaaggcgagccggctgcccggattccggaagcgcccaagccccccaacgcgaccgtcgctgtcgccaccgcgctcggctcgcccgcgtccacagaagccgccagggccatacgccgatgaatcctgccgcgacggcggatcccagcagctccagcacctcggcggccacgctgcggaagcggatgatctctatagacacggctcgacgaggagccgacggcgcgtcgcctgagaccgcgcccaggccagatcgggcgggtagtgataaggcgccgcangagcgggaggaggagggctcgatggcagcctccgcgcctgcggcgg

SEQ ID NO: 26375 - DNA, 335 bp, Zea mays
  unsure at all n locations
  Clone ID: LIB3180-001-P1-M1-A9
cggacgcgtgggtttccccatctcccagatccaattcgcgagttcttcctcctctgccgccatggcgctctctgtggagaagacctcgtctggacgggagtacaaggtcaaggatctctcgcaggcggacttcggtcgcctcgagattgagctggccgaggtcgaaatgcccggcctcatggcgtgccgcgccgagttcggcccgtccaagcccttcgccggcgctaggatctcggggtctcttcacatgaccatccagaccgccgtcctcatcgagaccctcaccgcgcttggngccgaggtccgctggtgctcctgcaacatcttcttcacgc

SEQ ID NO: 26376 - DNA, 395 bp, Zea mays
  Clone ID: LIB3180-001-P1-M1-B1
tcggtcaaccagctgcggagggaggaaccctagcggaacactgtgcaggtgacggcggcgcgctaccggtcacgggggatacggcggcatcgtcccctcctccatccccggcgcggcggcgccagcagccggcctgcagggacggtctccagtctccagaatccagattcagagcttgtccctgttttgtggtgtgctctgttgtactgtagcctgtagccagggcaaattaaagctacaatgcaggctgcctactatgcaaaggatcttttggtttgaagtccagttgaccgaagttggaaaatacttctgatacttacagatttcacagaggtcttgtttattttctactattttccttcaagcacgtggaatagtacgtttgacaaacaatt

SEQ ID NO: 26377 - DNA, 343 bp, Zea mays
  Clone ID: LIB3180-001-P1-M1-B10
tcgcccgtttctgtcacaaatcggcgctgaaaccctagccttccgccatggccacctcccctgccgcctcgtcctcctccgctccgaccgcctccgcggtggctgcggctacgatggctgctgaggccaccgacgggccggtgctcagcgtagtatcgaagcgtctccgcgcactgcggaagaagtacaaccgaatcacgcagatggaggagtcgctcgccgccggcaagacgctcaaccgagagcaggaggaggttctgcgctccaagcccgtcgtcgccgatctgatcgacgagctcgaggcgcattcgccctccgctcgcctacgccctcgcggaggagc

SEQ ID NO: 26378 - DNA, 327 bp, Zea mays
  Clone ID: LIB3180-001-P1-M1-B11
gtttaattgtgttttttcgaaccttggtttttacaaaatgttgataatgtggcctgtatagtgcaatatcaatgttcttattaatccactttaaaaacatatataattattgtgttcatattatcttggtttactggtactttgataaccttcagattctcatcatatgcatgcaaagcaaaaaatgattgtgatgtttttcggtcacatgtgcatggatagcttatggttgatcattgatcatttgatcgttatccatattttattccttgagtttctttttgtctctcttgagtgaacaaaatattgggtctggtactgagatga

SEQ ID NO: 26379 - DNA, 362 bp, Zea mays
  Clone ID: LIB3180-001-P1-M1-B12
gcgaggcaaaagcattgcgaccacagacagcgcgcgcttcaaggccttttttttttgagataacaaggaggagaggaggagatggcggtcacgatcacgtgggtgaaggcgaggcagatcttcgacagccgcggcaaccccaccgtcgaggtggacgtgggccttagcgacggcagctacgcgaggggggccgtacccagcggcgcatccactggaatatatgaggccttggagttgagggatggaggatctgattatcttggcaagggtgttcttaaggctgtcagcaatgtaaataacattattggaccagcaattgttggaaaggaccccactgagcaagttgagattgacaacttcat

SEQ ID NO: 26380 - DNA, 384 bp, Zea mays
  unsure at all n locations
  Clone ID: LIB3180-001-P1-M1-B2
gtagcacgaagtagttttgtggcctgacaaaccaattatgtggtccaatccaagagcctaattatgtggggaccgtgctggcagttcggcaacttttgtttgtatatggccaactaaacctatttcacatatgtgattcgatgtttatgtagttgcttggatcttggggttttgggagtctgtactcctgcctccgctacctcaaatccatgccgcgctgcacctactctgttttcaatgaaagagttttctgttgcgtctgcactgaggactggtcatggcattaacagggtcagatggtaggcgataatttccattggtcaagcggtagttgcgtccagagagatctctngacacttatttaggaccaatccctgttccatc

SEQ ID NO: 26381 - DNA, 422 bp, Zea mays
  Clone ID: LIB3180-001-P1-M1-B3
tcgctctctcactgccgcgccgccaccccctacaggtaaggaagaggagggcaggatgtcgcaccgtaagttcgagcacccgaggcacggctccctcggcttccttcccaggaagcgctcctcccgtcaccgcggcaaggtgaagtcattccctagggatgaccccaagaagccttgccatctcactgccttccttggctacaaggctggcatgactcacattgtccgtgaggttgagaagccaggatccaaactccataagaaggaaacttgtgaggctgttaccatcattgaaacccctcctcttgtcattgttgggctcgtggcatatgtgaagactcctcgtggcctccgcacactcaactctgtttgggcccaacatcttagtgaagaagtgaggagaaggttctacaagaactggt

SEQ ID NO: 26382 - DNA, 398 bp, Zea mays
  Clone ID: LIB3180-001-P1-M1-B4
gaccaactagcaacatagaaagcacaatagtgtaccaacaatggcagccaaaatattttgcctccttatgctccttggtctttctgcaagtgctgctacggcgaccattttcccgaaatgctcgcaagctcctatagcttcccttcttcccccgtacctctcaccagcggtgtcttcggtatgtgaaaacccaattcttcaaccctacaggatccaacaggcaatcacagctggcatcttacctttatcacccttgttcctccaacaatcatcagccctattacatcagttacctttggtgcatttattggcacaaaacatcagggcacaacaactacaacaacttggtgctagcaaaccttgctgcctactctcagcaacagcagtttcttccattc

SEQ ID NO: 26383 - DNA, 289 bp, Zea mays
  Clone ID: LIB3180-001-P1-M1-B5
acactcggtgaccacacaccaatacctctatctagttcacaacgcatcagaacccacccgacaccctgagggctgagcttgatgagctcgctctcctgcatctggctgaaagctcgaccttcacgcatacaagctgtttgtggaggtgtccatcaccgacgacgaactagatagccccctccggtcattggcaaacaactgaaccgtgcagctagcctgactgtgacaaaagaagaacagctgctgccggcggtacagctgacagaggcgcttgatgacacgacgccta

SEQ ID NO: 26384 - DNA, 395 bp, Zea mays
  Clone ID: LIB3180-001-P1-M1-B6
ctacgcccaacgacgacccctacaaagtggtggagaggacccaagtccttcgtcgcaaactcctgccgcagagaggtgattgtgtgatgaaggagggcgggttggacgctatgtggacgatgtcgtcgacgtagagttagggtaacaggtattagtgctgcgtcggaggacgaatagggacatgtccgatttggccttgacgaaggccagcgataccaatttaggaagcgaagcgactgtaccaggtctgtggtgcctgcttgaggccatatagcgagtggttgagcttgcacactaaatgaggatgagtggagttgacgaagccagcaagctagctacaatacactgtttcgatgtgagtgccatggaagaacgcgttcttgatgtacaaccga

SEQ ID NO: 26385 - DNA, 317 bp, Zea mays
  unsure at all n locations
  Clone ID: LIB3180-001-P1-M1-B7
tcgcggcgagccctccttctgcggggaccgcgaggcgcccagctcttccccattcccgtaggcaacaagccccgtgccttctcctccgcgtcccccgcggcagcgcgctctcccaaagacgctcataatgcgccgccgccgattatgccgacgctgccgtggggtgatgcgctcgcagccacgcagcgcaccttctgcctgccgctcgctgggcgcgtcctcgccgcctcggcgaccgagaacgcggccgtggccccccgcgcagtctacgcctcgctggcccctggccgccgncggcgcgcgcggcgacacgcggc

SEQ ID NO: 26386 - DNA, 412 bp, Zea mays
  Clone ID: LIB3180-001-P1-M1-B8
tcgggcgaagaagtccgccgtggcgcctgctgggaaggctgcccagcctgcggcgaccaccaagttcccgaccaagcccgctcctccctcgcagacggttcgggatgcacgcggcggtggctcatcagctcgtggaggctttggccgtggtgaacgtggccgtggcagaggtggacggggatatggccagaaccgtggcttcagtggtgacaatggcaatgagttccagggaggttatggtggcggaggctatggggatggtgctgtaactggtggatctgaaggagaaagggagagagacactcgtcccccgtaccgtggcggaggcagacgtggtggttacagggaatgtgagtttggtgatgactctgagaggccaccacggagaaactatgagcgccacagcgggact

SEQ ID NO: 26387 - DNA, 256 bp, Zea mays
  Clone ID: LIB3180-001-P1-M1-B9
cagggaggaagtgttcctccgcaagctcaacgtctgctgcgtggtgttcgacttcgcggccgagcgggggagggactcgccggaggtggaaaggaagcggcaggtgctcgtgtccctcgtcgactgcgtctctgaggcggaggagcccctcacggaggcgatgctctcggcctgcgtacgcatgttcgccatcaacctcttcagggtcttcccgcccaagctccggtccggtgccagtgccgtcaccgacgaggac

SEQ ID NO: 26388 - DNA, 403 bp, Zea mays
  Clone ID: LIB3180-001-P1-M1-C1
cacgccgccgtcttctgcggttctgccgtttactcttccactttggcctcctctcttgcaagtttaagcttcgcctccagccatgggtaaggagaagtctcacatcaacattgtggttattggccacgtcgactctggcaaggtcgacaaccaccggccacctgatctacaagcttggaggcattgacaagcgtgtgatcgagaggtttgagaaggaggccgctgaaatgaacaagcgatccttcaagtatgcttgggtgcttgacaagctcaaggctgagcgtgagaggggtatcaccattgatattgctctgtggaagtttgagaccaccaagtactattgcacccgtattgatgcccctggacaccgtgactttatcaagaacatgatcactggtacctc

SEQ ID NO: 26389 - DNA, 288 bp, Zea mays
  Clone ID: LIB3180-001-P1-M1-C10
tcggcgcactttacggtcccgtcctccggccgccgcgttctcatgtccgcggggctgtcgacggagctccgccacaagtacaacgtgcgctccatccagatccgcaaggacgacgaggtgcaggtcgtgcgcggcacctacaagggccgtgaggggaaggtggtgcaggtgtaccgccgacgctgggtcatgcacaccgagcggatcacccgcgagaaggtgaacggctccaccgtgaacgcgggcatccaccccttcaaggtgatcgtcaccaagctgaagctcgac

SEQ ID NO: 26390 - DNA, 295 bp, Zea mays
  Clone ID: LIB3180-001-P1-M1-C11
agcgcaagagggggcaaagccgcaaagggggaggcaccaggcaccggcagccattacttactggtcctcactcccacaccaaccaaccaacctcctctgcctgccgcttctcctgctgcgggcgggcactgctgcaagtactagaggaggacatccgcttccattactgcgcctgcggaggatcggaggaaccagtagcggaggcttcgattttcggcgggcgcaataaatttcccgcatggctcggagggccgcgtcctcgctcgtctcccgctgcctcctggcgagggcccct

SEQ ID NO: 26391 - DNA, 375 bp, Zea mays
  Clone ID: LIB3180-001-P1-M1-C12
ctgccgtggtacaccccgtacgtgtacaacaacccggtcggccgggtggtgcacatcgtggtgcagctcaccctcgggtggccgctgtacctggcgaccaacgcgtcggggcggccgtacccgcgcttcgcctgccacttcgacccctacggccccatctacaacgaccgggagcgcgcccagatcttcgtctcggacgccggcgtcgtggccgtggcgttcgggctgtacaagctggcggcggcgttcggggtcttgggtggtgggcgcgtgtacgccgtgccgctgctgatcgtgaacgcgtggctggtgctcatcacctacctgcagcacacccacccgtcgcttccccactacgactcgagcgagtgggac

SEQ ID NO: 26392 - DNA, 110 bp, Zea mays
  Clone ID: LIB3180-001-P1-M1-C2
cggccgattcggtcgaccacgcgtcgattagcttattactcagacgcaagaaccgacgcaccatgaggggtgctcgtgccctcgtctctgggtctgctggagcgcactca

SEQ ID NO: 26393 - DNA, 208 bp, Zea mays
  unsure at all n locations
  Clone ID: LIB3180-001-P1-M1-C3
aaaaaaactaggtcttccactcttcctccactagtctactcggcagatttcactgactctcaccggcggtctttgtgcctncaccggccgncgncatgccgtacctcgtccgcgagcggctctacttcggcggcatcaaagacgccattgccgccctcacggagtcttnctccacgccggacttcacccacgtncttctccgtggtca

SEQ ID NO: 26394 - DNA, 365 bp, Zea mays
  Clone ID: LIB3180-001-P1-M1-C4
cacttaacaggtatccaagatggatgagtcaatcgatgagatccaataggatttctaggaatctacgaaggagctggctgctcttcgtggaacactgaaaacggtgattgaagacagggacctgtcgtggcaggaggtgaagtagctgagaagaaacatcagcatcatgctagaacgaggttgtgtcgctgaagaagatcgaagccttggacaaagacatacttgtcaaggagggagagatcacgatattgcaggacaacatcgacaagccgttcaatatcatctgcagcccaagttcgatgcaggagttcggcattggggtgaagatggctgctatttttgtagtgagttggtggatgaaaatc

SEQ ID NO: 26395 - DNA, 392 bp, Zea mays
  unsure at all n locations
  Clone ID: LIB3180-001-P1-M1-C5
gtccaggccccgctcgctcctaccagtggcccgtgcgtgcggccgccggcgccctgatcgatcgacccgcgcctcggccggatggaggcgtcagcagcagcaggaggtgggggaggcagcgccgccacgcggagcagcccggcggccgtgcaggccaccaacgacgacgccgcggccagcaagctgtcctgtgttaacaaaggatacatgaaggatgattatgtgcggttttttgttaggcgaccaacaagaagggctccaataatcaaatcgtgggtattatgcgcgttggtctgttctcaggacgcttctgcatcaattcctcaatgcggggaagaatagtaacaatgacaagcctaaacaaatattatcccttgtgctggctntgacac

SEQ ID NO: 26396 - DNA, 396 bp, Zea mays
  Clone ID: LIB3180-001-P1-M1-C6
atccgatctgccacctcgccgtctcgcacgttcctttccccaactccccagcgcctctccgcgccgcgatccagatccaggttgttcagcatgggtctggtgaaggaaggcgtcgacatggaggagggaaccctagagatcggcatggagtacaggactgtatctggtgtggccgggcctctggttatcttggataaagtaaagggcccaaagtaccaagaaattggaaacatccgacttggagatggcaccactcgccgtggtcaagtccttgaagttgatggagaaaaagctgttgtacaggtttttgaaggaacttctggaatagacaacaaatacacaaccgtgcagtttacaggcgaggttttgaaaactcctgtctcactcgatatgctt

SEQ ID NO: 26397 - DNA, 323 bp, Zea mays
  Clone ID: LIB3180-001-P1-M1-C7
tcgcatttagcggcgatgattgagtaataatgtgtcacgcatcaccatgggtggcagtgtcagtgtgagcaatgacctgaatgaacaattgaaatgaaaagaaaaaagtattgttccaaattaaaaaaaaaaaaaaaaaaaaaaaaaaaaaaaaaaaaaaaaaaaaaaaaaaaaaaaaaaaaaaaaaaaaaaaaaaaaaaaaaaaaaaaaaaaaaaaagaaaaaaaaaaaaaaaaaaaaaaaaaaaaaaaaaaaaattgggggggcctttttagggtaccaattttatcttcgggggtttttaacctttttattttttttttg

SEQ ID NO: 26398 - DNA, 353 bp, Zea mays
  Clone ID: LIB3180-001-P1-M1-C8
ctcgcctcctcccacgacgacgcgcacgggcgtgcgtgcatgcggccagcggtcacggcccctccggcaaggcgaccaccgccgtgcgcgtgagaacaccggctcggctcgtctcgtcggacgactcgctcggcgccgcccgcgtccccatggcgcggccgcggccgcacggccgcatcgtccacgtcgccttcgccttcgcgttcgcgtctgccgtcctcctgccgccggccgcggagggtgtccaggagggcgacgtgctggtcgctttccgggacacgcttcgcggtctggacggcgcgccgccgggcccgctgcggaactggggcacgccgggtccgtgccggggcaac

SEQ ID NO: 26399 - DNA, 319 bp, Zea mays
  Clone ID: LIB3180-001-P1-M1-C9
cgcaccctccagttcgtctccccagctctgtctctaaaatccactcgtccaccacctcctcggcgcttcgcatcctttccccctccgcaagaaagaagcgaagcaactctccgccgtctccgtttttctccacaccacccaaagctctctccgaccacagcctcgcccccagcgcctccttccgcagtcatgtaccgcgcggccgctagcctcgcctccaaggcgcggcaagccgggaacagcctcgccgcccgccaggttggaagcaggcttgcctggagcaggaactatgctgcgaaggacatcaagtttggtgttg

SEQ ID NO: 26400 - DNA, 406 bp, Zea mays
  Clone ID: LIB3180-001-P1-M1-D1
aacataaccaagtctgagtggagacaaagagaggctgcaacatatgcctttggctctatcttggagggcccatcagctgataaactggctcctcttgttaatgttgcattgggcttcatgctgtctgcactgatgaaggatccaagcaaccatgtgaaggacacaactgcttggacccttgggagaatctttgagttccttcatggttcagcgcttgaaactcctcctatcatcacaggtgagaattgtcagcaaatacttactgtgctgcttcacagcatgaaggatgtcccaaatgtggctgaaaaggcatgtggagccctatatttccttgcacaaggctatgttgatgctggatctgcatcaccattatcccctttctttcaagatatcggtcagaacctgc

SEQ ID NO: 26401 - DNA, 394 bp, Zea mays
  Clone ID: LIB3180-001-P1-M1-D10
cggacgcgtgggcgaccagttccccagtcttgctccctgcagttctgcctgctccatctacagcgtcgtgttctgactcacctgcaccaatggctgatctttctgctgctggggctgcctcggcctcagctatcgcgtttgcgggctatgagaagcgcctatgagatcacattctctgaggcacctgtctttgtggacccccatggcagccgttcgcgtgccctctccaggtcccagattgactctgatcttggatcttgcacggtgcacgatcgcgtgcgagctcttcaacaaggattttgactcctatgttctctgcgagtcaagcttgttcatctatcctttgaagattgtcattaagacctgtggcacttccaagcttctgcttacaatt

SEQ ID NO: 26402 - DNA, 365 bp, Zea mays
  Clone ID: LIB3180-001-P1-M1-D11
ctcccttctttcctcccactcccatctgctctcctcgccgccacctgcgccgtcagagcacggagcagtccgcgaccacgctttcgctgccgctctccgacaggcgacggagccgcagctccagtcgcagtcggctcccctgaattcgggctcgccaaataccctccaatcgtctgcgtccgtcgtccgggacttccggtgcaactgaatccggcaccacctgtgccgcctgtcatggcacttggaagagggaagaggagggactcaagaggttaaggtaccgtatttatagatttggctgaagaaaactggttgttgctattatgaagactaagacgagtaggagcttacagaagtctgggaga

SEQ ID NO: 26403 - DNA, 381 bp, Zea mays
  Clone ID: LIB3180-001-P1-M1-D12
ccatttttgaagctgctatagcaatgaccaaccagggtgttcaagtgttcccagagataatggttcctcttgttggaacaccacaggaactggggcatcaagtgactcttatccgccaagttgctgagaaagtgttcgccaatgtgggcaagactatcgggtacaaagttggaacaatgattgagatccccagggcagctctggtggctgatgagatagcggagcaggctgaattcttctccttcggaaccgaacgacctgacgcagatgacctttgggtaccagcagggatgatggtgggaagttcattcccgtctatcttgctcagggcattctccaacatgacccctttcgggtcctggaccaaaaggggagtgggcg

SEQ ID NO: 26404 - DNA, 377 bp, Zea mays
  unsure at all n locations
  Clone ID: LIB3180-001-P1-M1-D2
caaaaaccctagccgccgccggcgccaagcccctgcccgccgccaccttcacgttcgtcttcttcccggccacccaccagcccgcgtgcctgctctcctcgcccgcgcccgggtctctgcgccgccgggacgtcgccgccatggtctccgcgccgccggccgtcggcaccgccatgccgtcgctcgacttcgacacctccgtcttcaacaaggagaaggtctccctcgccggccacgacgagtacatcgtgcgcggcgggaggaacctgttcccgctgcttnncggaggcgttcaagggggtcaagcaagatcggagttatttggatgggggctcgcagggtcctgcccaagcccagaacctgagagattcactggc

SEQ ID NO: 26405 - DNA, 82 bp, Zea mays
  Clone ID: LIB3180-001-P1-M1-D3
tctagtgttgcctcattggcaaatgataaccaggcaccgccctcatctgggtctagtacaaaaaatacttttagcagggatt

SEQ ID NO: 26406 - DNA, 354 bp, Zea mays
  unsure at all n locations
  Clone ID: LIB3180-001-P1-M1-D4
gcgagacgggaccgagcccgagggcaggctgcagctgcactgccggttcgtcaccaagcttctcaacgacctgttcggcgtgcaggcgcgcgcgggttgcgcgtgcgcggngccctacgcgcaccggctcctcggcatcagtccggcgcgcgccaaagccatcagatcagccgtcgaacagggctaccacggggttctgcccgggtggacgcgcgtcagcctggcatactacacgtcgatgcaggagggccgagttcgtgctggacgccgttgccttcgtcgncagcttcggncaccggtttctgccgctgtacacgttcgactggaaaaccggagactggcactacgatcaca

SEQ ID NO: 26407 - DNA, 387 bp, Zea mays
  Clone ID: LIB3180-001-P1-M1-D5
ctagccgatcactgggtgggctaccggcgccgccaccctgcgctaggtgccgaggccttcgtcggtctcttctccggcgacgagcacccaccagagtaagcagctgctgtcgaagtgtacatgagcaatggtttgtgttgggtccaaggcaattagacccaaggggagcacaataaatggcttgggagatggagctttagacgatagctcacacaagaagaggacaaggaaggatacgagcgagaaacacgggaaagggggtcacagctcaagtaaaggaccttctgtagggaaacctcggcatgtgaaggataggaagcagagaaatgatgatgggaagaaagggaagggtcgacgaaaggaccatcattcaggaagctccgtgat

SEQ ID NO: 26408 - DNA, 132 bp, Zea mays
  Clone ID: LIB3180-001-P1-M1-D6
atttttttccatcggaatgtctgaaactatgttgggtgtatcctagtggttggttgagcattaatggctcatattttgtcaggtctatgtgtcgccgtgaaacttttaatcaaatcagttcactcttttgcc

SEQ ID NO: 26409 - DNA, 244 bp, Zea mays
  Clone ID: LIB3180-001-P1-M1-D7
tcgagcttgtgaggacccagatgcaatagagctatatgagacccatatgccgcggcgaggtcaatggatataccttggttgaacactgctcagaagcagcagaatcgcaagaagaggatgctgtatggaagatggctgttcttacattggcacatacagagagctatgcaagcatatgcaagagaaacatattactgtaaacacactagctgcggtacagtggcatgcttacataaggaaacgg

SEQ ID NO: 26410 - DNA, 318 bp, Zea mays
  Clone ID: LIB3180-001-P1-M1-D8
gtgtcattctcggaattggtgaagtttacaatggaagcaagcatagacgacagcatcatacctaatgctattccttcacgcagtgttggggggtatttttggagtggaaggaaatgtggttgttgaggtaactccttaaacacatgttttgcaaagacatggattgaagtttctggttcatcagcaaaggatgttgctaagcagctcaaggaacaacaaatggtgatgccaggccattgtgagtcaaacttgcagaaggaacttaaccgatacatccccactgccgctgcatttggggggtatgcattggcgcattga

SEQ ID NO: 26411 - DNA, 333 bp, Zea mays
  Clone ID: LIB3180-001-P1-M1-D9
cagaattcaggccagcaatgtctcaaatcgtccaagacctagctaggattgtaggtgctagtggtgcggtatcagagtgacagataaagggggaacagtaaacatctagcttgactgtatgcacttgtggagacgccagaacgtttgtttcctttatctaaaaaaaggtaaaacatctagcctcagtcgtgtggccagtgaagattcatacatcctcagcgcagtgccaggggcactctcagtatttatgttggacgatattgcggctagtgtacatgccattttggagccccatttgcttctggaaaggtggtatggtactgtggtagtatg

SEQ ID NO: 26412 - DNA, 241 bp, Zea mays
  Clone ID: LIB3180-001-P1-M1-E11
tcgatcgccacagccaacaccacccggcgaggcgacgcgacagccgccaggaggaaggaataaactcactgccagccagtgaagggggagaagtgtactgctccgtcgaccagtgcgcgcaccgcccggcagggctgctcatctcgtcgacgaccagtggattaatcggcatggcggctctggccacgtcgcagctcgtcgcaacgcccgccggcctgggcgttccggacgcgtccacgtt

SEQ ID NO: 26413 - DNA, 114 bp, Zea mays
  unsure at all n locations
  Clone ID: LIB3180-001-P1-M1-E3
atcaagtccgtgctttggagaatgagatgcttctgaggattaagcagcagggccttgatatcactccgaaaatcctcattgntaccaggctgttgnctgatgctgctgggacta

SEQ ID NO: 26414 - DNA, 340 bp, Zea mays
  unsure at all n locations
  Clone ID: LIB3180-001-P1-M1-E4
gacaatgctgagataaaggcatggcttgctttggggccgaaatcaaagaagaagggtggtggaaagaagaagaaaggcaagaaaggagatgcagcatgagatcccatggaggcgacanacgatgctacaagccaagaataattctgatttttggaattactgcacccagcattttctcttttgtttcttcgctgcatctgatggtgttatattacattcagttgcgaaaaaatgaataccctttttctagtgtctaagaaacgaagcatcctgttgcacattatcgcatccaatggcacaaagataattatctacgaggcattgcctagtgtggttctct

SEQ ID NO: 26415 - DNA, 323 bp, Zea mays
  Clone ID: LIB3180-001-P1-M1-E5
cggaggtggagcaacaacaagacacgccgaagctcttcaaccggttgaccttcgatgatgtccaagtgaacgacatctcgctgaacgactacctcgctgtgaacgcgacgaaacacgcgatgtaccttgcgcacaccgggggggcgctactcccaagaagcggttccgcaaaggcgcagtgccccatcgttgagcgccttacaaactccctcatgatgcacgggcgcaacaacggcaagaaggtcattgctgtccgcatcatcaagcatacccttgagatcattcacctgctcaccgatgccaaccccatccaggtcgtcgtc

SEQ ID NO: 26416 - DNA, 375 bp, Zea mays
  Clone ID: LIB3180-001-P1-M1-E8
tcggtcttcacaaacgccggcgcaaactctcgcccgagcccgacagatcttcaattccccattccgcccaccgatcgaccttcacgccagtctcggtctcttccgaaggcgtcgcgcgcggttgtttgagaggagaggaggaagatgagggagtgcatctccgtccacatcgggcaggccggcatccaagtcggcaacgcgtgctgggaactttactgcctcgagcacggcatccagcctgatggccaagtgcctggagataagaccgcgggacatcacgatgatgccttcagcaccttcttcagccagactggtgctgggaagcacgttccccgtgcaatcttcgttgatctagaacccactgtgatcgatgag

SEQ ID NO: 26417 - DNA, 213 bp, Zea mays
  Clone ID: LIB3180-001-P1-M1-E9
aaaccctatccctcgcgccgtcgccggcgtgcccagcgctagagctcctcgcctgccgtgagctcgcgccataacgccaccatgaagttcaacatcgcgaacccgtctaccgggtgccagaagaagctggaaatcgatgacgaccagaaactacgtgccttttatgaccgaatgatctcccaggatgtcagtggtgatgctctgggtgaggag

SEQ ID NO: 26418 - DNA, 241 bp, Zea mays
  Clone ID: LIB3180-001-P1-M1-F10
gtctaactcgacctagatgaactacggttaggacctcacgaaaacgcccgacatggaacgacacgcgaacgccggcatctcaaggtcataacaaccaggcggtgtgacttaacacgcgcatcatatagtcgcacacggatattgtctgtgtgtagatcatctgaaattgtggcgacgcactgcccaagatcaaagagcagagtcttaatcacaaaatacaacttcatgcgcaacctgaact

SEQ ID NO: 26419 - DNA, 371 bp, Zea mays
  Clone ID: LIB3180-001-P1-M1-F11
gccttctgcgcctccatttcggcctctgtcccttgcaagttcaatctcacctccaaccatgggtaaagagaagtcccacatcaacattgtggttattggccatgtcgactctggcaagtcgaccaccacaggacaccttatctacaagcttggaggcattgacaagcgtgtgatcgagaggttcgagaaggaggctgctgaaatgaacaagcggtccttcaagtacgcgtgggtgctcgacaagctcaaggctgagcgtgagagaggtatcaccattgatatcgctctgtggaagttttgagaccaccaagtactactgcacggtcattgatgcccctggacaccgggacttaataaagacatgatcactg

SEQ ID NO: 26420 - DNA, 369 bp, Zea mays
  Clone ID: LIB3180-001-P1-M1-F12
caccacactcgagagccatctcccagcacacgagcgcgatggcttccaccaccaccaccaccttcctcgccatcttgctagtcgtggcagcttcggcggcgccggcacggtcctgctcaccgcgcgacatccacgcgctgctgagcgtgaagcaggcgctgggcaacccggcgtcgctgtcgacgtggacgccggcgtcgcccaactgctgcgcgtgggaccacctccgatgcaacgacgccgggcgcgtgaacaacgtcttcatcgacggcgcggacgacgtgcgcggccagatcccgtcggcggtgggcgggctgacggagctcatgtcgctgacgctgttccggctgccggggctgacgggcgcca

SEQ ID NO: 26421 - DNA, 383 bp, Zea mays
  unsure at all n locations
  Clone ID: LIB3180-001-P1-M1-F2
cataacacaactcgctagctctgcatcatgcgtcgttctggtgagcgagcgagcgagtgagagacctagctagactgaccggccgccggcaggccgagaacgaagcgcgtgtttgtgcattgaaggagcaggagccatggcggaccagcagcagccacagcagcagccgcaggagatggacgttgatcgtaccggtggcctcgaactgcctccagggttccgcttccacccgagcgactttgagattgtcaacgactacctcacgaagaaggtgcacgacagggactacagctgcatcgccatcgcggacgccgacctaaacaagaccgagccatgggacctnccgaagttgcaaagatgggcgagaaggagtggtacttctt

SEQ ID NO: 26422 - DNA, 88 bp, Zea mays
  Clone ID: LIB3180-001-P1-M1-F3
tcgcatccaggcaacatagaaagtggaatccagtagccaccaatagagcaacaatggcgaccaaaatattttcccctcctatgctcct

SEQ ID NO: 26423 - DNA, 390 bp, Zea mays
  Clone ID: LIB3180-001-P1-M1-F4
gttccttgcttgcctcgccagacagcctgtatcctcctccccctcccccgtatccgtcgagtagcaccttacgctgccgccgtcgtcatccgggcgaccaccctgccaaccaccatttcgctccgcccgcctcgcttttccctccccccaaccaaccactcccctcgtcccacttcttgcgtcaccgacccaatccgatcctatcccacccgcacggccgcacggcaacccgccgccgccgcccgagatcccgccccagtgttccgtcccgtgtgatgcgcggatccggctgagggcgagccatgccgagcgtcggcgtgaagatctacagcgtcttctttcaagctcttcctccgccaccgcctccagtcgctggccgccgccgcccgc

SEQ ID NO: 26424 - DNA, 332 bp, Zea mays
  unsure at all n locations
  Clone ID: LIB3180-001-P1-M1-F5
cgagccctccgccgcatcacaaacacctgcgatccgtccccgatcatcgcaccacctgtagcccacctcgctctcgagtctcgacccagcgacgagatggccgcggtggatctgaccccaaggacgcccaagaaggcctacggcggcgacggcggcgcctactacgagtggagccccgccgacctgcccatgctctccgtcgcctccatcggcgccgncaagctctcgctcgccgccggcggcctctccctccccagctactccgactccgncaaggtcgcctacgtnctacaagggcgcgggcacctgcggcctcgtnctgcccgaggcga

SEQ ID NO: 26425 - DNA, 165 bp, Zea mays
  unsure at all n locations
  Clone ID: LIB3180-001-P1-M1-F6
ccgtgctgctatcccccgataccgatcgatagccgncgcgctgctgcggctcgactnccttcccaacacgccccgccgtcgcctcctatcgatcactcattttaccccgagcttaagctcgcgcgtacctgcctaccaatccgtaggagaggaagaggggacaag

SEQ ID NO: 26426 - DNA, 398 bp, Zea mays
  Clone ID: LIB3180-001-P1-M1-F7
ggttagggatacagagtatgaaaatccggatattaaaccttgagagcaatatctagggctgtttggatccttggatagaggtgtggtgagtagcaataatcccatgcaatatctactgttagctgggtggagccagattatgggattataggaatctgggtggttggatatatatttttttcaatctacatcgtaatgtgagctggtttgatcctttacatatatttttagctggttttcataatgtgtagccttccaaacattgccttagacttccttttccagtcttacccttccttaaatgcatcactagctgatgtcttattgctagcatgcaagcatgtatatatttggtaccatacagtaattgtacacgtttctcctaaccaaataatctt

SEQ ID NO: 26427 - DNA, 264 bp, Zea mays
  Clone ID: LIB3180-001-P1-M1-F8
gttctagatcgcgagcggccgcactagttttttttaattaaacgggtactacatactcggaagcctcaccaaggatagctgggggaggaatcaggttgagactagacatttattgcacaaatgctccaccatgcatgtatggaaggtttaagcatgaaccatggcaagctatacagcagtatgatgggacgttgaaacccatacgcaaaagcgtctggaaccagactacggttagaagtttatgctgtgatgctactggatcca

SEQ ID NO: 26428 - DNA, 336 bp, Zea mays
  Clone ID: LIB3180-001-P1-M1-F9
cggacgcgtgggtgagcagcttatcagtggcaaggaggatacagccaacaacttcgcccgtggtcactacaccattggcaaggagattgttgacctgtgccttgatcgcatcaggaagcttgccgacaactgcactggtctccagggcttcctcgtcttcaacgctgttggtggaggaacaggctctggccttggttccctccttctggagcgtctgtctgttgactacggcaagaagtctaagcttggattcactgtgtacccatccccccaagtttcgacctcagtggttgagccatacaacagtgtgctgtccacccacttcctcctcgagca

SEQ ID NO: 26429 - DNA, 62 bp, Zea mays
  unsure at all n locations
  Clone ID: LIB3180-001-P1-M1-G1
cgtctcgtgtttnncgcctcttctttcctcccttctggccggggtcccttaataaagagcag

SEQ ID NO: 26430 - DNA, 370 bp, Zea mays
  Clone ID: LIB3180-001-P1-M1-G10
ggtctcgacgtctcgtctcgtctcgtctcgcctgcccgcagccccttggcttcgttccatccggcttctcggcggcggcggagaggagggggatggcgcaccggctgctgcgggacgcgcaggcggacgggtgggagcggtcggacttccccatcatctgcgagtcatgcctcggcgacaacccctacgtccggatgttaagagctgaatatgacaaagaatgcaaaatttgtgcacgtccttttactgtattccggtggcgtcctgggcgagatgcaaggtacaagaagactgagatctgccagacatgttgcaagctaaagaatgtctgcccaggtctgcctgctggatcttgaatatggactgcctg

SEQ ID NO: 26431 - DNA, 383 bp, Zea mays
  Clone ID: LIB3180-001-P1-M1-G11
gaatttttgtgatcaatttagcaaagcggtgtacaagactaattggccgaaaatcctttacctgatccgccccttcatgctttgggatcatggtgatgtacgcagtgtttagcttgctgaaattacagaattttctactccagaccgctgaaaccgcagccatcacatcatttttaataataccccagcaagatttgtaaaactgccctgtgaaaccatcgggccctaggaccttgtctgaaggcatatctctaatggtttcccatacttcttgctcagagaaaggaaagtccaatcagtcaggatgtccctaggaattgcaagggcctctaggtcaataaccctgtccctacctttgcactgaccaataaggttgtgataaa

SEQ ID NO: 26432 - DNA, 329 bp, Zea mays
  Clone ID: LIB3180-001-P1-M1-G12
ttccaggcacaatcattgtgaccacagacagtgctcgattgatggacttacatttatgtgataacacggaggagaggaggagatgaccacacggatacatggctgaagtcgaggcatatgttccacagggggtgcaaccccaccatcaggtggacatggtccttatcgacgagagctacgctaggggggccgtacccagcggtgcatccactggaatatatgacgccttggagttgagggatggaggatcttaatatcttggcatagggtgttgttaaggctgagagaaatgtaaataacatttttgtaccaatcaattgttaggaagg

SEQ ID NO: 26433 - DNA, 140 bp, Zea mays
  Clone ID: LIB3180-001-P1-M1-G3
tcggctaagcaaagcaatcggaattctctgcgatttctctagatctcgactaccccccactagtttgggttcctcctttcgttcgaaagagcaattctggtggcaatggcaaagagcgagggtccggcaatcggaatcga

SEQ ID NO: 26434 - DNA, 157 bp, Zea mays
  Clone ID: LIB3180-001-P1-M1-G4
ggggaacggccggtggtccacggaagcgcttttagccccaatccgagctccaaccagcgcgtttatccggcgctcccagtacctgtaatggcctcacttactaaatgccgcgcgctgggcatcgtccgggcgtgtgcgggggcagactgcgctagcg

SEQ ID NO: 26435 - DNA, 387 bp, Zea mays
  Clone ID: LIB3180-001-P1-M1-G5
gcgaaatccaatctagaagcgcccctctccctctctctctctctcttcgccgtccgaagctccgcaccccaatctaatcgacacctcgccgagatgggccgcaagttcttcgtcggtggcaactggaaatgcaatggaaccacagatcaggtcgagaagattgtcaaaaccctgaatgaaggacaggttcccccttcagatgttgtggaggtcgttgtcagccctccttatgtcttccttcctgtggtcaagagccagctgcgccaagagttccatgttgcggctcagaactgctgggttaagaagggaggtgctttcaccggtgaagtcagtgctgagatgctcgtcaaccttggtgttccctgggtcattcttggacactctgaa

SEQ ID NO: 26436 - DNA, 382 bp, Zea mays
  unsure at all n locations
  Clone ID: LIB3180-001-P1-M1-G6
ccttgctgactacaacatccagaaggagagcaccctccacttggtgctgcgtcttaggggtggaatgcagatctttgtgaaaacccttactggcaagaccatcactcttgaggtggagtcttcagataccattgacaatgtcaaggccaagatccaggacaaggagggcatcccgccggaccagcagcgtcttatctttgccggcaagcagctggaggatggacgcacccttgcggattacaacattcagaaggagagcaccctccacctggtgctgcgcctcangggaggaatgcagatcttcgtgaagacattgactggcaagaccatcacctttgaggttgagagctccgacaccattgataatgtgaaggcccaagat

SEQ ID NO: 26437 - DNA, 371 bp, Zea mays
  Clone ID: LIB3180-001-P1-M1-G7
cttccctcccgacccactcgcccaaaaccgtagcgccctcgcctgctcgccgccgccgtcgttgcgagctccccatcttcctccgttaaccatggcgacccagatcagcaagaagaagaagttcgtcagcgacggcgtgttctacgccgagctcaatgagatgctgacgcgggagctcgcggaggacggctactccggcgtggaggtgcgtgtcacaccgatgcgcacggagatcatcatccgcgcaacgcgcacgcagaacgtgctcggcgagaagggccgcaggatcagggagctcacgtctgtggtccagaagaggttcaacttccccgagaacggcgtcgagctctacgccgagaaggtcgtcaacc

SEQ ID NO: 26438 - DNA, 398 bp, Zea mays
  Clone ID: LIB3180-001-P1-M1-G8
gcctgctggacttcctcgtgctgtgtctctgtctgtcgctctcgctctcagacgactgggccgccgccgcttggtgctgaggctttcgttggtctcttcggcggcgacgagcacccaccagcagttctgtagaaatggctgatggtgaggacatccagcctcttgtctgcgacaatggcaccggaatggtcaaggctggttttgctggggacgatgcaccaagggcggttttccctagcattgttggccgtcctcgccacactggtgtcatggtagggatgggacagaaggatgcatatgttggcgatgaggcacagtccaagagaggtattctcacgctcaagtacccgattgagcacggtattgtgagcaactgggatgacatggagaaaatctgg

SEQ ID NO: 26439 - DNA, 341 bp, Zea mays
  Clone ID: LIB3180-001-P1-M1-G9
gtgtcatgcaccaccaaacgttgctcctggtggcccaggttatgttgggaacccacactacatgcctatacggccacaagagaactattatccttcttccgatgtgccccttgtcgaaaagcagccacactatggaatttcttcatatggacgagatgcacctgcaagtgctcccccagtgaatcaaaaccaagcacatggttcatctcaggtgacacacaggatgcaagttcctctttcctatgctgatgctgtgataggggcagctggtgccagtatcagctacatccagaggcatagtggagcaactataagtattcaagaaggtgctcctggcgaga

SEQ ID NO: 26440 - DNA, 376 bp, Zea mays
  Clone ID: LIB3180-001-P1-M1-H1
gaagcacgaagtagttttgtggcctgacaaaccaattatgtggtccaatccaagagcctaattatgtggggaccgtgctggcagttcggcaacttttgtttgtatatggccaactaaacctatttcacatatgtgattcgatgtttatgtagttgcttggatcttggggttttgggagtctgtactcctgcctccgctacctcaaatccatgccgcgctgcacctactctgttttcaatgaaagagttttctgttgcgtctgcactgaggactggtcatggcattaacagggtcagatggtaggcgataatttccattggtcaagcggtagttgcgttcagagagatctcttgacacttatttaggaccaatccct

SEQ ID NO: 26441 - DNA, 338 bp, Zea mays
  unsure at all n locations
  Clone ID: LIB3180-001-P1-M1-H10
tcgctccctcctccttcctccaaaccctggcgcaaaccctaatgtccaccgccggggacccttcccgcctctccggcgagtcctcgccgtcgtcctccacgtcctccggctcctcctcccactcctctggcgccgccgatgccgccgccaccaacctcgccctgacagcaccaacctccgccctcgccgatgacacagacgccgattcccccaccttcccgcgcgtggggacgtactttgagaccgaggacgacgcgtacgagttctacaaggcctacccggcccgtnttggctttgtcgttcgcaagtccaacaagtccaagaactcacggtacacc

SEQ ID NO: 26442 - DNA, 137 bp, Zea mays
  Clone ID: LIB3180-001-P1-M1-H11
ctgggctcctctgtttcctttcgtcaccgtcctcaccgttgtgttcccctctcagtctcggggcttcttctcgcgggcacctccggctgcttcttgccacgagaccacctgccagagcccgcgttctgtgagagagg

SEQ ID NO: 26443 - DNA, 334 bp, Zea mays
  Clone ID: LIB3180-001-P1-M1-H12
cgattattttctgaatatccttcgcaagttgatagagtcattgaattaagcttggactatttaacttctttgtttggcctctggctgaaatacgttgaattcttgttaaggatagtcttgggcactggaaacgctctgaactcccgtggcgatttggtccgtcagatatttgataaagaaattgataaccaccatgaggagaagctattgatatgtcaaatctgctgttcaaacattcagaaaacttctgaattcaaaatgccagatggaagcaggagcagagactaaactgttcctgcagaattggagggagatatttctaaagcagctcaca

SEQ ID NO: 26444 - DNA, 85 bp, Zea mays
  Clone ID: LIB3180-001-P1-M1-H2
gtgggaataacctagcctaacgaactttcgctctacaggtcgtaaattagccccaagcgagacctaatggggagtaaccctcccc

SEQ ID NO: 26445 - DNA, 386 bp, Zea mays
  unsure at all n locations
  Clone ID: LIB3180-001-P1-M1-H4
tcggagcacaccgcgcagcaacgagaggggcaaacaagcttgctactgtgatttctcgtccgagcagccgcggaggagagagagagagcatggccgaccacaaggaggagcctgtgccggagtctgtgatggacaagatcaccgagaagttcccacggcgggaactcgtcgtcgtcgtcgtctgactcggacgacgagaagaaggggtcctcgttggcgtcggcggcggaagccatgaangccaagatctaccgccttttcngccgggagaggcccgtccactccgtcctcggcggcggcaagccctgccgatcttatcctatggaggaaccgggaagatctctggcgggtacttgctggtgccacggccatctggctcctattcg

SEQ ID NO: 26446 - DNA, 381 bp, Zea mays
  unsure at all n locations
  Clone ID: LIB3180-001-P1-M1-H5
cgcgtgttccacaacatcacggacacgcacgtcgcgcaccacctnttntncaccatgccgcactaccacgccatggaggccaccaaggcgatcaggcccatcctcggcgactactaccacttcgacccgacccctgtcgccaaggcgacctggcgcgaggccggggaatgcatctacgtcgagcccgaggaccgcaagggcgtcttctggtacaacaagaagttctagccgccgccgctcgcagagctgaggacgctaccgtaggaatgggagcagaaacccaggaggaggagacggtactcgccccaaagtctccgtcaacctatctaatcgttagtcgtcagtcttttagacgggaagagagatcatttgggcacagag

SEQ ID NO: 26447 - DNA, 383 bp, Zea mays
  unsure at all n locations
  Clone ID: LIB3180-001-P1-M1-H6
gccttctgcgcctncatttcggcctctgtcccttgcaagttcagtctcgccttcaaccatgggtaaagagaagtcccacatcaacattgtggttattggccatgtcgactctggcaagtcgaccaccacaggacaccttatctacaagcttggaggcattgacaagcgtgtgatcgagaggtttgagaaggaggctgctgaaaatgaacaagcggtcctttcaagtacgcctgggtgctcgacaagctcaaggctgagccgtgagagaggtatcacccattgatattggttctgtggaagtttgagaccaccaagtactactgcacggtcattgatgcccctggacaccgtgacttcatcaagaacatgatcactggtacctt

SEQ ID NO: 26448 - DNA, 395 bp, Zea mays
  Clone ID: LIB3180-001-P1-M1-H7
gggtcttcagaccattagctttatctactccagagcgcagaagaacccgatcgacaccatgagggtgttgctcgttgccctcgctctcctggctctcgctgcgagcgccacctccacgcatacaagcggcggctgcggctgccagccaccgccgccggttcatctaccgccgccggtgcatctgccacctccggttcacctgccacctccggtgcatctcccaccgccggtccacctgccgccgccggtccacctgccaccgccggtccatgtgccgccgccggttcatctgccgccgccaccatgccactaccctactcaaccgccccggcctcagcctcatccccagccacacccatgcccgtgccaacagccgcatccaagcccgtgccagc

SEQ ID NO: 26449 - DNA, 315 bp, Zea mays
  Clone ID: LIB3180-001-P1-M1-H8
ctgatgtcgacaacacgttcattgaggttgcggataacattggcgatgagcatgtggtcggtgacaacctcgccaatgaccatgttctgccatgttcttgaatttgcggtagtagtccatgttggaggttgccttggacgaagttcgaggtggaagcatcgaggtaaggggcaccctgcttgcggttggcaatgaattggttttcgagagcgagtcaaatggcacgagcagtagtactgtgctcagacgatatcctcgggactgctagagatggtgtcgtggaggcacgtgaggacaatgcagtccatgcgtgcc

SEQ ID NO: 26450 - DNA, 356 bp, Zea mays
  Clone ID: LIB3180-001-P1-M1-H9
tgttgttgatgtcgacaacacgttcatggggggtgcttataacattggcgatgagcatgtgacctgtgacaacctctccaatgactatgttttgccatgttcttgaatttgcggtattagtccatgttggaggttgccttggactaagttcgaggtggaagcatcgatgtaaggggcactctgcttgcggttggcaatgaattggttttcgagagcgagtcaaatggcacgagcagtagtactgtgctcagacgatattctctggactgctagagatggtgtcgtggaggcactttgaggacaatgcagtccatgcgtgcccaacccggtatgatgttgtcagtgttggtgtcaag

SEQ ID NO: 26451 - DNA, 248 bp, Zea mays
  Clone ID: LIB3180-002-P1-M1-A1
tcggtcacccagagcagacccggatttcgctcttgcggtcgctggggttttagcattggctgatcagttcgatccgatccggctgcgaaggcgagatggcgttcgcggtttctggggcggtgctcggtggggccgtaagggctcccagactcaccggtggcggggagggtagtctagtcttacggcacaccggcctcttcttaacttggggtgctcgagttggatgttcggagacacactatgccatg

SEQ ID NO: 26452 - DNA, 214 bp, Zea mays
  Clone ID: LIB3180-002-P1-M1-A10
agaaaagggaaaaatcggagttctccctcgtgtcgtcttcctctccgccgcttctcctgtccaccctcgactgcttgcgcgtgacctgagccgccgccgcctaaatccgttcatcccggggcccgcctaaaccacgccgccaccgaccacgtataatcctgcctccctttgggccggtttcaaggctcgtttccttggggaccgttcgtttgcc

SEQ ID NO: 26453 - DNA, 315 bp, Zea mays
  unsure at all n locations
  Clone ID: LIB3180-002-P1-M1-A11
gcacttttagaccttctcaagtcaaaatatattcaattacatgactttggatctgaaatcctcccaagagctgtactagatcatagtgtgcaggcatgcatttttacgggctattgggaggatgttggaacaatcaaatcattctttgatgcaaacttggccctcactgagcangccttcaaggttgatttttatgatcccaaaacacctttcttcactgcaccccgatgcttgcctccgacgcaattggaccagtgccagatggaagatgcatttatcttaaatggttgcttactgagagaatgcaacatcgag

SEQ ID NO: 26454 - DNA, 364 bp, Zea mays
  Clone ID: LIB3180-002-P1-M1-A12
gcgccaatgggctcttccattcctgccgcaaaggcgctaatagactcttccagagagcccttctatgtcatccgcaagggggatgtcattggcgtctataagaacctcagtgattgccaagcccaagccagcaaatcggtactccatccttcagtcactgtctacaaaggctattctctgcgtaaagaaactgaggaatatcttgctgcacgtgggttaaggaacgctgtctattccattggtgcagcggatgcaagtgacgaattgtttggcgatctggttccctgccctttttcagcaacctgatgagaacacacaatctattttgaaaatgtcacaaggacaggagatggaaacaagatca

SEQ ID NO: 26455 - DNA, 368 bp, Zea mays
  Clone ID: LIB3180-002-P1-M1-A2
ctccggtggctccaccactagcaacccgtgcagcgagcccaccccgaccactgtcatgtcgaggcgcggcgactgggtctacgagaacaacggcgggacctgcgtggccatcgccggcgccgattactgtgtcgtcgcggcggacacccgcctctctgtcggatacagcattcttacgcgcgaccactctaagatctgcgacctggctgacaaatgtgtactagcatcttctggctttcagggtgatattaaagctctgcacaagaacctagctgccagagaattgctataccaacaccagcataacagaaggatgagctgccctgccatggcacagctcctctccaataccctgtactacaagcgct

SEQ ID NO: 26456 - DNA, 372 bp, Zea mays
  Clone ID: LIB3180-002-P1-M1-A3
ggttatgatgatgttggtggagttagaaagcaaatggcccaaatcagagagcttgttgagcttccactacgccatcctcagcttttcaaatctattggtgtgaagccaccaaagggcatattgctgtatgggccacctggttctggaaagactcttattgctcgtgctgttgcaaatgagactggagcctttttctttctgatcaatggcccagagattatgtcgaagttagcaggagagagtgagagcaatctcagaaaggcatttgaagaagcagagaagaatgctccatctatcattttcattgatgaaattgattccattgcacccaagagagaaaagaccaatggagaagtagaacgtcgtattgtt

SEQ ID NO: 26457 - DNA, 378 bp, Zea mays
  Clone ID: LIB3180-002-P1-M1-A4
cgaattcttcctcctcccatcccgtgcagccggcctcaccgccggcgacgggacgcggagacccgggctgccggtaccgtcagccgtgctccttcctctcttcgtcgcccccgccaaaaccttcatctgccggggctgcaccggcggcgcggggacaacaaaagctcgagatccggtgactgatctcttcgttcctcggttcactttgatattccaacaaaggtcacattgctagactcccagattggttcctaacaatgagggcacatgaacgagctgccagtttggctcttgcctgtctgagcttggctccacttctggttaacgtaaacccaaatgtgaatgtggtattgacagcatgccttactgtctatgtgg

SEQ ID NO: 26458 - DNA, 383 bp, Zea mays
  Clone ID: LIB3180-002-P1-M1-A5
cccattcccatccgagctgcagcgctcgacgacggggagaatagcgtggcgtgggcggcgccatgaagtacagcaaggaagataagcccgagagggcgggcggcgccggcgcagggtccagggcggtgccggtggcgctcgtcgtcgtcgtgctctgcgccttctccttctacctgggcggcatctacagcacgggacggagcctgctggactccatccagccggcgccgacggctctcctcgccctcggcgccgccacgacgacccgccgtccctccgacgacggccaggctcggccggcactggcgtccacggccgccgtggcgttccccgagtgccccgccgattaccaggactacaccccctgcaccgaccccaagcgc

SEQ ID NO: 26459 - DNA, 81 bp, Zea mays
  Clone ID: LIB3180-002-P1-M1-A6
agcgcgcgtgcgttagaacaaagcatagccacggactacgaagatgctgacccaatgactagcctgcccaccactatgaat

SEQ ID NO: 26460 - DNA, 373 bp, Zea mays
  Clone ID: LIB3180-002-P1-M1-A7
gagagaagatgatctacgacgtgaactccccgctcttccgttccttcctcagccagaagggcggcgccgacaagaggaaaatggaggagcataaaccaaaggagcagaggcccaaggccaacgagaacaagcctgtgatgaacgaatgagtatctccagaagctttgttcaatgtgcaaccaagtccgatgtccgtttgctctggttagcttaaaaccaacgcttccaataatcctattggtgtcttagtttccccttatagtgttatttgctcggcttgaacatggcaaacggaaatgaaacttgaactacctatggtactgtcatcaatttgagacccccatgattgacaaaaaaaaaaaaaaagggcggc

SEQ ID NO: 26461 - DNA, 372 bp, Zea mays
  Clone ID: LIB3180-002-P1-M1-A8
cgcgctgacccggtgctccgccgtgctctccaactcgcccttcatcctgaacctggactgcgaccactacatcaacaactcgcaggcgctgcgcgcgggcatctgcttcatgctcgggcgggacagcgacacggtggcgttcgtccagttcccgcagcgcttcgagggcgtggaccccacggacctgtacgccaaccacaaccgcatcttcttcgacggcacgctccgggcgctggacggcatgcagggccccatctacgtcggcacgggctgcctgttccgccgcatcacgctctacggcttcgacccgccgcggatcaacgtgggcgggccgtgcttcccgtcgctgggcggcatgttcgccaagaccaa

SEQ ID NO: 26462 - DNA, 322 bp, Zea mays
  Clone ID: LIB3180-002-P1-M1-A9
tcgagccgccaccaggtgcagagtctttcgtcatctcttctccggcgaagaacccccagtcgcccaccagatcacttgttaaactttgttgaggggtgatggcggtttctttcgcaaacctcaacaccgaggcagggcttaaaaagcttgatgagtaccttctcactcgcagctacatcactggctaccaagcttccaaggatgacttggctgtctacacttcgttttcgtctgctccctcgtccaagtatatcaacgtagcaaggtggtttaatcacattgatgcgctcgtgaggctgagcggaattactgcagagggcca

SEQ ID NO: 26463 - DNA, 376 bp, Zea mays
  Clone ID: LIB3180-002-P1-M1-B1
cacaaactcttctccaataaattacgaccccagccaagctttggagtgcggttcccaaccatggcggcctcccccacttcctccctcgccccgccggtggtgcctatggagcttcacgccggcaaccgcgaccgcctcgtcgccgcgctccgcggccacatctccgcctccgcgcgcccgctccacggcctcgtcctccttcagggcggggaggagaagacacggtactgcaccgatcacctcgagctcttcaggcaggagagctacttcgcctatctctttggagtgcaggaaccagggttctacggcgcaattgacatcgcctctggacagtcaattttgttcgctccaagattgccagctgactatgctgttt

SEQ ID NO: 26464 - DNA, 240 bp, Zea mays
  Clone ID: LIB3180-002-P1-M1-B10
gcgagcggccgccctccatttgtttcctacctttgtacaccagtagctctatttagatcgcgattaaaataaaacgtaataaaaccgccaacaactggagattccttatgctattgttgctccccgaggcattggatccgaatgcagcatgaatggtgctattgtttatcagatatcatttatgtgaaaccagcaatcccaaaattggtgatgaatgatgcttgctctttcttcttgttt

SEQ ID NO: 26465 - DNA, 304 bp, Zea mays
  Clone ID: LIB3180-002-P1-M1-B11
catctacgacatctgccgccgatcccttgacattgagcgcccaacctacaccaacctcaacaggcttgtgtcccaagtcatctcatcccttactgcctccctgaggttcgatggtgctctgaacgtggatgttaacgagttccagaccaacctggtaccctacccgaggatccacttcatgctttcttcgtacgctccagtcatctctgctgagaaggcctaccacgagcagctctctgtggctgagatcaccaacagtgccttcgagccatcttccatgatggccaagtgcgacccacgccat

SEQ ID NO: 26466 - DNA, 331 bp, Zea mays
  Clone ID: LIB3180-002-P1-M1-B12
tcggccgccatttcccgtgccccccaccggcgccccgccgccgacgcgatccccatcacgcgccgcccatggcgccccacctactcaccccaccagccctcaccgttacgggcgccgccgccccaggtcgcgtcggcagcgccggatcggcggacccgcggacgcccaggccacgcgcgccgtggcccaccttctgctcctcccccagcagagggcggcgggagctgaggaagaggaagggcttgagcgtcgcggcggcggcggaagtagcggagccgggtgggcccgctggggcgatgcggctcaacgagtacatggtcgctgtggaccg

SEQ ID NO: 26467 - DNA, 368 bp, Zea mays
  Clone ID: LIB3180-002-P1-M1-B2
caccccacgacttccgtccgagtctgagctcatctccacgcgccgccgccgccgctcgacgcccaccgcgcagccatggcggaacagactgagaaggctttcctcaagcagcctaaggtgttcctcagctcaaagaaatctggcaagggtaagaagccaggcaagggtggcaatcgattttggaagagcattggccttggtttcaagactcccagggaagcaattgaagggacctacattgacaagaaatgtccattcactggaaccgtttctatcagaggcagaattattgctggaacatgccacagtgctaagatgaacagaaccatcattgttcgcaggaactatcctcactttgttaagaaata

SEQ ID NO: 26468 - DNA, 286 bp, Zea mays
  unsure at all n locations
  Clone ID: LIB3180-002-P1-M1-B4
ctcgggaaattactggactccatcatgctttatttgctgtctgataatcatgtgcttcattaggcatatgaagcatgttcgcataaaatggaactgactatctttgcggcagtaaactgaccgcgcnnaaaaaaaaatgaaaaaagcaaataaaaaagaactagataaaaaagggcggcgttaaggatccagctactcgctgctgcactctacttttatggcacctaatcaattatgccgcgttacaactctgctgggaacctgcgaccaactaatgctgagacat

SEQ ID NO: 26469 - DNA, 297 bp, Zea mays
  Clone ID: LIB3180-002-P1-M1-B5
ctcgtggcccacgtgcgggaaaactaccccaagtctgaagtggttgctccggcggattgcatcatgctagcgctgcgaacaactcaaacacaccggctttctttgaggacctgttgacatggaatctaatcctgtcagaacctgtgacgttcttagaggttctgctttggatcatcatgccttgaaaagaggaaccaatcatgtcaggtgatgctatttgagcaaagcaattctgactattcggacgcaacagtcatatagtcacagcggtataaaggatgcggatgcattgtgtgg

SEQ ID NO: 26470 - DNA, 328 bp, Zea mays
  Clone ID: LIB3180-002-P1-M1-B6
gtgacttgctgtgcgggattggcaagggggacgcgccgccaccggagaagaggccggggcagctgcgggaggaggtggaggaggtggagcttagcctcgggctgtcgcttggcggccgattcgggctcgacaggaaggggagcaagctcccccggtcgtcgtccgtggcggccatgctgacaacgccggtggaggtgccggcgccgccctgcctctcgcgggcgagctcgctgccggtccaggcggaggcgtcggaagttgagaggaagcaggggctggatggatggggttcttgccgtgagggcgctggtttcggtgtgcaacacgc

SEQ ID NO: 26471 - DNA, 353 bp, Zea mays
  unsure at all n locations
  Clone ID: LIB3180-002-P1-M1-B8
cgaccagctacgcaaccatggctttcgcttcctcgaatgccaagcagagcctctacccggatgtggaccagtcccaccctgatctcaacacccctttcttctccgcacccaccacctccaccggcgccggcgccggcgccgccacgggcaactccctctaccccaccgtcgaccccaacgagctcgcacagaacctcttccccgagacggtcgaagaggacgcggcaccgtcaccgcccaccacagaggagaccatcatcgctgtccccggngcgcagctccacctcatcgaccccgaccgcagcgtcgacctcggcgctggcacgctctccatcgtgcgccttcgccagggg

SEQ ID NO: 26472 - DNA, 361 bp, Zea mays
  Clone ID: LIB3180-002-P1-M1-B9
cacagccgcggatagagaaggaaaaatttccccaaaccctagcttcggatctcgatggcgaacccccgcgtcttcttcgacatgaccgtcggcggtgccccagccggccggatcgtgatggagctgtacgccaacgaggtgcccaagaccgcggagaacttccgcgcgctgtgcacgggcgagaagggcgtgggcaagtccgggaagccgctccactacaagggctctaccttccaccgcgtcatcccccagttcatgtgccagggcggcgacttcacccgcggcaacggcaccggcggcgagtccatctacggcgagaagttccccgacgagaagttcgtccgcaagcacactcggcccc

SEQ ID NO: 26473 - DNA, 374 bp, Zea mays
  Clone ID: LIB3180-002-P1-M1-C1
cacctcgcctgcgatctccgtagcctccgtcgcgtcgagcatcgatcatgtcggcctactgcggaaagtacaaggatgagctcatcaagaatgctgcctacatgggcacccctggcaagggtatcctgcgctgctgatgagtccactggcaccattggcaagcgcctttgcagcatcaatgtacagaacgacgaggagaaccgccgagcccaccgtgagctcctattctgctgccctggtgctctccagtacatcagcggggtgatcctctccgaggagaccctgtaccaagagaccgacggtgggaagccttttgttgatgtcctcaaggagggaggcgtcctccctggcatcaaggttgacaagggcaccat

SEQ ID NO: 26474 - DNA, 374 bp, Zea mays
  Clone ID: LIB3180-002-P1-M1-C10
cagaccattagctttatctactccagagcgcagaagaacccgatcgacaccatgagggtgttgctcgttgccctcgctctcctggctctcgctgcgagcgccacctccacgcatacaagcggcggctgcggctgccagccaccgccgccggttcatctaccgccgccggtgcatctgccacctccggttcacctgccacctccggtgcatctcccaccgccggtccacctgccgccgccggtccacctgccaccgccggtccatgtgccgccgccggttcatctgccgccgccaccatgccactaccctactcaaccgccccggcctcagcctcatccccagccacacccatgcccgtgccaacagccgcattc

SEQ ID NO: 26475 - DNA, 374 bp, Zea mays
  Clone ID: LIB3180-002-P1-M1-C11
gcggaaagtacaaggatgagctcatcaagaatgctgcctacattggcacccctggcaagggtatccttgctgctgatgagtccactggcaccattggcaagcgcctttccagcatcaatgtcgagaacgttgaggagaaccgccgtgccctccgtgagctcctattctgctgccctggtgctctccagtacatcagcggtgtgatcctcttcgaggagaccctgtaccagaagaccaaggatggcaagccttttgttgatgtcctcaaggagggaggcgtcctccctggcatcaaggttgacaagggcaccattgaggttgttggcactgataaggagaccaccacccaaggccatgacgaccttggcaagcgc

SEQ ID NO: 26476 - DNA, 322 bp, Zea mays
  Clone ID: LIB3180-002-P1-M1-C3
cggacgcgtgggggaccttacgcgccgtgggcctattgctcttcgactatccggcccacacccattgccacccaccagcaccttcggcggtccccacccccgcctacttccctcgtgttcgcggtgtggaccccgcgtaccttgcggcgttgacgcgcgaacgtcccgtcatccggtgagtgactgggagaccgagccttaggcgggggggtggaaccggacaccctcgccgggttgcagtatattgggcgtggggcgcatgcgctctctgctgctttcgttcacgccaccacctgacgtctattcgccactgagccaggat

SEQ ID NO: 26477 - DNA, 385 bp, Zea mays
  Clone ID: LIB3180-002-P1-M1-C4
cgcctctcgagtctcgtccacccgtcgtcctcctagctcctctactcgccagtcgccatgggcaagattaagatcggaatcaacggcttcggaaggatcggcaggctcgtggccagggtcgccctccagagcgaggatgtcgagctcgtcgccgtcaacgaccccttcatcaccacggactacatgacctacatgttcaagtacgacaccgtccacggccactggaagcacagcgacatcacactcaaggactccaagacccttctcttcggtgacaagccggtcaccgtctttggcatcaggaaccctgaggaaatcccgtggggtgaggctggcgctgagtatgtcgtggagtccaccggcgtcttcactgacaaggacaagg

SEQ ID NO: 26478 - DNA, 376 bp, Zea mays
  Clone ID: LIB3180-002-P1-M1-C5
tgatgatgaaccctgtcacaaagaagaataaaggctttgccttcctgcgatatgcaactgtagagcaagcaaggcgtgctgtttcagagctaaagaatccactggtgcggggtaaacaatgtggcgttgctccaagtcatgacaatgatacactctttgttggcaatatctgtaaaacatggacaaaagaacatttgaaggataaactgaagagttatggtgtcgaaagttttgacgacttactacttgctgaggacactaacaatcctgggatgaatcgtggctatgccttgcttgagttttctactcgacctgaggcaatggatgctttcaggacattacaaaagaaggatgtagtatttggagttgatcgtag

SEQ ID NO: 26479 - DNA, 353 bp, Zea mays
  unsure at all n locations
  Clone ID: LIB3180-002-P1-M1-C6
cgctctcagggcagcaccagcgtgtatctgttaactagaagtaattcctctcgacatttatntttttcccgagcgtcctcttttcttncagcggcgcgtctcgactcctccncttcgtccgcatcggagcacaagcaagctcccaggatccgcgtctggatcccctcccgccgcccctggatccgctcccgccagcgcccctgggtccgctcccgcgcggcgcccctggatccgctcccgcgcggcgcccctgggtccgctcccgcgcggcgcccctgggtcctctaccgacgccgcccctgggtcctctaccgacgccgcccctgggtctcctccgcccgcccgccctgggt

SEQ ID NO: 26480 - DNA, 369 bp, Zea mays
  Clone ID: LIB3180-002-P1-M1-C7
gctttcgcgacgcccatcggcactagctagctagctagcaggacggcggcgatgagctccaccaccacaaccacaacacgtcttctcgtcatcccgcttgtctacttgatgctcgttgccagtgccagccatagtgccctcagctccgcttctctcttcttcgatgtcgacttctccaacgcctccacgttcagcctcgcggacttcacgaccgccggcgacgccgcgttccacggccaacgcttcgacctcacggcgaacgcgtacagagcggggatctccgacagcgtcggccgggttgcgtacgcgcacccggtgcctcttcgggacaacgccacgggccaggtggccagtttcaccacatccttc

SEQ ID NO: 26481 - DNA, 370 bp, Zea mays
  unsure at all n locations
  Clone ID: LIB3180-002-P1-M1-C8
ccgtcctcctcgccgctccgccgcgcggttgagcgccgacgagcgagcccaccgctgcctcgtccgccctatggatatggatgtccgccgcagggttccaccgccgcacgggagcgtccctaggcgccagcaggcgaccggggccgagggggagcgggtgcgtgtgcaggcgggtgatgcgctaccgctgccgatccggcacacgaacctcatcttctcggcgctgttcgccgcgtcgctggtgtacctgatgccgcggtggcgggggaagatccgcgcctncacgccgctccacgtggtctcccccgccgagatcttcgccatctgcggcctcgtcgcgtcgctcatctacctcctcagcttcttcggg

SEQ ID NO: 26482 - DNA, 369 bp, Zea mays
  Clone ID: LIB3180-002-P1-M1-C9
cagaagtggataaggccgttagatgggctagaaaccactatctgtcatcaacagctcttccttctatcaagggagacaagttaatcattctccatgagagatatatcaattgagaggctgaaggaacatggtataacaactaagaaatcctctcaaaatctgaagaaaatgggggttggcacaccagccttaatcaaaggtgtgttataggtaacatttagaagtattggctttatttgttctcctagcatgtgctatctgcttcttttgttctgatgttgtcctgcgctgaatattgttctaatattgcccaaatttgcatattctaactttgctcatgtattttgagcacatgaacaaaaagagcag

SEQ ID NO: 26483 - DNA, 376 bp, Zea mays
  Clone ID: LIB3180-002-P1-M1-D1
gcgaactccatttcgatcccatttgaaatcaacccatcctcgtttcctccgtctagcagcctctcacccttatggccaagatcaagatcgggatcaatgggttcggcaggatcggaaggctggtggccagggtggccctgcagagcgacgacgtcgagctcgtcgccgtgaacgaccccttcatcagcaccgattacatgacctacatgttcaagtatgacactgtgcacggacagtggaagcaccatgaggtcaaggtgaaggactccaagacccttgtctttggtagagaaggaggttgctgtgtttggctgtaggaaccctgaggagatcccatggggttccgttggcgctgaatatgttgttgagtctactg

SEQ ID NO: 26484 - DNA, 379 bp, Zea mays
  Clone ID: LIB3180-002-P1-M1-D10
ccagtagcaacaatagagcaacaatggcgaccaagatattttccctccttatgctccttgctctttctgcatgtgttgctaacgcgacaattttccctcaatgctcacaagctcctatagcttcccttcttcccccataccttccatcaatgatagcttcagtatgtgaaaacccagctcttcaaccctataggctccaacaagcaatcgcagcaagcaacatacctttatcacccttgtttcaacaatcgccagccctatctttggtgcagtcattggtacaaaccatcagggcacagcagctgcagcaactcgtgctacctgtgatcaaccaagtagctctggcaaacctttctccctactctcagcaacaacaatt

SEQ ID NO: 26485 - DNA, 296 bp, Zea mays
  unsure at all n locations
  Clone ID: LIB3180-002-P1-M1-D12
cgcacccttctggacactgcaagaagctggcgcccatcttggacgaggcagccaccactctccagagcgacgaggaagtcgtgattgctaagatggacgcgactgccaatgacgttcccagtgagtttgacgtccaaggctacccgaccttgtacttcgtgaccccgagcgggaaggtgacatcctacgacagcggcaggacggcggacgacatcgtcgacttcatcaagaagagcaaggagaccgnaggcgccgncaccaccaccaccacccaggcgccaccggcattcgagaag

SEQ ID NO: 26486 - DNA, 287 bp, Zea mays
  unsure at all n locations
  Clone ID: LIB3180-002-P1-M1-D3
cgggaacaacggcaaaatgctagctagagtagcgaaattccaatcccgtcgacccatgacttggcaagcaccaggatcaacgatcaggcactggtcggctgcacgaagtgctgcgccacgatgcggcgctggatctttccggtggccgtcttgggcaggtcgtccgtgatgaacaccttcttgggcaccttgaaggacgccaggttccgccggcagtgcgccagcacctcctcctnccgcagcgccgacccgtcccgcgggatcaccgcacagttgatctcctcccc

SEQ ID NO: 26487 - DNA, 380 bp, Zea mays
  Clone ID: LIB3180-002-P1-M1-D4
tgcgtacacggtctccctcttcctgtcagtagtagagtgagagtgaggcagcgagtgggagacaaggggaaatggggaagggagcgcaagggagcgatgcggcggcggcgggcggcgaggtggaggagaacatggcggcgtggctggttgccaagaacaccctcaagatcatgcccttcaagctcccgcccgtcggcccttatgatgtccgcgtgcgcatgaaggcagtggggatttgcggcagcgatgtgcactacctaagggagatgcgcatcgcgcacttcgtggtgaaggagccgatggtgatcgggcacgagtgcgcgggcgtggtcgaggaggtgggcgccggcgtgacgcacctgtccgtgggcgaccgcgtg

SEQ ID NO: 26488 - DNA, 381 bp, Zea mays
  Clone ID: LIB3180-002-P1-M1-D5
tcgcgccgctgccgctcccgctgccgcaggaaccctagaccacgctgagcaacccccggcctacacggcgtagctttgcaggaaatggaatacggcgccgtcctcgccgccgcgccgctcgtcgcacggccgaactggctcctcctctcgccgccgccactggcgccgtctattcagattcagaatcgtctttattcgatctcgtcattcccactaaaggctggacctgtaagggcatgcagagctttagcaagcaactacacgcaaacatctgaaacagttgatttggactgggagaacctgggttttgggattgtgcaaactgattatatgtatattgctaagtgcgggacagacgggaatttttctgagggtgaaatg

SEQ ID NO: 26489 - DNA, 340 bp, Zea mays
  Clone ID: LIB3180-002-P1-M1-D6
gatattcccacgaccaactgctggccctcttcgtcccattgttcaatgccagactctcaagtacaacatgaagtcaagggctgggagaggctttacccttgaggagttgaaggctgcgggcattccaaaaaggcttgctccaaccattggcatttctgtggatcaccgccgcaagaacaaatcccttgaggggctgcaggccaatgtccagaggcttaagacatacaaggccaagctggttatctttccaaggcgtgctcgcaaggtcaaggctggtgactctactctggaggagcttaccactgctacccaggtacagggtgactacatgccaattact

SEQ ID NO: 26490 - DNA, 376 bp, Zea mays
  Clone ID: LIB3180-002-P1-M1-D7
cacaaacgccggcgcaaactctcgcccgagcccgacagatcttcaattccccattccgcccaccgatcgaccttcacgccagtctcggtctcttccgaaggcgtcgcgcgcggttgtttgagaggagaggaggaagatgagggagtgcatctccgtccacatcgggcaggccggcatccaagtcggcaacgcgtgctgggaactttactgcctcgagcacggcatccagcctgatggccaagtgcctggagataagaccgcgggacatcacgatgatgccttcagcaccttcttcagccagactggtgctgggaagcacgttccccgtgcaatcttcgttgatctagaacccactgtgatcgatgaggtgcgcact

SEQ ID NO: 26491 - DNA, 361 bp, Zea mays
  Clone ID: LIB3180-002-P1-M1-D8
gtgctattgaccctatgcggaggtaatcaaaacttttttcttctgcgaccggggtgctgctctggcctatccgatctgccacctggccatctcgcacggtcctttccccaactacccagcgcctgtgcgtgccgcgatccagatccaggttgatcaggatgggtctggcgaaggaaggcgtccacatggaggagggaaccctagagatcggcatggagtacaggactgtatctggtgtggccgcgcctctggttatcttggataaagtaaagggcccaaagtaccaagaaattgtaaacattcgacttggagatggcaccactcgacgaggtcaagtccttgaagttgatggagaaaaagc

SEQ ID NO: 26492 - DNA, 214 bp, Zea mays
  unsure at all n locations
  Clone ID: LIB3180-002-P1-M1-D9
tgcagccgccgncgncaaaccacaccgggctcctntntggcggatagcggattgtgattttgatcggccgnccttanaccnnagnccagcccggcccgcgaaggagaagacaaagctgccgctgccgctaccgctacccctggtgcacggcgagcgtntgtgggcgcggccggggcggcggctgaagacggccgcggtcacccgccggacaaac

SEQ ID NO: 26493 - DNA, 376 bp, Zea mays
  Clone ID: LIB3180-002-P1-M1-E10
ggcatgtctgatgagcgtgctctctcactcctttctgtcaagccacccaagtcagggcagcttgatcctctgcactctgctgcaactcgcatacaaaataagttcagaggatggaaggggagaaaggaatttcttcttattaggcagcgaattgtgaagatccaggctcatgtgcgaggtcaccaagtgaggaagcattatcggaaaatagtttggtctgttgggatcgtggagaaagttatattgcgttggaggcgtagaggggctgggttacgtgggtttcggtctcaagaaggatcagtggagagcagtagtggcggaacaagtagcagttcgatccaaaataagtcttctggagatgattacgattttctgc

SEQ ID NO: 26494 - DNA, 378 bp, Zea mays
  Clone ID: LIB3180-002-P1-M1-E11
caacctgctcctgccccgttgcctcctctccgcccccaccaccatggctcgtgcttccgtctccggttccgctgcggtggccaaagcactgatccccttaaaccccgccagcggcggccgccttccttccctgcttcctgcgcgcctccatgtccccgggagcagccgcgtgctccgcggcgcctcgctccgctgctatgccgccgccgccgccgctgtggccgagcagagccgcatcaaggtgcagaaccccatcgtcgagatggacggggatgagatgacgcgggtcatctggaagatgataaaggataagctcatcttcccatacctggagttggatgtgaagtactacgatcttggaattctcaatcgcgatgc

SEQ ID NO: 26495 - DNA, 382 bp, Zea mays
  Clone ID: LIB3180-002-P1-M1-E12
tcggctgtaaggcagtacttgtggttgtttgaggagcataatgtgatggaatttctaattcttgctggcgatcacctgtaccggatggactatgaaaagttcattcaggcacacagagaaacaaatgctgatattaccgttgctgccctaccgatggatgagaaacgtgcaactgcatttggcctcatgaaaattgatgaagaagggaggatcattgagtttgctgagaaaccgaaaggagagcagttgaaagcaatgatggttgacaccaccatacttggccttgatgacgtgagggcaaaggaaatgccttatattgctagcatgggtatctatgttttcagcaaagatgtaatgcttcagctcctccgtgaacaatttc

SEQ ID NO: 26496 - DNA, 249 bp, Zea mays
  Clone ID: LIB3180-002-P1-M1-E2
aggatcagctcatgagagaatgctagctacattggcacccctggcaagggtatccttgctgctgatgagtccactggcaccagtggcaagcgcctttccagcatcaatgtcgagaacgttgaggagaaccgccgtgccctccgtgagctcctattgtgctgccctggtgctctccagtacatcagcggtgtgatcctcttagaggagaccctgtaccagaagaccaaggatggcaagcctttagttgat

SEQ ID NO: 26497 - DNA, 379 bp, Zea mays
  unsure at all n locations
  Clone ID: LIB3180-002-P1-M1-E3
gtaacctctggggattttcctgtgagaagagggattgccattggactggactggagcttggggggagccaaaagcaaaaagaagcccaggattagcgtgtggcggattgcgtggctatttcgggaggcgagagaacgagaggcgtggggcctaggccgggggaggcggcggctccttggaccggccattgatggcgccgtggagcggcttctggggcggcaagcccggcggcgacgcctaccggggcacgccggtggtggtcaagatggagaaccccaactggtccatctccgagatctcctcgccggaggacgacgacgaggacatcttggccgncgncgncgncgccggccggcgcaacaaggggggccgcaccaag

SEQ ID NO: 26498 - DNA, 380 bp, Zea mays
  Clone ID: LIB3180-002-P1-M1-E4
gtcgccggccatggccgcgaacgggcaccgtgtcatggtcgtctctccccgctacgaccagtacaaggacgcctgggacaccagcgtcgtgtccgagatcaagatgggagacgggtacgagacggtcaggttcttccactgctacaagcgcggagtggaccgcgtgttcgttgaccacccactgttcctggagagggtttggggaaagaccgaggagaagatctacgggcctgtcgctggaacggactacagggacaaccagctgcggttcagcctgctatgccaggcagcacttgaagctccaaggatcctgagcctcaacaacaacccatacttctccggaccatacggggaggacgtcgtgttcgtctgcaacgact

SEQ ID NO: 26499 - DNA, 380 bp, Zea mays
  Clone ID: LIB3180-002-P1-M1-E5
cctgcctttaatgtgattaatggagggtcacatgctggaaacaagcttgccatgcaggagttcatgatcctcccaactggtgcctcctcgttcaaggaggccatgaagatgggagttgaggtgtaccacaacctgaagagcataatcaagaagaagtacggtcaggatgcgacaaatgttggggatgaaggtggttttgcacctaacattcaggaaaacaaagaaggccttgaactattgaaggcagccatagaaaaggctggctacactggaaaggtggtcattggaatggatgttgctgcttctgagttcttcggtgagaaagacaagacttatgatcttaatttcaaggaggagaacaacgatggctcaaacaaaat

SEQ ID NO: 26500 - DNA, 210 bp, Zea mays
  Clone ID: LIB3180-002-P1-M1-E7
tcgggacgagccaccggagacgatgaacgcgttccacctgatctccctcttcgcggagttcgacctatcaccgctgttcgacgtggaaagcggtccggcgagggggccccgggagggcggcatgcggttcgcgacgcgggagcccgcgagcggcgtcgtcttccctctcgaggaggtgggccgcctctgcggcgggcggatgcgggtgac

SEQ ID NO: 26501 - DNA, 375 bp, Zea mays
  Clone ID: LIB3180-002-P1-M1-E8
gcacaacgtggggacgctggcgcggagcgcgacggcgttcggcgtcgcggaggtggtcgtcgtcggccgccgcgatgtcagcgcctttggcagccatggcgccacctcgcaccttcgcttccgtcacttcgtctctctcgcgctcgcccgcgcctacctcaaggatgagagaggatgtgacatttgcggcgtggaaatcaccgacgacgcgcagccggtgaccgcccacccgttccgtcggagcactgcgttcctcttcggcaatgagggtactggactttcacaaaaagagtgcgagatctgtgacttctttgtctacatccctcagtatggtggtggaactgcatctctcaacgttactgttgcagcttcaat

SEQ ID NO: 26502 - DNA, 346 bp, Zea mays
  Clone ID: LIB3180-002-P1-M1-E9
gccaacgaggtgcccaagaccgcggagaacttccgcgcgctgtgcacgggcgagaagggcgtgggcaagtccgggaagccgctccactacaagggctccaccttccaccgcgtcatccccgagttcatgtgccagggcggcgacttcacccgcggcaacggcaccggcggcgagtccatctacggcgagaagttccccgacgagaagttcgtgcgcaagcacaccgcccccggtgtgctctccatggccaacgccgggcccaacaccaacggctcccagttcttcatctgcaccgtcgcgaccccttggctcgacggcaagcacgtcgtcttcggccaggtcgtcg

SEQ ID NO: 26503 - DNA, 193 bp, Zea mays
  Clone ID: LIB3180-002-P1-M1-F1
aagactaaaatcgttctacacatggttggggccataactccagccgtgaggctttatcgcatatttaggaaaagaactaagggttttccttaaacaagatgaaaatcatccatttaggaatgggattaccacatatgcatccagtgatttggagaccaatgcactccaaatagaagaatcgctggacaaacta

SEQ ID NO: 26504 - DNA, 372 bp, Zea mays
  Clone ID: LIB3180-002-P1-M1-F10
aatggatcgcatcattcgaccacagggttttatcattattagagacgagaatgacactctctcaagaatcatcaatctagcaccgaagttcctttgggatgttaccacgcacatgttggaaaatgaggaaagcgggacagatcaagttctgttttgcaggaagaaattctgggctattgtttgagttatacttgggtggaaattgggaagctgccatattttatcctacttttggttgccctttgtatcagtgacagagcagagcgtaaggagagctgtttggcatgatagatgttccaatgaaacataatatttcattgcacgttctctgcagttgacagtagtgcattgttgagaaggcatatggtacgg

SEQ ID NO: 26505 - DNA, 422 bp, Zea mays
  unsure at all n locations
  Clone ID: LIB3180-002-P1-M1-F11
ttcggttgagggggtctgatnngaccactgtcgcatgctcnnatcactgcttacctcnnagaagacnntgttganntgggcctctcgtcttaagcgacctgnngaggggtggaacggggctgctacgtttcaaaacatcattcccacgcagcnnactggagctgctaagggctgttggcaanagtgcttcctgtccttaacggaaacgttgactcggaatgtctnnttccgtgtcctcaaccgtcgatgtttctgttgtgattntgactgttaaggcttgaagaaagtcagcaacctatgatgagatcaaggctgcggtcaaggccgaggcagaaggtagcctcaagggcatcctgggttacgttgaggaggaccttgtttccaccgatttccagggtgacagcaggtctagcatctttgat

SEQ ID NO: 26506 - DNA, 381 bp, Zea mays
  Clone ID: LIB3180-002-P1-M1-F12
ccaagccctcgccatggcgtcgcggatcctggcccgatccaagtcccttcacctcgtcgccgccctcacccctgccgctgccaaagcagcaacgcctatcgccggagcccgcgcgctctcgtccctgccccgctacccgtctgccccgtcgccccatgggctcggcaaggttctgggatatgaaccaacatctcacctcagtggaccacaagttttacctcgttggttttcctctctagcatccaatggatctcaggtgcagaagtcacagatctctgagacatacaagtcaggtggtgaaatgaaacagtctgagacacggaaatcaagtgaggaagccacaccaaaagttgtggcgttcagtccgctagaagcagctat

SEQ ID NO: 26507 - DNA, 375 bp, Zea mays
  Clone ID: LIB3180-002-P1-M1-F2
cccacgcgtccgctcgtgcgttgtctctctctctctgtctctctctttttggtcccacactagctctgagacgaccggtgggccgtaggcgacgtcctaagccaggtgctgaggctcttgttggtctgtagcacagcgaggagcacgcagccagacaaggcaacaagctgccggcatatggaccaacacggcatgcatgaccatgaaggggtacacgttgttggatctgaagtgccgtctagaccggataacagctacgacaaccctgttcacgggaatgaagacgaaggccggaagccaccactgatgccacctaatcttgcagaacacgctgctgagctttcaaccaagccaagacgagtcgagcccgctgac

SEQ ID NO: 26508 - DNA, 378 bp, Zea mays
  Clone ID: LIB3180-002-P1-M1-F3
ggagggaggcgtcctccctggcatcaaggttgacaagggcaccattgaggttgttggcactgataaggagaccaccacccaaggccatgacgaccttggcaagcgctgcgccaagtactacgaggccggtgcccgctttgccaagtggcgcgctgttctcaagattggccccaatgagccatcacagcttgccatcgacctgaacgctcagggtctggctcgctatgccatcatctgccaggagaatggtctggtgccaattgttgagcctgagatccttgttgatggccctcatgacattgatcgctgcgcttacgtcactgagaccgtccttgctgcctgctacaaggcgctcaacgagcaccatgtcctcctgga

SEQ ID NO: 26509 - DNA, 374 bp, Zea mays
  Clone ID: LIB3180-002-P1-M1-F4
cccggctctgtctgttgacttaccccgtcgagctttctagtcagctgctcccgttgccatggggaaggagaaggttcacatcaacattgtggtcattggccatgtcgactccggcaagtccacaaccaccggccacctcatctacaagcttggaggcattgacaagcgtgtcatcgagaggtttgagaaggaggctgccgagatgaacaagaggtccttcaagtacgcctgggtccttgacaagctcaaggccgagcgcgagaggggcatcaccattgacattgccctgtggaagtttgagacaaccaagtactactgcaccgtgattgatgcccctgggcaccgtgacttcatcaagaacatgatcaccggca

SEQ ID NO: 26510 - DNA, 284 bp, Zea mays
  Clone ID: LIB3180-002-P1-M1-F5
ttctggaacaacactggttggatgcaagcggatgggggaggaagtcttgaagacagtggagtcactgaaggaagtggctgctgtgaactgatgcatgctggtacttgattcattgcattttattagaagtcgagccgagtgtaagagagcatggtgtggctgaactgatagccacttcgcatttctgtggtttgtttgtctccctgtagttttttctttggtacaaggaaaggataggcatatgtttgctcaataaaatgggatagtttatgccgctttgaatt

SEQ ID NO: 26511 - DNA, 383 bp, Zea mays
  Clone ID: LIB3180-002-P1-M1-F6
tgcgttcattattccacaatgctcactggctcctagtgccattataccacagttcctccgaccagttacttcaatgggcttcgaacacctagctgtgcaagcctacaggctacaacaagcgcttgcggcgagcgtcttacaacaaccaattaaccaattgcaacaacaatccttggcacatctaaccatacaaaccatcgcaacacaacagcaacaacagttcctaccagcactgagccaactagatgtggtgaaccctgtcgcctacttgcaacagcaggtgcttgcatccaacccacttgctctggcaaacgtagctgcataccaacaacaacaacaattgcaacagtttctgccagcgctcagtcaactagccatggtga

SEQ ID NO: 26512 - DNA, 371 bp, Zea mays
  Clone ID: LIB3180-002-P1-M1-F7
tcgaccccgggtccccaccacacgcacgcgagcccgcggccaccacctcgatgccactgacgggctggaatccgctggcgcccgtccttcagaccgtcgccgctttctcccgccacatcctcatcgcccccgacgccgggctcgacgaccaccgcctccgcccccttctagcgctctccctctccccgccttcgccggcaccaccgcaaccggaggtccggaaggagaagaaggatgccaaggaggcgccactgacgaaggaggaggtcggccgggccacgtggttgctgcttcacaccatcgcaacgcagttccctgacgaacctacgaagcaacaaagacgcgatgcaaaggagttgatgcatataatc

SEQ ID NO: 26513 - DNA, 356 bp, Zea mays
  Clone ID: LIB3180-002-P1-M1-F9
tcgatcgcgagcgccgccctttttttttttttttttaatgcataacatgtcctttcagttaaacatctgtgcaaatacaggttaacaactcatacatgatacataaccgctacagatgtggcagttgcagcagatttccaactcagttcactaatgaaaaaaaaatccactacagttatacagatcctgatgcaaacatgaggcccaaacgctgtcggagaagctgtccgtccatcaatggagcagatgcgcttcataattttcatgcactcttcctatgaaatatgaatcattcaagtaaacgatcttcagtcattgcgatttcttcacctgaaattcgaactcatgcctgggct

SEQ ID NO: 26514 - DNA, 380 bp, Zea mays
  Clone ID: LIB3180-002-P1-M1-G1
tagtcatcagccgccgtagggagcaggagtgagggagcgcgatggcggagaagaagcagcgcccaggagggtccaggaaggacgaggtggttacccgcgagtacaccatcaacctccacaagcgcctccacggatgcaccttcaagaagaaagcccccaatgctatcaaggaaatcaggaagtttgcacagaaggcaatgggcaccactgacatcaggattgatgtgaaactcaacaagcacatctggagcagtggtatccggagtgtgccgaggcgtgtccgtgtcaggatcgcacgcaagaggaacgatgaggaagacgccaaggaagagctttactctcttgttaccgttgctgagatccccccagaaggcctgaag

SEQ ID NO: 26515 - DNA, 380 bp, Zea mays
  Clone ID: LIB3180-002-P1-M1-G10
ccctcatccgccatcaatctcaggggcgccccagccaccccgcccttcactcacctaaccatggcggagcgcggcggccagcgtggtggagagcgcggcgggttcggtcgtggcttcggtcgcggcgggcgcggtgaccagggtgggcgtcgcggcgggcgccgtggcccgcgccaagaggaagagaagtgggttcccgtgaccaagctcgggcgccttgtcagggagaacatgatcaccaagagcgaggagatctacctccactcgctccccggcaaggagcaccatatcgcatagaccctcgttccgaggctcaaggacgaggtcatgaagatcacccccgtccagtagcagacccaagcccggcagcgcactaagtt

SEQ ID NO: 26516 - DNA, 379 bp, Zea mays
  Clone ID: LIB3180-002-P1-M1-G12
ggttttatctgtaactttggatgattggtctgatagtgatatcgactccatggttgaggttggtggaaactcatatgcaaattcaatttatgaggcttttcttccaaaagatcacccaaaacccaaaccagattcaacgatggaatataggacaaaatttataagagctaagtatgagacacaagattttttgaagccaagtttgcgcatttcatcaagatcatcttttaaatctaccacttctgtgaagagtgtagatagcaatttctctagcacttcaaggaaggatgtctttgaagatacaagagaatttgttggagagttgaatatcacactggtcaaaggcaccaacttggccgttagagacatgctaacaagt

SEQ ID NO: 26517 - DNA, 383 bp, Zea mays
  Clone ID: LIB3180-002-P1-M1-G2
tttttccttggagccgaagaagagggaaaggaagggaggacagccgccgccgccgccatcaccaccgtcaggatgcattccacgaacctcctgctcgaggagcccatccggatggcctccatcctcgagccctccaagcccagctacttcccggcgatgaccaagatcgtcggcactctcggccccaagtcgcgctccgtcgacacgatctccgcctgcctcaaggccggcatgtccgtcgcccggttcgatttctcgtggggggacgccgcgtaccaccaggagacgctggagaacctcaagctctccatcaagtccaccaagaagctctgcgctgtcatgctcgacaccgttggcccggagctgcaggtggtgaacaagag

SEQ ID NO: 26518 - DNA, 373 bp, Zea mays
  Clone ID: LIB3180-002-P1-M1-G3
ccgaacctaatccctgttgacccgacggtggcgctcatctcctccccgacggtggcgctcatcttccccccgacggttctccccatcgacctgctggcttcccttcgtcttccccgacactgatcctcaccactcatgtctgctgaagttgccggaggaaacccttatttcctctcatgctacttctggttcatatactgcataaaattccgagatttcacttgatacaagtggaacactaggagttttgtgcaaatacttcctaccatgtgaatcagttgtagctggtgaatttggcaagactcaagtcctctcatctgggttcagaaaacatctgtcggttgattgcttggtctcctgtttcctttgagtc

SEQ ID NO: 26519 - DNA, 378 bp, Zea mays
  Clone ID: LIB3180-002-P1-M1-G4
acacaatagaccactgatttcacaatgaaaagggagacaatgccttcatggctagaactgttgcttgcaacacaattctttacgacttgtgctaaccatcttcttgctagtcgcaatgaatgtaacctattttgcacccagtgtgagaccaaaccagctgctttctgtaactattgtcgttcaagtgatcattccacccaccgtgtaatccagataaggcgttcatcgtaccatgacgttgtgagggtgtccgagattgaggatatccttgatgtcagcgatgtgcaaacttatgtaatcaatagtgcaaggattgtattcctgaatgagcggccacaactgcgtgcttatagtgtccccatttgtaaggcacccaca

SEQ ID NO: 26520 - DNA, 381 bp, Zea mays
  Clone ID: LIB3180-002-P1-M1-G5
gcctcgcattcccgaaagtatctgtattccttgatcaacatgtcgcgggaggagaatgtttatatggccaagctggctgagcaagcagaacggtacgaggaaatggttgaatacatggagaaggtggctaagaccacagatgtgcaagagctcactgttgaggagcgtaaccttctatctgttgccttcaagaatgtgattgcggccccccgtgcctcatggcgcattatctcctccatcgagcagaaagaggagtcccgtaagaatgaggaacatgttgcacagatcaaggaataccgtggcaagattgaggctgaattgagcaacatttgtgatggtatcctaaagctgcttgacacgcaccttgtgccttcctccact

SEQ ID NO: 26521 - DNA, 380 bp, Zea mays
  Clone ID: LIB3180-002-P1-M1-G6
ccacagtattgttagcaagatgatgatgcatgaagagcttcaggctagctggcaccagccaacaaagtgcaccgtgtttcacagcctggatcaaaccaggcttcaggagctactcttccaggttgcagaaaaaatatcggtcctggtggagacaaacgagagggcatacgagttaagaactggtggtactcttgaggggctaccgcccaggcgcaggggcgaggctcaggattcatccaagtggcaggagagctttgtcgcatcacaggggcggcagggtggtggcaaccggtttggatactccggtagaggtgcagcatcttgtcaaagtggtggactccagaggggcaggggcaatcatgtttcccgcgggggatacg

SEQ ID NO: 26522 - DNA, 361 bp, Zea mays
  Clone ID: LIB3180-002-P1-M1-G8
tgattcttggacgaggtgggatttggagagccaagggcggcgcggcagcggcgggtttctcggtcggactagattgtttccatcgagatggtgccatggtgggcggcggagggcattcgtcgatggaccaccctggcgccaaggacgatggagacggggaagaaagccagtacttctcggacgcggaggaccggtcgtggccgtcgcactcgcgccacgactccaccgcctacgaggactacgtctcgctgtgcgtgtccgcccgcgcgagctccgtcgacgccgacgccgatgccgacggcgaggccgtcagacaacactgcaggaagtcgtcgtgcgtgtcagaaggctcgctggacga

SEQ ID NO: 26523 - DNA, 342 bp, Zea mays
  Clone ID: LIB3180-002-P1-M1-H1
tttacaatttttccttttccacaagaacattgcacggtgatggcaaaaccttccatcggaggttggcttcctccggctctgattaaggcaaggagacggggacggttgccgggagcaggctctacagcatgactttcctaagagccaaccactgtaccagtacatactggaatccaccgtgtctccaacgagccggactgtctgctggagctccgcgtcgtcaccggcacccaccccatggcgggcatggctgcgtcgccggacgaggtgcagctgctgcagcttctgatcgagattcttggcgccaagaacgccatcgaggttggcgtcttcaccgggtac

SEQ ID NO: 26524 - DNA, 381 bp, Zea mays
  Clone ID: LIB3180-002-P1-M1-H10
tcgatgaattcatgacatctgatcaccagtatatttcccggaaacatgaggaggataaggtgattgtgttcgaaaagggagatttggtatttgtgttcaacttccactgcaacaacagctattttgactaccgtattggttgtcgaaagcctggggtgtataaggtggtcttggactccgacgctggactatttggtggatttagcaggatccatcacgcagccgagcacttcaccgccgactgttcgcatgataataggccatattcattctcggtttatacaccaagcagaacatgtgtcgtctatgctccagtggagtgatagcggggtactcgttgctgcgcggcatgtgtggggctgtcgatgtgaggaaaaacct

SEQ ID NO: 26525 - DNA, 277 bp, Zea mays
  unsure at all n locations
  Clone ID: LIB3180-002-P1-M1-H12
cctttctaccgacatcgacgccgacggcgatgtgcctccgcaagcgccagcgctcggcgagcagctnccgcctcaccgccttctgctcgccaccgtcccctcccgctcccccgtctacttccagctctcccaacccgcataccttccccaacgccgacgtcgtcctccgcctcttcctcaacccctcctcccccgacgacgtggacgtcaagcccgacatcgaccgccacctctccgcagccgtctcatccggaaccttcgtcgacctgcacgtctc

SEQ ID NO: 26526 - DNA, 261 bp, Zea mays
  Clone ID: LIB3180-002-P1-M1-H2
ggaagcggcgcctgcaggccggccgattccgtcgacccacctcgttcgcaggcgcacgaagccaaacctacctcataaacctacgctggtccgttgctcgcgcgtccatggctcagagcgtatgggactacgtcggtctaacagggcgagagcagagcatatcggacagttacacttaaggtggtggacaacccaagggcctgtggttgacagtgcagatggagcctgaaagctgatgggttaagcttaaacaacgcagct

SEQ ID NO: 26527 - DNA, 377 bp, Zea mays
  Clone ID: LIB3180-002-P1-M1-H5
atgcgtgccaatgcagttgccgccgtcaccagagcagtccaccttggtctgatatggcgaccggaagtgcaagtgccatcacgtccttctccatgggcgggtcagacagtgctgatgtccgcgatatgaggtcatgcgctcgagctggcgcttgggccgactactatcaaccgcaatcaggcatactggtgagcctaaagagtggcgcctaactggaacaacaagttcttctgaggggcacacagtcctatgccgaggccagttgatgccaagctcaggtcgttggatctcaagtaccagagacctacccgtcgcaagctttacctacacgatcgaggagtctctccttgccggcgctgggtgccagctgagcgtcg

SEQ ID NO: 26528 - DNA, 236 bp, Zea mays
  Clone ID: LIB3180-002-P1-M1-H6
acagagtacttacaagctggtggtcaacgaggatgacaatactgacaaccagacactggcaagtcaaaagacctcaacaaatccatcatctaagagtcggaagcatttcaggaggaaagcagatcaagacagtgatggtgatgaagtagtggcaacagattctggaaggaatgtccgtcgacgaacagaagaggaggatgaagaaggtggcatccgcagttctgatgaagagaaag

SEQ ID NO: 26529 - DNA, 372 bp, Zea mays
  Clone ID: LIB3180-002-P1-M1-H7
gctcgttcgatctgtgcagcagatctgaggtctcgagcgaccgtgaagcagcttcaatcgtcggcatggcgctcgtattgcatagtggggctggaaacaagaatgccttcaaagcacttattgctgcagaatacagtgggatcaaggttgagttgaccaaggattttgagatgggtgtctccaacaagacccctgagtttcttaagatgaacccccttgggaaggttcctgttctggagactcctgatggccctgtttttgagagtaatgctatcgcacgctatgttgctcgcttgaaggatgacaaccctctttttgggtcttcccatattgaacaagcccacgttgagcaatggatggattttgccgcaa

SEQ ID NO: 26530 - DNA, 342 bp, Zea mays
  Clone ID: LIB3180-002-P1-M1-H9
atgatcagatcaagtaccttgttgcccagggttgcattaagccactctgtgatctgcttgtttgcccggatcccagaatcgtaacagtttgcttggagggtctcgagaacatcctgaaggttggcgaggcagagaaaaaccttggtgcaggtgatgtcaatgtctatgcacagatgattgatgatgctgagggcctggacaagattgagaacctgcagagccatgacaacaccgagatatatgagaaggctgtgaagatgctggaatcctactggctggagggaggagatgatgccatgccctcaggcgacaatccccagaatggcttcaactttgggaacc

SEQ ID NO: 26531 - DNA, 249 bp, Zea mays
  Clone ID: LIB3180-003-P2-M1-A1
tcgctcgccgtctggcttctgcgccttcatttcggcctctgtcccttgcaaggtcagtctcgccttcaaccatgggtaaagagaagtcccacatcaacattgtgggtattggccatgtcgactcttgcaaggcgaccaccacaggacaccttatctacaagcttggaggcattgacaagcgtgtgatccagaggtttgagaaggaggctgctgaaatgaacaagcggtccttcaagtacgcctgggtgc

SEQ ID NO: 26532 - DNA, 398 bp, Zea mays
  Clone ID: LIB3180-003-P2-M1-A10
tcgcagtcatcatgagaataagagaacccaaaaccacagcactgatatttgcatcgggtaaaatggtatgtactggagcgaagagggaacagcaatccaagcttgcagcaaggaagtatgcccgcattattcaaaaacttggttttccagctaagtttaaggattttaagattcagaatattggtggctcttgggatgtcaaggttccaattaggcttgagggccttgcatattctcatggtgccttctcaaggtacgaaccagaactctttcctggccttatctatcggatgaaacaaccaaagattggtcttttaatttttggttcaagcaagattggtttgactggagcaaaggtgagagaggagacctacactggcttcgaaaacatttattct

SEQ ID NO: 26533 - DNA, 359 bp, Zea mays
  Clone ID: LIB3180-003-P2-M1-A11
tcggacaaacccttcttcagggctcttttcttctagccgccgccgcaaccggttgctagcgctttgcgctcttattcttgcgttcggggaagggcgtcttgacatggccttcgagacggagaccttcgcctttcaggcggagatcaaccagctgctatcgctcattatcaacaccttctacttcaacaaggagatctttcttagggagctcatttcaaacttcttcgatgccttggataagatcaggttcgagaggttgacggacaagagcaagctggatgcccagccggagctggtcattcacattggccctgacaaggccaacaatactttgaccatcattgacaggggcattggta

SEQ ID NO: 26534 - DNA, 300 bp, Zea mays
  Clone ID: LIB3180-003-P2-M1-A12
tcgcagtaaatgaggattctgcttcttgtgctgaaaatgcaaagattgatgaagctgacacaaaacaggaactggtttcatttggtgaggccacggtagacgaattcagcgagctacttaaccaagacgaaaaggtggcttgtaaagatgcaaagatggaagagtctgctgctgctgctgctgcacagagacaggttactactgaaggtgctcatgcaagggaaaacgcgaaacttggtgaagatggcacggagctgtaactggcaccacctttaatggtagacatatttagggagcaac

SEQ ID NO: 26535 - DNA, 199 bp, Zea mays
  Clone ID: LIB3180-003-P2-M1-A2
tcgagggaatgcttcagcgccatcagctgcttgcggagtttgatgccctgtttgatagtgacaaggagaagtatgcaccctttgaagacattcttcgtgctgctcaagaagcaattgtgctccccccatgggttgcacttgctatcaagccaaggcctggtgtctgggattacattcgggtgaatgtaagtgagctggc

SEQ ID NO: 26536 - DNA, 277 bp, Zea mays
  Clone ID: LIB3180-003-P2-M1-A3
tcgcgccgatacccctgatgatgcattgactgcgcgaaacaatggggcacaaggaattggattatgccggacagagcacatgttctttgcttcagacgagaggattaaggctgtcaggcagatgattatggctcccacgcttgagctgaggcagcaggcgctcgaccgtctcttgccgtatcagaggtctgacttcgaaggcattttccgggctatggatggactcccggtgaccatccgattctggaaccttcccttcaacaggttctttcaaaag

SEQ ID NO: 26537 - DNA, 403 bp, Zea mays
  Clone ID: LIB3180-003-P2-M1-A4
tcgggactgcaagactgcttcacctttctacgtctgcttctcggagctgaataaaagccaacagccttagggacaggtaccattcaagattttggtggcattttcaggacttcaacataatctggcaaagaagcgtggatataatacacgagtttctgagtgcaaagaggctggccgtgctcttttgcatgcttcaggctgggaagatacaccaaatatactttgcaatggtgacccagttgtatatgagacccagaagtgtgtattggaagaaaatctttccaggagagctgaacactacttttttgaaatgaagcgggttacaaagggcagggatgcatgggctcatgggaacctacaagaacttggacagctgatctctgaatctggtcgcagcttcata

SEQ ID NO: 26538 - DNA, 62 bp, Zea mays
  unsure at all n locations
  Clone ID: LIB3180-003-P2-M1-A9
aagaaggaaacccgccccccaaaacaataccgcccctacccnttaccccaacaacatttttt

SEQ ID NO: 26539 - DNA, 313 bp, Zea mays
  Clone ID: LIB3180-003-P2-M1-B10
tcgcgcttcgtgacttctctcttctctcgagcgattgctttcttcaccgaggcgggggaaagcgccgcccagatcgccgtaggcaagcggcgatcacttcagctttgagcataagtttctgcagggaggctcgtgaagtcaggagtcgtatttggcagtggcagcacagcgcaccatggaatggctgagctggagaacggtgtgttggttatcagtgctgtgcaccgggctggtcttgcgcccgggcgagggcattcgctttgtgatcgatagagaagagggcttttcgcataacgtggagtttgagggggat

SEQ ID NO: 26540 - DNA, 369 bp, Zea mays
  Clone ID: LIB3180-003-P2-M1-B11
ttggcaaattccacgccgatccggccccaccggtacttcaacgggcgccttcccttccgaattccgatccatcttcattcagccggcggcggcattcgcgagaggccatggacgtgagcaggaagaagaagtgggtggcctgggcggtggcggccggcatcttcgtcggccttatgcttgtgacgcccggcattccgcaggacgaagcctaccacgacttcgcggaccagcgcacccttttcttagggattcccaacaccttgaatgggatctcaaacattcctttcttctttggtggcgtcacggggctcattctgtgccacttcaacaactatttcaggctaagcttgcagggggagctctggagtt

SEQ ID NO: 26541 - DNA, 299 bp, Zea mays
  Clone ID: LIB3180-003-P2-M1-B12
tcggggtaaactggagtgatttaagactgtggtattgtcattcctgcgttggtgtaaacgagaaatgtgatttgacattgcggagggtaatgcttccgaggatagcttacagggatgcataagtgcttccttgcttaaagatgaaccgttcccaagaggagcacaaacctggtgggagggttcaaccgtacttaaaacattagcgcatgatttttcaaattctgggtactatgctggttgggcaatacaatctgaacggtgcacaaacaattgctggccttgcgctcgaatgcctattc

SEQ ID NO: 26542 - DNA, 202 bp, Zea mays
  unsure at all n locations
  Clone ID: LIB3180-003-P2-M1-B2
tcggaaacgatggacgataacccttgtgtccattccgaaaataacttggtttcttctggtctaatacaaatgcgctgggcatggattggtgggtgttgcaggggtgtaccagagcacgggtaatgcggcggagggcaaggggacggttttttnttnttttnntntttttttttttttttttttttttttttttttattttta

SEQ ID NO: 26543 - DNA, 347 bp, Zea mays
  Clone ID: LIB3180-003-P2-M1-B3
tcgctcccgcgaaacagtcacggcgatggcggcggccggtggcgtttcaactgacgatgtcccgatcctgcaggcagagaaccttaccagcaacgtcaagtccgtctactacagtcgaacattcttgtcaatcattggtggagttggtgctggaatctggggattcacaggcttgatggggtttggcttctactttctgataatgatgggtgcatttattgggcttttaacgaagtcaaagttttcagttcaggcgttctttgattgttggaccaggattttaattgaaggagttttttgttgtcttatttcattctttctgtttatgacatttgcttatttcattt

SEQ ID NO: 26544 - DNA, 388 bp, Zea mays
  Clone ID: LIB3180-003-P2-M1-B4
tcgcgccggaccggccaccccgcatgcgaacagggcacggaccggccaccggtgtgacttcttcattcaaggctttagcttcagacggagccggcccgccaatcgccgttcggcgaaccggctaggaatttggtttcctcatctaaaggtactgcattatattccatagaaatggctatggggttgattaatgctaatcctataatccatgggaaaaaagaaagacgcattcgacaggcaccagagaccacagatgaaaatgcggcagagtccatagaccagctggaaatatttgatcacattagagatataaaggatccagagcacccatacttactggaacagcttaatgtggtgacttgagacttaattgaacttaatggtgaaa

SEQ ID NO: 26545 - DNA, 341 bp, Zea mays
  unsure at all n locations
  Clone ID: LIB3180-003-P2-M1-B6
cgaaanncccggntttcccacccctttggcaaaatccacgccgaacccnccccaccgctactttaacaagcgccttcgcttcctaattccgatccattttcattcaaccggcggcggcattcccgagaggccatggacctgagcaagaagaaaaagtttgtttacttttccggggggggcagcaattttccaaatcttattcttggtatcaaccttacctaaaacaatagcgcaaaaattttcaaattctgtgtccccacccttttttttaaggatttccaacacccttgatgtgatctcaaacatccctttcttttttggtggggtcaccgggcttattc

SEQ ID NO: 26546 - DNA, 302 bp, Zea mays
  Clone ID: LIB3180-003-P2-M1-B7
tcgggcaacctagtcgccactctgctcgggcacaagttgggaggcactcaggggaccatcgctcatgccttggagaaaaccaaataccccaacttggacatttacttggacaaattcgacaggcagtaccacttttcttgccaggtcacagctgaccttattggcatgaaccacaccgatttcattattaccaggacattccaaggaattgcgggaaggaaggacaccgtggggcagtacgagttccacattgcgttcactctttctgggctctaccgggttgtgcatggcattgatggttt

SEQ ID NO: 26547 - DNA, 242 bp, Zea mays
  Clone ID: LIB3180-003-P2-M1-C1
tcggttacacttgcgaactccatttcgatcccatttgaaatcaacccatgctcggttccttcgtctagcaaccttttacccttatggccaagatcaagatcgggatcaatgggttcggcaggatcggaaggctggtggccagggtggccctgcagagcgacgaccttttgctctttgccctaaatttcctttttattatggccgatttcatgttttatctttttcaaatttgtatttttttt

SEQ ID NO: 26548 - DNA, 285 bp, Zea mays
  Clone ID: LIB3180-003-P2-M1-C10
tggaggagcggcggcgaggtctatgggggggatttttaagtacctggggcggttctcaaatcaaaacgtgctgatgttctttccctaccaaatggataattatggcccttttggggcaattgttttttgtggaggaattcaattagaaagaataaattattggtctacttcgtttgcttggtgaaaaaatgtaaccttaatttattcttacttgggacaaaaaaaaaattgcacttcatgttgctaaattttaataagtagcttattataacagggcttaatttt

SEQ ID NO: 26549 - DNA, 260 bp, Zea mays
  Clone ID: LIB3180-003-P2-M1-C12
tgtcgccgggacatggggaaaggcacttggtgcagaggtctatgactgcaacaacatggtggagcaggagctgcctggaggcgggctcctcgtgtaccagagcttctgtgctgctgaagacgctggtgctacctcgcccaaatctgttttccactgctttgacggcgagaacgtggagagtgcttcttcttctatgaagaaggactacaaactggctaattttttatgctgggaggaggaagcggatgccatggaggatt

SEQ ID NO: 26550 - DNA, 196 bp, Zea mays
  Clone ID: LIB3180-003-P2-M1-C2
tcgcgtcttcacacgggccacggcgtcgtcttcggcgaaccttcgcgaggccttgggttccctttaccaccggtggcgcgaccccggctacggagcattcttgggtagcgctctggctttccgtgccggcggacgttctgcaggagggggggggcttcggggcatggtgatgagggccgtcggttatcttcctttg

SEQ ID NO: 26551 - DNA, 144 bp, Zea mays
  Clone ID: LIB3180-003-P2-M1-C3
acacaagtgcaacaagagcggcgtacgggctatgcgctaaaggcgtttcttaacctactgctacactctgtgatgacatatgccctgattacggagacggccgtacgggcctgtcgcagccccgccctgggcccgcgcagtctg

SEQ ID NO: 26552 - DNA, 422 bp, Zea mays
  Clone ID: LIB3180-003-P2-M1-C4
tcggcttgaccattcaaatgtaaccaagtttattggagctataatgggtgcaagggatctgaatattcaaaccgaaaacggccacattggcatgccaactaatatctgctgggtcggtggggagtaccttcctggtggtgcactaaaatcatttctgataaagaacaggagaaagaagctagcttttaagggcggtggtcaaatcgctcttgaccttgccaggggattaagctatcttcattccaagaagattgtgcaccgggatgtgaagactgaaaatatgcttcttgacaaaacgagaaccgtgaagatcgctgattttggtgttgctcgccttgaagcttcaaatcccagtgacatgaccggcgaaactggaacgcttggttacatggcacctgagggtcttaatggaaattcctaca

SEQ ID NO: 26553 - DNA, 418 bp, Zea mays
  Clone ID: LIB3180-003-P2-M1-C6
ttgtggaaaacccatttaccatttcatgggggcatcaacattcagccaggacactggggtgcatgatgtcagtgttgcaaagatcaacccacaggcacccttagataaaggctggctgctcgggtgggggggtcctactggtcttggagcggtgtggaatactgcaaagggtgaatctggcttaattggtgctggttttggccttggaacagttggacttgcagttgctgagggagcaaaagctgctggtgcttcttgaggtattggcattgacatcgacaattaaaaggttgatggtgcaaagaactttggaggtacagaatttggtaacccaaaagagcatgacaaaccgattcagcaggttctggtcgatcttacagatggcggcgtggattacagctttgagtgcattggaaat

SEQ ID NO: 26554 - DNA, 388 bp, Zea mays
  Clone ID: LIB3180-003-P2-M1-C7
tctcgctgaatggatcgaccggcgaagtgatccttggaaagcaaccgctcttcccaccagcccttaatggcgatctgggaacattcatgtcctgggtggatgacgttagaaagctcaagggcctggcaaacgccgatacccctgaggatgcattggctgcacggaacaacggggcagaaggaatcgggttatgccggacagagcacatgttcttcgcttcggatgagaggattaaggctgtgaggcagatgattatggcttccacagttgagctgaggcagcaagcgctggatcgccttctgccttaccagaggtctgacttcgaaagcatttttcgtgctatggatggactttcaatgactattcgacttctggacccttcccttca

SEQ ID NO: 26555 - DNA, 374 bp, Zea mays
  Clone ID: LIB3180-003-P2-M1-C8
tttccctgattgagtataaacttgctgggaattcctggtcatcatgtcagaacagaaatggggtcggcctagtaacttcagactctactgctgtttcctgtgggtagatgctgatcttcaagtcctggacaggtatgtcaacaaaagggtcgattgcatgatggatggtggtctgctggacgaagtatgcaacatatatgatgcggatgctgtctatacccaggggctgcggcaggccattggggttcgtgagtttgatgagtttttcagagcatatttagccagaaaagaatctggtgagggttcctgtgcaagcctgttaagtattcatgaccatcaacttaaaaacttggtggaccaaactgttttccaac

SEQ ID NO: 26556 - DNA, 395 bp, Zea mays
  Clone ID: LIB3180-003-P2-M1-C9
ttgcactgattatgctgctttgctttctggcacaatgcggcggtatgggtatccagtagggatgctactcgatgtgctggctaagcacagggacaagtaccatgatttgctgcttgcagattgccgtaggcaggtggctgaggcactgacagcagataagtttgatcagatgcttatgagaaaggagtatgagtactcaatgaatgtccttgcatttggaattcaaagctcaaacattaccccagctttcccatatgttgcaccggtttcatgcaccgtcccagacatttgccggattggtcggtcggtcattgaagattctgtgagcttcatggcacatggggggaggggggatacctatgcagcaatggagaaagtccttggtcggatcctat

SEQ ID NO: 26557 - DNA, 364 bp, Zea mays
  Clone ID: LIB3180-003-P2-M1-D1
tcgtttgaatctaacgcgctgtcaaactacaatcgttctacaaaaccactaaaggcggctgatcatttggcgggaaggccttttttgcgtgtagtccaatccttggaggcccgttcaacctttgcgctgcgcaataaaagttcgaccatcctatgatcattacttatgttctaggccaacccaatacatccttggttggtttttttaccgagtccgagagagttattcgaaatccaacctaccaccagggtttcttaaaccctagtaagactgctgtttaatgacaatcggcatttctttcagatgctacaaaactcaccatggctgggagttattttgacctggcccatcaaggaagtttaaa

SEQ ID NO: 26558 - DNA, 376 bp, Zea mays
  Clone ID: LIB3180-003-P2-M1-D10
tcgctgggtcttcagaccattagctttatctacttcagagcgcagaagaacccgatcgacaccatgagggtgttgctcgttgcccttgctcttctggctcttgctgcgagcgccaccttcacgcatacaagcgggggctgcggctgccagccaccggcgccggttcatttaccgccgccggtgcatttgccaccttcggttcacctgccaccttcggtgcattttccaccggcggttcacctggcggcgtcggttcacctgccaccgtcggtccatgtgccgccgtcggtttatttgtcgtcgacaccatgccactaccctacttaaccggcccggtcttaggcttattcctagccatactcattcccgtgccaac

SEQ ID NO: 26559 - DNA, 306 bp, Zea mays
  Clone ID: LIB3180-003-P2-M1-D11
tcggcgccggctcaaggtacattgcgtgtcctagccaagacacgcagcttatcttagccttacacgcagagcaagagcgaggcgtgattcgccatgggcggcctcattatggaccaggccttcgtgcaggcccccgagcaccggcccaagcccatcgtcaccgaggccaccggcattccttttattgacctctcgcctttgtccgccagcggcggcgccgtggacgcgctggccgccgaggtgggcgcggcgagccgggactggggcttcttcgtggtcgtgggccacggtgtgcccgcaaagacc

SEQ ID NO: 26560 - DNA, 391 bp, Zea mays
  Clone ID: LIB3180-003-P2-M1-D12
tcggttgggatttctcataagtatctatttgcaagggtttcgcggtgggctttccaggagatcaaaaaatgcttgtggccagcaagggtcatattcaaataaactgttctacactttaaacatgcccattattttttactctgcgctgattaccaaactctattttatattccagcttttctacagggaggacagggggaactttcttggtaaccttcttgggaagaggaaggaggctgaatactctggccattctatttctggtggtgggcttgcttactatgtaactgccccatcaaggttggctgatgttcttgcaaatacatttcatgcactggtttatgtgggcttcatgctggcagcctgtgctctgttcttaaagacatggatt

SEQ ID NO: 26561 - DNA, 382 bp, Zea mays
  Clone ID: LIB3180-003-P2-M1-D3
tcgttagggccttcacccttcttggcggcttacttcctttgagggcgcagatccggccggttagaccaaaccgcccgcacccatggccttcggtgagcttggctggacctacgccggccttattcttagcgacgacggcattgccattaccggcgagaagatcgccaccatcgtgaaggcggccaacattaagctcgagtcctactggccggcgcttttcgcttagcttctggagaagcgcagcgttgaggatctaatcctcttcgttggatctggtggtggcgctgcttcaggtgctgctttcgccccagctgggggtgctgcagctgctgctgcccctgctgcaaaggagaagaaggtagagcccaaggaggagtctgat

SEQ ID NO: 26562 - DNA, 407 bp, Zea mays
  Clone ID: LIB3180-003-P2-M1-D4
tcggtttactcgccggaggcgaaccagaactcgggccaccttcttctggtccttggcatcttcgaattcccatctgagatttcaagggccgcgccgtgcaatcgaggcttttcccgcttaccatatattggaggcttcggccccgcgccttgaattctttgcgagaggtgctggtgtttgccgtgatttgagccgggtggaggtgtcttgcttcttgatcttgagaggggttcctaggtgattggtgggagcgaagaaggcatgataccttctgtgaggatcttttctggctttgcagccttctttggcttcagcctacgcttaaaattacattcaattccattcatctctagtctcaaacccttcaaatatgtggtcttcttgctgaaaccactctacctagcacc

SEQ ID NO: 26563 - DNA, 383 bp, Zea mays
  Clone ID: LIB3180-003-P2-M1-D5
tctctgacgcgtgggcgtacaccgtcttcctcttcctgtcagtagtagagtgagagtgaggcaaccagtgggagacaaggggaaatggggaagggagcgcaagggaaccattccgcggccgcgggccgcgaggtggaagaaaacattgcggcgtggcttgttgccaagaacacccttaagatcatgcccttcaagcttccgcccgtcggcccttatgatgttcgcgtgcgcatgaaggcagtggggatttgcggcagcgatgtgcactacctaagggagatgcgcattgcgcacttcgtggtgaaggagccgattgtgatcgggcaccaatgccccggccttgtccaagaggtgggcccccgccttacccacctgttcgtggg

SEQ ID NO: 26564 - DNA, 154 bp, Zea mays
  Clone ID: LIB3180-003-P2-M1-D6
tcgttgtcccggactactatccccgctaccggtagccgccccgctgctcatttgggggctgctcgccttccttcccccattcggcggcggcggcttcttctttagctccctccttaccccgagctttaagcttgggctaccttcctacctaacc

SEQ ID NO: 26565 - DNA, 373 bp, Zea mays
  Clone ID: LIB3180-003-P2-M1-D7
ttggtccggtcaggttggccagaagggcatggcctacctgaacacctacgacgggcgtaccattcggtaccccgacccggttattaagggcaacgacaccattaagatcgatctggagaccaacaagatcatggactttattaagtttgacgtcggcaacgtggtcatggtgaccggcgggaggaacaccgggcgtgtaggtgtgatcaagaacagggagaagcacaagggcgggttcgataccattcacgtcgaggacttcatgggccaccagttcgccacccgcatgggcaacgtgttcaccattggcaagggcaacaagccgtgggtgagcctggccaagggcaagggtattaagcttaacattattgag

SEQ ID NO: 26566 - DNA, 411 bp, Zea mays
  Clone ID: LIB3180-003-P2-M1-D8
tttgccttcacccttcagcgccttcaccctggttgccggcttacttcctttggagaggtcgcagatccgtccggttagaccaagccgcccgcacccatggccttcggtgagcttggctgcacctacgccggccttattcttagcgacgacggcattgccatcaccggcgagaagatcgccaccatcgtgaaggcgggcaacattaagcttgagttctactggccggcgcttttcgcttagcttctggagaagcgcaacgttgaggatctaattcttttcggtggatcttgtggtggcgcttctccaggtgctggtttcggcccaactgggggtgctgcaactgctgctgcccctgctgcagaggagaagaaggaagagcccaaggaggagtctgatgaccacattggcttt

SEQ ID NO: 26567 - DNA, 402 bp, Zea mays
  Clone ID: LIB3180-003-P2-M1-D9
ttgagcaatcgcagcaagcaacatacctttatcgcccttggtgggtcaacaatcgccagccctatctttggtgcagtcattggtacaaaccatcagggcacaacagctgcagcaactcgtgctacctgtgatcaaccaagtagctttggcaaacctttcttcctactcttcgcaacaacaatttcttccattcaaccaactgtctacactgaaccctgctgcttatttgcagcaacaactattaccatttagccagctagctactggctactcttaacaacaacaacttctttcatttaaccaattggccgcactgaaccccgctgcttatttgcagcagcaaatactactaccatttagccagctagctacagcaaggcgtgctttcttcttgacacaaca

SEQ ID NO: 26568 - DNA, 279 bp, Zea mays
  Clone ID: LIB3180-003-P2-M1-E10
tcgcgcttgaggagcacaacaatagcttggtgcataaggaggcgcttcggttacagatggccttcaaggagaagttgcagccttccgagattgaggggccggtctatgtcaaaggtaaagctttatcgaaaacagcagcatcaatacttgaatgtgtcctaaggagggatccccatgaagctgaatatatacagtcgatccaagaggtgggtcattccttagaacctgttttggtgaagaatgcccaatatattcaaattttggagccgttggtggaac

SEQ ID NO: 26569 - DNA, 410 bp, Zea mays
  Clone ID: LIB3180-003-P2-M1-E11
tcggacgccactgtcgtgcgcccgagccggtgcatttccccggcacacacctttcgatttttgccagtacacacccccaactggctgcccactttgcaccggcaccggattccgaccgagacgccggcgacctccgcaccgtatcggtccagccgatcggttcgagatttggtgatcaaagaaccatggaaggatcggttcagatgaatcccaacgccaggcctttcatacctggattgctggggtcatctgcacaaaaagccccagaaaaacaaggggggtcattatcaaagggggagccttctggttgcacctttgatccttctgagtatgaggaaaatgacatggatgaacttgctctagtcaaaatgggcttttcaatggtcccaaatgtgttcacggacttcatt

SEQ ID NO: 26570 - DNA, 392 bp, Zea mays
  Clone ID: LIB3180-003-P2-M1-E12
tcggcgtcccccattccacccgccggcggcgacgcgccgggcctgttcaagatgaatgtggagaagctcaagaagatggcgggtgctgtgcgcactggaggaaagggcagcatgcgcaggaagaagaaggcagtccacaagaccgcaaccaccgatgacaagcggcttcagagcacgttgaaaagaattggagtgaacactattcctggtattgaggaggtcaacattttcaaggatgacattggtattcaatttcagaaccctaaagtgcaagcattcattcctgctaatacatgggtaggcaggggagtaccccagacaaaaagtctacaagaccttctggcaacaattattaaccaactgggccctgataacctggagaaccttaagag

SEQ ID NO: 26571 - DNA, 342 bp, Zea mays
  Clone ID: LIB3180-003-P2-M1-E4
tcggagggcttgagcgaccgagaagcaacttcaatcgacggcatggcgctcggattgcatagtggggctggaaacaagaatgccttcaaagcacttattgctgcagaatacagtgggatcaagggtgagttgaccaaggattttgagatgggtgtcttcaacaagacccctgagtttcttaagatgaacccccttgggaagggtcctggtctggaaacttctggtggccctggttgtgagaggaatgctatcgcacgctatgtcggttggttggaggatgacaaccctctttttgggtcttcccatattgaacaagcccacgttgagcaatggatggatttt

SEQ ID NO: 26572 - DNA, 429 bp, Zea mays
  Clone ID: LIB3180-003-P2-M1-E5
tcggccttctggcaatcttctcagatgatgtaccaaccggagtgactagggtgtccaccgatcccactctaggtgatggtaattcgatgggcttccgcaaaggagcagctgcagtggcttcaatgaagggcccgagccttcaagatgccttgcaaaaggatgcggctgcaccacaaggaggagtgacaccaacagtgaacaaccccaatcttttcaaggacttgctaggctgaaggggacaggagggcacaccatatgctctgtgtggcctttttgggtacgtggaggtcggcttcgacatgggtcgatcaccgaaacgacgcccaactcgctggttgatcagcgtaggctggggttttagggttacaagggctaatatttggttgagaggcacaagacacgacctatcttctttcaattgggggttgg

SEQ ID NO: 26573 - DNA, 332 bp, Zea mays
  Clone ID: LIB3180-003-P2-M1-E7
ttgggcccggtcccttttcactggactgcggtgggcccattcattcttaaacccttctgcgcgcgtaggcctcgtcttgtcctttcccagcacaaccttttcttcttcttcggcagggtgccttttcgttcttcttttcgggctatcaggacgaaataactggccgcgctgcacgccggccggcttgagaagaagcgcttgccccgggcgcgcggttccgggctaccaggacgaaataactggccgggctgaacgccggccgccgggagaagaagcgctggcccgggcgcttttgccgttgtttgggcgggccattccgaccagggttcccc

SEQ ID NO: 26574 - DNA, 227 bp, Zea mays
  Clone ID: LIB3180-003-P2-M1-E8
gtcgcagcagcttctgcttgctctggggggaaggagagagagagagagccagagagagatctaatagagaggctagtaggtggtcctcgaacgaagatgttggcggtgttcaacgggcaggtggtggaggtgccggcggaccttgtggcggcgggcaaccggacgccgtcgcccaagacgaaggcgttgcaactggtggggcgcttcctggccccgttcgaaccggt

SEQ ID NO: 26575 - DNA, 130 bp, Zea mays
  Clone ID: LIB3180-003-P2-M1-E9
tgtcgtataattctaactaacagcccttgaccggcttatgttataagcggggggggggggctacctgcattacagttgcagggcccaccttccggcgtggcgggggcttgggccgacttacaggggtggg

SEQ ID NO: 26576 - DNA, 90 bp, Zea mays
  Clone ID: LIB3180-003-P2-M1-F1
tttgtaggggggattcggaggagtaaatcctaacagccgttttgcgccggtggtccggtgcccgcccgagatcggggggggggggggggg

SEQ ID NO: 26577 - DNA, 298 bp, Zea mays
  Clone ID: LIB3180-003-P2-M1-F10
tcgcaacaatcaatcaagtagttgcagggaaccttgctggttaccttcagcaacaacaggttcttccattcaatcaactagatggggtggaccctgctatttacttgcaggcacaacagctactaccatttaaccaacttggcgggagcccttatgccttcttactgcaacaacagcttctaccattccatctgcaagctggggcaaacattgctggtttcttgagacaacaacatttggtgccattttacccacaagttgtgggaaacattaatgcctttttgcaacaagaacaatt

SEQ ID NO: 26578 - DNA, 311 bp, Zea mays
  Clone ID: LIB3180-003-P2-M1-F11
tcgctcggaaggaacggccgcccgtcgcgccaaggattcaagggtgtgggagctgagttgggaggaggactgctgctgcagccatgaaggccctcattctcgtcggaggcttcggcacccggctgcgcccgctcacgctcagcgttcccaagccgctcgtggatttcggcaacaagcccatgatcctgcaccagatcgaggctctgaaggaagttggtgttacagaagttgtcctggccatcaattaccaacctgaggtcatgctcaactttcttaaggacttcgagagcaagcttggcattaagatcacc

SEQ ID NO: 26579 - DNA, 348 bp, Zea mays
  Clone ID: LIB3180-003-P2-M1-F12
tcgccttcccttccggttgcctcctctcgctggctcgtagcttctttccttcggcgaccgctgggcgagcggccgccagtcggtcccttcgtcggcgacgagcattcacctgcgccggcgccccatcttccggtccctttcttactcgcgctcggccacaggcgacggcggcggcgctcaagatcgggctatcaccgacggggtccggctttttcggccggcttttgccactcgccttgcgttcttgccttcgggtcttcggacaccggccggtgatcctgcaagggttggatgatgggcgagatctgaaagatgctgatttttataagcagcaagctaaactttttt

SEQ ID NO: 26580 - DNA, 400 bp, Zea mays
  Clone ID: LIB3180-003-P2-M1-F2
ttgcaataatgaccttcccccaaaactatcccaacagcccgccatcagtaagatttacttctgggatgtggcattcgaatgtttattcggatgggcgtgtttgcatttctattcttcatccacctggtgaagatcccagtggttatgagcttgcaagcgaacggtggacaccagtgcacacgggtgaaaggatagttctgagcattatttcaatgctctctagtccgaatgacgagtcttcagcaaatattgaagctgccaaggattggagagagaagcgggatgagttcaagaagaaggttaggcaatgtgtccgcaggtcttaagaaatgctgtgaaggaggaacatgggggagttgaatgagtctgcaatcggtgtgctgcaattcacaaccaatta

SEQ ID NO: 26581 - DNA, 318 bp, Zea mays
  Clone ID: LIB3180-003-P2-M1-F3
gtaaggagaagtcccacatcaacattgggggcattggccacgtcgactctggcaaggcgaccaccaccggccacctgatctacaagcttggaggcattgacaagcgtgtaataaagaggtttgagaaggaggctgctgagatgaacaagcggtccttcaagtatgcttgggtgctcgacaagctcaaggctgagcgtgagaggggtatcaccattgatattgctctggggaagtttgagaccaccaaggattactgcaccgtcattgatgcccctggacaccgggactttattaagaacatgatcactgggaccttcc

SEQ ID NO: 26582 - DNA, 300 bp, Zea mays
  Clone ID: LIB3180-003-P2-M1-F4
cttcgttatctgcgtacaccgtcttccttttcctggcagtagtagagtgagagtgaggcaaccagtgggagacaaggggaaatggggaagggagcgcaagggagccattccgcggccgccggccgcgaggtggaagaaaacattgccgcgtggctggttgccaagaacacccttaagatcatgccctttaagctcccgcccgtcggcccttatgatgttcgcgttcgcatgaaagcaggggggatttgcggcagcgatgtgcactaccttagggagatgcgcattgcgcacttttttgtg

SEQ ID NO: 26583 - DNA, 256 bp, Zea mays
  Clone ID: LIB3180-003-P2-M1-F5
tcgatcaaacttttatcttgatggcttccaagggccctagggccctagactttggaatcttgcatttgggctcttctgatctggtgtgatactgatgtaactgaacaacgaactaattatattagaggtggggtggactctttttttctttctaggggttttttacgagggggaaggttttacctagaaagggttttaggggggcctaataaaaataataattaatattttaaatataatagtattaattttatct

SEQ ID NO: 26584 - DNA, 337 bp, Zea mays
  Clone ID: LIB3180-003-P2-M1-F7
tcgttttccgctttgcattcgtcaatctggttgccatcagcccccacgggccacggcgccgaccacttaacattccgccttggacttggacgggatcagcacgttggtcggggaagcaagggtccagtccattcattcgcgaccgcgagtaggaacaggaattgacggcggcaagggagtagaggagggaccggacacgggaagagaggaggagcttgcttggacaggcggtggactggtgctggtatatagatagctactagaggtaggccggcggacgggcgggccggcggccaatgctgtcgggcgcgtaaggctaggaacattggccgagggg

SEQ ID NO: 26585 - DNA, 260 bp, Zea mays
  Clone ID: LIB3180-003-P2-M1-F8
tcgatcaaccccgagaacgccatcatggaggagcttcgcaagcgtgccgaggctgacaagaaccacaaggtcgttaaggaccttgtcatgctgctggtcgagaccgcgcttcttacttttggctttagccttgaccatcccaacacctttggcaggcgcattcaccgcatgctcaagctgggcctgagcattgaccaggaccaggaggcttcggaggcttacaccgacatgcccccttttgaggattacgcttgccaaag

SEQ ID NO: 26586 - DNA, 251 bp, Zea mays
  Clone ID: LIB3180-003-P2-M1-F9
tcggctacaggcttcagtcccgtgacctcatcgctgacagcattgagaccggcatgggcgcgcaacactaccacgccaacattttcatacctgggtgcgacaaggacatgccaggtacaataatggcaatgggacggcttaatagacctagcattatgatatatgggggaactattaagcctggtcactttcagggtaattcctatgatataggatctggttttcagggctatggagaatatggtaggggg

SEQ ID NO: 26587 - DNA, 352 bp, Zea mays
  Clone ID: LIB3180-003-P2-M1-G1
ttgttcggtttcggcggcccaagaccttattagcttcccttcgccgggaaccctaaccccgggccccttggccccttctttttggcggcatcggcggccggtttttcgggcccccatcggcttttctttttcacgagggggtcaagcatgggggtcgtgggcttcgcggacttcttcaacagcatttttttcaaggggcaagatgaaaagctaccagctggcttttactacacggcggtgtggtgtggaccatgtagggcgatcggacctttagtatcaaagctgagcagccaggattccaaggtaccggtggacaaaggtggcattgaattggaaggactgggaaaccaac

SEQ ID NO: 26588 - DNA, 368 bp, Zea mays
  Clone ID: LIB3180-003-P2-M1-G10
tcgcacgaatggcagatgcgctcttttcgggcgttgctggtggtccccttcgtgatggaatccgccagttcaaccaccaggtctgcttttgccgaccaggcaagccttttggcgggctgcagccttgccggcagcaggtttcttaaagctgccttgtaccaaggatgctgagacattaacctcttgattggcttctcttcagaatcgcttcacggaacaacgttcagcgcccggcggcggacccagcaaagcaagaggcgggcattcggtgaccgacgacagccgcacggaaacagacgaacccacggaggcaggcaaggtcgggtcgttgattggggataccccttcccgggagccgattccgtcgg

SEQ ID NO: 26589 - DNA, 223 bp, Zea mays
  Clone ID: LIB3180-003-P2-M1-G11
tcggaagaatgttgctgtcaaggatctcaagcgtgggtttgtggccttcaactccaaggatgaccctgccaaggaggctgccagcttcacctcccaggtcatcatcatgaaccaccctgggcagattggcaacggctttgccccagggctggactgccaaacctcccaaatggttgtcaagtttgctgagctcattaccaaaatcgacaggcgtgttggcaag

SEQ ID NO: 26590 - DNA, 354 bp, Zea mays
  unsure at all n locations
  Clone ID: LIB3180-003-P2-M1-G12
tcgaggggagaggaaaaaaaaaatctaaccctagcattcgcagcgctagggttcgggggttgcgatggccgcggcggcgagacaacgggggaccgtgaagtggttcaacgacaccaagggctttgggttcattttccccgaggaccgcagcgaagatcttttcgtgcaccaatcgtcgatcaagtcggagggctttcgctcgctcgccgagggccaggaggtggagtttttcgtcttggagggtgacgaccggcgcacttaggccgtcgacgtgaccggccccgacggattcttctttaagggccgcggaagccgaagaagaagctgctgcngcttccgtttccgccgcggtgg

SEQ ID NO: 26591 - DNA, 252 bp, Zea mays
  unsure at all n locations
  Clone ID: LIB3180-003-P2-M1-G2
agatcgggagcggccggccttttttttgtttttttttgggngaacggacaaggataccgaatcattaattcaattacatgagcgacttggcccttacgtacctttttttaaaacataggttcctacctatatatatctatatctatatatttcctccaaaccggattttacggaaggaaaggaaggggaaaatttggtgggaacccattatttcaaggaccaggaccaatttgccaggaggagaagaatttt

SEQ ID NO: 26592 - DNA, 351 bp, Zea mays
  Clone ID: LIB3180-003-P2-M1-G3
tcgttccgatccccccgggggttttccagctgggggctttgtttaccggaaccaaaaactaccccccaaaaaaaagaagaaaaccccaaattcttgagatctattaatttcgagccacttaccaatccgattgctagggtttaggttcggaaaaatctgaaaaaaaattcttgtcgaggggaggaggccatgtccgcccaagtggcggtggttcctaatgggggcccgggcgctgtccccgcggtggtgtcttccggagctgtcggcatggcttaagcccttccgaccaccttgctttacattggcgaacttgaaggggccggcttggactttcaggtgtaccaacttttc

SEQ ID NO: 26593 - DNA, 232 bp, Zea mays
  Clone ID: LIB3180-003-P2-M1-G5
tcgtttcgagtacgccggcaactttcccattcaggagtttctgcaggcgcagagcattgtggcgcccaacggctacattctggggggtggttttggcgaccaggcaagccttttggggggctggaagcttgccggcaggatgtttcttaaagctggcttggaccaaggatgctgagacattaaggttgctgagcttattaccaaaaacgacaggccggttggcaaggagctt

SEQ ID NO: 26594 - DNA, 246 bp, Zea mays
  unsure at all n locations
  Clone ID: LIB3180-003-P2-M1-G6
cccgtccgtgagatagtgctaacaaagatctcgcgtaacattccaaacgcttggggttcggggtttccattgccgccgccgccagnaattttaccttccaagtcattatcaataaccacccttggcagattggcaaccgcccttatgactggaacgtatatctcttctttcaccatatcttaaaaantnnaagggctttccctcgctcgccgaaggccaagaagttgaatttttccttttggaagg

SEQ ID NO: 26595 - DNA, 238 bp, Zea mays
  Clone ID: LIB3180-003-P2-M1-G7
tttctatttttgggtcgcataaggattctggaggtaattcaacaatcggtggtcttcatggtggaccacactcagtttattcatcaaggtattccaaatccttggcttttcttttttcgcagggatataatcttcttggtgtgaactacaggggttcattaggctttggggaagaagcactgcaatccctttctggcaatattggttctcaagatggcaatgatgtattgacggcatt

SEQ ID NO: 26596 - DNA, 323 bp, Zea mays
  Clone ID: LIB3180-003-P2-M1-G8
tcgctcagagctacgctaagaacatgggattgtatggagagcgtgttggcgctttgagcattgtatgtaaaagtgccgatgtagctgttagggttgaaaggcaactcaaacttgtcatcaggcctatgtattcaaacccttctcttcatggtgcctttatcggtgctaccatactcagggacagcgagatgttcaacgaatggactctggaactgaaggccatggctgataggatcattaacatgaggcaacaactatttaatgcgctgtaatccagaagaacccctggtgattggagccatattattaagcaaattgggatg

SEQ ID NO: 26597 - DNA, 370 bp, Zea mays
  Clone ID: LIB3180-003-P2-M1-G9
tttattgagaccaactagcaacataaaaaggacaattgtgtaccaacaatggcagccaaaatattttgccttcttatgctccttggtctttctgcaagggctgctacggcgaccattttcccgaaatgctcgcaagcttctatagcttcccttctttccccggaccttttaccagcgggggctttggtatgtggaaacccaattcttcaaccctacaggatccaacaggcaatcacagctggcattttacctttatcacccttggtccttcaacaatcattaggcctattacatcaggtacctttggtgcatttattggcacaaaacattaaggcacaacaactacaacaacttgggcttgcaaaccttg

SEQ ID NO: 26598 - DNA, 338 bp, Zea mays
  Clone ID: LIB3180-003-P2-M1-H1
ttaaacagcttacacaggttgctccgccatcaccgtatcgagagagacagagacaggctaacgagggaatggagaggatgcttgccaggctgatgccgcggcggagcttcgttcccctgttcgggcttcttcaacacggaggaacgcccggcccgcttgaagccggcggcgccactggggccttcccgctgatcttggcgcaccaacagcaggagcaggacacgggcggcttcggcgttctggcggggcttaagatcaaggacttcgcgttccaactgatcgggaggaccccgatggtgtacctgaacaaggtgacccgagggtgccgcgcccgggtg

SEQ ID NO: 26599 - DNA, 310 bp, Zea mays
  Clone ID: LIB3180-003-P2-M1-H10
tcggtcccgaccccgtcctggtcggttcggcgttcttcggccggcaaccggcggactggcaaagcccggaggcctgaggcccgagttacccgaggagcagcagaaccagggggccggggccttattccttaacgggcacgccagtgcgccgtcggcgcggagtgagcaagaacaacccgtggctggcgggcaatcgctggctagctggagcctggaggtgcgacttgggagccgcggtaggactcggcctacctataaattttggctggcttccgcactgattccaaccgttctggtggcggcgacagaa

SEQ ID NO: 26600 - DNA, 237 bp, Zea mays
  Clone ID: LIB3180-003-P2-M1-H11
tcgaaaaaatcgagccgaaaaagatcaaaagaaaaaaaaagaagaaaaaaaccctaaccactccgatcgaattattcgagggccgcagcagcccggcgaggctatgtcttaagcaaccggcggcttccgggatcgctttccctggtgatacaactcgggccggtcatttcgtcttttcgtggggatatgagggccggttcgaccgatccggccacggggccggcgaagtcgatgctt

SEQ ID NO: 26601 - DNA, 167 bp, Zea mays
  Clone ID: LIB3180-003-P2-M1-H12
tcggcgcaagcggcgccggcacacggagcagcggcgagattgaccaggtggtagaagcggaccccgataccgaggccgaggatcaagaagagaggtgggccaggcttcttcccgagcttcttttcgacctggtgcggcgcgtttaggcgttccgcggcgaacggtgg

SEQ ID NO: 26602 - DNA, 379 bp, Zea mays
  Clone ID: LIB3180-003-P2-M1-H2
tcgcagatgcgcacgctggaggcgggcaccggggtgctggccggaacgcaactggcgtacgtgctgatgctgcaccgcgccgccaccgtcgggtacgcttgtgatgaaaccggtgctaccggctaagccggcgctggtggggaccagtgcgagcctggctgattcaaccgcaccgacgacgagggcgactactaatgtcaaggcgcgcagttgcagaacgatggacgacaccagcaacaacccaggcagggccgggggcccttgctcaacgttatgtgaactaggatacccatggcatcatgtttggttggagaagctttttgggctagcgattttcggggaagagtttagtcacgtggaaaataagcaattgaaactt

SEQ ID NO: 26603 - DNA, 373 bp, Zea mays
  Clone ID: LIB3180-003-P2-M1-H3
agcccaccgaattccctgggattcctttccccttgccttcttgttttcccctaggggatcgtcggagaggaatcgcaaagagggccgtctcattcgagttaaggaagccatggagcacaaggaggctgggtgccaggcccccgagggacccattctctgcattaataactgtggcttcttcggcagcgcggcgaccatgaacatgtgctctaagtgccacaaggagatgattaccaagcaggatcaggccaagctggctggcttctctatcgacagcattgtgaacggcaacgaccccgtcattgaaccccgtggtgcttgcagcaacaccgtagtagctgttgcccaagtcgagttgcaaacaatgaacctg

SEQ ID NO: 26604 - DNA, 275 bp, Zea mays
  Clone ID: LIB3180-003-P2-M1-H4
tcgggggttctcttttttggccgggaccgctggtcaagtttcggccgtccggtcaaggttcattgagcccttccccacgacggattattctttagatggaaggcaccatgggttggggcatgcaatttttataacttgctgctaccaatggggtcccttctaagggttacggcgccaagggcccatctgtgtacatttcaattgtctttcacgggcgtgcggaatcctttgaatatcgggatgcacccttagataaaaagcttgtccttaatgat

SEQ ID NO: 26605 - DNA, 319 bp, Zea mays
  Clone ID: LIB3180-003-P2-M1-H6
cttccatttctcgtggggcccaccggccacgggcacgccgtagatcttcttcttggcgcagggcttcggcggtcttgccggcggtgagctgaaacgatggagctttggagcaagctgcgaaacctggatgcctacccgaaagggaacgaggacttctacaggcggacccttttcggcgggcttattaccattcttttcttccttggcattcttcttcttttcttcttcgagatccgactttatctatattctgccacggaaaggaagctcactggtgataccttgagaggggaaagactacatatcaattttgatggta

SEQ ID NO: 26606 - DNA, 366 bp, Zea mays
  Clone ID: LIB3180-003-P2-M1-H7
tcggggcattaattgggtggcgttgcagcttagtttttggttcatttgacaaacttggtagtgtcctgatacatctcttacctgggattggtctattcactattcggtggtgggatccacaaacatttgctgccatgcaccccgaaggaagagatgccagagtgacatggccatatgtggaggacaaatcatatatgtggacatggcttttttttggtccactagctgcttacaccctgtggcaacttatgtatttcctcataggtaatggcctgcgccggcagaggttggtaagggaccctgaagtcatgacattctacagagagctcttaaagaaagcacagaaaggcaacaacattttgtgga

SEQ ID NO: 26607 - DNA, 381 bp, Zea mays
  Clone ID: LIB3180-003-P2-M1-H8
tcggagaaacacaccaagcgaagcacattagcaacaacctaacaacaatggctaccaagatattatccctccttgcgcttcttgcgctttttgcgagcgcaacaaatgcgttcattattccacaatgctcacttgcttcaaggtccattattacacaggtccttccaccaggtacttcaatgggcttcgaacacccagctgtgcaagcctataggctacaacaagcaattgcggcgagcgtcttacaacaaccaattttccaggtgcaacaacaattcttggcacatctaacaatacaaaccatcgcaacgcaacagcaacaacaatttctaccagcactgagccacctagccatggtggaccctggcggctacttgcaac

SEQ ID NO: 26608 - DNA, 381 bp, Zea mays
  Clone ID: LIB3180-003-P2-M1-H9
tcgatccgaagctcaatcaattcactcaaacctcttccccaaatcttcgattagattctcggtgacaagaagactagaaccgaacctgaccatgtcgctgatccgccgcagcaacgtgttcgatcccttcttcctcgacctttgggacccctttgagggcttccccttcggcttcggcagcagcagcaggctcttcccctcgttcccgcggaccagctcggagaccggggccttcgctggcgcgcggatcgactggaaggagacttcagaggcgcacgtgttcaaggcagacgtaccggggctgaagaaagaggaggtcaaggtggaggtcgaggaccgcaacgttcttcagatcagcggcgagcgcaacaaggagcagga

SEQ ID NO: 26609 - DNA, 114 bp, Zea mays
  Clone ID: LIB3180-004-P2-M1-A1
caagacgccagtagaattatctcggcatcatctgcaacgcctgtgcggggtacaatgagagagcgagtgataggccagataaggagccgccggctttcggtggcagcttcattt

SEQ ID NO: 26610 - DNA, 75 bp, Zea mays
  Clone ID: LIB3180-004-P2-M1-A10
tcggttctagaacgcgagcggccgccctgtgggttattttataagaaccgggggggacaccaaaaaaggaagaga

SEQ ID NO: 26611 - DNA, 123 bp, Zea mays
  Clone ID: LIB3180-004-P2-M1-A11
tttgggttggcttcttctccccctccgggtcgggttcgggttcgtgagggtcttccgggttcagtttcatgggttaacggatcgagattgactgcgttcgaaagattgaaaatcttatgtttt

SEQ ID NO: 26612 - DNA, 302 bp, Zea mays
  Clone ID: LIB3180-004-P2-M1-A12
tcgggcccaccagcagctggccccttgctggcggcggcttttcgggcgaccgatctaccggcggcggcaccatgtcgctgatcgccggcgaggacttccaacatattctgcgtctgctgaacaccaacgtggatgggaagcagaagatcatgttccccatgaccttcataaagggtgttgggcgccggttcttcaacatcagttgcaagaaggcccgcatcgacatgaacaagagggccggtgagctgacccctgaagagcttgagcgcctgatgaccgtcggggcccacccttaggcggtt

SEQ ID NO: 26613 - DNA, 288 bp, Zea mays
  Clone ID: LIB3180-004-P2-M1-A2
tcgtaacaagcctatatcatcttccaaatatacttggtccgtgccggcgggcttcccttctacgcccctggcgattcttcaatcttcaccaacgtctgggcgtagcaagcttgcaatcggcacgactttcttagatctggcggacgacttgctggtcggtaccgacttaccagcaaccaacgtgaggcattagccggcagcaggggaagctgggcggagggtcattgcggcacggcgttcaagcgtacagcaggcaccagcaacaggccatggcaaacgatgacccta

SEQ ID NO: 26614 - DNA, 85 bp, Zea mays
  Clone ID: LIB3180-004-P2-M1-A3
ccccgcacctacccggcccgcaatccccggtccacccacaccttccgttccaaaaccccaaccgccccccctttttttttttttt

SEQ ID NO: 26615 - DNA, 252 bp, Zea mays
  unsure at all n locations
  Clone ID: LIB3180-004-P2-M1-A4
tcggccatggcgacatcgccgttgccgacggggaccggctctgtctcgaagaagcggcgttccaaaggcgggacgctagccctagatgaggtgaagaagctgggaaccgagcttcttttcttttggttccaacttaaacacgcccccgtccttctnggttttctctcttccaacgagccggttgaacttgcttttgaggcgcttaatttgctccaggccttcttcggaccacttaatcccttcattcccttc

SEQ ID NO: 26616 - DNA, 85 bp, Zea mays
  Clone ID: LIB3180-004-P2-M1-A8
acctaacaaggctaattatattccaaatattgtttgccagggccagagagataggattctacgcccctggcggatttaaggtgcg

SEQ ID NO: 26617 - DNA, 342 bp, Zea mays
  Clone ID: LIB3180-004-P2-M1-B1
tcgggccgccctttttttttttttttgggacggtactttttttcttttgatgtcaaatggataaataggttattggctaaactgaccatgctacccatggggattctttacacatttaatattcctttgacccacaattgcagttgccagcttcatgtttccagggcttgcgacctggttcttaatttaatgaccttttgtaaggatctaggggtctttttggcgattcagcccataaataaagtgtgaaataaaagccgcaggttgaggcaggaaccttcttatttgagggaacagatttgcctgtgtttggttacattaaatatctgtttcacagatttt

SEQ ID NO: 26618 - DNA, 348 bp, Zea mays
  Clone ID: LIB3180-004-P2-M1-B10
tcggtcaggcacacaccttaccacggcagacgggaccacccttcttcaccttcacgccagaattcatgctttcagagctaaattaaccacgcttcggtcatcggttcttccaccttcaaaataatccaggctcaggccccacactggccgcaaatccaacctttttgggctcaatcaaccttcaaatctacctttttcgtcactccatcctggcctaaatcccgtccctcccccccaaagtcatacctttcccactgcgcccccctgcagaaattcatagattcttcgccacttcgattgtccgcttcatgaatccggcttcgcgcgcccaatttcctgtaaaggccc

SEQ ID NO: 26619 - DNA, 190 bp, Zea mays
  unsure at all n locations
  Clone ID: LIB3180-004-P2-M1-B11
tttttcttcggctagggtgttcacgcctggcggggcgaagcttctggccttcccggcgtcgggctctggtcgtcgtcggccgggaagatggctggcggcttcagggtacttcatctggtcaggccctttctggcttttttggcagaggggccnaacgccgattgggaagataccattcagaggaaaaggt

SEQ ID NO: 26620 - DNA, 167 bp, Zea mays
  Clone ID: LIB3180-004-P2-M1-B2
tctgcaaaatcagatcctttgtttaccttcgaattcaatggtcatgccaaggacacaaaaccgccaagcgcaatccgcgattcgaggcctttacaccattcaatggatagaaattcaacgcgtcaatcttctattgaagacttttataatgccattcccaagtcaca

SEQ ID NO: 26621 - DNA, 333 bp, Zea mays
  Clone ID: LIB3180-004-P2-M1-B4
tcgtgcccaccagcaggtggccccttgctggcggcggcttttcgggcgaccgatctaccggcggcggcaccatgttgcttatcggcggcgagggctttcaacatattctgggtctggtggacaccaacctggatgggaaggagaagatcatggtccccatgaccctcataaagggtggtgggcgccggtttttcaaccttgtttgcaagaagggcgacattgacatgaaccagagggcccgtgagctgacccctgaagaggttgagcgcctggtgaccggcgtgggccacccttggcaggtcaaggtgcccgactggtttcttaacaaggagg

SEQ ID NO: 26622 - DNA, 293 bp, Zea mays
  Clone ID: LIB3180-004-P2-M1-B5
tcttccggaggcaccgaaattttccaggcaagggaaaatcccgttcgaaatccaacgcttcaaattcgttcgtcttctaggcgcttccccgaacccgtcacgaattccttagatccccgctgaaatcccttaatccttcgtgcttggcggcgccggcttcttccttggaccgggccgccttctttcgcaatcgtggccgcattttttcacccgagggttttggtttgcttttgctcttttcggtttactggcttcacagattggcgcgacccgtccgtcattgtggacctttt

SEQ ID NO: 26623 - DNA, 345 bp, Zea mays
  Clone ID: LIB3180-004-P2-M1-B6
tcgagaccattagctttatttacttcagagcgcaaaagaacccgatcgacaccatgagggtgttgctcggtggccttgcttttctggcttttgctgggagcgccaccttcacgcattcaagcggggggtgcggctggcagccaccggcgcccgttcatttaccggcggcggtgcatttggcaccttcggtttacctggcatcctcggtgcattttccaccggcggtccaacttgcggcggcggttcaactttcaccggcggtccatgtgccgtcgccggtttatttttcgtcgtcaccattccactaccctacttaaccgtcccggacttagtcttattcccagg

SEQ ID NO: 26624 - DNA, 325 bp, Zea mays
  Clone ID: LIB3180-004-P2-M1-B7
tcggttttactagcatcgttcgcttttacactgaggttgagctggcgtacctgaaccatggaggcattcttccttatgtcatccccaacttggcagctgcccataactgaggcaaggtcaacacaccgtttgacccacaatggcagtggcaggctccatgttcccagggctagcgacctggttctcaatgtagtgacaattggggagggatctaggggcctctttggcgattcagcccataaataaagggggaaataaaaacccgaggttgaggcaggaacctgctgattgagggaacagttttgccttgggttggttacatgaa

SEQ ID NO: 26625 - DNA, 242 bp, Zea mays
  Clone ID: LIB3180-004-P2-M1-B8
ccagtcctgttggacgtcagcctagcaattagctcattgacttcagattggagaactcgacaccatgaaggtgcttatcgttgcccttgctctactggcgctcgctgcgagcgccggcttcagtacaagcggcggttgtggcttgcagacaccacccgttcatttaccgccttcgctctatatgccggcttcggtctatctggcttcgcaacaataatccgagccattgcaataccccaatt

SEQ ID NO: 26626 - DNA, 316 bp, Zea mays
  Clone ID: LIB3180-004-P2-M1-B9
atgacaggcctggtggagatgtacggcaagaacgcccgcctgagggagctggcgaacctcgtgatcgtcgccggtgaccacggcaaggagtccaaggacagggaggagcaagcggagttcaagaagatgtacagccttatcgacgagtacaagttgaagggccatattcggtggatctcggcgcagatgaaccgtgttcgcaacggggagctgtaccgctacatttgtgataccaagggcgcatttgtgcaggctgcgttctacgaagctttcggcctgactgtgatcgagtccatgacctgcggtcttgcaacga

SEQ ID NO: 26627 - DNA, 293 bp, Zea mays
  unsure at all n locations
  Clone ID: LIB3180-004-P2-M1-C10
tcgggcagagataagcaaatgggttttccatgagaggggacatctaaaggctggtaacgttaggcatcacaaggttggggagaccaatgaaccaggcatgtaccgcattaatgatgacctggaatactctgttgagatctatgaatggtccggaaccagcttgaagccttatgttgctgatgatgtgcagctttaattttttaattngagcccttaccttctgaaaactatgtttactgacaacaagggtttgttttcaacaacctttaaagatccggattttttttgtggtt

SEQ ID NO: 26628 - DNA, 295 bp, Zea mays
  Clone ID: LIB3180-004-P2-M1-C2
ttttaccgagctacctaccttccccgtgccaccacctttaaaatcccccagcggcccaaccgaacccgcctagggattcctaccgagggaggccgcacgcagccatggattttctgcaggggcaaagcgtcgagaccacaatggccgtcgccgtcgctttcgccggccgtgccgcaagcggggcctttcttcttctttgattcaagaagcccaagggcttcttggatcctgagaacctcaagaaggtcaaacttgttggaaagaagcaaatatatcattatggtgccaggttcaa

SEQ ID NO: 26629 - DNA, 330 bp, Zea mays
  Clone ID: LIB3180-004-P2-M1-C4
tcgggcgtgatgacccattttcccgagcagcagtattagccaaacagcggcaacgccaacgttaaccttctggacattgggttcttctctggcaacagtggtggcacgtttggcagccagggccctttggttcacggcaaggagccctttcatagccatgacctggcgcaactttccgagcaggagcaccagccaggcagcagcaacccccgcgtgaaccttcctaaccttggggtcttctctggcaacagcggtggatggcccggaagcagccatcaagacccgcgccttgtgattcaagaacaaattaaccgggggaggaggaagaac

SEQ ID NO: 26630 - DNA, 326 bp, Zea mays
  unsure at all n locations
  Clone ID: LIB3180-004-P2-M1-C5
tcttgagtctcggccacccgtcgtccttctaggttctttactcgccaggcgccatgggcaagattaagatcggaatcaacggcttcggaaggatcggcaggctcgtggccagggtcgcccttcagagcgaggatgtcgagctcgtcgccgncaacgaccccttcattaccacggactacatgacctacatgttcaagtactacaccgtccacgggcacttgaagcacaacgacatcacactcaaggacttcaagacccttctcttcggtgacatgccggtcaccggcttttgcattaagaaccctggggaaattccgtggggtgag

SEQ ID NO: 26631 - DNA, 284 bp, Zea mays
  Clone ID: LIB3180-004-P2-M1-C6
tcggcgcacggggcaccggacaccttactggcggttccttcttggcttctgttcttttcttttctcggcggatccggcaccgacccaacggccctttggttggttctttcggcggaatcgctggtcctttctgtgctggcgatttgtgcggcgactggtagtttggttcgggcccattcttctggtgatcaatggctgacggggaggatattcagccacttgtgtgtgacaatggcactggaatggtcaaggctggctttgctggtgatgatgcgcccagagca

SEQ ID NO: 26632 - DNA, 269 bp, Zea mays
  Clone ID: LIB3180-004-P2-M1-C7
gcttcggccatgatgaaagcttcagcttcggcttgcaaggatgagtgggtggtctgtcctgtgttcaacaagaccaccgggatcaagaagaccgctgcgccggcataccaagtggccattgccggggcttatatggatcaaaatcaaaacaacatttcggtcattcccatccccattccgcttcaactgccactgtccttttccatgcatattcaatttcccaatcttccagattttgccacggacctcgttgccccctacttccccaa

SEQ ID NO: 26633 - DNA, 201 bp, Zea mays
  Clone ID: LIB3180-004-P2-M1-C9
cccaccgtccgtgagatggatcggccaggcagttttatcggggatttcctgggaacacggggagaagctgacgagcacttttccgctacgggaggtaacgcaggccgcgtatgcgcgacaagatcaccggccgcccccgcggttgggttcgcgcttcgggtcccgccgcgtcacagagcgctgaagaccccccaccctgac

SEQ ID NO: 26634 - DNA, 250 bp, Zea mays
  unsure at all n locations
  Clone ID: LIB3180-004-P2-M1-D1
ttggttctagatcgcgagggggcggcctttgtttttttttttttttttttagggtttttttttattttttttttttttttttttttttttttttttttgggaaaaagtttgtaataggaagggggaattttaaaaattaatgaaaaagccntttttgggaattggaggaataattaaccgaaaattaaaaaagttcaaaanttgtatgatagtaaaattttaaaaaataaggttacatcaaatataaaaa

SEQ ID NO: 26635 - DNA, 84 bp, Zea mays
  Clone ID: LIB3180-004-P2-M1-D10
tcttatccactcaaaaaccctccagcttctcatctttcttactttcatacaattcttggtaccagcgcactatccatgaggacc

SEQ ID NO: 26636 - DNA, 340 bp, Zea mays
  Clone ID: LIB3180-004-P2-M1-D2
tcgatttcatgcctggggtcggtttgctcgtgaagattgcttttggttgctgtggaagccggtgcaaggattacacaacagcaatatcgggactggtgtgaaggatgaaattgagaggcaacatctgagaaccatggagctcaccataccccacaaaggaactaaagctgctaggttaagcatgggtaaaagaggcagtgcttgtcctttaaggtaaataaaaaccttgcggggccccacaatgtgcaaaaaagggttagtctagggcactaggccgatgggctatgtattggaagtacccaaattggcagatacctatgccttcaaaggaacgcattaa

SEQ ID NO: 26637 - DNA, 92 bp, Zea mays
  Clone ID: LIB3180-004-P2-M1-D3
cttctgtagaatcgggatcggacccattgccgggtttagcaccaatagtagcgaagccacttgttgttggtaggaacactcaacccaacccc

SEQ ID NO: 26638 - DNA, 318 bp, Zea mays
  Clone ID: LIB3180-004-P2-M1-D4
tcggctctttggatccttggggaggacttcctttttttatcaaagggtggaagcaccattgctaccattaaacaatgtcttggtgatctgccattctacactggctttgatgaaggggagggaactgattccaccaattcaacccaagcgggggggaacactgtcactgtattttccaggaggcctgttggtcttgcggatggcacttaagccacacagagcgccgcttccgagaccatttcaggcccatcaggtgctcatgggtcattagcatttaccctgaaccttaaatcacttattttggcaggtggtttcttt

SEQ ID NO: 26639 - DNA, 333 bp, Zea mays
  unsure at all n locations
  Clone ID: LIB3180-004-P2-M1-D5
tctagatcgcgagcggccgccccttttttttttttttttaggcatagaaagacctatggcatagaactaaatctcacgaagaatcagaataagattgaacttaccaaaccgacccttacaaacaccgatgccggcacaaacaaacagncccacgcacatactgggagacacaagcatgttgacacacacataccaccataatagatagggggcatacacaccaaaacggacacctgacataccgggaattaaaccaaggttaaaatgcttattttccacgagaccaaacacgagcaccggaaatggcaaggccagggagcgacaccaccaaaa

SEQ ID NO: 26640 - DNA, 66 bp, Zea mays
  Clone ID: LIB3180-004-P2-M1-D6
tcggattgtcggcccagtttaaattaacccattcttgcttgctccgactagcaagctgggaccctt

SEQ ID NO: 26641 - DNA, 132 bp, Zea mays
  Clone ID: LIB3180-004-P2-M1-D9
taactcggtgtcctcgttcaccccgggttccggtcggtccattgagccaacacgccagtagctgctgacgcctaaaacaccgggaaagacccggcttcctttctgggggcagccaggtccaacgcccgtagt

SEQ ID NO: 26642 - DNA, 141 bp, Zea mays
  Clone ID: LIB3180-004-P2-M1-E1
cagtaaataaagggcggtcgctgatttattgactgggctccttgcaacttttgttaaatccaaaagaccctgattgcaaatagaaaggacttgcacgcaaaaacaccacgagggagaccaataattcgaatttatttgggc

SEQ ID NO: 26643 - DNA, 284 bp, Zea mays
  Clone ID: LIB3180-004-P2-M1-E10
tcgcttggacgtatctccctgcatatgattgcaggtggattgactggctacatggcaactgtggctaatctgaaagaccctgttgacaaatggagatgtgctgctgcttctttaactgcgatgatgagtgtgaaaaggcatttaccttgccctggagcaatccctatagggaggcctttcattcacccttcttcaattgacctggaagggaaagcttattagttgctgcgagagaaggctttaagctttcttcttgacgacttctacaggacttcaggagggat

SEQ ID NO: 26644 - DNA, 233 bp, Zea mays
  Clone ID: LIB3180-004-P2-M1-E2
tcggcaaaagcgaagcaaagcaatcggaattctctgcgatttctctagatctcgactaccccccactaggtttggttccttctttcggtcgagagagcgattctggtggcaatggccaagagcgagggtcccgcgatcgggatcgacctcggcaccacctacttgtgcgtcggcgtgtggcaacaccaccgggtggggaagattggcaaccaccaagggaaccggaccacgcc

SEQ ID NO: 26645 - DNA, 308 bp, Zea mays
  Clone ID: LIB3180-004-P2-M1-E4
tcggttccctagagcagatccatatagactctagagtacattcgagggggaagcgagcagatcgatggcgatggcttagaaggtgaaggagaagattcttatgcttcgcaacagcgacaaccaggagttcgaggggaaggagtcggtggcgatgcaatcgatgacccttaagaaaatggtcgaggaccggttcgccgacaaaggcattccggttcccaacgttaccttccacattcttgtcaagggcattgagtattggaacaagcacgcccagcccaccgggccgggcgacgcggtcggcaccaaca

SEQ ID NO: 26646 - DNA, 338 bp, Zea mays
  unsure at all n locations
  Clone ID: LIB3180-004-P2-M1-E5
tctttcaggcaatggcgcgaaccaatcgggaggtgcacggatcggattcggggagcactcaaacccgcagatccttaacttgctccgatcaaaccatggtgaccgccttcaagtgcttttgaacagcgaccgcagaaaggtgtgggttcaggngccaacccatccatcaacgttctttggcaatggtggtgatcttcttcatgtaaaatagacaggcactgcggctaggagattaggtaaattagaattgcttctatttattagctaccaacggccgggggttctaaacagacaaccaggttaattagcaattgcttctttttttgtgaaaagattgg

SEQ ID NO: 26647 - DNA, 77 bp, Zea mays
  unsure at all n locations
  Clone ID: LIB3180-004-P2-M1-E6
tttggaaaattnggtnttttaaaaaaaggggggaaaaaaaaaaaaaaaaaaggggaaattaaaaaaaaaatacttaa

SEQ ID NO: 26648 - DNA, 293 bp, Zea mays
  unsure at all n locations
  Clone ID: LIB3180-004-P2-M1-E7
tcggccagccggcgtncgttcgcgctttactatccttcattcccttccctggcagcgacgactgggtaggctaccggcggcgccctacgctaggtgcccatcttttcgccggcgaagagcgcccaccaagcttcggccaagggcgtgatggcggctgtaggcagcttggagccggggatggagactcttcatgtgcagggctaccaggacccgccttcggccaaggccgcggtagagagcctccagccggcgatggagagtctgcatgtgcaggattacaaggacccgccttc

SEQ ID NO: 26649 - DNA, 307 bp, Zea mays
  Clone ID: LIB3180-004-P2-M1-E8
gtttcagagaagctgagggctgactacgactttggccacactttggatgccaaccaccttccacgtggtgatgcagcagtggaacggccattggtcaggctgctgaagccatttgatgagcttggtggtgacagcaaggattttgatgtccctgcactgatgaaggttattgatgcttgcaccattcctagagttggcacttttgacaagaaccctggcaaccacccataccttaagaaattctttcaaaggtcaacccccaaggctatgctggttttgaacttcttcaccggaccttttgattctt

SEQ ID NO: 26650 - DNA, 246 bp, Zea mays
  Clone ID: LIB3180-004-P2-M1-E9
ttctttcccgagggctgaggatatccttcaacccatccacctcacgaggaatcagcactcgcttttgctccgcgatttattgctcagggttcttgctgggtggtggtggccggtggcaccagcagtagttcacaagagcaagctgttcttgtgtgcgtgggtctatgcctgcttgcttgcccaggggaggagaaggaggccgagttctgggaagtggggagttcaagtaccggcatttcttgggcg

SEQ ID NO: 26651 - DNA, 194 bp, Zea mays
  unsure at all n locations
  Clone ID: LIB3180-004-P2-M1-F2
tcttgcaggtccccgtgcgaggaacaggaaccggtgctgctttttggcttcggttcgaaccttcttgcgctcgagaaccgggacgcccacgcccttccttgacgcgttggtgatccgcgagctcagaactgcatattaaagaagaatttnccnatattccggggaacatgaaaagaaaggccccattaggaaaa

SEQ ID NO: 26652 - DNA, 311 bp, Zea mays
  Clone ID: LIB3180-004-P2-M1-F4
tcgtcttggacccggcccttaacttccatgggctttcgccgtcggttacactggggcccaacgctcttccccgcgttcgggcccggcttcttccccttacccttctccttcttttggtggctccactgactttaggcgaccggccccggccaccggcattggaaggcctagctgctgcaggaactggcctggcggcccgccggttcttcggttggagcgtttccggtttcttggatgcaccggctgcttcgatggctggcctttcgcccgccggagagggccccgacgccgtggagatccgtgaagtttgg

SEQ ID NO: 26653 - DNA, 345 bp, Zea mays
  Clone ID: LIB3180-004-P2-M1-F5
tcggttatgggtgcaggcactgaggaaggagcccttgaccgtttatggtgatggaaagcaaaccaggagtttccaatatgtttctgatctggcaaggctacctttacttaacatatattggaaaaaaaataagagacacttgattcaacatcactgccagagtaccagatttgattttttttccggtggcttaatggcctatccagcaagtgggatgcttgaactattcattacaagggaatctattattctttgcattcattggactgatttgtgggtcttcttccaagtcgagggtctgatgaagcttattgaaggcgagcatgttagaccatttaacctggg

SEQ ID NO: 26654 - DNA, 268 bp, Zea mays
  Clone ID: LIB3180-004-P2-M1-F6
tcggccgtatctaggacaagttccaaagaagagggaacgcaaaaggcctgtgagagtgtacatggatggatgctttgatcttatgcactacggccatgcaaatgcattgcggcaggccaaggtgctgggcgatcagcttgtagttggagtgggtagggatgaggagattgtggcaaacaaagggccaactgttctttctatttgagagaggttttctttttgtagtgggcttaagtgggtcttataggtgttttccaattcttcctat

SEQ ID NO: 26655 - DNA, 196 bp, Zea mays
  Clone ID: LIB3180-004-P2-M1-F7
tcgcggcgacgggccgcttcgacgttctgtccaaggacgccggggtgccgctggtggccttctcgctcagggacaggagccggttcagcgtgttcgacgtcttcgagaacctgcggcggttcggctggatcgtgccggcgttcacgattccggccgaccctgaacacgttgcggtgctccgagttgttgtcaggga

SEQ ID NO: 26656 - DNA, 334 bp, Zea mays
  Clone ID: LIB3180-004-P2-M1-F8
gttttccttgctttcacacttggtgtgaagcagatgatttgctgctgcaacaagatggatgctactacacccaagtattcaaaggcccgttatgatgagattgtgaaggaagtctcttcctacctgaagaagggtggatacaaccctgataagatctacttcggtccaatctctggttttgaaggtgacaacatgattgagaggtccaccaaccttgactggtacaagggcccaaccctacttgaggctctggacttgatcaatgagccaaagaggccttcagacaagcccctgcgttttcccctttaagatgtgtacaagattggtggtattg

SEQ ID NO: 26657 - DNA, 263 bp, Zea mays
  unsure at all n locations
  Clone ID: LIB3180-004-P2-M1-G1
tcggtcggttcaaatccattcatcctcgtttgcttcgtcccggaggattttaaccccatggccaagatcaagaacgggatcaatgggttcggcaggatcggaaggctggtggccagggtggcccttgagagggaccatttctagctcgtcnccccggaccaaccctttattagcaccgactacattacctacatggttcaggactgcactttgtacggaccggggaagcaccatgaaatccaggtggaaggcttcaaaaccct

SEQ ID NO: 26658 - DNA, 290 bp, Zea mays
  Clone ID: LIB3180-004-P2-M1-G10
tcgtacacttttggcaagatttcagacttcaacaacgcggatgttgcagttgaccagtaccaccgttttgaggaggacgtgcagcttatggcggacatgggaatggatgcgtatcggttctctattggctggtcaagaattctttcaaatggtacgggccaagtcaatcaagccggcatcgaccactacaacaaagtgatcaatgtactactatctaaagggattcaggcatatgttaccctgtaccactgggaccttccccaggcccttgaagacaagtacaacggatg

SEQ ID NO: 26659 - DNA, 244 bp, Zea mays
  Clone ID: LIB3180-004-P2-M1-G4
tcgatatactagagagggacaaagaaaattctatgggctctaagatgggcttaacaagcgccactggctttgacctactttgctccttaagtcatgacttggtggtgtaactaaacatacccagtttacaactttgggcatgcctctaccgattttttgcatcagtctgacattgagcctaccttcagcttagggttttgggatcagatctttattgtttccacttagggggggtcttccacta

SEQ ID NO: 26660 - DNA, 185 bp, Zea mays
  Clone ID: LIB3180-004-P2-M1-G5
tctacactggggaccctagaccccaagcaccggcgcggctgcggcggcttccatggcaatcgggaagaacaagaggatctccaagggaaagaagggtggttagaaaaagaccgtcgattccttcttttagaaggactggtattacattaatgccccatcggtcttcaatggtggcaacaattgga

SEQ ID NO: 26661 - DNA, 347 bp, Zea mays
  Clone ID: LIB3180-004-P2-M1-G6
tcggtcttactctctttctaatcacactttcgacactgatcggtactctagtggccgactcgtcacaattttagcgagaaccagccagccagccagggagaggatgggttccacaggaccggcgagcgggttcgcggcgcccgagcgggacattgaccatctggcgcggaacgaccccaactacacggggcttacgccggtctggttcctcgagcgcgcggcgctggcgcattcgggcagggccttcgtcgtgcacgggcccgtgcgctacacctgggctgacacctattggcggtggcggcggcttggattcggccttgggcgcctattcgtcgggcacggaagca

SEQ ID NO: 26662 - DNA, 259 bp, Zea mays
  Clone ID: LIB3180-004-P2-M1-H1
tcggtcaaacacgtcaatagtagagattttggactagatttgtgcaaaacacttgaaaagaaaagggcatcgtaaacgccgccggcggctttgatgcttttcgccgtgcgatgtggtgcccttcggcggtggggcccggctacgtaacttcttccacgcattctttactgcttctttggtacattttccgcgcgaccacctgggggggctcttgtggagctccccgagggggaggaggtactttgcgaattacgagctg

SEQ ID NO: 26663 - DNA, 350 bp, Zea mays
  Clone ID: LIB3180-004-P2-M1-H10
tcggcttcctgttgaccattgggtattctgaaccatcgagccatggctgccaagctgactcgccttcacagtcttcgcgaacgccttggtgccaccttcttcttccattccaatgaactgatagcactcttttccaggtatgttcaccagggcaagggaatgcttcaacgccatcagctgcttgcggaggttgatgccctgtttgatagtgacaaggagaagtatgcaccctttgaagacattcttcgtgctgctcaagaagcaattgtgcttcccccatggggtgcacttgctatcaagccaaggcctggtgtctgggattacattcgggtgaatgtaagtgagcttgc

SEQ ID NO: 26664 - DNA, 289 bp, Zea mays
  unsure at all n locations
  Clone ID: LIB3180-004-P2-M1-H11
tcgggtcgatgtggncttggtaatggtatggataacaagtacaggcccagggcatgtaatggatactatggttatggcaatgagagtcaggatggaacaattgagttaaacagaggtcctagatcttgccggttcaagaaccaaaaattggaccgtcatactggcactattggtgtgaaagggcagtcttttccttctagttaaagcaagaattattgtgctgtgccttattgagcaaagttcaataaagatgactttccttgtcaataccattctttaaaggtttttg

SEQ ID NO: 26665 - DNA, 270 bp, Zea mays
  unsure at all n locations
  Clone ID: LIB3180-004-P2-M1-H12
tcgggcccttatccgncaaggcgctaacaaaggtttcaccagtatgggtaaaactattgggtacaagatcggaacgatgattgagatttccagggcagctttagtggctgacgagatcgcggagcaggcttaattcttcttctttggaacgaaccacctcacgcagatgacctttggcttcagcagggatgatgtggggaagtttattcccatttattttgcttaaggcattcttcagcatgaccccttcgaggttcttggccagagagg

SEQ ID NO: 26666 - DNA, 194 bp, Zea mays
  Clone ID: LIB3180-004-P2-M1-H2
tcggtcccctagccgccgccgccgctcgtcttcctgagaggtgccgggaccgaggatttggccgagttctaggtagagaatcgggtttacttgtcttagcccggggtctgctgcgtctggtggtggggaaggggagaaaatcgtgagatctttttcttatcatgcgtgcgaacttgggaatcaggggttttaca

SEQ ID NO: 26667 - DNA, 246 bp, Zea mays
  unsure at all n locations
  Clone ID: LIB3180-004-P2-M1-H3
tcggaggcaagtgcgatttcaatcttgcaagcaccttttttttggtccggtgcgtatctagtacctggaggagatatgcactttgcacttgcattggacaccaactcaggtcctcaccagataagatcttgtgagggtgatgggattgacaggnttgaaaaattaagtattgggggccgaaagcaagaaaaagctttgagaaatangntccttggtggtagaggtgctggaactacacaatgtatt

SEQ ID NO: 26668 - DNA, 299 bp, Zea mays
  Clone ID: LIB3180-004-P2-M1-H4
tcggccaacaagcaagaccggttctgcttggggtccgaaacctttctttgaacgcaaaaagaaccccacccgacgtaccgcgagccggcgatggcgaccgtggccatggacatcttgaagcccacgccggcagcgttcggtgaccaggcaacggcggcggccaaagggaggagcggccgctggggccaggggcttccgcagttctacctgcaagacattcatgaccttgagcttcagatccggccgaagacccataaccttaaccggcttgagggccagggcaacgaccttaacttccg

SEQ ID NO: 26669 - DNA, 121 bp, Zea mays
  Clone ID: LIB3180-004-P2-M1-H5
tcgggtgaagccgcccccgcttcaatgtccatagccaccgcaagagactgagatggggggttttggcaagacccacaagagcaatgcgtacttcaagcgtttccaggtgaaattcaagaga

SEQ ID NO: 26670 - DNA, 357 bp, Zea mays
  Clone ID: LIB3180-005-P2-M1-A1
tcggcacaatagtgtaccaacaatggcagctaaaatattttgcctccttatgctccttggtctttctgcaagtgctgctaccgcgaccattttcccacaatgctcacaagctcctatagcttcccttctttccccgtacctttcaccaacggggtcttcggtatgggaaaacccaattcttcaacccttcaggatccaaccggcaatcgcagcttgcattttacctttattacccttggtccttcaacaatcattaggcctattacagcaggtacctttggggcatttattggcacaaaacattaagggacaacaacttccacaacctgggcttgcaaaccctggttgcctacttta

SEQ ID NO: 26671 - DNA, 309 bp, Zea mays
  Clone ID: LIB3180-005-P2-M1-A10
gaagcccatactatgtccgatccagatcccccaattgatctactatgggtggcacaccatttcccctacttatggtgatcaatgtttcttaatttcatgataaccccaaaacctatgcttaatgcttaaaatgctatataaaattgagcttattcccacataccttgcatcaatgatacgcctaaccatgggaaaacccaagtcttccaccctatgatcttcaacacgcaaatggctcaagccacatacccttatcacccttgtttcaacaatgcccaaccctatctttggcgcattcattgttacaaa

SEQ ID NO: 26672 - DNA, 416 bp, Zea mays
  Clone ID: LIB3180-005-P2-M1-A11
cacaagaacaccaccaaagtggcgctcctagttctgctgctgtcattgatgctctctttgacagcgtcagtggcgcgcaatctccaatggcgactgtccgtcgctaccgctgtggaggtgtgcgtgaaggctgctgtcggggctcctgacaagcttggcgactgtcccttctcacaaagggtgctgctcactctggaggagaagaaggtcccttaccggatgaggctcattgacctcagtaacaagcctggatggtttctgaagatcagcccagagggcaaggtgcccgtgtacaacagcggcgatggccaaatggattgctaattctgatgtgatcacccaagtcatcgaggagaagttcccagccccgtcttttgcgaccccttcagaattcccactaattggatcgaagattt

SEQ ID NO: 26673 - DNA, 282 bp, Zea mays
  Clone ID: LIB3180-005-P2-M1-A12
tcgccgggccacactccgctgctccgccatggcgatccgctccaaggcctggatctcgctgctgctcgcgctgaccgtcgctctcttcgcccgggcggaggaggagcccgccgccgcggcggagggcgaggccgtgctcaccctcgacgtcgacagcttcgacgaggccgtcgccaagcaccccttcatggtcgttgagttctaccccccctggtgtgggcactgcaagaaactttctccagagtatgagaatgcggacaaggcacctagcatgcatgaccc

SEQ ID NO: 26674 - DNA, 349 bp, Zea mays
  Clone ID: LIB3180-005-P2-M1-A2
cgggttatgatgggctcatcttcgatcaaggccgagctttttttcatgggaggcttgtaattcttaaacaagttggtcctttatatcaataagaagaccctcattttttccatggcgcttcctgaccctgttaagaacacgtcccgcccgggggtgaagtacggcaaggaccctcgccctacggaacttgttaaccttttggtcctaaacggtgaccaccgtcaggagtacaaggacaggtaggatcaagccgtgttcaataatatggacagtctcatcggccagttccaggtgaagggccatattccttggatccttgcgcaaatttaccgtgttcgaaaccgggagc

SEQ ID NO: 26675 - DNA, 347 bp, Zea mays
  Clone ID: LIB3180-005-P2-M1-A3
cgaagtaattaattggagctacattgagttgattggttaccaggatggtgcggatctcactgagaagaaacctggtggaattattgcccttctggacgaagcttgtatggttgccacatcgacacctggaacatttgctcacaagactggtcaaacttacaaaaatgaacagcgctttgctgaaccaaaattatctcggtcaggcttcaccatatcccagtaaggtggacatggcacctatcgaaccgcattatttctggacaaggaccaacattatggtggtggcgagcatcaaggcccgatgcgggggttaaaatgggcaattgacccaggcccttaccgttttc

SEQ ID NO: 26676 - DNA, 319 bp, Zea mays
  Clone ID: LIB3180-005-P2-M1-A4
acgaccttccccttacctattcgccgtcccttttctggtggccttcccacgccggcggcctacgggccaacccggcgacgcgccaacttcgtatttttctttcccggctacgcgggcgggggatcttcggatccgcgcgggggagggagatccggattggatgggcctcttcgggcgcgggtaggccgggctgatctgatccgacccgtgccggcggggcaatccgggcagggtggctgggaaatttcggacctgggcggtggtgatcccgggggagagggcgggccttgctcgatctccggataaaagctgggaattt

SEQ ID NO: 26677 - DNA, 411 bp, Zea mays
  Clone ID: LIB3180-005-P2-M1-A5
gtagaagcgcccctctccctttctctctcttttttcgccgtccgaagcttcgcaccccaatctaatcgacacctcgccgagatgggccgcaagttcttcgtcggtggcaactggaaatgcaatggaaccacagatcaggtcgagaagattggcaaaaccctgaatgaaggacaggttcccccttcagatgttgtggaggtcggtgtcagccctccttatgtcttccttcctgtggtcaagagccagctgcgccaagagttccatgttgcggctcaaaactgctgggttaagaagggaggtgctttcaccggtgaagtcagtgctgagatgctcgtcaaccttggtggtccctgggtcattcttggacactctgaaaggagagctctgctgggagaatcaaatggatttggt

SEQ ID NO: 26678 - DNA, 317 bp, Zea mays
  unsure at all n locations
  Clone ID: LIB3180-005-P2-M1-A6
tcgctagcgagggacccggggcggaagaagagagagaagacctntctcttctctgggcgtccccgttccccaacctttcgtctggtggctgcctggctgcctgcctgcaaaaaggagtttggcatggcgtctaagcgcattctcaaggagctggaggacccgcagaaagacccccccacatcatgcattgcaggtcctgctggtgaggacatgtttcattggcaagcaacaattatgggaccacctgacagtccctatgctggtggtgttttcttagagaacattcattttccggcagattaccccttcaaaccttc

SEQ ID NO: 26679 - DNA, 284 bp, Zea mays
  Clone ID: LIB3180-005-P2-M1-A7
tcggaggcctgctgccttcttgacacaacaacagttgttggcggtctacgcttgacgctattcctaacgctggcacccttttacaactgcaacaattggtggcattcaaccaacttggtttgacaaactcaacagtgttctaccaacaacccatcattggtggggccctcttttagaatggttatgaggtataggtcaataatggaggtttttggatgatgtttggggcgttccaaaaataagaaaggtcatttctaaaaaaaaaaaaaaaagggggggcggtt

SEQ ID NO: 26680 - DNA, 278 bp, Zea mays
  Clone ID: LIB3180-005-P2-M1-A8
tcggtcactggcttccatcctgaaatcgaggagctcatctacagcgacgtcgagaacttcgagcacaagttcgtgctgaaggacaagaagaagccgatcatcttctcgatggcgcgtcttgaccgcgtgaagaacatgacaggcctggtggagatgtacggcaagaacgcgcgcctgagggagctggcgaaccttgtgatcgtcgccggtgaccacggcaaggagtccaaggacagggaggagcaagcggagttcaagaagatgtacaggctcatcga

SEQ ID NO: 26681 - DNA, 147 bp, Zea mays
  Clone ID: LIB3180-005-P2-M1-A9
gtttctctcccggttcgtcccctcttctgcgacgtcagggttgggttacggcactcgccgacgacgtcctacgcaagtgccgaggccttcatcgatctcttagccgtcgacaagcacccaagagatgcaagattgaatgagaccgca

SEQ ID NO: 26682 - DNA, 263 bp, Zea mays
  Clone ID: LIB3180-005-P2-M1-B1
cccttctttgtaagaacttcctccttaactacttggcggcctccgttattggcaggtggtattccaactccatggaggaagcttgagatctcaacaaccgttggaaagcattagctggctgtgcttactcctgctggaatgtgaagttccaacaagggccaactgggcatacccaacaattagcacaaccctaaagtgaactgtcctgaataaggcctctaaaacttgattaattaaccaaaccttgctcatggtttaaaaat

SEQ ID NO: 26683 - DNA, 196 bp, Zea mays
  Clone ID: LIB3180-005-P2-M1-B10
tgctgtctaacgagtctgggagtgctgtttcaggtttactttatcaaggattgagggcgaaacaaaacttctactttcatccactgacaaatgatgtgacaattgcttttagctcaagcaattcagacaagcttctcatcttcaatggtaaactaccaacatattttgacctgaaggcctcaacaacttttggtta

SEQ ID NO: 26684 - DNA, 327 bp, Zea mays
  Clone ID: LIB3180-005-P2-M1-B11
ggatgagctgaaggaacttgtgaagattttccatgaagctggtatcaagggtcttggcgatgctgttctaaatcataggtgtgctcagtttcagaacaacaatggtgtctggaatatatttggtggtcgtatgaactgggatgatcgagcagttgttgctgatgatccacatttccagggaagaggaaacaagagcagtggagataatttccatgcagcaccaaacattgatcacttccaaaagtttttgaagaatgatcctaaaagaaggctttgctggatgagaaaggaagtcggcttccatggatggagactttgcttttttcg

SEQ ID NO: 26685 - DNA, 216 bp, Zea mays
  Clone ID: LIB3180-005-P2-M1-B12
tgcctcggacgcgtgggatcgagtacagtcggctaggtaatctggtggtacgacgactgacgaccacatggcggccaccagcagcaagtcgtcgtcgtcctcgagctcggcgcatcgggcagcatctgccgccctgctcgtggcggtgtccgtcctggtggtgggcgcggcggcagtgtgccacattagcaacgagcagttcatgttgtgccatcc

SEQ ID NO: 26686 - DNA, 219 bp, Zea mays
  Clone ID: LIB3180-005-P2-M1-B2
agccttccatcgttcgcgcgggagacgtaaattgcggcttcggaagcggcagcagcggcggcaacacccgtgactccctcagaggggaccgtgattcccatccacaagctggaggagtggagcattcaaatcgaggaggcccacaggaccaagaaaatgggggcgaacgacttcactggaacattgtgtgcttccttccagggcattgcctcaattttt

SEQ ID NO: 26687 - DNA, 393 bp, Zea mays
  Clone ID: LIB3180-005-P2-M1-B3
atttagcatgcgagaatttagggccaatatcagggttatttaacagttttacacacgaactgctgctgcaaatacagagtcaacttctgtcactaaactaccattgacatttcaatagcccctataaagctattggagatggatattcaaataaaaagacttaccacatatcgtataggtgaagaagtgcatgctctttatgtttccaaaaagacaaaaaaataactttggaaggggttaatggatttcaacataacttttggtatctttttttgcgatggaagcttttggtatcatcttttggatgggaagcatatgtcagttcaactaaatacaattctatggaatgtgcttcataaatttagcttggcactacattgggaaagggtttgt

SEQ ID NO: 26688 - DNA, 340 bp, Zea mays
  Clone ID: LIB3180-005-P2-M1-B4
tcttccaaatccacccgtcggcaccttcgcttcaagatgcaaatctttgtgaaaaccctgaccggcaagactatcaccctcgaggtggagtcgtctgacaccattgacaacgtttagggcaagatccaggacaaggagggcattcccccagaccagcagcggcttatcttcgctggcaaacagcttgaggacgggcgcacgcttgctgacttcaacattcagaaggagagcacccttcaccttgtgcttcggcttaggggaggcatgcagatctttgtgaaaacccttgccggcaagactatcaccctcgaggtggagtcctctgacaccattgacaacg

SEQ ID NO: 26689 - DNA, 263 bp, Zea mays
  Clone ID: LIB3180-005-P2-M1-B5
tcttaggaagcaagggaatcacatcgccatggcagccaagatgtttgcattggttgcgctcctagctctttgtgcaaccgccactagtgctacccatattccagggcacttgtcaccactactgatgccattggcttccatgaacccatggatgcagtactgcatgaagcaacagggggttgccaacttgctagcgtggccgaccctgatgctgcagcaactggtggccttaccgcttcagccgtgccagatgccaatgatga

SEQ ID NO: 26690 - DNA, 352 bp, Zea mays
  Clone ID: LIB3180-005-P2-M1-B6
tctttcagtcggctggcgcaaactggtagtagccggcgcgccgtcaccgtattctcagatcaacggcgagcagataccacaccactttactgacgcccgacgaggagtgtaacattttccttcagccatgggtaaggggaagactcacatcaacattgtggtcattggccatgtcgactcttgcaagtcgaccaccactggccacctgatctacaagcttggaggtattgacaagcgagtgattgagagggtcgagaaagaggctgccgagatgaacaagcggtcattcaaggatgcgtgggtgcttgacaaggtcaaggctgagcgtgagagaagtattacaattgatatt

SEQ ID NO: 26691 - DNA, 289 bp, Zea mays
  Clone ID: LIB3180-005-P2-M1-B7
cgggaagaacttcgtcctgagcgacttggcggccgccgtcatcgccagctcgtatgccatcttcatggaggaagctgcagagctcaagaaccgttggaagcatgagcttgctttgcttacttcttcttgcaatggcaactaccaacaaggtcaagctggcaacgcccaacaataggcacaaccttaaagggatcctgccgaattaggacctgtagaccggaataattaaacaaaacttgctcattggttaaaaaaaaaaaaaaaaaaaaaaggggcgggcggttttaaa

SEQ ID NO: 26692 - DNA, 334 bp, Zea mays
  Clone ID: LIB3180-005-P2-M1-B8
tcgtcttgctattaaagcagccggtcttccttcttatgaagctcaacccggtcgtcttcttccttttcctttatgatatcgccgggacccccggcgttgcgggcgacgtcttccacattaacttccccggcctggtgaaggggttcatgggggacgaccagctcggggaggcgctcgagggctccgacgtcgtcattattcccgccggggtgcccaggaaggccggcatgacttgggacgacctttttaacatcaacgccggcattggttaagggctctggactggcattggcaagcacttgcccaacgcttttggccatattatcaggaaccc

SEQ ID NO: 26693 - DNA, 260 bp, Zea mays
  Clone ID: LIB3180-005-P2-M1-B9
tttccaacaagcaacatacaaaggggaatccattagcaacaatagagcaacaatggccaccaagatattttcccttcttatgctccctgctctttctgcatgggtttctaacgccacaattttgcctcaatgcttacaagcttctatagcttgccttctttccccattccgtacattaacgttagcgtaaatattgtaaaacccagctcttcaaccctatttgcttcaacaagcaatcgcatcaagcaacatacctttat

SEQ ID NO: 26694 - DNA, 320 bp, Zea mays
  Clone ID: LIB3180-005-P2-M1-C1
tcggtcgccttgccttggtgttcacgccgtcgctagcgcctgccgcggcgaagcttctgtcctccccggcgccgggctcgggtcgtcgtcggccaggaagatggctggcggcttcagggtactgcatctggtcaggccttttctggctttcttgccagaggtgcagagcgcggataggaagataccgttcagagaaaaagttatatacactggtatttccctcttcattttcctggtctggagccagctcccactctatggcattcattcaacaactggagctggtcctttctactggatgcctggtattcttgcattaa

SEQ ID NO: 26695 - DNA, 292 bp, Zea mays
  Clone ID: LIB3180-005-P2-M1-C10
tcttccgtgcaaaagggcgtgtttgagactagcggaccgaccttgaagttgaagttgaaaaggccggcctgcgcggcgatggatgtcaagtgccggcgtctggaggggaaggtggccatcgtgacggcgtccacgatggggatcgggcttgccatcgccgagcgccttggtctggagggcgccgccgtcgtcatcttcttccgcaagcagaagaacgtgaacgaggcggtggaggggctcaaggccaaaggtatcaccgcggttggtgccgtcttccacgttttcgacgcac

SEQ ID NO: 26696 - DNA, 349 bp, Zea mays
  Clone ID: LIB3180-005-P2-M1-C11
gcaacatagaaagcacaatagtgtaccaacaatggcagccaaaatattttgcttccttatgctccttggtctttctgcaagtgttgctacagcaaccattttcccacaatgctcacaagctcctatagcttcccttcttcccccatacctctcaccagcggtgtcttcaatgtgtgaaaacccaattgttcaaccctacaggatccaacaggcaatcgcaacaggcatcttaccattatcacccttgttccttcaacaaccgtcagccctattacagcagttacctttggtccatttggtggcacaaaacatcagggcacaacaactacaacaacttgtgctagcaaac

SEQ ID NO: 26697 - DNA, 342 bp, Zea mays
  Clone ID: LIB3180-005-P2-M1-C12
gtccttccccaccggttcgtgttcaggttctggttcctgggccaaaaggaagagattgcggcgtccgacctttaattcccgttgtttgtttgggggcctggcttgggccaccgacaaccactccttaaacaacgctttaagaccttccgggagggccctgaggtcgaaaaccatcctggaccgggagacccaaaggtcccggggtttcggtttcgtaaccttttcaacggaggacccattccccacggccatcaagggcttgaacggaaggagcttgaacggcccaacataaacggttacaagggccaatcccccggccgcccttgaagccgccgttgccga

SEQ ID NO: 26698 - DNA, 298 bp, Zea mays
  Clone ID: LIB3180-005-P2-M1-C2
tctgttttattcaccacaccagcaccacccaggaccgatggccggcgacgacggacgtgctcccttcggcctccgcgtcgtgatgttccccttcccgttctggagccacattaaccagatgcttcagctcgggaagctccttcgtgcgcggggcctgggcgtcaccatgctccacaccgacttcaacgcgcccgaccccggacttcaaccggacattaacttggtgtccatccgcgagtcccttcccgccgaggtcgtggccaaccccgacatggtagagcagatgatgcaacttaac

SEQ ID NO: 26699 - DNA, 322 bp, Zea mays
  Clone ID: LIB3180-005-P2-M1-C3
tcttttttcgccacaggcaacaccacccgccgaggcgacccgacaggcgtcaggaggaaggaattaacttactgccagccagtgaagggggagaagtgtactgctccgtcatccattgcgcgcaccgaccggcagggcttgtcattttgtcgacgaccagtggattaattggcatggcgggttttgccacttcagaccttgtagcaacccccgtccgacttggcgttccggacgcgttctcattacgaccaagttgccaacttggacaacaatggtttggacattttaacctacaaaccattgttacgcaacaggaacaaca

SEQ ID NO: 26700 - DNA, 74 bp, Zea mays
  Clone ID: LIB3180-005-P2-M1-C4
tctgaccattagctttatctacttcagagcgcagaagaacccgatcgacaccatgagggtgttgctcgttgccc

SEQ ID NO: 26701 - DNA, 236 bp, Zea mays
  Clone ID: LIB3180-005-P2-M1-C5
gcaaagggtctccattgcttggttcagtttccttccgatcatgtttttagttccatcaatcaagcaatggagacatgcttgtgcttcatgcttggcagcatcgtgtttggggttttcactgagcagtactggttaatttttatggactgaaaagactcagatttgtgaatattcgtcactgtgaccaattcctgtggtggtttatgtgatttgcagattgcaaggggtagtgtatc

SEQ ID NO: 26702 - DNA, 363 bp, Zea mays
  Clone ID: LIB3180-005-P2-M1-C6
tcggtcggagccaaacccttcccagcagccgtcgtcgccaccgctgcagcgcggaggcgaccccccatcggcggcaagatgcagatcttcgtgaagaccctgacggggaaaaccatcacgttggaggtggagtcctcggacaccatcgacaacgtgaaggccaagattcaggacaaggagggcattccgccggaccagcagcggctcatcttcgccggcaagcaactcgaggacgggcggacccttgccgactacaacattcagaaggagtccacccttcacctggtgcttcggcttcgaggtggcgccaagaagcgcaagaagaagacgttcaccaagcccaagaagatcaagcaccagccc

SEQ ID NO: 26703 - DNA, 244 bp, Zea mays
  Clone ID: LIB3180-005-P2-M1-C7
tcggttctagatcgcgagcgggcggccttttttttttttttttaacaaaaaattaatttaccggtgaaaaggagtttaacaatgtcttgccatggatgaatgatgattcaaatttgttcacgcctattggtacaagcttacgcttcaaaagtacaattgaaaggtcggtcttttttggcaattccaaggctttgtaaaaagggcattaaaaggaaggccgggagagcttttacaaatggatggg

SEQ ID NO: 26704 - DNA, 229 bp, Zea mays
  Clone ID: LIB3180-005-P2-M1-C9
tcttttttagactatgtcacccgactcgtcagacgtgagccagcagttcgaaaccaaggatcgatccatgagctttcggaaggcgaggcgcgcgcgcagcgtctaggtgctggtgccggttccgtccatggattgggctcgaggatccgcgtttctgcctagcgtgctgatcgcaggatccttgtttgcgttttcagattactaagaggggaccaataagcttggggcc

SEQ ID NO: 26705 - DNA, 339 bp, Zea mays
  Clone ID: LIB3180-005-P2-M1-D10
gtggtgttcaaccttcgccggcttcttcaccggcagttgcaaatggtccgcggccaatgattccaccgccacctaacttcacttctggagcacccccaccacgcccttcaatgcatggttttcctgggcaacaacagcagtagttaagtgcttagcaatgttccagtaattgacagtcggcaaaagtttcacgcttgcttgtgttgccttatgttttccaactcgaaactttgaatggtgtcataggcttacatggtctctagactatactcaaatttggtcaaattgcaagaaattgagttacatcaaaatattagggtccaaggaaggagaccattt

SEQ ID NO: 26706 - DNA, 299 bp, Zea mays
  Clone ID: LIB3180-005-P2-M1-D11
cttgtttaccattcctccccaaaacacatcctgcgatcctcgaagcctccgccgagcatcgatcatgtcggcctactgcggcaagtacgcggatgagctcatcaagaatgctgcctacatcggcacccctggcaagggtatccttgctgctgatgagtcaactggcaccattggcaagcgcctttccagcatcaatgtcgagaacgtggaggagaaccggcgggctctccgtgagctcctgttctgctgccctggtgccctccagtacatcagcggtgtgatcctcttcgaggagaccc

SEQ ID NO: 26707 - DNA, 360 bp, Zea mays
  Clone ID: LIB3180-005-P2-M1-D3
tcggtggaatcaagagtgcagattgatgggaagtgtatgaccagtcgtggaccgggaacagccatggagtattctgttattttggttgagcaactatatggaaaggaaaaagcttaagaagttgctgggccaatggttatgcgtcctcagcatggtgtggaattctttatgaaagaggtgaattcaactagttggaatggtggtgaaacaccaaatattcttgttccaatcgcttatgggacagaggagatggaagcaactattattattgacattttgcgttgggcgaaagcaaatgttgtggttgccttcttggaagacaagcttgagattgttgcattcaagaaagtgaagattatt

SEQ ID NO: 26708 - DNA, 302 bp, Zea mays
  Clone ID: LIB3180-005-P2-M1-D4
tcggagcttgcttcaacttcgacccacaaccacgggacggcagtcggcagcaggcagcgtctaacgcaattcccttttgttttgttgcttctaccttcccggccagtattaattacaagcttccactttcgagttttggttgcaacctgttcttctggggtcccatcggaggggggtgaggagattgaaccagattccgcttcctccaggctcgcatttgttgcgcttattcttcttgcggcgcccggccggccagccttggtgggtaccgtggaggatggcctggttaacaatagtgactt

SEQ ID NO: 26709 - DNA, 327 bp, Zea mays
  Clone ID: LIB3180-005-P2-M1-D5
tgttaaatgatgtccttgatcgagcaaagatcgaggctggaaagttagagcttgaagcggtgccttttgacctgcgttctctcatggatgatggtggttccttggtttcttcaaagtcaccggagaagtgcattgagcttgcagtatttgtatgtgacaatgttccaaaggttggtattggagatccttggagggttcgacagatattgacaaatttggtcgggaatgcaatcaaattcacagaacgaggtcatgtatttgtgccggtctggttggctgaaaacctaaatgtggaagccaatcaagtcctacattgagccatgaatg

SEQ ID NO: 26710 - DNA, 271 bp, Zea mays
  Clone ID: LIB3180-005-P2-M1-D6
tcgtccggtttcgctggtgctttcgtcgccatctcgcttcggtccccggcggtgctccaagtgggagccaagtcatctctctggccgaagatccaagttgagtcggcgtctccggcagaggcaagagacttcggcgcgatgtcgttggactcggaggcttcctcgcagggtggggacttccggagctttcggcagatcacgcgagatcggttattatttgaaatgctcagatcaactaggaagaattcgaaatcaacatggaagggtctta

SEQ ID NO: 26711 - DNA, 269 bp, Zea mays
  Clone ID: LIB3180-005-P2-M1-D7
ccggttacgctgttcctttagtggacatgtatttactgggcccggcgttggttcaatggtgaacccagttaagttttttgccgaaaaatcaggttaagattggccctccgggacattgaatatacttcggggcgatcatgacggaatatgaagctttttcccaaggtggggacttccgtgaattacggcagatcatatcgagatcggttattatttgaaaagataaaagcaacttgggaggagtgtgaatcaacatggaatggtcttat

SEQ ID NO: 26712 - DNA, 378 bp, Zea mays
  Clone ID: LIB3180-005-P2-M1-D8
tcgagcatacctacttttacctgttgatccaggttgttcttttccaggcaacgcttacattatgctgtccataagggaattccattccacaaatgatgttaagcaaatattccatcatatgttagaatggctgaaacacatccccaaatttgattcttcattcgctcattatgatgttaaacctggtaatggtcctattacctggcgttaaagacaagcacctgttgcaactttaatggattttggaagggcaaagccctccaaaaaggaaattcggtctcgttttaaggaatacaagttcaagaattggccacttagcaattctctttttcttaacgggccccttaattattggacttgcccaagccttcccatttt

SEQ ID NO: 26713 - DNA, 347 bp, Zea mays
  Clone ID: LIB3180-005-P2-M1-D9
gcagtcggctgccgcagactggtagtagccggcgcgccgtcaccgtatcctcagatcagcggcgagcagataccacaccactctactgacgcccgacgagcagtgtaacattttccttcagccatgggtaaggagaagactcacatcaacattgtggtcattggccatgtcgactctggcaagtcgaccaccactggccacctgatctacaagcttggaggtattgacaagcgagtgattgagaggttcgagaaagaggctgccgagatgaacaagcggtcattcaagtatgcgtgggtgcttgacaagctcaaggctgagcgtgagagaggtattacaattgatat

SEQ ID NO: 26714 - DNA, 164 bp, Zea mays
  Clone ID: LIB3180-005-P2-M1-E10
gttatagataggttccggggcgccgttttgcttttcctcgatccacaggtggggccgttcctgcaagggcgcacccatcgtcccgactacgcactgccggccaacgatctacgagctggcatggctaactcagcggcaccgggaggaatgaggtcgttcctgca

SEQ ID NO: 26715 - DNA, 334 bp, Zea mays
  Clone ID: LIB3180-005-P2-M1-E11
tggtgagcctggagtggaaagcttcactggttccgctgttgaatgtgacgaaagcaagaggactcacaaagttgtgaaagatcctagcaaggataatatttcttctgatgctaccaaacatgaattgcctaaggaatgtgcagtggactctactgaacaagcatcagcagtgacttctaacactgatgattcatatgcagcacctctagtaactaatcaagagcagttgctgaaagggtctgcttctgagaaacaagctgtgatgaataactcatccaagaattctgatacttcaacacatttttttgatggcaatgatgtgggcgtgacaact

SEQ ID NO: 26716 - DNA, 354 bp, Zea mays
  Clone ID: LIB3180-005-P2-M1-E12
gcgcgtacgcgtacacagccccgatccgaatcgtccttctcgcgagccttgccgatcccccactccccttcccttgcttcaagatgcagatctttgtgaagaccctcaccggcaagactatcaccctcgaggtggagtcttctgacaccattgacaatgtcaaggctaagatccaggacaaggagggcattccttctgaccagcagcggcttatcttcgccggcaagcagcttgaggacggccgcacacttgctgactacaacatccagaaggagtcaacccttcatttggtgctgcgccttaagggaggcatgcagatctttgtcaagaccttgactggcaagacaatcaccc

SEQ ID NO: 26717 - DNA, 301 bp, Zea mays
  Clone ID: LIB3180-005-P2-M1-E2
tcggaggcagaagacgtgccttcacgggaggaccgtctgagcccgagaggccacatcatcaacccaaacaacgagtccaaggcaaggtcaagcgagtttgagataagcagtgaccgaagagaggtggggccgtcatcgaggtttcaggccttacttccagtgagagcacgggagattaccatcttcaagaacccggtttcagttctacgccgggttattccttaccttgcttgctcgatcattgactcaacaagccggtcgaaatatttgggaatccgtgcggggtggggctttattggat

SEQ ID NO: 26718 - DNA, 338 bp, Zea mays
  Clone ID: LIB3180-005-P2-M1-E3
ggttcactcttgggcccacgccttcatggtcaccggcacgacaaccccggcggaatgcttgccagggcttcccgccttggcccgggcaccttcaccccttttcttttcttttcgggcgcgtgccgtagcggctgcggcttccatctattcttttaggcgccggatcgctattactacaaccagaggaaggcgaggcacactggactggtcccccaggtgtacgctggaaaccggcggccctggcttcgaccctttggggctctacgaggaggggtcttattctctggcgcggtcttccctgtctaccttctttggtatcatggcgccggtatttggga

SEQ ID NO: 26719 - DNA, 142 bp, Zea mays
  Clone ID: LIB3180-005-P2-M1-E9
tctgcgatcgatcggcagcgggtccttctggcgcaccttcttcccttcccctccggcggcttcttggaggcttagcttgcggcgtcggcgtgcgcggccggggacagggccgcctaccagaggtccttcttcttcggggacg

SEQ ID NO: 26720 - DNA, 274 bp, Zea mays
  Clone ID: LIB3180-005-P2-M1-F1
tctttttattctttcttcgtgggcaacaagggagcacttttaagggtttcgggccggttcgtggcctgttactcgttataactcgtcttcggtgcctttttttttgtagttgagcatgcttgagaatttggttctagttatttgcatttctgagcgtttccttgcacgttattttctaccccttttgtgaattgtgtttttttttcttcctttttttacctgttacattttcttttctattatcaattttttcttttctacactttttttattt

SEQ ID NO: 26721 - DNA, 264 bp, Zea mays
  Clone ID: LIB3180-005-P2-M1-F11
gctagagtttcctgcatccgccttcggcccccaccggcttcacctgcggcccccaccgtcccggcccacagtaggaaggatggaagccccgggcttcccctacgccttcttgccggaatccgcccccaagcgtgccccacgctccccttcgcagcagcagcagtctccctccgaggaaggagatgacaaggagaaaccaacacatttgagatttctagtggctaatacggcagcagggtgcatcattggcaagggtggatcaac

SEQ ID NO: 26722 - DNA, 378 bp, Zea mays
  Clone ID: LIB3180-005-P2-M1-F12
gccttctgcgccttcatttcggcctctgtcccttgcaagttcaatctcaccttcaaccatgggtaaagagaagtcccacatcaacattgtggttattggccatgtcgactctggcaagtcgaccaccacaggacaccttatctacaagcttggaggcattgacaagcgtgtgatcgagaggttcgagaaggaggctgctgaaatgaacaagcggtccttcaagtacgcgtgggtgctcgacaagctcaaggctgagcgtgagagaggtatcaccattgatatcgctctgtggaagtttgagaccaccaagtactactgcacggtcattgatgcccctggacaccgtgacttcatcaagaacatgatcactggtacctt

SEQ ID NO: 26723 - DNA, 387 bp, Zea mays
  Clone ID: LIB3180-005-P2-M1-F2
gagaaattccccatcgatctcggtcttcttttttcttccttttttggggcatggatcgcgccggcgcattggcggccggcgtggaggaacccgtcagggccaccttcgttcttgacaggcttggcgcggaggtgcttgcggtcatgtccccggtcttcatctgcatggccctcgtcgtgctccttattttccttcttttgccggcggtctacgggttcgcggcgggttcgcccccgtcagttatcggtgtcacaattgtttaccttgtggtcccttacctactcctggtcctaaagcttctttttgagcttttttgtctccttcttatatttttccttttttactgtttaacctttcattcattttattgttttaatttttctgcta

SEQ ID NO: 26724 - DNA, 310 bp, Zea mays
  Clone ID: LIB3180-005-P2-M1-F3
tcggtatctatccccttgccttacctaacaatctcgcgaatccaaagagtgtgagaggcggttcgctaaaccatcgacgggaaagaagacgattctaaaccccgaagcccaagaatcatgggcgtcaacgcttaaccctacttgttcaccaccggcaaaccgtccaccccctgcggccaccggtcggcgttcggcccgttccccttcattttcgttcgcgccggcgtcgtattcccccgggcccggtacttaatctattggcttttcggcggcgggaacgcgttcttcaacaccgttcggcttcctgcgc

SEQ ID NO: 26725 - DNA, 103 bp, Zea mays
  Clone ID: LIB3180-005-P2-M1-F5
cttcttttttcaaacccatcatcgttctaccaacaacccatcattggtggtgcccgggggtagaattcttattcattatagttccaaaaaaaaaactttacct

SEQ ID NO: 26726 - DNA, 280 bp, Zea mays
  Clone ID: LIB3180-005-P2-M1-F6
gggttttgctgctcttcgaccccgagcttcgaaggccgcaacatcaggcgagggccccctcgcgtgtgaccgagatggcgcttccgaatcaagggaccgttgattaccccagcttcaagctcgtcatcgtcggcgatggtggaactggtaaaactacatttgtgaagaggcatctcactggagaggttgagaagaaatatgaaccaaccattggtgtggaagttcattcgttggattttaacactaactgtggttagaacaggttttactgctgggatac

SEQ ID NO: 26727 - DNA, 264 bp, Zea mays
  Clone ID: LIB3180-005-P2-M1-F9
ttttccgtctagcgagaccgataggcgaggcgagccaccgcggcggcggttgcagccattgtgtccattacgatcggtgccaatttcaagaccacgttcaatgtcccctgtacccctttcattcttcgcattaacggttataggtttacctttaccccttattatccacaatcttcattttaatttaactctatctttttgaatcgttataccatatatgtttctgttctttttaaaagtatgtaattcaatcttttttttatt

SEQ ID NO: 26728 - DNA, 373 bp, Zea mays
  Clone ID: LIB3180-005-P2-M1-G1
tcgtcttggcggtgccgccgcagatggaagtctgcgaccaactgcggtcggttggagccacaagcgtttaccggcttgatggcacctgcagcggcgccggagccacttaccttgacccggtccggcttcttaacgcgttctaccagcgtttccggattgtcccttctgcgtactacttccgaagcttcgggccccaacatcaggaaggcgagccagagatcgagcggcccgagaaaaggaggaaacgcaagcgtaatcagaagccgaagcccaaggagctcaatccaatggagcggatcgctgaagcccggcaccaggaagcgaagcctttactattggacgcacatgaattactcggttaggcttaacattt

SEQ ID NO: 26729 - DNA, 282 bp, Zea mays
  Clone ID: LIB3180-005-P2-M1-G10
ggaggaccaagagggtcttaaatttgtcatgctcagccaattcaaagaccaatgaatccccttccttcaggttgtggtgcattgcaaagccccttcatccaccacttagaccaggtcggtttccaatattgacagcgtcaaatctgcgacgggggcatcggcttcgtgctccgctactttcccaaggcgttcaagccccgcccccgtccaggccacgaggtggacgaccttgccaaccttatcaagctctacccggactggcacttccgcctgatcccctac

SEQ ID NO: 26730 - DNA, 341 bp, Zea mays
  Clone ID: LIB3180-005-P2-M1-G11
tcggcacaccacaccttctcgcttccactccggtcgtctgacatctcgtcccgtcctttcgtttcgaagcctcgcgagccccgacgatggccaccgccgcggtgtcggtcgacgagaagctcgacaagcttcgcgccgaggtcgccaagctcgaccagatcagcgagaacgagaagtccgggttcatcagcctcgtgtcacgctacctcagtggggaagcggagcagatcgagtggagcaagatccagacccctaccgatgaggtggtggtgccctacgataccgtcgcgtcgccttccgaagatctcgaggagaccaaaaagctgctggataagcctcgt

SEQ ID NO: 26731 - DNA, 347 bp, Zea mays
  Clone ID: LIB3180-005-P2-M1-G12
atgtatgcatctaagtttggagttgatgaaactaagatgatggagaggctatggggtgagaacttctttgaccctgccacaaagaagtggaccaccaagaacacaggttctcctacctgcaagagaggatttggtcagttctgctattagccaatcaagcaaatcatcaagacctgcatgaatgaccagaaggagaaattatggcccatgctgcaaaagctcaatgttaccatgaaggctgatgagaaggagttgattggcaaagctttgattaaacgtgttatgcaaacgtggctttcaactagcactggtctgcttgagatgatgatattccacctttctttccc

SEQ ID NO: 26732 - DNA, 295 bp, Zea mays
  Clone ID: LIB3180-005-P2-M1-G2
cagagataggcgtcttcgtactcgcctaccttcgcgggttaaaccttttccccttcttccaatttccggcggcggttcattccgtaacgcgacaccatgagggagtgcatttcgatccacattggccaggccggtattcaggtcggaaacgcgtgctgggagctgtactggcttgagcatggcattcaggctgacggtcagatgcccggtgacaagaccattgggggaggtgatggtgctttcaacacctttttcagtgagaccggggcttggaagcacgttccctgtgctgttt

SEQ ID NO: 26733 - DNA, 332 bp, Zea mays
  Clone ID: LIB3180-005-P2-M1-G3
aggtgattcactcccagagcaataagctcggctcatttgctcatgggtttacatactctggtcatccagttgcctgtgcagtggcaatagaagctttgaaactttaccgcgaaagggatattcctggtcatgtcaagcaaatcgctccaaagttccaggacggaattagggcgttggcagacagcccaatcatcggggagatacgtggcttagggatgattatgggaaccgaattcaccaacaacaaatcaccgactgatctattccctggcgaatgggggggtggtgccatctttggggaggagtgccagaagcgcggcatgcttgtcaag

SEQ ID NO: 26734 - DNA, 232 bp, Zea mays
  Clone ID: LIB3180-005-P2-M1-G4
ttgttctactgctagcaccagaccgctgtcttcttgagcacattgagggcttcggatttctcccggggtggcccctcgccacaccccaaaaatgcgtatacaagccacccctgaccggccttttcttgtcatgtcaagccaattgctccaaagtttcaggaccttaacagggcgttacccaaccagccaatcatctgggagattccttgcttaatgggtaatttttgctacc

SEQ ID NO: 26735 - DNA, 53 bp, Zea mays
  Clone ID: LIB3180-005-P2-M1-G5
agccttcttgtttttaatactaacacaagaacaaaaaaggggggagctcaaaa

SEQ ID NO: 26736 - DNA, 323 bp, Zea mays
  Clone ID: LIB3180-005-P2-M1-G6
tcggaaggccctggagagcgagaacgttgacttggtgaagatcaacaaccgggtgcatgacaccccctgcgtcgtggtcaccttcaagtacgggtggagcgccaacatggagaagatcattcaggcgcagaccctttcggacttgagcaagcaagcgtacattcgcggcaagagggtgctcgagatcaaccccaggcaccccatcattaaggagcttcgcgacaaggtcgcccaggacaacctgagcgaggagcttaagcacacggcgaggcttgtgttccaaaccgccctgattgagagcgggtttaaccttcccgacccca

SEQ ID NO: 26737 - DNA, 302 bp, Zea mays
  Clone ID: LIB3180-005-P2-M1-G9
tcgcagcaagcagccgttcccccaaaaaaggccagagctcatcagagccccgcaggccgcacccaccagaaaccccagtcgatcggcggcggcgatgtcgctgtcctcggtgaagatcggcgaggaggtttggcttacatgccttttccacgcccttacttccgagaccgaggaggtcatgggccttctcctcggcgacattgagcttttcagcaagggcgccaccggccttatattgggagcgtcttcgcagatgaggtgcgagcgggttaatgtcccgtttgaggttaaccctgagcttt

SEQ ID NO: 26738 - DNA, 283 bp, Zea mays
  Clone ID: LIB3180-005-P2-M1-H1
atcgaagctgtcaggatgtccaagcgcgccggatggggagtgatggcaagccacaagagtggcgagacaaaagacaccttcattggtgacctctcaattggcctgtctacgggccaaatcaagacgggagcttcttgccggtctgagcgcctggccaaatacaaccagctgctcaagatcgaggaagagctcggtgatgccgcggtctacgccggagcaaagttcaaggcaccagtggagccctactaagaaaggaagagggttggagtggtttttttgtgga

SEQ ID NO: 26739 - DNA, 277 bp, Zea mays
  Clone ID: LIB3180-005-P2-M1-H10
atatactgcgtctctatgattatttttattatcaggaacatctcttcattggcactgaattactacgtgcaaacctttatgagtttcagaaatataatcagcagtctggtgatgaggtgtacttttcactgcccagaatacaggctatagctcaacaatgtttggaggctttggtgtacttgcatcatctaaacataggtcactgtgatctgaaaccagagaatatccctctgaagagctacagcagatgtgaaatcaaagtcattgatcttggaag

SEQ ID NO: 26740 - DNA, 349 bp, Zea mays
  Clone ID: LIB3180-005-P2-M1-H11
tgatcttaagaaacaactcgaagatgctcggtcaaaaggcattgatgttagggccttggtggttatcaatccaagaaatccgactgggcaggttcttgctgaagacaaccaatatgatatagtgaaattctgtaaaaatgagggccttgttcttctagctgatgagggatatcaagagaacatctatgttgacaacaagaaatttaactctttcaagaagattgcaagatccatgggataccgcgaggatgatcttcctctagtattatttcagtctgtctccaaaggatactatggagagtgtggttaaaggagaggttacatggagattactggcttcaaggcttcc

SEQ ID NO: 26741 - DNA, 338 bp, Zea mays
  Clone ID: LIB3180-005-P2-M1-H12
gcagcctgcgttctacgaagcgttcggcctgactgtgatcgagtccatgacgtgcggtctgccaacgatcgcgacctgccatggtggccctgctgagatcatcgtggacggggtatctggcctgcacattgacccttaccacagcgacaaggccgcggatatcctggtcaacttctttgacaaatgcaagggagatccgagctactgggacaagatctcacaaggcggcctgcagagaatctatgagaagtacacctggaagctctactccgagaggctgatgacccttgccggcgtgtacgggttctggaagtacgtgagcaacctggagaggcgcg

SEQ ID NO: 26742 - DNA, 194 bp, Zea mays
  Clone ID: LIB3180-005-P2-M1-H2
cttggtgcgggggggccaagccttggcttttcggaccctggcatcgaagaagggcctatccttcccggtcggcggcgcgggccggccgttggcggcggcggcgtctgctaggggggtgtccactggtacactccccgtccttttctacgtcttgggcgcgcctgaacccggcctatgggggggggtcattgctc

SEQ ID NO: 26743 - DNA, 387 bp, Zea mays
  Clone ID: LIB3180-005-P2-M1-H3
attgacaacatcaattctttgatgtcagagttagtagtggagagagaagcgctgcttcgagcactgagaattgagtcatccaactgctccaagctgaaggagttgaataaggacctaacacaaaagctggagattcagacacagaggcttgaactattgacttctcaaaggatggctaacgagaatgccctggcaaaaccaattgacacacgctccatcaatgatgcaacaatgtatgcagatgaaggagatggggttggtgaacgggtgcttggctggataatgaagctcttcccaggagggccaaagcggcgaaccagcaaacttctgtaatgaaaatagagctcctagtataccaaatggttctttcatttaaggcttggttag

SEQ ID NO: 26744 - DNA, 263 bp, Zea mays
  Clone ID: LIB3180-005-P2-M1-H4
ggctatcgcagcaggcattttacctttattacccttgttccttcaacaaccgggaggcctattacagcagttacctttggtgcatttgttgggacaaaacattaaggcacaacaactacaacaacttgtgcttggaaaccctggtggctacttttaacaacagcagtttctttcattcaaccaaatggctgcattggaccctgcttgttatttgcaacaacaacttccatttaacaaggaagctggtgactacccccagcaat

SEQ ID NO: 26745 - DNA, 283 bp, Zea mays
  unsure at all n locations
  Clone ID: LIB3180-005-P2-M1-H5
tacttttattaaacttactatttcgttttttggctaccacgaacaacggttgctggcaccttcattatctatcccttacctttttttcattccatatttttttttcatatatcccattttgtattattaaattctttaaaaattaaggccttgttcttctaacttattaggtatattaagagaacatctatttttacntcnagaatattaactccttcaagaaaattgcaagatccattggataccgcgaggattatctttnnttaattatatattaattctt

SEQ ID NO: 26746 - DNA, 234 bp, Zea mays
  Clone ID: LIB3180-005-P2-M1-H6
tcgacagaacagcctttcaactgaaaacggttcaacgaatgtggatagcttactaagcgaaaataattcttctaacccaacagttggtcatgagactttgtctatgggggagatcccttcttcttttgatcccggaatttctgtaccgacccatagtcctgaatattctgtagagagacagaccaaccaaacttatggatctcacccacatgtgaaacggagttatttttgggg

SEQ ID NO: 26747 - DNA, 141 bp, Zea mays
  Clone ID: LIB3180-005-P2-M1-H7
gaaagccttccccctgcaagttacccttccctaattcccttttccacccacccttcttttttaacatacttttaacttaaaacgggtgatctatatatgagtgcggacccctccaaaattattctctttacccaacatttt

SEQ ID NO: 26748 - DNA, 273 bp, Zea mays
  Clone ID: LIB3180-005-P2-M1-H9
ataatgatctgcataggttaatttgatgggacctaataggttaccctaggttgtctatctttataccttgtttaccactgaactttttgggtagtacttgctagtgctttatgtggttttgggtatgaagatacattattcatgatcacacttttattatctggttattatcactggtcatgataagatcattatgttaattggaacatggagaaccacccggtaaaacaatgcttccacaagggtttaatgggacgcccttggccgatttat

SEQ ID NO: 26749 - DNA, 161 bp, Zea mays
  Clone ID: LIB3180-007-P2-M1-A10
tcgttcttcttccccttcggttcgggttcgggttcgtgagggtcttcggggttcggtttcgtgggtgagccgatcgagattgccgcgtcggatgttgagtaccggtgctttgtcggcgggcttgcctgggccacggacgaccacttccttcacaacgcctt

SEQ ID NO: 26750 - DNA, 262 bp, Zea mays
  Clone ID: LIB3180-007-P2-M1-A11
tctgttctagatcgcgagcgggcgccctttttttttttttttttttttttatggcatcaaaaaaacatagtgcaagattaaattaaaaaccattctaattgaacagttgttgacaggacccttaacaacatgataaaagcaaacccaaaataccccttggcaaaagaaataaaggtgctctattataacgaaattattccagttcaacaaaatatatcaaatggtaaaggtttattatcttgccagacattcattttttttt

SEQ ID NO: 26751 - DNA, 202 bp, Zea mays
  Clone ID: LIB3180-007-P2-M1-A12
tcggttccttccgcggactaggtttttctgaagattcggtgatggcggccaccatccaatccgagaaggcgcgccagatctttgacaggcgcggcaaccctacagaccaggtcgacccggtttgcttagaccgaacctttgcaagggcagctgttcccagtggagccttaactggtgtatatgaagctcttgaggtgaggga

SEQ ID NO: 26752 - DNA, 262 bp, Zea mays
  Clone ID: LIB3180-007-P2-M1-A2
ccatgcgttgtcttccacaggattgaacattttgtacaccaaaccattggcttttccacccgcggcaggcgaaacgggggagggaggtgcgccaccgactgccccccacctgctgagccccggctgaagatctacgagcagcttattctgaggcaggaacaagatgggtgccagcggctcgatgaccggaaaggggcgggagaagcaagaacagctcgcccgagctaacggtggcgccgcgatgcagctgttgtcggttgag

SEQ ID NO: 26753 - DNA, 74 bp, Zea mays
  unsure at all n locations
  Clone ID: LIB3180-007-P2-M1-A4
tatanntagcggtacaaaaaacgtgggggattttttcttttaagccaccgggttgttctagccggccttttttt

SEQ ID NO: 26754 - DNA, 273 bp, Zea mays
  Clone ID: LIB3180-007-P2-M1-A5
aagtgtaacgggtgactcctcgcgtctttgaggagcgtgcgaccttaccggcggcgtccatgcccccaccctggccttggcccctagcttacaccatatgtgtctagcggcttctgctggtttgtcgggccacccggcttcttccccaaacttttgaccacttcattcccaaacatttgcattgtgacgtcggcgcccttaatgtcgcacaactgtcatttggcaccgtactgtgagacgacgaccccttcggcctttccgacttttcggctt

SEQ ID NO: 26755 - DNA, 237 bp, Zea mays
  Clone ID: LIB3180-007-P2-M1-A6
tcgtgtgctttggactggacgacttcttccccatgtaccactacctggctacctacccagcccatcgactggcccttggaacgcaatggcgcttggcaccaacttcggcggtggcgcagcagctggcgtattcggcggggcgggattccaggcggaccgggcggtcacgtttcttccgttgaagaggggcaccattttcggcattcacgccggcgacccgtttaagaacaacgggcc

SEQ ID NO: 26756 - DNA, 374 bp, Zea mays
  Clone ID: LIB3180-007-P2-M1-A7
ttgcttccttctgcttgcaaattctgtagacaccaccatttggttttctatccgggacaggagaaaaggggagagagaggtgaggccccgtatcccccccatctgctctgccccgacgcaactgttaccaccttctcagtctcaatcaggaacaagatgggtgccggccgcaggatgaccgagaaggagccggagaagcaagagcagcttgcccgagctaccggtggcgccccgatgcaacggtcgccggtggtgaaaccttcgtttactttgggtcagggccagaatgtccacccgccacactttttcaagcgctcggtgcttaaggccttctcgtacgttgtccaagacccggtgatcgcccaggcgcttct

SEQ ID NO: 26757 - DNA, 315 bp, Zea mays
  Clone ID: LIB3180-007-P2-M1-A8
tttgttccttcttcctgcaaatcctgcagacaccaccggtcggttttcttttcgggacaggagaaaaggggagagagaggtgaggccccgtgtccccccgatctggtctggcccgacgcagctggtacgaccttcttagtcttagtcaggagcaagatgggtgccggcggcaggatgacccagaaggagccggagaagcaagaacaacttgcccgagctaccggtggcgccgcgatgcaacggtcgcccgtggagaagccttcggtcactctgggtcagatcaagaagggcattccgccacactggtttgagcgc

SEQ ID NO: 26758 - DNA, 317 bp, Zea mays
  Clone ID: LIB3180-007-P2-M1-A9
tctaagcgagcgagggaccccgggcggaagaagagagagaagacctcttttttcttttggcgttcccgttccccaacctttcgtctgctgcctgcctgcctgcctgccttcaaaaaggagtttgtcatggcgtttaagcgcattcttaaggagctgaaggacctgcagaaagacccccccacattatgcagtgcaggtcctgctggtgaggacatgtttcattggcaagcaacaattattggaccacctgacagtccctatgctgtgggtgttttcttagtgaacattcattttccggcagattaccccttcaaacc

SEQ ID NO: 26759 - DNA, 253 bp, Zea mays
  Clone ID: LIB3180-007-P2-M1-B1
tcggagctaataaggtttttataccggcggctgggcgggttggcctgccgcccgaattttgctccgggcgtaaaaaacaccggacctgtcccgtggctttcaaccgaacttggaacggagacacaattcgcggttgatggaatcctgtaggggattgagggacatgcttgagtctacaccgcagtactcagtgtttggacggcaagggggggcatggaaaacaagcaatggacaattattttgccaccagaca

SEQ ID NO: 26760 - DNA, 204 bp, Zea mays
  Clone ID: LIB3180-007-P2-M1-B10
tcgggtctttagaccattagctttatttacttcagagcgcagaagaacccgatcgacaccattagggtggtggttggtggccttgcttttctgggttttggttggagggccaacttcaagcattccaagggggggttggggttgcaagcaaccgcggccggttaatttacggccgcgggggcatttgcaacttccggttaactt

SEQ ID NO: 26761 - DNA, 255 bp, Zea mays
  Clone ID: LIB3180-007-P2-M1-B12
tcggctttggtcggttcttgggacccttgatcccgagcgtggttaattcacgcattgaccggcgaacgccaccgtattccattttgaataccttcgcgcttagcgtcatggacgggtttttcaaaacgatcggggggggtgggcctaacgttccggcgggatcccaccccgcgggcgggagccaggccgcggcagggggaggcgccacccaacggacgcaatattccgatgtgactggtacttcaggcattggct

SEQ ID NO: 26762 - DNA, 421 bp, Zea mays
  Clone ID: LIB3180-007-P2-M1-B2
ttttagaaaccccggttgggtacccttggtcttgagtggcggcctccctttggaaattttgctggtggccccacttacaatggaacaactggtggataccaaactatcccaattattgatccggataggggggaaccggtttcagagataacaaatttcattgagcttgaacctgaaaatgaagttatcttttacgatactgattctgagtacaatggcatggattagtattcaagtgaaggggaacagggtattattagggggggatctttcaggaccttatattccaggggggaaaatggtgccaattaccctggatgggcttaatttccgccgtccaggagaaaggaggaaaaatttgggggttgacctggtaccttaattgggccgggaggcatttaggaaaggattttgggatgat

SEQ ID NO: 26763 - DNA, 367 bp, Zea mays
  Clone ID: LIB3180-007-P2-M1-B3
tcgtcccggccgacacgccgggccggccgtgcgtttccttttgtcttcgcttgcttcctttcgaaaggccttgcgtcacactcggcgatcgatcgagtctttccggatttcagagaggcccaactggcgaagccatcaatcgccgccaccttttcgagcagaattgttgataaaggctgacgaggatatccagcctatcgtatgggacaatggcactggaatggtcaagggcggtttcgctggggatgacacgccaagagctgtcgtgcccagcaatgggggaagaccacgccacaccgaatttatggccggtatccgccaaaaggatgtctacgtcggtgaagaggctcaggccaagaaaggcaag

SEQ ID NO: 26764 - DNA, 220 bp, Zea mays
  Clone ID: LIB3180-007-P2-M1-B5
ccttctctttttaattcaataataagcaatctaaaagggggcccctctaattgtgtttttgttttttctttattttctactcttattatttctttttcttacactctgcttttttctatttcttttatttcttttattttcttttttttgtttttctttttcacttgttttttttatttctcatttttccattcttctttttttttatcattttttcttt

SEQ ID NO: 26765 - DNA, 459 bp, Zea mays
  Clone ID: LIB3180-007-P2-M1-B6
tcgtctttaacgactagattggctagagagatcgcgatcgtggtagctgctggcttgtgatcgagacgagcaatggcgttcaaggcgtttgcgctggtcctggccgtgaacctggtggtgctgggcgtagccagcgcctgcttgccctactggccgaccccgaccccgacccccttgacgccgacgacgcccacgcccacgcctgttttgtgtggctggtgcccccgtgacgcgctcaagcttggcgtgtgcgccaacctgctttgccttattaaggcgaaggtgggttttccttttctttatcattttattttactgttttctatattatcttacttctttattatatttttatattttatatctttttttctatcttttaatttaattcttttctatttttattaattttttatcttatttttactatttcatatatatataaatgttcttttttat

SEQ ID NO: 26766 - DNA, 408 bp, Zea mays
  Clone ID: LIB3180-007-P2-M1-B7
ttttagaaaccccggttgggtaccctgggtctcgagtggcggcctacctgtggaaattttgctggtggcctcacttacaatggaacaactggtggattccaaactatcccagttattgaaacggattggggggaaccggtttcagagataacaaatttcattgagcttgaacctgaaaatgaagttatctcttacgatactgattctgggtacaatggcatggattagtattcaagtgaaggagaacaggatattattagtggtgattcttcaggtacttcatattcgagtggagaaattgatgcagataaccctgatagtgctcatctccgccgatcaagaagaaaggagaaaaaatcttgggctgatcttgttacttcatctggtcggcgagtcattaggaaaaga

SEQ ID NO: 26767 - DNA, 233 bp, Zea mays
  Clone ID: LIB3180-007-P2-M1-B8
ttttagaaaccccggttgggtacccttggtcttgagtggcggcctccctttgtaaattttgctggtggccccacttacaatgcaacaactggtgaataccaaactattccaattattgatccggataggtgggaaccggtttcagagataacagatttcattgagcttgaacctgaaaatgaagttatctcttaccatactgattctgagtacaatggcatggattagtattc

SEQ ID NO: 26768 - DNA, 70 bp, Zea mays
  Clone ID: LIB3180-007-P2-M1-B9
cgtcgtctagaacgcgagcggccgcccctgggtttgaattgcctgcccccgacggaaacattggacctgc

SEQ ID NO: 26769 - DNA, 294 bp, Zea mays
  Clone ID: LIB3180-007-P2-M1-C1
tcgtgtaacttgcgtgggtctcttcctgcgacggaagcaaacactggccgagacataaacagcgggacgtcgagatggcccaccgggaggacgcccgcgtccctcccccacggacctgtatcacaaactaccggaagaagctgcttaactggaaggaggttgaatcgggcgtcggccctcggagggaaagctcttaaaacggcaaagaagggtttttccaaggctttggacgagttaaaagctgttgagagcggggggctaattagtggcgaagtactccgacctgttgataat

SEQ ID NO: 26770 - DNA, 220 bp, Zea mays
  Clone ID: LIB3180-007-P2-M1-C10
tcgggcacttattcccaggttcgcctacaggacccacgcctaccaagcgcgggagcagggggagcacgagagcctgcaccgggacatgatggtcggcttcggcaagtggagctggagcccgctggagctggaggacccggttcccgacggcgacggcaaggtgcacctgtggcaccgcgccgaggaccttattgtgcccgtggggctgtcgagggccctt

SEQ ID NO: 26771 - DNA, 351 bp, Zea mays
  Clone ID: LIB3180-007-P2-M1-C11
tcttggacgcctgggttggggctaccgaactagcattagttgagagaagatggtgggggtaatatataatggggtttgggtggcctggatcagttcattacgaaaaatgctacacttacttatgggaatgaaactttcccttgctcaattagatcaatgaatttttccgtctttctctgttgtgcgtgttgcttttcaatgcaaggttgtctttttccttatcaagctagttttaagtttttagcgcataacatagtcttattctaatgttctttgttcaatggaagaattttgttaggatatttttttttgaacttgtagacctctaatttgagattttgctttatgatt

SEQ ID NO: 26772 - DNA, 286 bp, Zea mays
  Clone ID: LIB3180-007-P2-M1-C12
tcgtaacacgctggttcgtcttcatcttcaaatctcaaattacctatccttttcgtcgaatcagaaaccctaaccttaccggaccacgggctacgagccggaatgaccacattagccgccgacgatggcagctctttggcgcctaccattaccgagggagaaaccacagccgacgccggtgctggggcaggtgttgagtgcgtcgagggcaaagagattaagggtggggccgggggttcagttgaggagccggataaggaggtggcgcgggaggaggattctggtg

SEQ ID NO: 26773 - DNA, 394 bp, Zea mays
  Clone ID: LIB3180-007-P2-M1-C2
cttttcttggtactggtatcaggatgggaaaggagccagatttggttggggatggtccttgtagtaacactggtgctattggtggtttggaacaactgatcacaaagaatgctacactcactaatgagaaggatactggcccttggccaatcagaagaatgaaagtcttcggctcttctgttgggcgtgttgctgctcaatgcaagggtgacttttaccttcccaagctagtccaagggttgaagcgtctagcaaagtccgatcctatgggtctctgtacaatggaagaattttgtgagcatattattgcttgagcttgtgagctttatcttgagatttgcctgaaggatcttcaagaggacttcatgggtggtgcttaaaatattggtttccc

SEQ ID NO: 26774 - DNA, 469 bp, Zea mays
  Clone ID: LIB3180-007-P2-M1-C3
ctaaagtggaggaaggacgccggctggaccgccccggcagaattggcgggacccaccacgcctttctatcttacggttgtctgcccgggaaaggagccagaattcgttggggatgtttcctgtgggaacactggtgctatgggtgggctggatcagatcattaccaagaatgctacacttactaatgagaaggggactggcccttggccaattagagcaatgaaattcttccgcttttctggtgggcctggtgcttgtcaacgccagggtgccttttacccttccaagcttggcgaaaggttgaaacggtttaccaaagtccatcctattggtttcttggcaaaggaagaaatttgtgagcatattaatggttgagcttgggagccttaatttgagaattggctggaggaacttcaagagggcctcattggtggggcttaaaatattggtttcccacccggcggtttct

SEQ ID NO: 26775 - DNA, 159 bp, Zea mays
  Clone ID: LIB3180-007-P2-M1-C6
tcggttactctttactaggcctctggttctctggaatggggggggggactttctttttcacctaacttggcattgggcggaaaaacctaaaacccggccccttcggaggcacaggcggcaacttcgggttctttcccggcacgcaaaattcattgcttg

SEQ ID NO: 26776 - DNA, 309 bp, Zea mays
  Clone ID: LIB3180-007-P2-M1-C7
ttttaatgatccggtaacctggtagggaataagcaagggtcagttgccgattgtccgggttgtaacacttgctctattgattgtctggagcccatgattaccaacaatgctactcttactaatgagaatgaaactgcctcttgcccaattacaacaattaaattgttccggtcttctttttggcttgttgcatatcaatgcaagggtgacttttggcttcttaaagtaggttacaggttgaaagcgctatgaacggtttggacttagggtactcggaaaaggggacaattttgacggcatttcttttgt

SEQ ID NO: 26777 - DNA, 233 bp, Zea mays
  Clone ID: LIB3180-007-P2-M1-C8
tcttagcgtactggtatctggatgggaaagaagcaagagtcggttgaggatgttccgtgtggtaacactgttgctatggttggtctggatcagttcatcacgaagaatgctacacttacttatgagaaggagactgacgcttgcccaatcagagcaatgaaattcttcggctcttctggtgtgcgtgttgctgttcaatgcaaggttgccttttacctttccaagctagtcca

SEQ ID NO: 26778 - DNA, 334 bp, Zea mays
  Clone ID: LIB3180-007-P2-M1-C9
tctgacattgagaccggctggccgaccccgggccggcgatccctttgcacccctttctttgcgctgccagccccaatctttcgcattcctgtcaaccatggcggcgttagcaggcggaggcgcggtgcgcgcgctgtcccagaaggagcaggacatacagatgatgctcgcggccgacgttcaccttgggaccaagaactgcgattttcagatggagcggtatggctttaagcgtcgtaccgaccgcatttacattatcaaccctggcaagacatgggataagcttcagcttggggcgagggttattgttggcattgggaacccacaagacatt

SEQ ID NO: 26779 - DNA, 203 bp, Zea mays
  Clone ID: LIB3180-007-P2-M1-D1
cattgcgaccacagacagtgcgcgctctaagggcttttttttttgagataacaaggaggagaggaggagattgccgtcactatcacctgggtgaaggctaggcaaatcttctacaggcggggcaaccccaccgtcgaggtggacgtgggccttaacgaccgcaggtaccccaggggggccgtacccagcggcgcattcactgg

SEQ ID NO: 26780 - DNA, 400 bp, Zea mays
  Clone ID: LIB3180-007-P2-M1-D10
ttttgttacacttcgtcggttgccaactcgcgcgcaacatgggccgttcgaccggcccccttcacacttccgccctgtcttcttctcccttcgcagaggccgaggttggacctttactggatcaaaagggcttttctgctgctgccccttaataccatgcgcccgcgcccgggcccgggccgtaaaagtggaagcttgaggaagcagggtttcacaccttcgaatactacaagatcctggccgctgtccccgatttgtgtattcggttcaggcatggtcaccaagctactgatttgctgaacacttgatcttcaccttagaatttgagaggtatattaatgaaaccctattatgatctggtaggatgacaattgtttttcaattgaatggattccagcca

SEQ ID NO: 26781 - DNA, 409 bp, Zea mays
  Clone ID: LIB3180-007-P2-M1-D11
tctatctgcgtacaccggcttcctttttctgtcagtagtagagtgagagtgaggcaaccagtgggacacaaggggaaattgggaagggagcccaagggaaccattctgccgcttgccggccgcaaagtggatgaaaacattgctgccttgcttgctgccaagaacacccttaagatcatgcccttcaagcttccgcccgtcggaccttattatgtcccctttcgcattaaagcaattcggatttgcggcagcgatgtgcactacctaatggagatgctcattgagcactctgttgtgaaagaaccgattgtgaaccggcacaatttcccgggcttttaataagacgttttccccctcttgtcggacctcaacctgtgctcacttgaagggattcaagccaacattagct

SEQ ID NO: 26782 - DNA, 244 bp, Zea mays
  unsure at all n locations
  Clone ID: LIB3180-007-P2-M1-D12
tcggcacttaccagtcaccagtccagcaagcaacaacaaaggcgtaggaggaagcttggtttggaccgagcaagcgagccaacccagcgtgggagagagagaaagaggaattaattgatgggcgaggaggccagcttcgacgccgtcaggctgaccgaggccggcaccaacgccaagccggtgggcaagggggctttcttnatccttattctacccctttctattttacacaatccttactttt

SEQ ID NO: 26783 - DNA, 230 bp, Zea mays
  Clone ID: LIB3180-007-P2-M1-D5
tatgatctaaatgtttggggcaaaagctggattcatcatacctaaaaacaggctggccggttaattcgtaatccggggccccagggccaggaatgaaaccccaactgtttccaacgaaattggcagcaggcttgttaccagaaggccaaagggggggcctgaccttgctttggaccctttcgggggcaaaggaagggttttggcctaccagactcgggtggggcaaattt

SEQ ID NO: 26784 - DNA, 98 bp, Zea mays
  Clone ID: LIB3180-007-P2-M1-D6
gtttctctgtcgggcgttaccgggaggcccgtacatggtgcagtgcttggaatgttgttcgtcaccttcgtcagggtccacactgtaagggtggaaaa

SEQ ID NO: 26785 - DNA, 398 bp, Zea mays
  Clone ID: LIB3180-007-P2-M1-D7
tttggctacactagctcgtttcccaacgcggacccaacatgggcggtgcaaccggccccttcgacactggccccccggcttcttcttccttggcagaagccgcggctgcacctgtactggatcaaaagggcttttctgctggtgccccttaacccgatgcgcccgcgcccgcgcccgggccgaagaagcggaagctcgaggaagcggggtttcacaccttccaatactacaagatccgtgccggcgtcgccgatctgcgtgttcggttcgtccaagttcaccaagctactgattttcgcaacaccgatgctgcacctgagaatattagagggatattaatgaaacctatttctggcttggtaggaagaccattggtggccaaatgaaaggattcgagc

SEQ ID NO: 26786 - DNA, 220 bp, Zea mays
  unsure at all n locations
  Clone ID: LIB3180-007-P2-M1-D8
ttggcttacactcgctcggttcccaacgcgcacccaacatgggcggttcgaccggcgccgtcgacactggcggcccggcttcttcttccttggcagaggccgcggctggacctgtactggatcaaaagggcttttctgctggtggcccttaggccgatgcgcccgcgcccgcgcccgngccgaagaagcggaagctcgaggaagcggggtttcacacctt

SEQ ID NO: 26787 - DNA, 412 bp, Zea mays
  Clone ID: LIB3180-007-P2-M1-D9
ttgtgttctcgctcaccttgtccgaactcgggagctacatctgccttccctttggacagcttcagccttcaaccatttttccccacctgtacacaagtacaaagcttggcactttgcaggttgcaattgcatgctctttggcccctcgcgcttaccggtggcccgccttccgacttggcgcctacgactagcttctggctttacaatggccttcatgcttggcattcttaaggcctcggcgccgggcccgcttgcgggacgcccggccaaggctggccagccagctaccggtagggtggccctatttaccaaatcttggtatttgtcaggcatggtggtgctaggcttccaaggttcagtgggcccccaaccgctctttaatttatataaattcaaccacgatttgctattt

SEQ ID NO: 26788 - DNA, 401 bp, Zea mays
  unsure at all n locations
  Clone ID: LIB3180-007-P2-M1-E1
catcctactgccgacggcttatgtggtnctgacgggtacgcttccactgtggtccctttggatgcgaggataatttaagcctttagccatgggtttggagaagtgccaaatttggaattttgctgtttgcaatcgtatttttttttggtgctccagcttaccgtttgcccgccttccgacttggcccctataactagcttctggatttacaatgggctccaatcttcccattcttaaggccttggggccgggccccgttgttggaagtctgttcagggctgttcagccagctaccggtatggtggtcctttttaccagatcttggtttttgataggcattgtaatgatacccttttatgttttagtaggattacaatcgcttttcaaattatattaatcca

SEQ ID NO: 26789 - DNA, 358 bp, Zea mays
  Clone ID: LIB3180-007-P2-M1-E10
tcgagaccaacttgcaacatagaaagcacaatagtgtaccaacaatggcagccaaaatattttgccttcttatgctccttggtctttctgcaagggctggtaccgcgaccatttttccgaaatgctcgcaagcttctatagctttccttctttccccgtacctttcaccagcggggtcttcggtatgtgaaaacccaattctttaaccctacaggatccaacaggcaatcacaggtggcatcttacctttatcacccttggtccttcaacaatcatcaggcctattacatcaggtacctttggtgcatttattggcacaaaacattaaggcacaacaactacaacaacttgtgctagc

SEQ ID NO: 26790 - DNA, 344 bp, Zea mays
  Clone ID: LIB3180-007-P2-M1-E11
tcttcctagcccggcccccatgggccatcccttcttcgccttcaacaagcacaagcgcaagcgggggctcaagcccaagggggttgcctccttccccgaccggttcttccccttttccttggccgggcccggttctgctgggccccccggccccaagcctggacgtcattagttccccgccggcgcggacgccacgcggtcgccgatcccgaaccgacgaggggaggccaaaccggttgcaaacagaagccatttggttgcatacgccgaaacagggcccgccagcttggattacgttgtgaggggttttgcatgcatttacccctctgtttagtggacctggg

SEQ ID NO: 26791 - DNA, 214 bp, Zea mays
  Clone ID: LIB3180-007-P2-M1-E3
tttcaattaataatggcttttgaaggaatggccttttttccgggccgtcggattcccccttggtttccgtgaggggcaaaatttcaaacccggggaggcctttttaggagctgggggcgggcctccccaaaccgttggatttttttttattaggcaacttgttcaaggccccaccgttaaagaggagggttggccaaattgcaggggacccttg

SEQ ID NO: 26792 - DNA, 307 bp, Zea mays
  Clone ID: LIB3180-007-P2-M1-E4
tcggtgccagggccggctggtcaacagatttttggcctgcgctgtcacttcaccacgctgcttgtactgaaagcttttttccagaataaaagctggggaggaggaagcggccgccgctgcgctcaaaaaagagggtgagatgaagactctgagctcaacgagaggggagcctgggcgttttggaaatgcggcttttttggcgctcatgctctgtttcggtgtcgcgcttttccttattcgggggggattcgccccattggagatgccattaaattcgagggcgacgcttcggtggttgctcttaggg

SEQ ID NO: 26793 - DNA, 259 bp, Zea mays
  Clone ID: LIB3180-007-P2-M1-E5
cttttgccggtgacccaaaaaattggttgacaaccggggatccgggcggggggttaaccatgtttaagtaggaaccgctgttcctgttgcttgaccttgtgaggttcgggtccgaccaattggggtaatattggccctttggggccatggttttttttggggggggtccatgccgaagggggacctgtttgcccgcttccgttggctgggggaacaacggaaccgggtttgtagcctgccggggccaaaagaagaactg

SEQ ID NO: 26794 - DNA, 284 bp, Zea mays
  Clone ID: LIB3180-007-P2-M1-E6
tcgaagcggcagtgcgtagagaggatcgtcgaacagaacagcatgaagatggtcatcggtctcgtcgtgtgcctggctctgtcagctggcagcgcctttgcaatgcaaatgccctgcccctgcgcggggctgcagggcttgtaccgcgcttgcgcccgcctgaccaccattattggcgcccgcgggctgtacccctaccccgaggtcctgaggcagtcccaatgcaacccgttggccgtgggtccctactactcctggtgttggtagaccagctccattgtcca

SEQ ID NO: 26795 - DNA, 87 bp, Zea mays
  Clone ID: LIB3180-007-P2-M1-E7
tttgtgccagcttccctttggaagaatgagggggccattagttaggaatgtgggaacctgttaaaacctaaacctttttctcaaaat

SEQ ID NO: 26796 - DNA, 258 bp, Zea mays
  Clone ID: LIB3180-007-P2-M1-E8
tctttgacgctgggaggcgctgcctttctgtatggcttgctaaaaggcggggactggttgggcttctaccgctgccgggccttggcgaccttttgtccgcgaataggtacgacatgtaaaagactaaccgcccgccagtacccttgctgatggccactatccacaaacctgaggacgcccttcagctaggcgaaccattaaacgatgatcggaaaatgacgatcctgacgtatactgatgtattcctcaaaagggcag

SEQ ID NO: 26797 - DNA, 399 bp, Zea mays
  unsure at all n locations
  Clone ID: LIB3180-007-P2-M1-E9
tgctgccgctgggaggcgtcttgcctgtggtggatgtcatgctaaaagggccgcgactggttgggctttctaccgctgccccggcccttggcgacctttttgtccgcgaataggttccgacatgtacaagggacttcactgctcccccaataccccatgcttatggccacttatccacaaacctgagaacgtcttctagctaggcgaaccattaaatgatgactctgtaaaaggacttatacctgaaagaattacatgatcttattaccttcaaaaggtgcagggtacacgtaaaatccttagcctaggttatggatcanattagtgcaccaaaagcttaactttgggaaaatggtattgccaaatgtggatctctttaaccttggacttgttttccca

SEQ ID NO: 26798 - DNA, 303 bp, Zea mays
  Clone ID: LIB3180-007-P2-M1-F10
tcggcggtcttccccattccaaacgggcgtgttcgtcacttcttaacttcgacctttacggggcccacggggcccgacgcttggcgggtttacttaatggaccatgggctttttttcggcactggcggcggtctttccaacttttggaacctttcgagcccattccgcttggagggttcgggcccatgcaccccggagaatcgtggcgttctggttggccccttccgacctcgtggtgacccccgagccaggaaaggacccccggcttattttcgcgcttgaaaagcataatgtacacccttt

SEQ ID NO: 26799 - DNA, 307 bp, Zea mays
  Clone ID: LIB3180-007-P2-M1-F11
tcggccaagtgccacccccgccatggcaaggacatggcatgcttgcttatgtaccggggtgatgtggttcccaaggaccttaacccttctttggccacaatcaaaaccaaacccaccattcaattcggggactggtgcccgacttggttcaagtgcgggatcaactaccaggcttccaacgttgttcccggcggggaccttgccaaggtgcaacgttccctgttccttatcttcaacttcaccagtggtgtggagggttttttccgcattgaccacaagttcgacctcatgtaccccaagcgcgcct

SEQ ID NO: 26800 - DNA, 144 bp, Zea mays
  Clone ID: LIB3180-007-P2-M1-F12
tcggtcacaagcacccttcgaaacacaaacgcaaagacccgctcacagatcgaaacggaggatgaaggtggagggggcggttaccctactggtgccaccgtcaaaggccatccccccgttcatgccgtgggtttgcgacctttt

SEQ ID NO: 26801 - DNA, 57 bp, Zea mays
  Clone ID: LIB3180-007-P2-M1-F2
cggattccacgaatcgctccctttcaggcattgtcatttatagtagagaaagaccta

SEQ ID NO: 26802 - DNA, 185 bp, Zea mays
  Clone ID: LIB3180-007-P2-M1-F3
gggggacccccatttatttgtcaagcgacgccgcggccttgatcagagtcggaggcgaccaccccaatggcggcggttgccggcggcccagaagggaagggttccttaaaaacaatcttaacttccgaccccaagttccttttaaaagggttaagggggcccaaggcgggcccctttacgggggg

SEQ ID NO: 26803 - DNA, 385 bp, Zea mays
  Clone ID: LIB3180-007-P2-M1-F4
tcggcaacttgcaacatagaaaggacaatagtgtaccaacaatggcagccaaaatattttgcctccttatgctccttgggctttctgcaagggctggtaccgcgaccatttttccacaatgctcacaagcttctatagctttccttctttccccggacctttcaccagcggggtcttcggtatgtgaaaacccaattcttcaaccctataggatccaacaggcaatcgcagctggcattttacctttatcacccttggtccttcaacaatcattagccctattacagcaggtacctttggtgcatttattggcacaaaacattagggcacaacaactacaacaacttgggctagcaaaccttggtggctacttttagcaacaaca

SEQ ID NO: 26804 - DNA, 388 bp, Zea mays
  Clone ID: LIB3180-007-P2-M1-F5
attagatccaacagataaaggacgatggctctccacaaggtaattcaaaatcataagacttcttaagcttcctagcctctctacaagagcttatttggcgaccagtttctggcaaggctccccaggtgggaacgcttccctttttgccccgcacctcttaccaattgtgtagccggcatgtgaaaacccaagtcttcaaccctattggctccaacaggccatcgcagcttgcatagtacctttatcacccttggtccttcaacaaccaatagccctattacagcagttacctttggtgcatttaatggcacaaaacatcttggcacaacaactaccacaacctgtgctaggaaaccttgctgtccacttttaacaacaacaggttctt

SEQ ID NO: 26805 - DNA, 297 bp, Zea mays
  Clone ID: LIB3180-007-P2-M1-F6
tcgcagtacttctcttcccggtccctggatgccacccacaacgttttgatccggcccgatcggaacttcggaccgggcttctggtcttagatacacactggcaactcaatatcaaaatattcataccattcaaccgcagcatggggatggtagtaaacagcagtgcagtttcggtcttcattgcgctggttggcggcgttattgcgggaggagtaattaccaagggtggactgggacgacgaccaacaggcggaggcaacaacccaggaccaacaacccggaacgacgttgacaccg

SEQ ID NO: 26806 - DNA, 71 bp, Zea mays
  Clone ID: LIB3180-007-P2-M1-F7
cttctttaaacttcaatatacaatccatggaggccttccaaaaagtattaaatcaacattatttcttactt

SEQ ID NO: 26807 - DNA, 322 bp, Zea mays
  Clone ID: LIB3180-007-P2-M1-F8
tcgtgcacctgacatgtacaaacatgccagtagagaagattgaccatgccttggaaaccattaaattcaatgggattcaaaatgttttggcccttaaaggggatccttcacatgggcaagacaaatttgtgcaagttgaaggcggatttgcttgggctcttgatttggtgcagcatattagagccaagtacggtgattattttggcataactgtagctggttattcagaggcacacccttgtgcgatacaaggcgagggaggtgcttcattggaagccttatgcaatgatcttgcgtacttgtagagaaaggttgatgcttt

SEQ ID NO: 26808 - DNA, 201 bp, Zea mays
  Clone ID: LIB3180-007-P2-M1-F9
tcggccatggcgctttttgtggagaagaccttgtctggaccggagtacaaggtcaaggatcttttgcaggcggacttcggtcgccttgagattgagctggccgaggtcgaaatgcccggccttatggcgtgccgcgcccagttcggcccgttcaagccctttgccggcgctaggatcttgggggctttttacatgacccat

SEQ ID NO: 26809 - DNA, 204 bp, Zea mays
  Clone ID: LIB3180-007-P2-M1-G1
tcgcttagttctacggcggcgatacccccctgcacttcccaccctgttacccccacaaaataagttctgcggcggcgatggcgcttttcttcttccgggcgaagcaccttctgtgccccattctgcgggggttccacgccttaacgcgggcccttgcgcgggtggagccgcacgagtttttcaaggccagcgagttcctgggca

SEQ ID NO: 26810 - DNA, 334 bp, Zea mays
  Clone ID: LIB3180-007-P2-M1-G10
tcggtctttacgcacgaacacaggacgcgccggaccccggttttttttttctgggttcccatctgcggcggggagtgagcacattgaggacgggctacttcttgttcgcgtgcgggtcggcccgagcgatccggcaaccatgaacattttcaagaagaaggtcgaccccaaagaggctcttaggaccaggaaacgtgaaatggcggtcgccaccccgggagttgagagagagattggctccctgcaaatggaggagaaaaggctggttgcagagataaagaagactgccaagactggaaatgaggcttcaaccaaaatattagctcggcaactt

SEQ ID NO: 26811 - DNA, 134 bp, Zea mays
  Clone ID: LIB3180-007-P2-M1-G12
tcggcggcattgatcttggtttaaaatcaatcaatcttggtttcttcgggccggaagattttaaacccatgggccagaataaaatcgggatcaaatgggttcggaggattcggaaggttgggggccaggtgggc

SEQ ID NO: 26812 - DNA, 188 bp, Zea mays
  Clone ID: LIB3180-007-P2-M1-G2
tcggcagtcatggcggcttccctgttccttcttcttctgctgctggctatgttcacaggctcagacgcggcgttctgcgtgtgcaagacgggcgtgcccgaccaggcgatgcaagcggcgatcgactacgcctgcgccaagggggccgactgcgccttcggcttcaaaggcgcgccctgctacggcaa

SEQ ID NO: 26813 - DNA, 396 bp, Zea mays
  Clone ID: LIB3180-007-P2-M1-G4
tcgagttgtcctcactggcaggcttcaagacaacttctttggcaggtttgctctgggttggctgatcaccaacggggctggtcttgcatcttaccccaatgatactggccgcagaaggatgatgatgacttctggtgaggctggcaaggacaagagcttcttggacgcattccaacagatccttaagaaggaaggccccaagtccctggtcaagggtgcttgtgctaacattcttcgggccaatgctggcgcttgtgtgctttctggctaccaccaggttcagaatcttttctttggaaagaaagaccggttccgcggtgcttaaatggagaaaaatgattaccaacaagagcagttcgcttccggttcaagccaatcaggatctgggcaaggttt

SEQ ID NO: 26814 - DNA, 415 bp, Zea mays
  Clone ID: LIB3180-007-P2-M1-G5
gtgccacttattttgctagctcagataattttccaagttcttcaaattggatgcaatttctggatggcttgggcagcaccaatatctgaaaatgtgaatcctccaatcagtagtttgcagatggtaaatgtgtactttgcattagcaattggtagctcattgtgatttttcattcgatcacatcttcttggcatgaacggatgtaagactgcttatattctatttgagaacatgcacaactgcattttccgagcaccaatgtctttctttgacttcacacctagtgggcgaatcttgaacagagctttcacagatcaaagcacagtggatacaagaatttttgacctgatgggctatcttctatttcctgctattgagattctaggaacaggtattctgatgtcacatgttgcat

SEQ ID NO: 26815 - DNA, 122 bp, Zea mays
  Clone ID: LIB3180-007-P2-M1-G6
tcgacgggagtgtgcactactgtgacaatttggagaaaattaaatcaaggggcgagctctacaaatgtcgacaccttgtctgcaagggttttccgctgtcttattccttcggacacgcttcc

SEQ ID NO: 26816 - DNA, 332 bp, Zea mays
  Clone ID: LIB3180-007-P2-M1-G7
tcgtaacctgcaacccttgccgcgacacgacgacgcctttaaacttagggggctggttcaagctataaagctcaagagtcagggcggcatgtccacagaaacagacacctttgccttttaagctgagatcaacccgaaactcttactaatcaacaacaccctttatcgcaacacggttaatttttaaggggaagttatttcccactttttcgatgcgttggacgcaaattagtttttttagcctctcttactagatctagcttatcgggcattcggcgctttttatacacattgtaccaaacaaagttttgaatacactttttattatttac

SEQ ID NO: 26817 - DNA, 241 bp, Zea mays
  Clone ID: LIB3180-007-P2-M1-G8
tcttgcgagcgggcggcctttttttttttttttttttaaggcccaagggggacctttttacaattacccggcaggttttcgcaaaacatgcattaattaattagggaaaaaacatttacacaagaacccaaaccaaaaaaaaacaaaaggctactggtcccctttatctactggaaaagagcgggatctggattaatgtggaggccggagcacctatattattaggggttcagataggttc

SEQ ID NO: 26818 - DNA, 77 bp, Zea mays
  Clone ID: LIB3180-007-P2-M1-G9
tcgggtcaatttacattggcggcaagcctggccttagaacttttcgtgcggccaaagctaatccataacaatattgc

SEQ ID NO: 26819 - DNA, 186 bp, Zea mays
  Clone ID: LIB3180-007-P2-M1-H1
tcgcgcgttggattcggttcacaggatcctctgcgccaccgcaaccgtgtgaccggccgtgccgccggcgattccgattcggcgacccgtgccaggcccggtcgcagacatgttgccgtcggagccgacccgggaggagagcgtgtacatgggcaagcttgcggagcaagcggagcggtaccagga

SEQ ID NO: 26820 - DNA, 103 bp, Zea mays
  Clone ID: LIB3180-007-P2-M1-H10
tgtaaaagacaacgcaacccccaaacccaaaaccctaccacggggcccatgggttttgccggcggcggcgccttcttcttctggccgggacccgaactttcga

SEQ ID NO: 26821 - DNA, 324 bp, Zea mays
  Clone ID: LIB3180-007-P2-M1-H11
tcggtgacgcctgggttcaccctgttatttcaagcattacttgaagcttcaaggatccttaaccttaacaacaacccatactttttcggaccataccgggaggacgttggggtcttcttgaacgactggcacaccggccctttttcgtgctaccttaagagcaactaccagtaccaccggatttacagggacgcaaagaccccttttttcattcacaacattttctaccaggggcgggttggcctcttccactaccccgagctgaaccttccggagagattcaaggggttctttgatatcaaggtcctctacctaaaacccctt

SEQ ID NO: 26822 - DNA, 326 bp, Zea mays
  Clone ID: LIB3180-007-P2-M1-H12
tctgtgaggtccaactcgttcttacaggacttcaataattttagccctgctggaaacaaactccaacccggttaaaagtccttcgcatttgaagcatatgccgcgaactgggaccaaccaccagaccttcaaaagcaagacttcttccagcgacctgggctatatcggtagccattattgcaaggggaaaagtcctttgcctcctgggcatattccgcggaatggagcctattaccatcacttggtcatatatcacactattcctttctagtcctaagcatattcgctgaaatgggaagaaccactaccattagggcaaccatctc

SEQ ID NO: 26823 - DNA, 287 bp, Zea mays
  Clone ID: LIB3180-007-P2-M1-H2
cttcgctttagatacaaaatactcttatcaaaccattggggaagacaccaaccttttaatagattaggattaagggtttctttttgaggggttcaagattctttcacaagagaaaaataaaattgtgggttcttttagggaggttaaccgaatttgcctaccttagaggtttggacaatggaatctttgtttgaaatgggtgtaccaacaactttttttttgggtttacaattgggaactttgggttgtttataattttgagaacaactaaatttatacttgatttt

SEQ ID NO: 26824 - DNA, 208 bp, Zea mays
  Clone ID: LIB3180-007-P2-M1-H3
tcggcacaggggtcaggtcagtcgcctaccaaattcaatagcacagcgagagccaagggagaagaagaagcaagcggagcgccatggcggcgttcaacggcgagggccacgggcggttcgacgtgatcgtggtgggcgcgggcattatgggcaggtgcgccggctacgcggcgttctcttgtggcgcgcgcgtgctggttctggagcg

SEQ ID NO: 26825 - DNA, 120 bp, Zea mays
  Clone ID: LIB3180-007-P2-M1-H4
tcggttctagatacgggagcggccggcctttttttttttttttttttaatgggtcatttttttaatgataaggggttttttttgaagattttgaaatctattaaatataaaaaataatat

SEQ ID NO: 26826 - DNA, 312 bp, Zea mays
  Clone ID: LIB3180-007-P2-M1-H5
atctagaagcgccccttttcctctctatctctatttttgacgggcgaagcttcggaccccaatctaatcgacaccttgccgagatggggccccaaggtcttcgtcgggggcaactgggaatgccatggaaccacagatcacgtcgaggagattggcaaaaccctggatggaggacagggttccccttcagatgttgtggagggcggtggcaggccttcctatggcttcctttccgtgggcaagagccagctgcgcccagaggttcatgttgcggctcaaaactggtgggttaagaagggaggggctttcacc

SEQ ID NO: 26827 - DNA, 363 bp, Zea mays
  Clone ID: LIB3180-007-P2-M1-H6
cacccaagcgttttgtcaagagttcttcttggtaggcaaggcaaaagcagaagcaaaaaaagaaaggccttgttgcccatggggagcttagggttcttgtggacgctttcggaccaccccaagcttcccaaggggaaacccgtggctttcgtcctgcttgaccgattgggccaggcccacccccaccagtacaactgcattcatgttgctcaaacttctgtcatggacttgcttaagaatggcgcttctgagaaatggagacttgtgaaggcttatggaacaactgtgggccttccatcttatgatgacatgggcaacaatgaagttggtcacaatgcacttggtgcttgtccaattttcgcc

SEQ ID NO: 26828 - DNA, 352 bp, Zea mays
  Clone ID: LIB3180-007-P2-M1-H7
tcgcaagtagcaacatacattgcgtaagacactggcaacgtgttaactccaatgggagccaagatttttggccttcttggccttcttgatttttcaacaagcggtgataccttgaattttattgcacaatgctcacaacaatacctttatacggtgacagacgagggatttcaatacccaactatgccattctacattgtgcaagaggccatccaagcaagcatcttacgggcaatagcgttaacccttcaacaaccatatgctctattgcaacagccatacttagtgcatatttgttttcaaagaattgggggaccacaacttcaacaacaagtggttacaacaattaatc

SEQ ID NO: 26829 - DNA, 370 bp, Zea mays
  Clone ID: LIB3180-007-P2-M1-H8
tcttttgagaccaactagcaacataaaaagcacaatagtgtaccaacaatggcaggcaaaatattttgcctccttatgctccttggtctttctgcaagggctgctaccgcgaccatttttccacaatgcttacaagctcctatagcttcccttctttccccggacctcttaccagcggtgtctttggtatgtgaaaacccaattcttcaaccctataggatccaacaggcaatcgcagcttgcatcttacctttatcaaccttggtccttcaaccaacaataggcctaataccggaagtaccctttggtgcatttattggcacaaaacattaaggcacaacaaccaccacaacttgtgctagcaaacctt

SEQ ID NO: 26830 - DNA, 215 bp, Zea mays
  Clone ID: LIB3180-007-P2-M1-H9
tcgttacccctaggcgtgacaacaacttcttcctttcttcttttaagcaacgggctggttcaagccggcctcttttttcctcttgttgtccatggcgagcagcaaggtgggagcttttttcttcttccatgggacagcagcaaaataacatggggcagcgggttccttccccaaggttcggcacgcacacgacagcagcaaccagcagatttttc

SEQ ID NO: 26831 - DNA, 168 bp, Zea mays
  Clone ID: LIB3180-008-P2-M1-A10
tcgttcgttaaggttggccaattcaacaaaagggggccttttccaaaaggggggccagcaaccaattttcctttgcccggaaaaagccaacctatacccatttgacaggcctcaaaaacccccgcaagcaaattttcccaaagtccgcacaaatttaaatcccaaaaa

SEQ ID NO: 26832 - DNA, 303 bp, Zea mays
  Clone ID: LIB3180-008-P2-M1-A11
tcgcaactcttttccaaatccaccggcgggtcggctcgcccatcttggggccaagcaccgaatcttcgatggcccgcacgaagcagacggcgcgcaagtcgaccggcggcaaggcgccccgcaagcagctggccaccaaggcggcgcgcaagtcggcgccggcaaccggtggcgtgaagaagccttaccggtttcgccccggcaccgttgcgctccgggagattcgcaagtaccagaagagcacggagctgctcattcgcaagctgtccttccagcgccttgttcgtgagatcgcgcaggatt

SEQ ID NO: 26833 - DNA, 205 bp, Zea mays
  Clone ID: LIB3180-008-P2-M1-A12
tgcctcaaatactgatctcactgatccagggtggctttttcaaaggcaggggcgcgccttgatcttctcggtccaacttttgactttcataccatcactcctctgccatcattgcggctcccctgtttcttcttcttctttctcttgctttttttacaaacttaaaccccccctttttcttttgccttaaaaactttccccccca

SEQ ID NO: 26834 - DNA, 307 bp, Zea mays
  unsure at all n locations
  Clone ID: LIB3180-008-P2-M1-A2
tcgcagggacgtagtcaacgcgagctgatgactcgcgcttactaggcattcctcgttgaagaccaacaattgcaatgatctatccccatcacgatgaaatttcccaagattacccgggcctgtcggccaaggctatatactcgcccacgcgttcggtagcaggagcgcatccagcaagcttaggcccccaggcctactggcaccgngccgaacgccatggccgagccggcagagcaccgtccaacggatgaagaggaggccccggcggcccgcgaggattaagacaccggcgcccaggtcgcgccca

SEQ ID NO: 26835 - DNA, 357 bp, Zea mays
  unsure at all n locations
  Clone ID: LIB3180-008-P2-M1-A5
ttttgcccacccgttttttcctaaatccctaaaaaactaactttagactgtttttatgcagcaagagggaagaaacttgcccctccctagctctcgttggcagcaatggccaccaccggtgcgtccagcctcctaaagttcttcttcgcgggctcccggtttcttnggncacgcgcaccaacaccccgttgttcgtggccgtggccaccccgcgcgccggcggcgggcccattcgggcgttcattttcttccccaacccggcctacgacctgacgttctttcggttcagccccatcaaggagtccatcgtgttccgcgagatgacccggcgctacatgaccgacatgatcacccacg

SEQ ID NO: 26836 - DNA, 51 bp, Zea mays
  Clone ID: LIB3180-008-P2-M1-A6
tttttccccacacgggcacaccaaacccaggtgtccccattgggcgcacac

SEQ ID NO: 26837 - DNA, 100 bp, Zea mays
  Clone ID: LIB3180-008-P2-M1-A7
ccccctgttctttttgtttttagcccattacgatgaaatttcccaagattacccgggcctgtcggccaaggctatatactcgcccacgcgttcggttgca

SEQ ID NO: 26838 - DNA, 298 bp, Zea mays
  Clone ID: LIB3180-008-P2-M1-A9
tcggttctagatcgcgagcggccgcccctttgttttttttttaggaccaagagttcggtttgctccattcccatttcaggtcggcataatagcccgaggacaggcgcttcttataaacgacaggtggataacaaaacccaactacagatggatcgcaacaacaaaacggtgtattgcagcataggccacacaagggaaatccagaaaccacttccgtgaatagttgaccaaaaatacccaattccaggtaccgtgccacaaccaggcccaaaaaacaccatttcattggatccctttg

SEQ ID NO: 26839 - DNA, 274 bp, Zea mays
  Clone ID: LIB3180-008-P2-M1-B10
atctttcggtcaaaaccgggaacacgccccccgtgggttcacccattgagtgaagcccgttaattcctgttgcttccccttgtatgctaccactcccaaatacttcaaagaactttatccatagatccagtaggtagtcttattctacctcatgaagttaggttcaacccttgtcagacttcccttggttccatttctagttttgcgggctaccaccttgtcgggaaggccaccaaccctgactcttacaaatgcccaacccttattgaagctt

SEQ ID NO: 26840 - DNA, 360 bp, Zea mays
  Clone ID: LIB3180-008-P2-M1-B12
accccttcaagtacccttccctaattcccttttcgacccactcctcctggatttcaaagactggacaaattggctggtttattgaaataggatgggcggtaaaaaacctcaacgtttccaaatttacttacaacaataacttcatcattttttcattttttcccactatatacctcaattcttttttttccttactcttctcatacttcaaatctcattcattctcctcatttattatataatattctgtttccttttatattttcaactattactcgtttatttttatccctatttttcttttatattatttttaataataatttttttttaattatctttattttttcatatttataa

SEQ ID NO: 26841 - DNA, 344 bp, Zea mays
  Clone ID: LIB3180-008-P2-M1-B3
tcggcttttttcttcttccttggacagttcacgaggtgaccacatatatacccccacggggccccccacctcgcaatctccttaacccggtcggtttatttggcttcttcttggcaatccgagagcactcggacttccacttggccaaattatggtggattgaccggattgcgggaggccaggcttgaagcttgagatttcttctccggttcgacccggcatgggccgggcttgaccgggcgcttcttggctttttctttttcggcctttttaagcggcttgtcgttggatggagcaagcaccgccaaaccggaagaggaggaggaagatggtcccccgtgatc

SEQ ID NO: 26842 - DNA, 331 bp, Zea mays
  Clone ID: LIB3180-008-P2-M1-B4
tcggtccagggaaactggtgcttcggcccttggcggtaccgacacgcttagggctctggctacaccggcttgcttccttgctttttgaccgtgaccagacacgttggcgagaggccaacccgcttgggattgtgagggaaagcgcgatggctgcatcaccggaaagggcccgagccgactaccactacctcatcaaactggtccttatcggagacagcagagttggaaaaaggtgtctcctgttacgggtctcaaatggatcattcaccactagctttattaccacttttggcattgacttcaagattaagactgtcgaattggaaggcaa

SEQ ID NO: 26843 - DNA, 83 bp, Zea mays
  Clone ID: LIB3180-008-P2-M1-B5
ttgctattcctcccaacaccaccttgcctgggatctccgtagcctccgtcgggtcgagcattgatcatgtcggcctactgggg

SEQ ID NO: 26844 - DNA, 338 bp, Zea mays
  Clone ID: LIB3180-008-P2-M1-B6
tcggtcaccgacgtggtcctccccgcaggcccgaggtctgcaggcggccgcctccacgggtccaggctttcccgatcacgggagggccgtccttcgcccccccctccccccttttaggtttggcctggtgaggactggaggttcatccattccgaccttggtgatttcttctggtggcacttgggtgttcagctcaaaatgaaaggagtgcttccgattaagggggcatcaagccgtgaaaagaaagcgccttaggagctcgagagcgtcttggaccgatatttcgggtattcggggtttcgaggaaaacaacttggagctatcgaagctggtctatc

SEQ ID NO: 26845 - DNA, 221 bp, Zea mays
  Clone ID: LIB3180-008-P2-M1-B8
gtcttccttttgtgtcgtggcgaccactgggggggctttctcatatgcgacctagggcaagttgccaggtcgtattaaggcactttgcccgcgaccaataccacaagttttcaagcagtggacactttctttggtatcaaaaggtcaatggccaattattaatatgacctccatgacattgaccagattgtagatgattattatattgattatcccatttt

SEQ ID NO: 26846 - DNA, 176 bp, Zea mays
  Clone ID: LIB3180-008-P2-M1-B9
gtctagcaaggagagctggtcgtcattgcaggtcccggcggtggcattcccttggaagccaccaagtggcaagaccggcggcctcgagttccctcgccgggcgatgttcgccagcgtcggcctcaacgtgtgcccgggcgttccaacggggcgcgacccgcgggagcccgatccca

SEQ ID NO: 26847 - DNA, 278 bp, Zea mays
  Clone ID: LIB3180-008-P2-M1-C1
tcggcgagcgggcggcctttttttttttttttttgtgtttttttaaaggttgggggaaaaccaaaactttattatgatgcatttttttttgggcataccacacatgataatggggggcggcttactggatttttacattttttgattggggggggtgggttggggggatttcccaaattttatgaatcaatagtagggcggaatggcagcggaaaccccacaggggttggtgcgggtgcttggcaatcctgccccattttccaagcgttcccgcatcg

SEQ ID NO: 26848 - DNA, 235 bp, Zea mays
  Clone ID: LIB3180-008-P2-M1-C10
atctttcggtcaaggcatggggtggcgccaatgggttcttcatgcttcaaatggcaacccttttacccattgattgaacatgaatcacttctgagtgcgaggatgaggaactattatatgccttaagaggaaggtagttgatggaaatggaaatcattagaataggttcaatgacgtgcctgggttcattgattagtcaaatattggtagctgattgaaaagcgtaggggttgga

SEQ ID NO: 26849 - DNA, 143 bp, Zea mays
  Clone ID: LIB3180-008-P2-M1-C11
tgtcgttcggttgatcgcgagcggccggcctttgtttttttttttagtaaaggaggaccgtttattcatttggattgcccttttaagttcgtggtcacacaaacggcgtaatcaatggccttccgtgccattgtttctcttaa

SEQ ID NO: 26850 - DNA, 319 bp, Zea mays
  Clone ID: LIB3180-008-P2-M1-C12
tctgaagtctgacattaacattggctccaatgcttgcttcacaaccaactggcttgctccttttgcttaggtcatcaatgacaaggtcggtatcgttgagggtctgatgaccactgtccatgccatcactggttcccagaagactggtgatgggccctcgtcttaggactggaggggtggaagggctgcttgtttcaacatcattcccagcagcactggagctgcttaggctggtggcaaagtgcttcctgtccttaaccgaaaggtgactggaatggcttttcggtgtccaaccgtcgatgtttttggtggtgatttg

SEQ ID NO: 26851 - DNA, 319 bp, Zea mays
  unsure at all n locations
  Clone ID: LIB3180-008-P2-M1-C2
tcgttctactcttgcaagttgtgccaagaaatgggattnttttaaaacgaggtggttccaccaaaatttgtgatgtggtgtctgcaattggacccttcacttgactggtttggctcgaaaggcccacgaacccttgtcagcaaattactgacattaagacaatctcagagatagcgcattctcatggggctcttgttttggttgacaacagcatcatttcttcagtgctctcccgtcctattgaactgggagcttatatcgtgatgcactccgctaccaaatttatagcgggacatagtgatcttattgcttgaattct

SEQ ID NO: 26852 - DNA, 315 bp, Zea mays
  Clone ID: LIB3180-008-P2-M1-C3
tcgttttcaggaacaatacgctttgttgtctgacggtgttttcacgaccttggattgacaagcaacggggtgcaaaccagctttagcacattcctcgttgcctgagccttatgcattattttacgcagcattcccttggcaattttatgcttctgacatgacccacgcttgaccgaattcgaccgcttatccatgggccggcggccgcgcagcttacttgtattgtacagcatcagcaggcacaatgccgtctgtttaccagaatgcttaccgcgatcaaagcaagcagggtgcgttcaggtcttattgatcttt

SEQ ID NO: 26853 - DNA, 298 bp, Zea mays
  unsure at all n locations
  Clone ID: LIB3180-008-P2-M1-C4
tcggtacactggttccatcggcagaccgcttccatggaggcggccgagtggagcaacccccttgcaagcaggcattgtntttgggcttgtttcgtgggccggatctgggaacgcggcgcttacaggggaatacagtggactacgtcgtcaggtgcaatacttcttgatccagatccaagcgttctttcaactcttgcttctgcattcgtgtggaggggggattcttctggcctttcgagggacttcttttctttaggattgggagatacaacatcaactgatccaatggcgacatata

SEQ ID NO: 26854 - DNA, 278 bp, Zea mays
  unsure at all n locations
  Clone ID: LIB3180-008-P2-M1-C5
ttttccaccacacccggtcgtcgttgtcccggcgtgagccagccagaggggaaaacccaaaacccttgcacccccggcccgttggcgacgggcgncggagtagagagattgccgtggaccaggtgaactcggtctacgttggcgggcttccctacgagggcaacgaggagatgcttcgcgacgccttcgggtacttcgggaccattgtcttcgtcaaggggattaatgatcatgctggcaaaggcaagtgttatgggtttggtactttcactcacccc

SEQ ID NO: 26855 - DNA, 325 bp, Zea mays
  Clone ID: LIB3180-008-P2-M1-C6
tttttctcactgactgactactgtaataccagagatcgtacaacttggtcctgcagctcaagaagagagttttgtgcatttgggggccgggggcaagagagagagagagagagccattgcggcggaccagcagccgcagctgcaggaggagatgaacgacgcttgcggcggcgggcttaagctggcttcagggttccgctttcacccgagcgacttcgagattgtcaggttctaccttaacaacaaggtgcttaacacgcgcttcaactggaccggcattacggagggcgaccttaacaagattgagccattggaccttccgagc

SEQ ID NO: 26856 - DNA, 381 bp, Zea mays
  Clone ID: LIB3180-008-P2-M1-C8
aattccccggtttacccacccctctcttaaaccgaaaggaccgcaaaaaacacgtgctttttatagggggccgcccattaaaattgtttttaataccttctttgaaaaagattaaaattataaatttaaaggcattggaaaccaaaaactccctgattttttttgagaatattaaacaaaaaaaacacctcattcctattgtccctcttggcacccatgttttaaccttttaatattttaaagctcaacttttgactactattaatctttacctcttcatatacaccttgtttatcaatattcaatcatgtatttattttaccttccccattgttcttcttttccctatttgaaatatccacttatttatttttttacaac

SEQ ID NO: 26857 - DNA, 239 bp, Zea mays
  Clone ID: LIB3180-008-P2-M1-C9
tcgaggaagtcggagcgcactgatgttgctatatgtagaggtgagcagctctggccgttcccctatgaccttattcaacgcgaggtggaaagatattcaaatgcccagaaccggtggtggccaaagggggccgttaacatgggagcattcaggttcattaacccgcggttggttaccgcgattaaaggtcttggcccgggtggcattgaagacattaagagccttgggagggccccgtt

SEQ ID NO: 26858 - DNA, 330 bp, Zea mays
  Clone ID: LIB3180-008-P2-M1-D10
tcggtaattgcagggcttgggttgaggcgggggtggattaaccctaggcgggggtttagcttggttggtggctctgattccgtcgtcggcccaattgttcccggaatatagtgaggtgacgaaagctgccattggctattactatgccacgattggattctaagatagtcgctggccgcttccaaatttctagaaccaatttgtgtttaacgagaagcgtgacttttgattaattctttcaccctcttcattggtggtgttttgtccagggagacaagccaacttgtggttgaaagttacccttttcaaaccttcccaaggtttttaaaa

SEQ ID NO: 26859 - DNA, 341 bp, Zea mays
  Clone ID: LIB3180-008-P2-M1-D11
tcggtctcatcctgttgcaccgcaccggtgggtttctttcgtcaactgggctccttttggccgccggattaccttctttttgccggtggcggcaccggttcaccgggcaggcagccaggcatggatgaggagtacgacgtgatcgtgcttggcacggggctcaaggagtgcatcctcagtggtcttctttccgtcgacggccttaaggttttgcatatgggcagaaacgactactatggaggagattccacctcgctcaaccttaatcagctctagaagaggtttagaggggaagacaagcccccagcacatctaggtgcaagcagagacttcaatgtgga

SEQ ID NO: 26860 - DNA, 429 bp, Zea mays
  Clone ID: LIB3180-008-P2-M1-D12
tctttcggagcattcagaaacacaccaaggggagggctctttcaacaacctggcgaacaatggctaccaagatattatccctccttgcgcttcttgcgctttttgcgagcgcaacaaatgcgttcattatttcacaatgctcacttgctcctaggtccattattccacaagttcttccaccagttactttaatggccttcgaacacccagctgtgcaagcctataggcttcaacaagcgattgcggcgagcgtttttcaacaaccaattgggcaattgcaacaacaaaacttggcacatctaaccattcaaaccattggaacccatcagctacaacagttcctaacaacactgaagcacctatgcatggcgaaccctgtaaactaccttgcaacagcttctgcttggattcaacccacttttctttgcc

SEQ ID NO: 26861 - DNA, 177 bp, Zea mays
  Clone ID: LIB3180-008-P2-M1-D2
tcggtaggcgcgtccgccgcacgtcgcattggccggccccatcatagcccggaggtgggcttgccgaccttctcgcggtcggcggccttaagtgctgggccgttgcggagacccccccgaacgaggggtgccatcttcttgtttttcttaacggtaccccaaaaaaaccgccgtttg

SEQ ID NO: 26862 - DNA, 302 bp, Zea mays
  Clone ID: LIB3180-008-P2-M1-D3
tcgttctaatcacaaccttgcattcttttctggcgcggccccaagtatttggtcggtgcccttttggccgcccgtttcccccggggccgaggagccgccaatagcaaggagagggtttccttctccctccacggttccaccgagctccccgatcccttcgtcccaaatcccacacacccggttggccaccggctcgctatggatttggatctgtggatctccaaggtcaaggagggtcagcaccttgcggagcacgagcttaagtccctttgcgaattttggaaggaaatcctaatcgaaaa

SEQ ID NO: 26863 - DNA, 211 bp, Zea mays
  Clone ID: LIB3180-008-P2-M1-D6
gcctgcaggtacggtccggatttccggttgaccacgccgctggatgattcagcacgccggccgttgggaaaggagcttctaggcgggccggcgcggctccttttccggtctgtcttagccaatggcacgggcccttggggcgcgaacgccctaacgtgggtcggggcgggcggcgagcaaaggcgcccgttgctagcttggattctgactt

SEQ ID NO: 26864 - DNA, 403 bp, Zea mays
  Clone ID: LIB3180-008-P2-M1-D9
tttgatcttcatattttcacaacgaaaacgggtcgggttcagtaggaatctggcaaagcagcaggcgaggaggtgtagaccgactccgcgctaagcggcagagcttcaaagtttccagcagcataaaaggaagctacgtcgccaagactagcgtccctcgtccgaagccaggggacagcctgagccagtctgcgacagcgctgcgcggggtcaggaagaacacgaccgctggtgaagttggccatcctgtgagtttgaagccaaacgctgttcgctcggtcgccaaggacccatcatccagcagaggaccacccagggatagcctgagccagtctgcgatagcgctgcctaaacacagaaaggacgccactgctgttaagagcaagacttattattaaccttg

SEQ ID NO: 26865 - DNA, 147 bp, Zea mays
  Clone ID: LIB3180-008-P2-M1-E1
gttggaaacacaatgctggatgattgggttcgcttcttccttggttaaccgggcaaaaattttttccagaagcacctacagtttcttgttaattgcattggagcaccttttcaatttatttcaaagtccttcctggatgaagattta

SEQ ID NO: 26866 - DNA, 137 bp, Zea mays
  Clone ID: LIB3180-008-P2-M1-E10
tcggcattgcaccttaattctccggtttggtggtgctcgaagaaaccacggatctgctgcagaagctgtcgctcgactcgcagcccaaggcggcggtcgcaacacaggctgctggtgccaccgccaaaaagcagggc

SEQ ID NO: 26867 - DNA, 307 bp, Zea mays
  Clone ID: LIB3180-008-P2-M1-E11
tcggcattacctgcgtacgagcagcgggcaaggatcttgtttcgcccggaaggccaccaacccccggggtacacgaggagggtgacaggtgggccattcggggttcgggcgagcccaacttaaaccccgcaccaattcccactttagtactttacacccagcgcacttgagcttgagcccttggccttttcttaaacacaagccttaaatctcaatcacctgcgccggcgctttgttcgtgtggaggggagaaaagaggaaatggcggcgaccgagggcgttcttcttgggattggcaacccccttc

SEQ ID NO: 26868 - DNA, 376 bp, Zea mays
  Clone ID: LIB3180-008-P2-M1-E2
tcgttcagatgccctgcccctgcgcggggctgcagggcttgtaccgggctggcgccggcctgaccaccatgatgggcgccggcgggctgtacccctacgcggagtacctgaggcaggcgcaatgcaacccggttgcgggggcgccctactacgccgggtgtgggcagaccagcgccatgtaccaaccggttcggcaacagtgctgccagcaacagatgaggatgatggacgtgcaatccgtcgcgcaacaactgcagatgatgatgcaacttgagcgtgccggttgcggcagcaacaacctgtacgagccaacttttatgcagcaacaacaagagctgctggcagcccaaggtcttaaccccatggccatgatgat

SEQ ID NO: 26869 - DNA, 345 bp, Zea mays
  Clone ID: LIB3180-008-P2-M1-E4
catatcctaacttgccgccggcggcggttgtcccttgccccatcgggttggcccggttcaaggtgcacgagcttcgggggaagagcaaggcggatcttcaagcgcagcttaaggaggtttaagtgcggagcttcttcctgcttcgcgtagccaatgtcaccggcggtgcttccaacaagctcttcaagatcaaggttgtgcgcaccttcattgcgcgcgtgctgaccgtcatctcgcaaaagcagaagtcggcgcttcgtgaggcgtacaagaagaagaagcttctcccgctcgaccttcggcccaagaagacccgtgccattcggaggcgccttaccaagcacc

SEQ ID NO: 26870 - DNA, 300 bp, Zea mays
  Clone ID: LIB3180-008-P2-M1-E5
tcgggacccaatcgcagtcgccttcaacactatggtgacttcttccactgtcgagcaagaagaccaggagattgctctgccccggcaggaagcggtcgacaacgacgcaacgcaagccattgaaatggtcgcacagactgaagtggtgagcaccgccgaaaagcaacctttggaaaatccggaaacattaccggtcaattggacaattgaaaaccttaacaaggtcaatgagaagaaacactatttaaagggttttggtggtggcggattcaaatggagtgggccgatttttcccaaggg

SEQ ID NO: 26871 - DNA, 228 bp, Zea mays
  Clone ID: LIB3180-008-P2-M1-E9
tcgcgttgatgctggtcttgatttagcatcacatttcataactcgcttgcggggttatgcgagtttctgtcgaactctggcgagccatgtgggaccatcttctaccacaagcacttctagaaatatggttacaagtccaacaaacaggtcttcttcgccatcaaataatcaagggaatcaagggggatcaacatctgcaacagggaactcacaaatgcaagagtgggt

SEQ ID NO: 26872 - DNA, 250 bp, Zea mays
  Clone ID: LIB3180-008-P2-M1-F10
tcggtatttctcgataattagccgggttggtggttctcgaataaaccaggggtcctcttaacaatgtgttactcgacttggatgccaagggggccatcgcaacaaagactgatgcttacaacgacaaaaagctatgcgccgtggcgagccaaccacttagcgcagttatcccgtcggcgccggccattacgccagcggaacaagaattttcggattccaatctgttttatttaccatcgtattactacgg

SEQ ID NO: 26873 - DNA, 355 bp, Zea mays
  Clone ID: LIB3180-008-P2-M1-F11
ctaggtctagatcgcgagcggccggccttttttattattcaagggggagctctaaaacctcacaattaccctaggaagataacacgcccaccaacaccctgttgaaggccacccaataaacaccacagaccaattcaccccaccgatctagaaaaccagtacacataagcttgatccctcgtccaagtaccaaacacaaaccgtaaaatttcaattaatctttccatcctatttctaccgtatttgaatggatgtatattaaataaaatttggtaactttacttaaaatacaaattttttattcataagttccatttatcataaaataataaaaaataacagatactatattaat

SEQ ID NO: 26874 - DNA, 149 bp, Zea mays
  Clone ID: LIB3180-008-P2-M1-F12
tggcacgcctgcaagttcccttcccgaatttccttgtcgacccactcatcctctaactatagatcaccagccgccggcctttttcaataatcagtcaggaccccttattcctacttcttcccctccccagttcttaaacaaacaacctt

SEQ ID NO: 26875 - DNA, 368 bp, Zea mays
  Clone ID: LIB3180-008-P2-M1-F3
tcgtttttgaggatttaaaaacaaaaaaagtgaagcgcgctttcaacaaccctagagctatggttaccaagacattatccataggtgcgcctattgcggttcctatgaacggaacaaatgctggcagtattccacaatgatcacttggtcctagtttaattattgcacaagtcctcccaacaggtactgtaatgggcttccaacaacgagataggcatgacttttggccacaacaagcgactgcggcgcagcgtttacaacaaccgattgggcaaatgcaacaacaattcgtggcacatttaacaatacaaaccattggaacgctacagtcacaacagtttctaccaacactgtggcatctagtcatg

SEQ ID NO: 26876 - DNA, 151 bp, Zea mays
  Clone ID: LIB3180-008-P2-M1-F4
tctgtttccttcggttccctttcccttgtgcgcagtgcgcttcttgagcaccccacacttcagatcttcgaaccccttccacatgccactgcactgagcggcagccagttaccaacttgccacacgccatggcgcaatcctgcaattgggg

SEQ ID NO: 26877 - DNA, 352 bp, Zea mays
  Clone ID: LIB3180-008-P2-M1-F5
ttgtaggcttgcacttataaagttctccaaggggaagggcaccctcatcatcagaaaattcggagacctcgagccaggtaactactggtacaatgtctgcgagggtgaggcaaagcatttgctcagcccattgccctgggtgattcgctggacttcaagcttgatgcacattggtgatgatatcctctcaaggatgcaaccagactttgattcggtccatatcgatgccaaaggtgaggacctgagacagaaggtcgaggaagttcttggtggaaggccgcaagtgtatttttcaagggttggggtcaacaaggcattggttgagtcacttaaagaaaagtgcattgggcat

SEQ ID NO: 26878 - DNA, 368 bp, Zea mays
  Clone ID: LIB3180-008-P2-M1-F6
tcttctctattgctgtctacgcaggtgccaaattccgtgcacctgtggaggcctacttaacgggcgggatgcaagtgcttttatgtctgcacaagtcctgtgaaactggttactgggacctgcagattttactcttggagtgccctgagtagattttagcaataatatccaacatgtaacatgttacggacatgtacccaaacgtgatccagttttaggttatgggctccatgcttgacgttttgtgctgctgtgggtacattgttgcccttctaccttacatagttgtgacggcaattggttcaaaaaaaaaaaaattatttaaaaatattagtattaaattaatatattattaataataataaaat

SEQ ID NO: 26879 - DNA, 281 bp, Zea mays
  Clone ID: LIB3180-008-P2-M1-F9
tcggtttgctgcaagcatatctggatcagaaggatcaattgacctttcctttactggtaccctttccccttctccatcatttgatgccaaggtagttagtaactcaaactcaacacctgctgctagcacagatctttcattggcattggcctcaagtgatagtttaacaccatctttgagtcatgattccaatactgaggtagtggactctagtagcaaaattaatttttcatatgatgaaaaacagaaggtctggatcccacaagataaaaaggatgaaa

SEQ ID NO: 26880 - DNA, 88 bp, Zea mays
  Clone ID: LIB3180-008-P2-M1-G1
ttttcggaatttccaacgcctttgccttaccagccacgttttttggagggcggtcgaccaaacaaaaggtggcaatggcggcggcggc

SEQ ID NO: 26881 - DNA, 260 bp, Zea mays
  Clone ID: LIB3180-008-P2-M1-G10
tcggcggctcgacccattcttcccccctgccgttgcgccagtcaacaggctgtctttctttttcctcggcacccatgggcaccgtagcgcgcacccttgtcggcgcatgtgcggcacgggctcttcttcaccttcggtctcggggccttccgttgttcttttgtattcgtcccgcgcgggaacgtgccggcgtcgggtctggccgctggatggctcggcgaccggattccttctatttccccgttcgttcggggcaaggc

SEQ ID NO: 26882 - DNA, 238 bp, Zea mays
  Clone ID: LIB3180-008-P2-M1-G11
tcggcgaggcaaaagcattgggaccacagacagggcgcgcttcaagggctttttttttgagataacaagggggagaggaggcgaatgcggtcactatcacgtaagcaaaggcgaggcaaaaattcgacaggcggggcaaccccacccccaaggtggacctgggccttaactactgctgcgttcccgaggggggccttacccaacagaacattcaattgcatatatgaaggcctggaat

SEQ ID NO: 26883 - DNA, 331 bp, Zea mays
  Clone ID: LIB3180-008-P2-M1-G2
gttctagatcgggagcgggcggccttttttggtttttttagataagtaggtgattatcaaaatggcattattattaaggaaccggaattacatcacattacaaatgtaccttcagcttggaagggaatgaaaggacaagtgtgacgcacgagcaaatgccaaatcagcgtgaacaggacgggggtaccggtcacctatttataggcacaggacacaggctatgcaaaattacattcatgccctttacatttgataataattctataagaatctatcgagggctgaataggcctttcatctttaaggcggtttcaatttttggtaccacgcc

SEQ ID NO: 26884 - DNA, 287 bp, Zea mays
  Clone ID: LIB3180-008-P2-M1-G4
tcggcaaattccactttcccaggccccaagttcaggttggctattccccttaacagggccgcaagaagatcgcgcttggcccggcgtcttacgaggaggcattgatcggcgccgtggcatttaagaagaggaaggggaggctggaccctggtgaccgggtcttaattaggccgggagccgccagattagcattttccggagggacccctggggcgggccggttgagatattccacgacttggccacggaccacgaccggagcccgaacctggacattgaccggggcg

SEQ ID NO: 26885 - DNA, 351 bp, Zea mays
  Clone ID: LIB3180-008-P2-M1-G5
tcggaagaaagccgggaagcctggtgggaagaagaactggaacatatttacaggattccatggatgatactggaaaccatattaaggccgaggtttttgatttttcaaatccgaggtgattaacacaagaatgctttcggaggaaagacaagtttattggtggattggaattcctgggctgggcctggtggcccttttatgctcctattggtctttggggtaaaccccaagggcatggtacatttcccattggtcctgcgtttggtcaaaagcgtaaacctcttgatggatttggctgtgtttgtcccggcaattttgtttaccaaacttaatgtgagaaatgtttttgct

SEQ ID NO: 26886 - DNA, 316 bp, Zea mays
  Clone ID: LIB3180-008-P2-M1-G6
tttgtgaacattctgaagcagaacaacctggactcggaggggtgcctgttcgacaagcacgcgccgaccgcgcttgccttcgtgacgctcaagcacgaccgggagcgcgaggtcatgttctacaggaacccgagcgcggacatgcttctgaccgaggcggagcttgacctgggcctggtgcggcgcgccaaggtgttccactacgggttcatcttgctcattttcgagccgtgccggtcggcgcacatggccggcatgcgcgcagccaagggcgcgggcgtgctctggttctacgaacccaacgtgcgccttccgg

SEQ ID NO: 26887 - DNA, 222 bp, Zea mays
  unsure at all n locations
  Clone ID: LIB3180-008-P2-M1-G7
cccttctccccgcctcttcctcctctttttttttcanactccaacaaccccccccccccctctccccccctcctctcccccccctcctctctccctttctccccctcccccttccttcccccattcccctacttactccctcccctctcctctttcccccctctccttcctccctcctctctctctcctcccttttcctctcatttcctcccctttccctcc

SEQ ID NO: 26888 - DNA, 238 bp, Zea mays
  Clone ID: LIB3180-008-P2-M1-G8
tttaggacccgtgggtgggtcttcagaccaggggctttatctactgcagaggggagaagaacccgatcgacaccatgagggtgttgctcgttgccctcgctctcctggctctcgctgcgagcgccaccttcacgcatacaagcggcggctgcggctggcaaccaccgccgccggttcatctaccggcggcggtgcatctgccaccttcggttcacctgccaccttcggtgcattttcc

SEQ ID NO: 26889 - DNA, 277 bp, Zea mays
  Clone ID: LIB3180-008-P2-M1-G9
ttttctggtactggcaagactcttatggcacgacaaattggaaaattattggacggaaaagatcccaagattgtgaatggacctgaagttctgagcaaggttgttggagaaaccgagaagaatgtgagagatttgtttgctgatgctgaaaatgagcagaggacacgaggtgatcagagtgacctccatgttattatatttgatgaaattgatgccatctgcaagtctagaggatctacccgggatggtacaggtgtacatgatagcattgttaacc

SEQ ID NO: 26890 - DNA, 94 bp, Zea mays
  Clone ID: LIB3180-008-P2-M1-H1
cgccgccgccgtttgttttcctgggaggtgccggaaccgaggatttggcccaattttaggtagagaatcggttttacttggttaaacccggggt

SEQ ID NO: 26891 - DNA, 231 bp, Zea mays
  Clone ID: LIB3180-008-P2-M1-H10
accggacccccagttcctgccacacccactcgttttcccaccccaccacccacaccggggggaggtttaaacaaaagcagggggcggacccaaacaataccgagaacatggaacaccacccccccgagtgcaaccaaaactagaggattccgaagcacccaatgctaggcctaaattcgccaaccaaaccaaccctaccatacccaacatcccgtccacatggtgaacaag

SEQ ID NO: 26892 - DNA, 186 bp, Zea mays
  Clone ID: LIB3180-008-P2-M1-H11
ttcgttcggcactccctgacattgagaccgggtgcgggaaccaaggtgcggcgatgcctgtggacccctttctttgcgcttgcagccccaatattttgcataaatatcaaacattgtagcttcaacaagcggatgcccagtgcgcacgcttgcccaaaaggagcaggacatacaaatgatgctcgc

SEQ ID NO: 26893 - DNA, 335 bp, Zea mays
  Clone ID: LIB3180-008-P2-M1-H4
tcgacttcattagaactttcaaactatcctcgggttatggattatcttgataatgctacaaccaaagtgatggctgggggtattattcaaaggattatggaaaacacaacctggatatttacttctgacaagattgagggactattcgatttaattaaagggctgattaaggatatggatggagctcaagatgatgagcttgatgaagaagacttttaggagggacaaaactctgtagcgcgtcttattcacatgctggacaatgatgatcctgaagagatgctgaagatcttatgtaccggacagaagcatattcttcaaggaggccccaagcg

SEQ ID NO: 26894 - DNA, 299 bp, Zea mays
  Clone ID: LIB3180-008-P2-M1-H5
tcggcgggccgtacgccaccacggcaacggagaagaggactttcaactgcggcggctggcccgcgcggcgaccgggattggggatgggcgcacaagccgggccaaccgtccggggtggctgcaacaataccaactgattggcaagaatggggaagggacctatgggcttgtctttcttgcgcgccttaaggcgtcccaaccggcaccttgccgacgcgggccccctattggcataaagaagtttaagcagtcaaaggagggggaccgagtatcacccaacgcaatttgagagatcatgc

SEQ ID NO: 26895 - DNA, 265 bp, Zea mays
  Clone ID: LIB3180-008-P2-M1-H6
tttgtcgtagcacccgcaggagagcttttcttcccgggaaacaaggagaccttcggagggctcttcctttcacgagggctgcggctgttggattgtgcttaaagatctcaatttttatcttcaaggaaggattactcatcgcgaatcccgatctgtcggtggtggaaaccggaaaggtgccacttttatgaagcgaggctttgaggaacccgtgtgccttccgtggatgtggtgagcccttattggcgcaccaagccagaagggg

SEQ ID NO: 26896 - DNA, 238 bp, Zea mays
  unsure at all n locations
  Clone ID: LIB3180-008-P2-M1-H7
tgatacaaaacgcggcttgcttcttccgacggttaccttcaatccctgagcatgcaccacttgccattcctttcttatttgtacatttgtgcccattatgtcattaacttcgtaccaaaagtttcctattcctaagttacctattttaccgtatacctgaagattgtaggatggatgttgtgtccgttggttaaaaagtgtnctattggtctaatctgggaaggtacttttgagaggt

SEQ ID NO: 26897 - DNA, 196 bp, Zea mays
  Clone ID: LIB3180-008-P2-M1-H8
agatcgcgagcgggccgcctttttttttttttttagagttaagggccgttgcttcatatattattaaaacctttcatcggtttttttttggtattaaatccattaacctcattgctattttctttatattggtaacttcccccaaattcttcccccattttttcattacttcccttccaaaggatggtcctccccc

SEQ ID NO: 26898 - DNA, 311 bp, Zea mays
  Clone ID: LIB3180-008-P2-M1-H9
ttttccacgcgttcggccacgcgttcggtcctggaaggcgaagcaaagctaccaacgcatacaagagtgagagcagggagcacgagcgctctgagtgagtggaagacgagaggagttcgagtcccccagggctagggtttcattcgccacccgcgccggcctttcctttcccagcattcgtccgccatggtgaggaagaaaagaactggccctggagagaggtctggggaggcttctggagcgcctggtcatggcttcttacagggtccttaagcaacacaacaaggtacccgtggtggagggcaacaaca

SEQ ID NO: 26899 - DNA, 269 bp, Zea mays
  Clone ID: LIB3180-009-P2-M1-A1
tatccgtgttccccccgggcgatcgatcgatcgcgggtaaccttgccggcggcccatcgaggcagccatggcggagatggccgaacggtccgtcgcgggcgagctgccggaggagccgcggccgccgcacggggaggaggacgacgaggaggaagaggagggggacgtgtgccggatctgccgtaaccgcggcgacgaggaccaccctgtgcgctacccgtgcgcctgcagcggaagcatcaaattcgtgcaccaggactggcttcttc

SEQ ID NO: 26900 - DNA, 308 bp, Zea mays
  Clone ID: LIB3180-009-P2-M1-A10
tcggaatgcttcagcgccatcagctgcttgcggagtttgatgccctgtttgatagtgacaaggagaagtatgcaccctttgaagacattcttcgtgctgctcaagaagcaattgtgcttcccccatgggttgcacttgctatcaagccaagggctggtgtctgggattacattcgggtgaatgtaagtgagcttgctttggaggaacttagtggttctgagtacttggcattcaaaggacaacttgtggatggacaattcaacaacaactttgtgcttgagcttgattttgagcccttcaatggcttc

SEQ ID NO: 26901 - DNA, 259 bp, Zea mays
  Clone ID: LIB3180-009-P2-M1-A11
tcggttctagatcgcgagcggccggccttttttttttttttttttttttttgtgggggttaaacaaaaatttgacgggctttaatggccaaattttcacgaaattaccattaccatttgtttaaatccaggaaggggaaccgaaaaaaaaaccctcctcatgataatgtttctgggttttagtttggaaaatgtcaaaacctaaaccctttgggtttgaaaatacactaaaacaattggttaagttattttccttcctt

SEQ ID NO: 26902 - DNA, 346 bp, Zea mays
  Clone ID: LIB3180-009-P2-M1-A12
tcgattttgagcattcagaaacacaccaagcgaagcacattagcaacaacctaacaacaatggctaccaagatattatcccttcttgcgcttcttgcgctttttgcgagcgcaacaaatgcgttcattattccacaatgctcacttgctccaaggtccattattacacagttccttccaccaggtacttcaatgggcttcgaacacccagctgtgcaagcctataggctacaacaagcaattgcggcgagcgtcttacaacaaccaatttcccaggtgcaacaacaatccttggcacatttaacaatacaaaccattgcaacgcaacagcaacaacaatttctacc

SEQ ID NO: 26903 - DNA, 247 bp, Zea mays
  Clone ID: LIB3180-009-P2-M1-A2
ttagggttaggaaagccggctcgccggcccgttccggtactgcagtgtcggcccacgcctccggctttcttcgcctctcgagtctcgtccacccgtcgtcctcctagctcctctactcgccagtcgccatgggcaagattaagatcggaatcaacggcttcggaaggatcggcaggctcgtgggcagggtcgcccttcagagcgaggatgtcgagctcgtcgccgtcaacgaccccttcattaccac

SEQ ID NO: 26904 - DNA, 195 bp, Zea mays
  Clone ID: LIB3180-009-P2-M1-A3
tctgttaaccctaacccgtgcgcttaccttctggtgcccttaggccatggcgtcgtcccctacccccaagaaggtgctggtcccgatcgcgaatgggacggatccgatggaggcggtcattaccatcgacgtgcttccgcgcgcgggggccgattgtcccctcgctttcgtcgagccgggggcgacgttcgtagc

SEQ ID NO: 26905 - DNA, 371 bp, Zea mays
  Clone ID: LIB3180-009-P2-M1-A4
tttcgttaccacgcgggtgctatcgaatcttgggtaggttttcttcgcttgcgggctctcgaatctgacccatttccacggttcgcgtgcgccgttgccgcggatctgcgtgcttgtggcatcgggttccgtggatctagttgcgcggagatggggctcacgttcacgaagctgttcaggcggctattcgccaagaaggagatgaggattctcatggtcggtctcgatgcagctggtaagaccactatcctctacaagctcaagctcggcgagatcgtcaccaccatccccaccattggatttaacgttgaaactgtcgagtacaagaacattagtttcactggttgggatgtcggtggtcaagacaagat

SEQ ID NO: 26906 - DNA, 201 bp, Zea mays
  Clone ID: LIB3180-009-P2-M1-A6
tcgtactgttttaaaccatccccactctttttttttcacccgcgagcggacacactccctgtcctcttggcccgataccggtcccggccggccggcccggcggcgggggcggttgttccgacgcttgggcccctgtgaacccgttggtgccacaaagggggctttgccacaaatggcggttccgggggtttttccggttcc

SEQ ID NO: 26907 - DNA, 171 bp, Zea mays
  Clone ID: LIB3180-009-P2-M1-A7
tcgttgacgcgtgggtaacacttcaccgacggccagatctggttcttctttttttcacggcggcggcggcggcggccttgaattttcgaattcttaggaacaattgggcgggcggcatgggggggatccctcacattcagggggggcagggggggaaccagatcgggggcc

SEQ ID NO: 26908 - DNA, 234 bp, Zea mays
  Clone ID: LIB3180-009-P2-M1-A8
tcgtcccggttcggccgtgtaaaccaaaccccggttcggcggggggggggactgggccaccaggctttttggaacgacgcattcggcaaccatggtggggttgcacaagccaacggaatggggccgggcggcggttcggcaacaagggaggggggaggcggcttcgggggggggtccccccgggggaatgccgtgccccccgggttccccccaagtgttccggatcgaaggggg

SEQ ID NO: 26909 - DNA, 351 bp, Zea mays
  Clone ID: LIB3180-009-P2-M1-B11
tcggtttctttctttcccgccactgcgcagcgcgagtgcggcgacaggcagtcacacacttccacttccttgaccggtcttgggccttgggcccgtccgcgtcgccgcagggcgaggaggcaatggcggcgggcgggaatggcgccggcggggacaccagggcgggcttcgcgcggatctacaagacgctcaaggaggagctggtcaccgacccggccttcgagttcaccgaggagtcacgccagtggatcgaccgcatggttgactacaatgtactcggaggcaagtgtaaccgtgggctctctgtggtcgacaggttcaagctggtcaagggcgctgatgcttttggcg

SEQ ID NO: 26910 - DNA, 389 bp, Zea mays
  Clone ID: LIB3180-009-P2-M1-B12
tcggttagacatagtcaatgcttccgcaaatgccacaccaggacttgggagatattcttcattcaagcgtgagggtgttgcaatagcatcaaatgcattggagaccttcaaaaacgacgccaaaaagatggtcgttgcgcttggtgatattgaacgtgcttttggtccttcccaacatttcattcgcttagtacaaagaagaatggaaagacagcgtccggaggatgaattgagaaatcgatcttctaagaaaacacaagaagcttaacagccaacatctaagagggccttaagttcccaaacagattcttagcaaggtggtggcagcttaaaatcaatgaaagacaaatctggcccgccaggttaagacaccaaagagggatccaatt

SEQ ID NO: 26911 - DNA, 243 bp, Zea mays
  Clone ID: LIB3180-009-P2-M1-B2
tcgtttttcacacacacacacacatgcataatgggtggtacatggtaaaactataggaagctaaggtcgatcgctcgtctatagctagaccactatcaccaagtccaccttcatgggttcttgaccgatagatagaccgaccagaatgaaaaagctagctagctactaaatatatcatcagtagagtgttcaagtggtgatgatggccttcttcttgcccctggtcaccaatgggcttggcca

SEQ ID NO: 26912 - DNA, 392 bp, Zea mays
  Clone ID: LIB3180-009-P2-M1-B4
tctttttttccggcggccagcttctctcttctgtcggcggcgccaccacggcgatcaagcgcgatacgggcgtaaccgaagaatcgacaatgggcggcgagaaggaaacctttgatacgttcgacctcaacgccttccttcccgcgggcggtgcagcccttagcgccgaggaccgggccggcctcgtcaatgcccttaaggataagctgcagagcctggcgggccagcacgccgatgtgttagagacgctgtcgcccaatgttaggaagcgggttgagtttttgagagagatccagagtcaacacgattaaattgaggccaagttttttgaataacgagcttcccttgaggcaaagtaccataagctttatggtcctttattcacaaagagg

SEQ ID NO: 26913 - DNA, 274 bp, Zea mays
  Clone ID: LIB3180-009-P2-M1-B5
ggcttttgagctcgccacggctggaaagggtggtgagtacatcatcccatgtttcaagaacattggcaggtttgtcagtgagtggggaattgacaatttggggaagagggagctattccttgctattaccaccattcttaaagaccacaagggcatggctaaggagtactttaactttcttaataagtaccttgtcacattcaaagggtcagatgatgaatcagctacaattggtgatgcctatgaagaggctgttgcggcaatcatcgagttt

SEQ ID NO: 26914 - DNA, 200 bp, Zea mays
  Clone ID: LIB3180-009-P2-M1-B6
ttttcttttgcttcggctttcgagtcttgtggagccgtttttcttctagcttctgtactcaccagtcaccatgggcaacgatttagatcgctatcaacggcttcggaaggatcggcaggctcgtggccagggtcgcccttcaaatcgaggatgtggaacaccaaggcgggctttccccgatattaaaaacgcctaaaggg

SEQ ID NO: 26915 - DNA, 126 bp, Zea mays
  Clone ID: LIB3180-009-P2-M1-B7
cggtcgcgacttcaaggtcatcacccaccgggagacggggaggtctcgcggcttcgggttccttaccctcttcttcgagaacttcatgcttgaccctatcgagaacatgaaccgcaaggagctcga

SEQ ID NO: 26916 - DNA, 193 bp, Zea mays
  Clone ID: LIB3180-009-P2-M1-B8
tggtataaaacgcgaacggccggccttttggttttttttaaaaattttttggggtttttaaaattttttttttttttttttatttttatatataattatttaattatttttttatttaaaaattaaaaaaaaaaatttttaataaaaattaaaataaaaaattaaataaatatttaaaataaattatttatat

SEQ ID NO: 26917 - DNA, 244 bp, Zea mays
  Clone ID: LIB3180-009-P2-M1-C1
tcctcctgttcttttgaaggggggaccccaagagaggggccccgcttgttgcattccaatgggaaccgtgcccccggaatctttttctttcttggccggcgcgcccttcccccaccggattcaagggacacccctgtatttgagtggaagtttgggggaacctcctgaatcctatattggattaaccaaaaattaaatggctggggggaccaattgagccaaatggaaggcaacacctaacccc

SEQ ID NO: 26918 - DNA, 297 bp, Zea mays
  Clone ID: LIB3180-009-P2-M1-C10
tcgtccacgcgtgcgttaaagagcgggttaaaccctagcttggcgtggtgctcgggtccacatcccttgccagcttatttgatggcctaaccgctttccggcactcattggagcactcccggtagcccacctaatgacatggagaagaagcgggagcgcaccgacgcccccggagaggcgaacggcgcagaatatgctgacgacttttcggcggggccccctgtgcgcacgcttgtccggttcaaggaccccgtacccgactccgaggccgccttcgccggcgccgagggccgtgtg

SEQ ID NO: 26919 - DNA, 249 bp, Zea mays
  Clone ID: LIB3180-009-P2-M1-C11
tcgtcttctcaatgtctttggttttacagaacatgttccaagcaaccatcgagacatcattcctggtgcttgagtactccattagccagcttattaacaaccgccacgttctggccaaacttcaaaaagaggtgaggaccgcgacccccgaccgccgcattgtgattgaggaggaccttaacccgattccattccttgagggcaccattaaggagtccattcgcattcaaccggcggcgccgtttcttc

SEQ ID NO: 26920 - DNA, 212 bp, Zea mays
  Clone ID: LIB3180-009-P2-M1-C12
tcggcggctcaacttcagccttacgggcccgcgaccgctatggccgacgcgtactggaagtacccggcccctgccccgcgccagcagcaacagcaacaacaaccgccggccttcgccagggggggcgtcgcgcaccccggcatgggccgcggcgcaccgcaaatggcccccgccggggggcaacaacaacccatgaaaccggcccgccccaa

SEQ ID NO: 26921 - DNA, 362 bp, Zea mays
  Clone ID: LIB3180-009-P2-M1-C2
tctgggtcttccaaacttcagtctggaagacaacgctccacttaagcatattaagcctatacctgatatatttcctagcctgacactgggtgctcataaggattatattcgtaggtctgtcccagagttgccagatggttcattgctgccaaacttcatggcagatattactggtacttcgaagcaaaagtcatttatgtctggtctacttcctgggctgggtcttagcccagggcaaccaatacattcagctatgcctgataatcacaagaaagtcttggacaatataatgatgcgtgctcagtatgcgtcaaacaaattcttgaagaagagatcaaaactagattattggtcagaggatg

SEQ ID NO: 26922 - DNA, 339 bp, Zea mays
  Clone ID: LIB3180-009-P2-M1-C3
gttggcttctcctccccctccggttcgggttcgggttcgtgaggttctccggggttcggtttcgtgggtgagcggatcgagatggcggcgtcggatgttgagtaccgctgcttcgtcggcggcctcgcctgggccacggacgaccactcccttcacaacgccttcagcacctacggcgaggtcctcgagtccaagatcatcctcgatcgggagacgcagaggtcccgcggcttcggcttcgtcaccttctccacggaggaggcgatgcggaacgccatcgagggcatgaacggcaaggagcttgacggccgcaacattaccgtcaacgaggcccattcc

SEQ ID NO: 26923 - DNA, 409 bp, Zea mays
  Clone ID: LIB3180-009-P2-M1-C4
gggaaaaaaaaccaggtctgtgtgtgtgtgagagagagagagaggccaaggcaactcaagcgacgcgatggcgatggcggcgcttcgacccgaggggaggcgccttattcttttcttcaccgtccccaacccgtctttggcggccgcttcctctgcggtgacgcgatccttcgccgtctcgcaaccggagatggctccacttggtgcacggtctatttcaactcaaatcgtgaggaaccggatgaagagtgtcaggaatatccagaagatcacaaaggctatgaagatggttgcagcatcaaagctccgggcagttcagacaaggactgaaaattcacgtggcttgtggcaaccggtcaccgcccttcttggggatgctcctagtgttgacgtcaagaagaatgtgatt

SEQ ID NO: 26924 - DNA, 203 bp, Zea mays
  Clone ID: LIB3180-009-P2-M1-C5
aactgcccggtccacgcgttcgtttttttacgtacacggtctccctctttctgacactagctagtgagagtgaggcaatcaagagcagacaaggggtaattgagaagctaacccaatggcgccactcatttgagcactcccagaagcacaactaataccatggagaataaccgggagcccacagaagcccccggagaagggaa

SEQ ID NO: 26925 - DNA, 127 bp, Zea mays
  Clone ID: LIB3180-009-P2-M1-C7
tctttcccaatcttcgctgcggctttccgatctgcggtactttcgggaccgcgagctaaagctcgccaccgatccgcttggtcctcggcatttctttttcttcagcaccggcaaaggtttcatcttt

SEQ ID NO: 26926 - DNA, 294 bp, Zea mays
  Clone ID: LIB3180-009-P2-M1-C8
cctgctccgtcccaaacttcgctgcgactttccgaggggcttttcttaaggaaccgggggctataaaaatccaccgatccattttgttctcggcatttctttttcttcaataccggcaaatcttccatctttttgccagcaaactttacaaacggggtgcatgaccctttttggagtatacgcaagcttttaggaaaatctctagcatatcccttttacaaaattgtctaataacatttttctttactaagtactttatttccaacaagcaaatctgtataaacaaaaagagca

SEQ ID NO: 26927 - DNA, 276 bp, Zea mays
  Clone ID: LIB3180-009-P2-M1-C9
tctgagctagtccgtgtccttcgtccaaatctcgagacaacctcagttgattttaagccatacattggtccaatctataatgcgatactgggacgtttggccaatcaagatcaggatcaggaggtaaaagaatgcgccatatcttgcatgagtttggtggtctctacttttggtgatggtcttgaaagagaattaccagcatgccttcccatactcggtgacaggatgggtaatgaaattacaagacttacagctgtcaaggcattttcaggtatt

SEQ ID NO: 26928 - DNA, 235 bp, Zea mays
  Clone ID: LIB3180-009-P2-M1-D10
tcgtggcttgtcgcggtcgaggtgcaatgccaggaccttgtggcaggggcattcccaagccataaactgggtcacgtagatcatggtcagatttttttttgcctgtttgcgagtgcttttgtgccttacaacacattttttgacccttcacttactattgtgccctttttgttgtgaaacaatcctaaacctttttggttcaaaagagatgcaccaagcgtttatcggtgtacct

SEQ ID NO: 26929 - DNA, 151 bp, Zea mays
  Clone ID: LIB3180-009-P2-M1-D11
cttccggcaagaccggcgaccacattctccaccttaataaaaaaaagcagggggaccgaaggggccgcaacaacaacaacaaccaaggggcaaccggcatccaaaaaggcagccgccgccaagcccgtaaaggacaaccttgaagcatcca

SEQ ID NO: 26930 - DNA, 402 bp, Zea mays
  Clone ID: LIB3180-009-P2-M1-D12
tcgcaatggtacagtggtccaggacccaaaacttggacaggtcattcagcttcagggtgatcagaggaagaacgtctcgaatttcctcgtccaggccggcattgtgaagaaggagcacatcaagattcatgggttctgagcaaccgccgggtccattgcaaaccaacccttcatgcaaggccagcttattatatataatatctgagggggagcatatctatctggctgtgtactgcaagcaggcctagtacgccggcttggcgttccttctattacacatataagccccttccttggtgtattcttggttcccgtgtgtccaaacctggaccttcgagggctccatcgaccatcgttggcttcttctttaataaaaacatgtttgaataaaccctttttggt

SEQ ID NO: 26931 - DNA, 376 bp, Zea mays
  Clone ID: LIB3180-009-P2-M1-D2
tcggttcttcttcgccaccttcacccttgaatcgttggccaccatggcgtcgcagggggccttcctcttcgccgcactcgagcaggccccggaggaccccattctcggagtgaccgttgcctacaacaaggatcccagccccgtgaaggtcaacctcggggtcggcgcctaccggaccgaggaagggaagcccctagtgctgaacgtggtcaggcgcgccgagcaaatgttgatcaataatccgtcacgtgtcaaggagtacctaccaatcaccggtctggctgaattcaataagctgagcgctaagcttatctttggcgctgacagccctgctattcaagagaatagggttgctaccgcgcaatgcctatcgggt

SEQ ID NO: 26932 - DNA, 326 bp, Zea mays
  Clone ID: LIB3180-009-P2-M1-D3
tttttccgctgcgccgtctccttcgctcccgtcgtccggaaagatggcgtcccacattgttggataccctcgcatgggccccaagagggagctcaagtttgcacttgagtctttctgggatgggaagagcaccgctgaggatctggagaaggttgctaccgacctcagggccagtatctggaagcagatggctgatgctgggatcaagtacatccccagcaacactttctcgtactatgaccaggtccttgacaccactgccatgctcggcgctgtccccgaacgttactcatggactggaggagagattggatttgacacctact

SEQ ID NO: 26933 - DNA, 317 bp, Zea mays
  Clone ID: LIB3180-009-P2-M1-D4
tcagaacagtcgtcttcctcgtggagaagcggcaaggcgagtttgtcggagtctcacgccccgttcgtcgtcgacggcggccacgggacgtgacagactccagctcggacagctcgtcggagaacttgtacagcccccgctacgagtcgagtcggctgctcgctccgagtcgggcgttcctagggccttcaacaccgagctggacagggagttaagcaccgcctctgccttcgtcatagcttcgccgcctctggcagaggcacaactgcacctctacgacctctacacaatcgccacttaggggcccttcaccgtgc

SEQ ID NO: 26934 - DNA, 156 bp, Zea mays
  Clone ID: LIB3180-009-P2-M1-D5
ttcttggcaaaagcattgcgaccacagacagggcgcgcttcaagggcttttttttttgagataacaaggaggagaggaggagattgcggtcaccatcaccttggttaaggccaggcatatcttaaacaggcccggcaaccccaccgtttaggtggg

SEQ ID NO: 26935 - DNA, 234 bp, Zea mays
  Clone ID: LIB3180-009-P2-M1-D7
tcttattcaaatcgcaaggtagatctcaattcggtatagcacaagatgaatccataaagtcagaactttgcatgttaagggcttgctcgttttgatctgaatccatatggattaagtgagattgagcggggttaaataccaaacaagtcaaaatctttcataatttttttcaatctcatataatccatatgggataggaattatcgaagaaaccctaaggtggatctgatgttc

SEQ ID NO: 26936 - DNA, 246 bp, Zea mays
  Clone ID: LIB3180-009-P2-M1-D8
ttttattcagtcagtcagcagccgcaaccttgggcaatctccaaagcagcacacgggtccacaacagcaccccgcctttttttcttcacgtgcgttgcgtgccctgcccccatggagacccttctggcttgcaaccccgccaaccgcgtggcgaaaccgacgtgcaacggcgtcggcgcccttgccgtgggcaacttccacgccattattggcacgcccgcggcggcttcggcgacccttgccccg

SEQ ID NO: 26937 - DNA, 334 bp, Zea mays
  Clone ID: LIB3180-009-P2-M1-D9
tcttaacagcgaaggagaaagcagaccaacctagccacccagggagaaagaggccaaaagggaggggagagtgtcgtcatggctttcattgtcgcttccaggagggccgttcctttagttcgcgctctggagaagctcatcgcagcgttcttcggtcccgggactggcttcggccttaagccggtggcagtcgccggcggccttcgcggcttcaacaccggcgcttcggttcgacgcttcgagggggccgagtcggaagaccatagcgtccgcgagttccattggcggcacggcggccgggacttcctttgcccagcctgttctcaaatatttt

SEQ ID NO: 26938 - DNA, 185 bp, Zea mays
  Clone ID: LIB3180-009-P2-M1-E1
cccgtcccggatttcccggttggaccaagccgtctttttttacttgttattaaccaccaacttttgggggcccggaccaattggatttttaaaaaaggaattcgggagggttcccaaggcttgggacccgagaaagggggtaataatccccaacaatttatttttaacaagggacagggggccca

SEQ ID NO: 26939 - DNA, 242 bp, Zea mays
  Clone ID: LIB3180-009-P2-M1-E10
tcggctggtcttcctggatctctgactgactgactgaccttaattgggggccgggggcaagagagagagagagagagccattgcggcggaccaacaaccgcaactgcaggaggagatgaacgacgcttcccgcggcgggcttaagctggcttcagggttccgctttcaaccgagcgacttcgagattgtgaggttctaccttaacaacaaggtgcgtaacaagcgctttaacttgaacggca

SEQ ID NO: 26940 - DNA, 397 bp, Zea mays
  Clone ID: LIB3180-009-P2-M1-E11
atttcatcatcaccagcacattccaagaaatcgcgggaagcaaggacaccgtggggcagtaccagtcccacatcgcgttcactcttcctgggctctaccgtgtcgtccatggcatcgatgttttcgatcccaagttcaacattgtctcttctggagcagacatgagtgtttactacccgtattccgaaaccgacaagagactcactggcttccatcctgaaatcgaggagctcatctacagcgacgtcgagaacttcgagcacaagttcgtgctgaaggacaagaagaagccgatcatcttctcgatggcgcgtctcgaccgcgtgaagaacatgacaagcctggtggggatgttccgcaagaacccgcgccttggggagcttgcgaaccttgtgat

SEQ ID NO: 26941 - DNA, 331 bp, Zea mays
  Clone ID: LIB3180-009-P2-M1-E12
tcttcacgacgcacgcagagccgcaaagatccgtcacactgcaaggtttgaaaactgaactgtaagatggcatcagcagagctttcccgtgaggaaaatgtgtacattgcgaaacttgccgagcaggcagagaggtaccaggaaatggttgagttcatggagaaagtagcgaaaactggtgactcggaggagctcactgtggaggagcgcaaccttctgtctgttgcattcaagaacctcatttgagcccgccgtgccttatggggcattattttcttcattgagcaaaaagaggagggtcgaggcaattaggaccgtgttacacttatta

SEQ ID NO: 26942 - DNA, 412 bp, Zea mays
  Clone ID: LIB3180-009-P2-M1-E2
ttcttacgtcactgagaccgtccttgctgcctgctacaaggcgctcaacgagcaccatgtcctcctggagggtacccttctgaagcccaacatggtgacttcaggctccgactccaagaaggtgactcctgaggtgattgctgagtacaccgtccgtacccttcagaggaccgtccctgctgctgtgcctgctgttgtcttcctctctggtggacagagcgaggaggaggccacccgcaacctcaatgccatgaacaagctcagcaccaagaagccgtggtccttgtttttttccttcggccgtgccctccaggcgagcaccctaaaggcctgggctggcaaggtggagaacttggagaaggctagagctgccttccttgccaggtgcaaggccaactttgaggctaccctt

SEQ ID NO: 26943 - DNA, 398 bp, Zea mays
  unsure at all n locations
  Clone ID: LIB3180-009-P2-M1-E3
ctttacattgacggcaaataccaagtatgtgaagaatgtagacctcctaattaggttctaatatatttatttgactttgggttaggtatggaaaatgggaagaatataaagctgattagtaacatctagctacttcaaattatgagtttccctttaaaattctccattcttaacttgtttctcttatagactgcatgattatgngttggttattattagataaataaaaacacttagttttgacaatttttgttcctttgatatctcaaatcggccaaacaaactaggagtgctggcaggaaaagatcggtatgtttatgctaccatattttttagacgtttttattttctagcttttctttaaacttgcattgtaccatctatttttcagattttgc

SEQ ID NO: 26944 - DNA, 265 bp, Zea mays
  Clone ID: LIB3180-009-P2-M1-E4
cgtacgcgtgggtttccacgcttcaacgtgcgtcggttaggttcttgggaggtgggggtgtctccgggattccccgtggcattcacccgcgtcttcccccacccgcgcctagccgctaaggttcgcgcttaaaccaagagcttcggcggccaagaccaatcgaccattgctacccgtattcaatttgagaacaactgtgaaattggtggtttctccaagcttacaaatgcttactgtctggttgcgattggtgggtcagagaact

SEQ ID NO: 26945 - DNA, 321 bp, Zea mays
  Clone ID: LIB3180-009-P2-M1-E5
tgtcaacgcaacatgtactacatacggtctggttagcttgctttttcacactataaatacactgccctagctatggcgattcgcatcacaatcggtcgagctgggtcgaagaaactttagagaggagaacacgcgcgcacacacacaacatacgtatacacaggctgctgcagtagtataggagctagatcgagctagcatggcggtgaaggtgtgggtgttccccgtggcaccgacgatgtgcgctggtgtagggcttggagcttgcgaccaccaccgcagcagtgccgggcgtagtatggattctgtttgcaggcccct

SEQ ID NO: 26946 - DNA, 308 bp, Zea mays
  unsure at all n locations
  Clone ID: LIB3180-009-P2-M1-E7
tcttattcccgattcgtcacgaagccccactgggagagagggacccggcccgttgtccccctcttgtacgcaatcctttcgtcgctgcgaaattgatcccttatgttccccattgcccccagcgttatcgttgaaaaccttaaccccaaagtcttgaaatgtgagtattcagtacctggcgagattgttattcatgcttaaagcttacatnaacatcttcaaacacaaccagggtctctttcttttgatgagatcctttttttgaacatttcgaatcctcaatccctttgtcaattaccttttaagtt

SEQ ID NO: 26947 - DNA, 331 bp, Zea mays
  Clone ID: LIB3180-009-P2-M1-E8
ttctcacgcgtgtcgtcgtaatacagcaccacacaacttttctgggagatcattcaacaccagcggtggcgttcaaacctaacccttcacgacttggctttccctaacttccttcgaacccttaactttcaagaacaccacaagaaatcctttcccgcacccgcacaatggtttccggcaccggcttaaacctttccggcaccgggacgcgcttcaacaacgtgcaaccttacacaaccggctttttcgggccgtggttccccaacaaccggttttggacccgcaacaaccacaattgccgcaacggcaacggggccgggttccccggctt

SEQ ID NO: 26948 - DNA, 343 bp, Zea mays
  Clone ID: LIB3180-009-P2-M1-E9
tctactaggtctagatcgcgagcggccggccttttttttttttttttttaggagaaaactcataaccatgtatgccttacattcgatggtccataaaaaaaattaagtcttaatagcatcacgggttcaacgaaaggaataatacttcatgaccaggcaaacattgccatcatagattacttggtcacgcgacaactgcaaggatgtcaacaagacgagatattttaagcttccacgaggtaaccaacaagcaagcacaggaccagccagatagatcatttgttcttggcagcaaccttcgttaccaggcaaatagatcatttttttttggcagcaagctttg

SEQ ID NO: 26949 - DNA, 174 bp, Zea mays
  Clone ID: LIB3180-009-P2-M1-F10
tcgaattaataaagagtaaatgagcatggtggatggtttatactagtcatcagcggagcttggtggtaggcacttgctggagtagttgcttcgaacttctttttttcgtgttagatgaggtaaaaaaacaattttgtgttattgactctgctgtgagcgagtgaaccttgcccc

SEQ ID NO: 26950 - DNA, 339 bp, Zea mays
  Clone ID: LIB3180-009-P2-M1-F11
tcgggtgtagccatataatggttcagaactgactttgatcacgggtacacctctttctgctgcggagccagtgctgggagcggtggcgattggggcatctggtgctgatcttcaaatttggtggtcactttgatctcgaggagacgctcaacaggctggctgcagatgggacaccgagtggtttggtaccttaagaccttggcgcactcactggacatgcacatattcctacatgggagggcaggagtattccttggttctgagaggcaaataacacaatcttttcctggatcaattggattaacattaaccttcaaggagttccctatgccatatatt

SEQ ID NO: 26951 - DNA, 275 bp, Zea mays
  Clone ID: LIB3180-009-P2-M1-F12
tcggtccttattcgtccaggggagcaaacaagcaagcaagttaaccggccaggagcttgattgaggcccgcgacttgaaacaaccggccatcggagccccggcttaagaggaggagccagctccagattgtgggtcttgtcggcggcaacaccgggccggccgagcacgttgtggccaacgcccgaggagagaccgagttcctgcgccggctgtaccggcacgcgccgggcgagcaccaatgtactttcacccttgttaagcacattaaggggcc

SEQ ID NO: 26952 - DNA, 118 bp, Zea mays
  Clone ID: LIB3180-009-P2-M1-F2
ggcaaatttttgaaagccggggaaacccaaccctcaaggtggacctgggccttatcaaccgaaattacccaaggggggccctaccaaaggggccatcaaatggaaatattgaggcctt

SEQ ID NO: 26953 - DNA, 373 bp, Zea mays
  Clone ID: LIB3180-009-P2-M1-F3
tgtttcacaaggagacacgctttcacgattccaccaccttgcgccataagatggccgattgtataaccgcccgaaaggcaaagcctactagctcctgtccaaccccctgatggcggtgggggtcaaacccttgcacaacgtacgcgcaagccctgccggttacattgcgcacctccacccattgctgagctcttcgcgccccttcgctccggcggccgcggatcccgtgtctgcaccttcaaccccgtcaaggtctcgtgcgcgaggagcactggctcatgtcacttcggctgcgccttcccctacatagggccttctgttcggctgggaggaaccttgagccggtgagggcgatagccacgcaagcgccccc

SEQ ID NO: 26954 - DNA, 334 bp, Zea mays
  Clone ID: LIB3180-009-P2-M1-F4
ttttgattgctgtatgccccaagggaatgggtccatccgtccgcagactttatgttcagggcaaggaagtcaatggcgctggcattaactctagctttgctgtgcaccaggatgttgatggaagggcaactgatgttgctttagcatggtcaggtgcacttggttcccccttcacgtttgctactactttggaacaagagtacaagagtgatatctttggagagcgaggcatcttgctgggtgctgtccatggtatcgtggaggctctgtttaggaggtacacagaacaaggaatggatgaagagtccgcctaccaaaacactgtcgagggcat

SEQ ID NO: 26955 - DNA, 278 bp, Zea mays
  Clone ID: LIB3180-009-P2-M1-F7
tctgtccgatccctcgtcagtcaccaaacaacagtgagtgccccaatactgggcgagcctcttaatgttgaacgattcgcgcgtcgtgttcccagacgggataggggccttaatcgtcgagagcgatgaaagggttctaagatcggctggcttgatgctctctcttctaaactaccgagtggccacgtgcgagaggccaacgtcggtagtcaagctcatcaccggaagactcaaagacgccgacgtcgtcttcatcgacgctctgagaggcgcaacct

SEQ ID NO: 26956 - DNA, 137 bp, Zea mays
  Clone ID: LIB3180-009-P2-M1-F9
tctttcgtcgtcagggtcgtgtactcgttttgcctttcaaggcacccgttgcgggggccgatgcccccattgcccgggcgggggccggtgccggagccggggcccttgccggtcttgcaaggggcgcgacccttgcg

SEQ ID NO: 26957 - DNA, 347 bp, Zea mays
  Clone ID: LIB3180-009-P2-M1-G10
tctgtgaaatggaacaaatcaccaccaccacttcagcaattccaagacttcttcgaaccagaggcatatcgggtgaaatggaacaaattaccaccaccacttcagcaattccaagacttcttcgagccagaggcatatcgagtgaaatggaacaaatcaccaccaccacaccaacaattgcaagacttcttcgagccggaggcatatcgggtgaaatggaacaaatcaccaccaccacttcaacaatcggaagactccttcgagccggaggcatattgggtgggatggaagcaacatgcgcaaggggaaacagacctttcttattggaccaccccaggacgcgggca

SEQ ID NO: 26958 - DNA, 293 bp, Zea mays
  Clone ID: LIB3180-009-P2-M1-G11
tcgttatattttatgcctcatatgtctgtgcatatgggtgggcatgaacttctataagaaacagcggtagtagtcattctttggtattggaaaagcaataaacactaaatgtattttttcatcaataagctgcttattcagaaacatgccaaacagctctctgctgtaaatgtctggcctaatgtacgctgtaccccccttcccaaaaaaaggaaagaaaattccacgatgcctattgagtcttgacccgtgttttggccttttatcacaaacattggttaattacctaatta

SEQ ID NO: 26959 - DNA, 403 bp, Zea mays
  Clone ID: LIB3180-009-P2-M1-G12
tcggttcctcatcacccttggaatcgctcttcttggtctctttggattatgggcatatggccaggttcagcagctctcgaagaaaaccaagaaggcccccaaggtggagctcggaactggaacaactgatgccaacatcgatgagtggctggagggcacttcgtttgtgcagagaagccaatcccagaagaagccgacctgaagctagctcttcagactaggtaatccttggaggatctagaatgaggcatttgagggtagcccttcacaagtgacttctgcagaaagatagatgcccaaggaggggcctgaaaatggaagttcgtggtccaaccattttggttacaacaatttcgaacctgtgtaccttacaatggacctttctttaaaccaaagtttggtt

SEQ ID NO: 26960 - DNA, 332 bp, Zea mays
  Clone ID: LIB3180-009-P2-M1-G3
cacccttcttgatttggcacgcggattatcctctttgcataaatggcaactgatgtttctttccagcctaattttgtgcagtttttgagctcaactcctccacttttgctgcagcgcgtgtcaactggagtagttaagcggcgccatgggtatgcggagcaggcacccaaaggcgttgggtttccgctggtacccggcggcaacccaccggtccctaactctggtactgtggagcctagcggcattggtcgtcgttgtgaatttccatcttctcatcattcataaggaggagggtgagaatatgagttcacaccagatccgtccatcgatta

SEQ ID NO: 26961 - DNA, 291 bp, Zea mays
  Clone ID: LIB3180-009-P2-M1-G4
tttgatcaaggacatgcgccacagcaacagcgtcaaggacgaggaagggtacccggccttcgcgctcgtcaacagggtcaccggcgaggccatcaagcactcccagggcgagggccacccggtcaagctggtgccctacaaccccggctaccaggacgagtcggtgctgtggaccgagagccgcgacgtcggccacggctttcgctgcgtccgcatggtcaacaacatctaccttaacttcgacgcctttcacggcgacaaggaccacggcggcgtgcgcgacggcaccaa

SEQ ID NO: 26962 - DNA, 153 bp, Zea mays
  Clone ID: LIB3180-009-P2-M1-G5
tggttaacccggtggctgatgcccaaatgacggtgggtatccgggatgggaggcaggaagccgccaacttcaaacaggttaagaagggggccaaaggagctcccagaccctggatagggccatataggagtgcgctacaacctcggcttccaa

SEQ ID NO: 26963 - DNA, 119 bp, Zea mays
  unsure at all n locations
  Clone ID: LIB3180-009-P2-M1-G6
cttaataaccctcanaatncgggtgttggtcttttgcagggaggggggttaaaaacaggttcagcagctctcgaagaaaacgaagaaaggccccaagggggagcttggaactggaacaa

SEQ ID NO: 26964 - DNA, 321 bp, Zea mays
  Clone ID: LIB3180-009-P2-M1-G7
tcttcttaagctgtgcgcggtgagccccttactgtccatatgccaggaacacagacttggaatttcttctatgttgcccatatggttgatggtcttattaagctgatgaatggaaacaagactggaccgatttacttggggaacccaagtgaattcaccattcttgaaccttcttagaatgtgaaagagttgatcaacccaaatttgacaattacaattacccaaaacacttcttattacccccgtcagaagaaagccgatattacaaaaggcaaaggaggtcttggattggaagccaaaattcttcttggggaccggttt

SEQ ID NO: 26965 - DNA, 230 bp, Zea mays
  Clone ID: LIB3180-009-P2-M1-G8
tcgtcctttgtcttcactggtttgcttcttctggggccgtcgcaaggacgtaatggcttccgccccggtgcttccgaacgcccgcttccggggcctttttttctaccctacttttcgcgccggttcgatatatgtaccttcttcgcttcccgatgcgcccgcggcggcggtagcgcccgtccaaccgccaccgattggccggaccctcttggcgaggttcattggcaact

SEQ ID NO: 26966 - DNA, 172 bp, Zea mays
  Clone ID: LIB3180-009-P2-M1-G9
tcttccacgcgttcgacagggaccaccggcctggagcttgttaccttgtgggggggcccaacttttggtccaacgcgttgccttcggttgttgtgggcccgaaccccaaattcccttcccagggcccaagcaagtaacatttttgcctaccttccccccgtgacaaacaccc

SEQ ID NO: 26967 - DNA, 159 bp, Zea mays
  Clone ID: LIB3180-009-P2-M1-H1
ttttctaaagcggcagtgcgtagagaggatcgtcgaacagaacagcatgaagatggtcatcgttctcgtcgtgtgcctggctctgtcagctgccagcgcctctgcaatgcaaatgccctgcccctgcgcggggcttcagggcttgtaccgcgcttgcgc

SEQ ID NO: 26968 - DNA, 385 bp, Zea mays
  Clone ID: LIB3180-009-P2-M1-H10
tcggaggatttatacccacccccgtcggtcgatccccttccttccggcggcggcggcggcggcgtcggccgtagccaagaccaagatcccgtcttggcccgcgcacgcacctgacctaaccctgagccctgtgatatgccggttcaggtcggaggcagcaagggggcggacccgaggccggccaggggtgggggcctatcgcccgtaggcgacagggtccgggccttcttcaagaagaaccggcgtcgccacaagaaggccgacgccggctttttcgttttggccatgcaaaggcttttctacaccaagaggggggtttttggcaaattctaaccgggcttttgtccggcggcggacggcgtgtgccggcttttgggccttccta

SEQ ID NO: 26969 - DNA, 248 bp, Zea mays
  Clone ID: LIB3180-009-P2-M1-H11
cttctggctggttgtcctaccattttattggcagggcaattcaagatggattcccagatcccggaattttcattaaaatacctttattaagggccgcttacaaatagggagaggggtggttaaataccctgtgaaacccatttcaaagattcacctattggaccctatattttttaccaattggcacaatggccggaggcttataaggggggggcattttcatattaaaatattcattaaacgccatt

SEQ ID NO: 26970 - DNA, 118 bp, Zea mays
  Clone ID: LIB3180-009-P2-M1-H12
tcggtcaaaataaacatagatgccatttggaataaaaaaatgctatattccttgggctaacaaacttttaacctccttggcaaaaacaaaaaaccgggggcaggcggtcttgaggatc

SEQ ID NO: 26971 - DNA, 231 bp, Zea mays
  unsure at all n locations
  Clone ID: LIB3180-009-P2-M1-H2
ggaacccgggccactatatatgtatgtacaaaatgcctgctttgatgatggcacaatcgctcgacaattataaatctgggacttattattattcccattccctttgttagacgccggcgtaaaaaatgccagacccggaggtgatggattatttggtttggaggcaaataaagggggggttatcttgcccnaaaaaaaaaaaaaaaattaatttatataaatatttttttt

SEQ ID NO: 26972 - DNA, 384 bp, Zea mays
  unsure at all n locations
  Clone ID: LIB3180-009-P2-M1-H3
taccacctncctcccagatccaccaccccagccatggccaccggctttgacttcccgaccttcttccccggcggcgcgccctttcacgacgaccctttccttcatttcgacgggtcggcccccgccggcggcgacggctttccggccttcccggacgcctacgcgcccttccccttcggcatgccccactccaacggcgaccttcacgacgaccctttcgccgcatctgctgactccaacggtgggcccatccttccgccgcccaccgagatgggccgcgaggagggattcctgctccgcgagtggcgccgacaaaatgctattcaccttgaggaaaaagagaaagaggaggaggagctgaggagccaaatcatcggtgatgct

SEQ ID NO: 26973 - DNA, 288 bp, Zea mays
  unsure at all n locations
  Clone ID: LIB3180-009-P2-M1-H4
gattgatccctggtgggtggaccgcgtggcaaggtcaaccagtggctgggatggcctcntcngcgtccgcgccagcgttcacaggcccgcgcttcgccccggcggatccgacgctgtccaagccgtggagggggcttatccacggcaacaccgggtacctctacctctggaacccggagaccaaggtttcccaattcgagcgtcccgtcgcttccgtgcccgccccccaatcccagccggttgtctacttcaggccccatgattggccgataagccacgcacctggcc

SEQ ID NO: 26974 - DNA, 396 bp, Zea mays
  Clone ID: LIB3180-009-P2-M1-H8
tctggctccttccagttcccaccagaggggaaaggatcgctttctccaagataggcccggtgtcttccgttgcccctcttgggcttggcttggcactccaaggcacacccccgtcggccccggcgaacattgtgcctctattgaactccactggtgaggtcgcttgcttttcaaatgcgatccattaccgttttttgttatgggggccccttttttggaagctatatttttgattttgggtgattttacatctttatcccccttttaaaaggttggatgggaggccaatcctgtcccccacgtttggcatcttattgttccattcggtggcctcaaattttttgcttccttgggttccgattggatcttttcttgcaaaggattttggtccctttt

SEQ ID NO: 26975 - DNA, 317 bp, Zea mays
  Clone ID: LIB3180-009-P2-M1-H9
tctgtcatcgatctcgtttcaaatccatccatgctcgtttccttcgtcccggaggatcttaaccccatggccaagatcaagatcgggatcaatgggttcggcaggatcggaaggctggtggccagggtggccctgcagagtgaccatgtctagctcgtcgccgtgaacgaccccttcatcagcaccgactacatgacctacatgttcaagtacgacactttgcacggacagtggaagcaccatgaagtcaaggtgaaggacttcaaaacccttctctttggtgagaaggaggttgctgagattggctgcaagaaccc

SEQ ID NO: 26976 - DNA, 355 bp, Zea mays
  Clone ID: LIB3180-010-P2-M1-A10
tttttggaatgcaatttctagcactaaaggtggtaccttcttttaatccaggggatttgaagttgatgttttggatgtcgacccaaacgggttacaaattccacaaaaaattagcacatacacaattggccctttccaaaccttcaaaggagagaagggcaaactgaaagtgaaagtgcgtttcaacattcatgggaccggtacaggtgattcaacaattatgctggaggatgatggggaaggtccaggttcatttgaaatgaagcttcaaatgatactatgaagatggacacaaatgatgcaccaagtgatcctggtgttggatttgatgtgaatattgcagagccttaaagcg

SEQ ID NO: 26977 - DNA, 350 bp, Zea mays
  unsure at all n locations
  Clone ID: LIB3180-010-P2-M1-A11
tttttgggtcgggccccttatcggcggggggcttgccggcgttatctacgagctggtcttcatcttccacacccacgagcaggttcccttcaccgactactaaaagccgaagccgaccgacccaggggtgcgcagctagcattcagcttttttttcccgctcgccggcgatcggttagtttctctcgtgcacgtgcatgcattggcgactggcttaagccggcgctgcgccggcgccgctcgcattggttgcttttcttggaccagcagtcgtcgccgtcaggctgagctgcttgtaaccgtgaattcggacccggttgcttctgtgagatttgggcatttgcctgngtt

SEQ ID NO: 26978 - DNA, 329 bp, Zea mays
  Clone ID: LIB3180-010-P2-M1-A12
attgttgatttttttgcccacacactatacacgggcaacttttctacattgacggggttccctttaaaccccacacttacgacctactccttataaccgactactaaaaggcccatccaaccgaacaacccatggcccccttgcatacacttttcccttccccctcgccggccaatgtataccttccctcttccccatgcatgcatcgaggactaactgaagccgccgattcgaccgctccggtcgcatcattttcttttttcggaccaaaattacgttcctccaatctgattttattaaaaacctcaattctaacccaaatatttttg

SEQ ID NO: 26979 - DNA, 230 bp, Zea mays
  Clone ID: LIB3180-010-P2-M1-A2
agccaccttttttgagcacagcagcatcatacaaaagagggatgcaagtgcaacaattgggcgacgatggaaaccaagatatttttccttcttatgctccttggtttttttacatggggtggttacgcgacaaattttccttaatggttacaaacttctattggtttccttttttccccatacctttcattaaattattggttcaagatgtgaaaacccaactttttaaa

SEQ ID NO: 26980 - DNA, 365 bp, Zea mays
  Clone ID: LIB3180-010-P2-M1-A4
tcttgatttcttcttgacgccgcccccattcattcttggagggcaagaagaacgcgccggccaaaagcgaaacaaggggaaggggcgaggcagccaaacgaatcccaacacctgccttttctttgcttgcgcagatctaacgatggcggcgggccgtgagttggcatggggggaggagcccgtggcgcggcgccggcctaagaccaagatcgtctgcacgctcggcccggcgtcgcgatccgtcaagatgatctcgcgctgctgcgcgccgggatgtgcatcgagcgctttaacttcttccatggcttccacgagtaccaccaggagacggttgacaacctgcacgccgacattgagcttacccg

SEQ ID NO: 26981 - DNA, 409 bp, Zea mays
  Clone ID: LIB3180-010-P2-M1-A6
tcgggcgttgtcgactccatgaaggtgcgcgttgggccggaaccggccccggccccggcggcggcggacggggccgcccggcgcggcgggggtggcggaaggggattgtattggcgcgcggtcgcgttcccgcttgtcgttgcgctcggatggcttctgcccttcgcctttattcttgccggcgttcccgcgcttgaggcaggcggaagcaagtgcttcttcgtcgattgcttggggaggcgaatagggcctaatttcttggtaggcaaggaggtgattctacaaggctggtgcaagatttgtatagattttttgatcaagttaacaaggaggaatttccacctgatgaaaagttaccagaatcattcaaggattttcttttggagatgaaggataaccattatgatgc

SEQ ID NO: 26982 - DNA, 260 bp, Zea mays
  Clone ID: LIB3180-010-P2-M1-A8
tctaaagcaagccatgtggaggagggctttagcgatggtcctgttcatggctggcgccgcgcttctcgccggggcttgccgcgcccgcgcgcaacaaggcgtgtggagcattattaccccgcccatgttccaaagcatgcttagccaccgcggcgaccgcgggtgccaaggcgccttctacacctaccacccctttattgagggccgcaccaaggttcccggctttgggaccacccgcgaccagcaaacccccaagccgg

SEQ ID NO: 26983 - DNA, 256 bp, Zea mays
  Clone ID: LIB3180-010-P2-M1-A9
tctggcactttcgcagtttgcatttgtaaatcgggacaggtgctgggaagaacttgagtggaaaggcaagcatgggcaattttcggctgtagttgctaccaaaccttactattttcgggaacttgatgttcttgagacaatcgagaatttcttaaagtatgtcccaaatttctggtcttctgatgagcttgcttattctattaaaaatggggaaatactgcaaattgatgaagaatattttggagaacaaatttta

SEQ ID NO: 26984 - DNA, 347 bp, Zea mays
  Clone ID: LIB3180-010-P2-M1-B1
cttttatcatcccctgtgcttggctcgcccgctgtctctcgccttccacaaccctgtccctcttccatctcatttccgctgcggctgcaacaataaaataataagtctcgtgcaggcgaaggacgtacgacgacgcggacgcaccgtcgaagtctacaggctgcgcaatccctttctccctcttatccccaaggcgaggagctgagggggggcccttctgctgctggtcttggttccccgctcttcaagatgtcgtccccgagcagcgccgcgagatggaccttatgaagctgatgatgagcgactacaaggtggagatggtgaacgatgggatgcaagaattcttc

SEQ ID NO: 26985 - DNA, 252 bp, Zea mays
  Clone ID: LIB3180-010-P2-M1-B10
tctagccggtctggccggcgaccactggccccaaattcttttgaggccctagggaattctacttccgcccggctttatagaattcccgggccggcccccctttcccgacttccttttttttcttaaataggcattccggttttcccagaggcaccccttcttcccttggaatcgagaggccctaaggccggaaggccgtaaccataagttcttcttcttttttcgagggcccggcggccgggccccggacct

SEQ ID NO: 26986 - DNA, 418 bp, Zea mays
  Clone ID: LIB3180-010-P2-M1-B11
tcttgcggattggtccgtgaacagccctgaggggctccacctttcccaggaggaccttatttagaagtttgccactggagttttcatgggttccttcctgtcactggctatctcataccccacccttgcttctttgccccacatgttcatcaatgggtacaacaatgtgcttgcttttgctgtcgagacaaactactcatacccacatgctgacaagatcaaggagtaccttaaggacccaaacaagtttgctgttccggcccggttgctgctggtgactctggcgcttcaactgcttccaaagaagaagagaaagcttcggagcctgaaaaggagtcggacgaggaaatgggcttcaaccttttcgacgactagagcttctgttttcgtcaaacttgtgcaaggtttggctttttta

SEQ ID NO: 26987 - DNA, 265 bp, Zea mays
  Clone ID: LIB3180-010-P2-M1-B12
tcggcgcactacccgcccatggtgcgcctgtcccggcgcctttgggacgagggccaggccgacgccgggtacaccgtgcttacgcccaccccggaccttgacctgggcccgcgggacgacttggcgcttgtcggcttcatgaggaacggcggtgccaccgaagtcgtcgccggggatgagtcgtcgtccttgcccggggcaagcgtgttcaaggttcccgaccggttgaccggcggcccgaaccagcttggccgggtattaaagg

SEQ ID NO: 26988 - DNA, 368 bp, Zea mays
  Clone ID: LIB3180-010-P2-M1-B3
attttacaaggcgggctgcagagaatctatgagaagtacacctggaagctctacttcgagaggctgatgaccctgaccggcgtgtacgggttctggaaggacgtgagcaacctggagaggcgcgagacccggcggtacattgaaatgttctacgccctgaagtaccgtaacctggcaagccaggttccggtgtccttcgattagtacggggaaaggagaagaagaagaagcccaggccggagaaccatcggctgcatttcgtctggttcaccgcaattcgcattgttagtcgtgtattggagttatgtgtacttggttttcaagaactttgggtccttggttttttttctttcttgggtgagcgtttt

SEQ ID NO: 26989 - DNA, 316 bp, Zea mays
  Clone ID: LIB3180-010-P2-M1-B4
tctttcctgcaatgctctcctcttgaaggtgaaccaaatcgggtctgtgaccgagagtattgaaactgtcaggatgtccaagcgcgccggatggggagtgatggcaagccacaagagtggcgagacagaggacacctttattgctgacctctcaattggcctgtctaccggccaaatcaagaccggagctccttgccggtctgagcgcctggccaaatacaaccagctgctcaggatcgaggaagaactcggtgatgtccgggctacgccggagcaaagttcaaggcaccagtggagccctactaagaaaggaaga

SEQ ID NO: 26990 - DNA, 370 bp, Zea mays
  Clone ID: LIB3180-010-P2-M1-B5
ttagttctagatcgcgagcgggcggcctttttttttttttttttttttttaaaagggtaaaacgtttaatttggaacaatacttttttcttttcatttcaaatggtcattcaaggcattggttacactgacactggcacccatggggatgcgtgacacattattactcaattattggcggttaatgacttaactagcttgcttgccagcgggtatactacaacacataatttgattaatggaggccgacggcgaaccctactggttgccttaaaggcagtcgttgcggcactaattttgccagaaagttaagcaggtggagccgcaacaccggtaccaagcgatttttggtttgggccttcaatccattc

SEQ ID NO: 26991 - DNA, 139 bp, Zea mays
  Clone ID: LIB3180-010-P2-M1-B6
acggtttttggggtttacaaaattttcccaccctactagaaatccccatattcgggggggcgccgcccatcggattggatccttctaacaagtcgacttcatctgatcggcggagccggggcaccaaccaccattttgg

SEQ ID NO: 26992 - DNA, 249 bp, Zea mays
  unsure at all n locations
  Clone ID: LIB3180-010-P2-M1-B7
ttgtggacggtttcccttcccgcttcactcttgcccgcgccctgtcccggtgggcgcgaatggttctcgcgcgagtccttccgctggccggcccgtnggtcgggccccaccggcggttacttctggcgacttagcggggccggacccgccgggtgtgcttaccgtgcgggccgtcggctggcgcgcaacgaacgccatggcgggcggtgcttttgacccgnccttggacggttccagccccgcagaggt

SEQ ID NO: 26993 - DNA, 193 bp, Zea mays
  Clone ID: LIB3180-010-P2-M1-B8
aacattttgtggccaccggcgacccggcgcctgtattggccatttttcaagcagaagcccttacaaacgcggatggcccacaaaaacacaccaacccaacatcgggagaaatattggcgtccgggagaataggctctgtacgggcgcgggcttttaccaacacaaaaccattttcttcccttagggacccctg

SEQ ID NO: 26994 - DNA, 265 bp, Zea mays
  Clone ID: LIB3180-010-P2-M1-B9
ttttggacgcgtgggcttttagatcgcacgggcgcccttttttttttttttttttttttttttttttttttttttttttttttttttttttttttttttttttttttttttttttttttttttttttttttttttttttttgggaaatggggggtttttattattttcccccccctttgggtatattacaatttttttcttttctaaggctgtctgaatttcgcccaaaaatgaattttttgactttgggctttcccgaattttt

SEQ ID NO: 26995 - DNA, 312 bp, Zea mays
  Clone ID: LIB3180-010-P2-M1-C1
gttctagatcgcgagcgggcgcccttttttgttttttttttttctgggcaaaacagggattacttttagcgcaccttaaaagggggggtttccaggaacacaccagggaaacttccaaggttttgaccatattaaggttgggcttagtttggccaccatataaaggcataacttggttaatggaaatggttaaaattaccaaggggggaaccaggtacttgcattcaatttgggggggaacaatgactttcacaaaaaattttaagattcccttaaaaaaacttttggttaaaaaaaagttggaaagcctgg

SEQ ID NO: 26996 - DNA, 394 bp, Zea mays
  Clone ID: LIB3180-010-P2-M1-C10
tttgcacgcatcgatgcattcaatcatattgtcaccgcggtcggccgggtttaaaccgagggccaagatggggcaaagaggacgtggacaccctcggggaggccgttctggagggggagaaggagggggagaaggccgacttaacgtccagcttaacgatgcccttacaataccgacgacatcagcattcgcacctgcattcccaccatcaaggtcatcattaagaagggcgtcaaggagatctcaagggccaccttggcaggccaaaaggtggtaccaaaagggacaacttgaagcctattgttacacccttggctgaactccttggagatgtaattgggattgacaatgatttgatttatgaatgaattggggaagtagctggcaatttggc

SEQ ID NO: 26997 - DNA, 172 bp, Zea mays
  Clone ID: LIB3180-010-P2-M1-C11
tctgaacttgggctggcgcgccaatctaatgttgcacaataatgcgaggggtgtgcatgtgctcctaccaaccatcggaccgattgtatttaaaaaagcgcccgcttagcttatctttgcccctaacaaccctgctattaaagttaataggggtgctaccctttaactgcta

SEQ ID NO: 26998 - DNA, 386 bp, Zea mays
  Clone ID: LIB3180-010-P2-M1-C12
tcgcattgctgggcgctcttcaccttaccagatttcgcaacagaaccttcggtccctgccgtctcttggcggtctggccggccgaggtgggtgatctgtagagcgaaacgccgagccttgagaggagggaggccgcaccggcgattgtagaagcagaaccggtggaggagtagaggagggcgccgaatcgatgcgcggcttcgcggacgccgtcgtggttgctcgggacgtggtggccttgtcgagcccgtccaaggcgcgtcggcgttggacatgacgagatacccgaggcttaacccagatggcctcccgctggccaatggcaacggcagcggcgcgagcaagaaaccttgaacgccggtgccgtccgcccccaaatcgagcca

SEQ ID NO: 26999 - DNA, 281 bp, Zea mays
  Clone ID: LIB3180-010-P2-M1-C3
tcggtttattctcgaattacgattcccaatccaggaaaccctaccagccttttggaaactcaaagagggacccgatggcacccaaggcggagaagaagccggcggcgaaaaaacccgcaaaggaggagcccgcgggcccggcggagaaaggccccgctgggaagaagccgaaagcggggaaacgggtcccggcgggaaaattcggcggcaagggaagcggggttgacaagaaagggcgggagaaaggcaaaaagagcgggggacctacaagaactacattt

SEQ ID NO: 27000 - DNA, 387 bp, Zea mays
  Clone ID: LIB3180-010-P2-M1-C4
tcttctttgacaagggaaaaaaaaccaggtctgtgtgtgtgtgagagagagagagaggcgaaagcaactcaagcgacgcgatggcgatggcggcgctgcgacccgaggggaggcgccttattcttttcttcaccggccccaacccgtctttggcgggcggtttctctgcggtgacgcgatccttcgccgtctcgcaaccggagatggcttcacttggtgcacgggctatttcaactcaaatcgtgaggaaccggatgaagatgtcaggaatattcagaagatcacaaaggctatgaagatggttgcagcatcaaagcttcgggcaggtcaaacaaggactgaaaattcacgtggcttggggcaaccggtcaccggccttcttgggga

SEQ ID NO: 27001 - DNA, 334 bp, Zea mays
  Clone ID: LIB3180-010-P2-M1-C5
gcccgagatggcgaacgcgagatcgggtgtcgctgtgaacgatgagtgcatgctgaaatttggcgagctgcaatcgaagaggctgcaccggttcataactttcaagatggacgacaaggtcaaggagataggtgtggaccaggtcggggatcgcgctaccagctacgatgacttcacaaacaggcttcctgagaatgactgccgatacgcgatctatgatttcgactttgttactgcagaggatgtccagagagcaggatcttctatatcctatggtccccattcttcggcaaggtgaagagcaagatgctttacgcaagctcaaaccagaaat

SEQ ID NO: 27002 - DNA, 233 bp, Zea mays
  Clone ID: LIB3180-010-P2-M1-C6
tttttgagcattcagaaacacaccaagcgggggacattagcaacaacctagcaacaatggctaccaagatattatgcctgcttgcgcttcttgagctttttgcgagcgcaacaaatgcgttcattattgcacaatgctcacttgcttcaaggtccattattacacaggtgcttccaccaggtacttcaatgggcttcgaacacccagctgtgcaagcctataggctacaacaa

SEQ ID NO: 27003 - DNA, 120 bp, Zea mays
  Clone ID: LIB3180-010-P2-M1-C8
tttaaacacacaatctaatgctgactagtgatggtgagttgcaaattaagggcctgattttggccttgccttgacccgtaggggatattggattggaaagggttctttcggtattggttt

SEQ ID NO: 27004 - DNA, 373 bp, Zea mays
  Clone ID: LIB3180-010-P2-M1-C9
tctgaagcagatgatttgctgctgcaacaagatggatgctactacacccaaggattcaaaggcccggtatgatgagattgggaaggaaggctttttctacctgaagaagggtggatacaaccctgataagatctacttcgttccaatctctggttttgaaggtgacaacatgattgagagggccaccaaccttgactggtacaagggcccaaccctacttgagggtttggacttgatcaatgagccaaaaagggcttaaacaagcccctgcgtcttccccttcaagatgtgtacaagattggtggtattggaactggccctgttggacgtgttgagactggtgtcattaaacctggtatggtggtacttttgg

SEQ ID NO: 27005 - DNA, 210 bp, Zea mays
  Clone ID: LIB3180-010-P2-M1-D1
gctggggaatacttcctttgccccgcggggggtgattttttaaaattgaattggaattcgccccgaacacccaccttatggggggcaaaggggacttttgggggaagaccaaagccggttaggggggaggacccttaaaccgcccccccccggggggggaggggggcaccggggcccaagttggttccattaggacggtttgggggggag

SEQ ID NO: 27006 - DNA, 296 bp, Zea mays
  Clone ID: LIB3180-010-P2-M1-D11
tcgggcgggttctttcgcaaaccttaacaccgaggcagggcttaaaaagcttgatgaggaccttctcactcgcagctacattactggctaccaagctttcaaggatgacttggctggctacacttcgttttcgtctgctccctcgtccaagtatatcaacgtagcaaggggggttaatcacattgatgcgctcgtgaggcttagcggaattactgcagagggccaaggtgtgaaaggtgaattcttaacagttcctcaaccccaacttcagatggtgcttaaacacaagccccaac

SEQ ID NO: 27007 - DNA, 313 bp, Zea mays
  Clone ID: LIB3180-010-P2-M1-D12
tcggcggcagggcgtaaagaggatcgccgaacagaacaacatgaagatggtcatcggtctcgtcgtgtgcctggctttgtcagctggcagcgcctttgcaatgcaaatgccctgcccctgcgcggggctgcaaggcttggaccgcgcttgcgccggcctgaccaccatgatgggcgccggcaggctgtacccctacgcggagtacctgaggcatgcccaaagcaacccggttgcggcggcgccctactacgcccgtgaaggcagacgagcgccatgtaccaaccccttcggcaacaatgctgccagcagcaca

SEQ ID NO: 27008 - DNA, 424 bp, Zea mays
  unsure at all n locations
  Clone ID: LIB3180-010-P2-M1-D2
tcgcttgggagggcgactagggttaggggcgaccggaggttcccaagcctggccagaatcacccatccctttcgttcaagccggcggagatcgcaagccgctggtgtcgaaaccggcctgcctttcttgcaggcccgccttctttctgtccggtctgtcttgggcgacgaaacttaagaccacagtgttaggaagctgtccaatcttccaggcaaacacaattcatcagtcagatacacttttaccaaggaatttttcagatcactccacgagaggttcaactctcgaagctagagaaccagaactctaccaaacaggccaggacgttttttaaatccccaattcagtaactggcttactgtangagaaggagagagatggagaacggcggcgcttaacccgacgttcccgacgatgcgaacga

SEQ ID NO: 27009 - DNA, 376 bp, Zea mays
  Clone ID: LIB3180-010-P2-M1-D3
gtgaagcaactcttcggcggcttcggttttcttcacaccacccaaagctctgtgcgaccacaggcttgcccccagcgccttctttcgcagtcatgtaccgcgcgggcggtagccttggcttcaaggcgcggcaaggcgggaacaggcttgccggccgccaggttggaagcaggcttgcctggagcaggaactatgctgcgaaggacatcaagtttgctggtgaggcccgtgctctgatgttgaggggtgttgaggagtggcagatgccgtcaaagtgacaatgggacctaagggccgcaatgtggttattgagcaaagctttggtgcaccgaaagtcacaaaggatggtgtgactgtagcaaagagcattgaattt

SEQ ID NO: 27010 - DNA, 382 bp, Zea mays
  Clone ID: LIB3180-010-P2-M1-D4
cagaccattagctttatctactccagagcgcagaagaacccgatcgacaccatgagggtgttgcttggtgcccttgctcttctggcttttgctgcgagcgccaccttcacgcatacaagcggggggtgggggtgccagccaccggcggcggttcatctaccggcggcggtgcatttgccaccttcggttcacctgccaccttcggtgcattttccaccggcggtccacctggcggcggcggtccaactggcaccgcggtccatgtgccgccgccggttcatttgccgccggcaccatgccactaccctacttaaacggcccgggcttagccttattcccaggcacacccatgcccgtgccaacaggcgcattcaagcccgtg

SEQ ID NO: 27011 - DNA, 363 bp, Zea mays
  Clone ID: LIB3180-010-P2-M1-D5
gtataaatgtgaagttgcggcaattgagggtggaaagttgatggcaaatgctgatgcttgtgaattctggggtctctttggcggatttgcttctttaccaaaaaagacattttctgaacttaacgggaaagattctactttcactttaaaattgctttgtgtaaacaagggccaatttgcccctattgattgcgaaattcttaaaagggagctattagattcaacaaaatggtacctactagactgggggtctgaatttatgtctggatgggtagagaaacaactcttgaagaaaggaaaccaggcgggttaacttcttggggattactacgtggagggaaccggcaaaaatcttatattatt

SEQ ID NO: 27012 - DNA, 144 bp, Zea mays
  Clone ID: LIB3180-010-P2-M1-D6
cttccgggggagggcgtaaagaggcttcaccaacaggacaggcttgaaaagggtggtggggtccttattacttgcaagttcattaattggttccaaactttcaaaggtgaattggctggctacactttggtttcggctggttcc

SEQ ID NO: 27013 - DNA, 302 bp, Zea mays
  Clone ID: LIB3180-010-P2-M1-D8
tttgtcggatctgagacgagacgaggtaccatcttattccaacttcgggacggacaagttaccattttattccaacttcggcttgaccggatcttgtcggacttggattcggccgaccaccccgggccggcggagatcaaagaagatggcagctggcgacacatttctttttaccttggagtctgtgaacgagggacaccctgacaagctctgtgaccaggtcttaaatgccggtcttgacgcttggcttgctgaggacctgacagcaagggtgcttgtgagacctgcaccaagaccaacat

SEQ ID NO: 27014 - DNA, 330 bp, Zea mays
  Clone ID: LIB3180-010-P2-M1-D9
tcggcggtggggccgagagcgaccggcttgcctttttatcctccccggcttccggcggcgtctttactggttcacttcgacgccttccctggcggtggcgcaactgggaggcgggccctggcgcgcgcgacgaccagccttcatgacggggacacgctggtgattcatagcgcaccacccgccgggtcggcctcgggctcttttgcgccccttcaacggattactggtgcccaacgcttgtgcttgctgtgtaaccggcgcgtctgcttgcgggcgataccttcgcgggcggcggcgatgggccaggaccttgtcgagatccattcgagc

SEQ ID NO: 27015 - DNA, 398 bp, Zea mays
  Clone ID: LIB3180-010-P2-M1-E1
tcgtttagatcgcgagcgggcggccttttttttttttttttttttttttttttttggttttttttttttttttttttttttttttttttttttttaaaaaattaaacgggggggatttttttattaaaaccattatttgaaatgggactttataaggattttttggtacaaggggtgaaaaaaaacttggttttaaaaaggttggcgttctaaaaattatttttgattaagggcaaattttttccaggggaaaaaaaactattttgcctgtttaatgagtttcttttattaaaaaggttaaggacaaatttttcgttacgattaaaaaaagatttgggaacttaaattttgaatgtgttatacaatatcaattttacaaaatttattttagggggaac

SEQ ID NO: 27016 - DNA, 280 bp, Zea mays
  Clone ID: LIB3180-010-P2-M1-E10
tcgaacataactgagagtcttggtattcaaaaagcttcaaccggtgctggcaatgatggaaggctgagtatagaacacaccagatctatggccccaagctctttgaccccctgctctgcgctttctattcatgtaataaataagaacgggaatgaggatgctttgcctgtctggcttgaaacgaggcctgtagaacggggtgcttgagatatgattgggggtggtgcgctttcaacaaaagaaactgagataaaggtataaaaggtacaaaaactctttg

SEQ ID NO: 27017 - DNA, 413 bp, Zea mays
  Clone ID: LIB3180-010-P2-M1-E11
tcgaacgagaccaggtctttcctgctgccggtctaccccaaggcgcgttagggccgcgccctgcgcgagttcggggacgtcaagcttgccgccaggatggtcgacgacggcggaagaaaggcttggaacaggatggaggtcgcgaaggcggccacggcggggaccaattccacggcgttgcttccgatcaagggcaatgtcttccccgatggccagtattacacatctatctttattggcaacccttcaagaccatactttttgatgttgatactggaagcgacttgacgtggatccagtgtgatgcaccatgtacaaactgcgcaaagggaccacattctctatataagccagcaaaagaaaagattgtgccttctagagacttggtgtgccaagaattggaaggcaaccag

SEQ ID NO: 27018 - DNA, 410 bp, Zea mays
  Clone ID: LIB3180-010-P2-M1-E12
tcggctggaaccgggtccgaacgtccgcttggctttccttggattaccatgggactcggccgtccgactgccgggaagcaaaagcaaagcctgcaaacccaaccattgataacgccaacgatcggcagggggtccttctggcgtacatcctcccattccccttcttcgcatgcttaaaggctcaatttgccgactctgcgtgcccggccggaaacagcgccacctaccagaagtcctagttgttatgggacaatgacgtttcgacgctgcctacatgacgcccttatgcaaagacaaactgggaggttttaaagacacctatctacaagaccctcctaatgcatttataaaggctggtatggacaacacttaaattaaatgctgtgacatggtggacataggttataaaa

SEQ ID NO: 27019 - DNA, 313 bp, Zea mays
  Clone ID: LIB3180-010-P2-M1-E2
ttttaaaaaaaaccccaaaggccaaaagcggaccaaaaatagcattccccgcggtcaaagaagggaacaaaacaccaacccctaacaaacgggcccccccctaaaaaacattatagccacaaagcgcaaacactttcccaaagcaaaaaaacccattttccccgttaaaggagggcccttaaataaaaagaaacccgacaaaatttcccttccataaaaaaaaaaatgcgaaaccaaaccttcagcccgctaaaacaaatccaccctacccaaaattaacttacgggacccacgaaaaaaaaaaacaaccccc

SEQ ID NO: 27020 - DNA, 225 bp, Zea mays
  Clone ID: LIB3180-010-P2-M1-E4
ggttaaaaacgcgaacggccgcccttttttttaagatttaaacgggggtgggggggattgaaggctgaacatagaacacaacagaactatcaacccaaactattaaaacccctgtttggcattggtaataaaggaaaaaataaaaaacgaaataaagaataaatgactgactaccttgaaagaaagaaaaaaaaaaacagaaatgtaaaaaaaactgaactaaaa

SEQ ID NO: 27021 - DNA, 416 bp, Zea mays
  Clone ID: LIB3180-010-P2-M1-E5
gacccccggcctttacttctagccgtttacccgaaggcgccgggggggctttatttaccatgatcatgtgcaagaaaaaccggcgcgaggactggaagtacatttttcatgagggggttgtatatgccaagaaggactacaacctggccaagcaccccaaacttgacctggccaacctggaggggattaaacttattccaaggtttaaattcaaagaggattttaaggagacccttttcttgcaggactatacttgtaacttaacaaccattggatttagcaccttcggaactttcttaaacttgcgttagaaggtgggcccaacaaccttaaaaaattcttcaaagccccgttccgttccttttgcttttggccaaccggtggaccgcccaagggttcccctttcttttggggaa

SEQ ID NO: 27022 - DNA, 266 bp, Zea mays
  Clone ID: LIB3180-010-P2-M1-E7
tcgtcccgttggtggatcttggcactgatcaggggtgtttgctttgctttggcgggctaatggcgcccgcttcatgtggccggtcgtcgcaaagggtgttccacttcggcaagggcaagagcgagggcaacaagaacatgaaagaacttcttggcggcaagggcgcgaacctggcggagatggcgagcattcggctgtcggtgcccccggggttcacggggtcaacggaggcgtgccaacaataccaagaagtcggcgcgcccttc

SEQ ID NO: 27023 - DNA, 345 bp, Zea mays
  Clone ID: LIB3180-010-P2-M1-E9
tctggtgaatcccccctttccttttacgcttcaccactgatcatggggctactcagcattatccgcaagatcaagcgcaaggggaaggagatgcgcattcttatgggtggcctggacaactcggggaagacaaccatcggtcttaagatcaatggggaggacaccagcgtcattagcccaacccttggattcaacatcaagaccattaagtaccacaaatactctttgaacatattggatgttggaggacagaagaaatcaagtcttactggagaaactactttgagcagactgatggattaagttgggttggtggtaggtcaaacataaaggggcttgatgatt

SEQ ID NO: 27024 - DNA, 348 bp, Zea mays
  Clone ID: LIB3180-010-P2-M1-F1
ggggccaaggtgtctttaaacgggagaaaggttgtttgaaaggacttaaaccgggggatttgggcctccaactccaaggttgcccctgccaaggggggtgtttgtttaacctcccaggtaataataatgaacccccctggccgaattgccaatggttttgcccaagttttggactgcccaacttaaacaattgttgtaaagtttgttgacctggttcccaaaattgttggcgatccggcaaggacctggaaaaggagcccaaatttttaaagaacggggatgctggattggggaaaatggttccaactaagcccatggggggggagaccttttttaagatcctccttt

SEQ ID NO: 27025 - DNA, 417 bp, Zea mays
  Clone ID: LIB3180-010-P2-M1-F10
tcgtgatgaagagaaggcacttaggaagaaggtccgaggtatcatggaaaaggaaatcgcgcccattatgactgagtactgggagaaggcttaattcccatttcatgccattcccagccttgccagtcttggtttagctggtggtacaataaaggggtatgggtgccctggactttcgcttacagctagtgctatttcgataggaaaggttgcaccggtcgatgcaagctgcttcacatttattctagtgcacttcttgtggctatttacactattgccctttgtggatctgaggctcaaaagcagaaatacttaccatcttttacccagttcaaaactattggttgctgggcattgacagaaccagattattgaagtgatgcaagcttcctaaggactgcagcaaccaaagtacct

SEQ ID NO: 27026 - DNA, 420 bp, Zea mays
  Clone ID: LIB3180-010-P2-M1-F11
tcggttaggaagaggaggagggcaggatgtcgcaccgtaaggtcgagcacccgaggcacgggttcctcgggttccttaccaggaagggcttctcccggcaccgcgggaaggggaagtgatttcccagggatgaccccaagaagccttggcatctcactggcttccttggctacaaggctggcatgactcacattgaccgcgagggtgagaagcccggatccaaactccataagaaggaaacttgtgaggctggtaccatattgaaacccctcctcttggcattggtgggctcgtggcatatgttaagactcctggggggcttcggacacttaactttgtttgggcccaacatgttaacgaacaagtgaggagaaagttctacaagaactggtgcaagagcaagaagaaggctttcacaaa

SEQ ID NO: 27027 - DNA, 340 bp, Zea mays
  Clone ID: LIB3180-010-P2-M1-F2
gttagcggaaaaaatttcaaggtttcttgaaagggcttatataccgctaaatgcttggtttcaatgggtcaacagtacacaatcaggtgagtatgaaagcaccctctattggcattggagagacaacattacgaccaaagggttggacccaaagactttgacatttggattggatgactattcttgggcattttattctaatgattaaaaaccccattgtgaccttcggtggtggatgcttctaacttccaaatgattttgttcattggaaaagttcttaaaaaggattgggcttttgagaaaggatactattaaatggtaaattaaactttccaatttt

SEQ ID NO: 27028 - DNA, 328 bp, Zea mays
  Clone ID: LIB3180-010-P2-M1-F3
ggggccttggcaagctcaagagggtgctcttgggaagtgtcagcgactatgttgtgaacaatgcaacctgccctgtcaccgtcgtcaagtcaacaagcaccgaaggttgatcttatcgccgagatgcctggatgtgatgttgtaataaagatggttggcctgatgaagaacatgcactagtttctagctatttgaaacatgttgaacgaggcaattctaatgtaataataatagacaaagtgccttatgaaggacaggttgacatgcctttgttgctgtatgagtgatgtttataggtttgagggtttgaagatgtggatcatttgcc

SEQ ID NO: 27029 - DNA, 427 bp, Zea mays
  Clone ID: LIB3180-010-P2-M1-F4
tcttctagatcgcgagcggccggcctttttttttttttttttttaacttagaagaacatcatcactccaccggatcgactacaggagcagccgatcgatcgatagatcgcgatcgaacgatcaactacacctagctataggtacaaaggaagcaacacgacaatcggcggcaagattaacattatcctttggttgggttggcggccttactagctctctcttccccggccgggcctaactggctctacctgcaagctctgtcttgatgacgaacgacacaccatgcatgcgcccatgcacgactcatatatgcatgaatggacacatgcgcgtgtggcgccgttgtatgcggcggccggcgataaccattaataagggccgccggaaccagttggggccttataattgttcctgcggggccctgggg

SEQ ID NO: 27030 - DNA, 273 bp, Zea mays
  Clone ID: LIB3180-010-P2-M1-F6
cccttttataacgaaaggggtgaaagcccggtgccgggaatttagtttaagcacgcggggcacgggttccttgggtttctttccaggaagggcttctcccggcaccgcgggaaggggaaatgaattcccagggatgaccccaaaaagccctggcattttacttgctttcttgggtaccagggttggatgacttacaatggccgcgagggtgtgaaacccggatccaaacttcataaaaaggaaacttgtgagggtggtaccatattgaaaccc

SEQ ID NO: 27031 - DNA, 351 bp, Zea mays
  Clone ID: LIB3180-010-P2-M1-F7
tctggatattctggtggaaaatctctcgtgggagaggataaacttgagctcgcaacttctcttattgagaaggcgaaagcaaagggggtttctcttttgcttcccactgatattggagtaacggacaagtttgcaacttatgcttagagcaagaatggccctgccactgctattcctgatgactggatgggtcttgatggtggcccttattccacccaaacattcaaccgaacattggacaccacccaaactggttttggaaccgccccattggagtggttgagttccagaaggttgcaacttgcacttaagccaatggccaaaaacttgcttagcttaccaaccccaaag

SEQ ID NO: 27032 - DNA, 299 bp, Zea mays
  Clone ID: LIB3180-010-P2-M1-F8
tcggaacaaggaaactgggtgggacgtgcctattcacgtcgacgccgcgagcggagggttcatagcgccattcctctaccctgagctcgagtgggacttcaagctgcctttggtgaagagcattaatgtcagcgggcacaagtaccggctcgtctaccctggtgttggctgggtcatctggcggagcaaggatgatctgcctgaggagcttatctttcatatcaactacctggggacggaccaacctacgttcacgtcaacttcttcaaaaggtccaggcagatcattgcgcaatacta

SEQ ID NO: 27033 - DNA, 210 bp, Zea mays
  Clone ID: LIB3180-010-P2-M1-F9
tcgggttcagggaggcaaaccctaccgggccgggacgtttgacgccgacggggggaggttgataatccaagtggaactgcaacacgcctttcaccaagggaaattctttgcgggcattggcaagaaacttaaggggtctgattgatctgcacatacccctcttggaaatattatatttacagacttgcaatgcccggcaatatgatgggc

SEQ ID NO: 27034 - DNA, 201 bp, Zea mays
  Clone ID: LIB3180-010-P2-M1-G2
agcctttttgggggaaaaacgacacaccaccgggggaggcgtaaaaccaagagggggggggcgcgctaaaacaaccaaaggaaagggcagtggttgggcaaaaggacaatttgacgaaggaagaagaagaggaaccaagaactgagaaccggaggggccacccacaaaaggggcacaaagacgggcaagtgggaggaaaaa

SEQ ID NO: 27035 - DNA, 246 bp, Zea mays
  Clone ID: LIB3180-010-P2-M1-G7
tttgaggagcccagattagacaaaccctaaggggaagattacgaacggggggggggctaccgaacccaacccaaaccaacctcatggccccgagaaagggcacaaggacaaaacggatcgggccaaggacgaaggaacagcccgcagccggacccaaaaataatgccaagggaaggaaaagaaaagaaaaccaaaccccagaagcgggagtaccgggcaaaagcaagcaaacgggggggagcccca

SEQ ID NO: 27036 - DNA, 270 bp, Zea mays
  unsure at all n locations
  Clone ID: LIB3180-010-P2-M1-G8
accggccgggtcaagaaatgaccgagggggaaattgaactcagaaggggggggggaaccgagcgtgaccctgcaatacatgaaattaacaggctaagggattggaacggggcatacccagaaagacgtgaagatgaactggtagaagcttcaaataacgcccacaacaatgatattaaaggaggcttaattttcaaaaaactggctacactgagacaatggctacaggaatatagcgggaatcgcaagaagggagnaaagggagaaaatt

SEQ ID NO: 27037 - DNA, 364 bp, Zea mays
  unsure at all n locations
  Clone ID: LIB3180-010-P2-M1-H3
aaaganaaggggggagggggggggagaagggagagggggagaagggagggggggacggttttttttagagggggggagaaacgggggggggaggggggggggggggggtaaaaaataagatgggggggggggaagggggggggggggggggagggggggggggggggaggggggggggggggggggggggtgggggggggggggggggggggggggggggaggggggggggggggtgggggggggggagggggggggggaggggaggaggaagggggggagggggggaggagagggggagggggggggggaaggggggggggggagggggggggggagaggaggggggggagaggggggggggg

SEQ ID NO: 27038 - DNA, 264 bp, Zea mays
  unsure at all n locations
  Clone ID: LIB3180-010-P2-M1-H9
aaagggggggtggttnttaggagaggggggggggggggggggggaaaatagggaaaaaaggggaggggggagggggacaaaaggaatgcaggaaactgggtgttgtttgggtggggagaactaaggaatggggggggcggggaggtggcgtggggggggggggcacgggggggggggcgggctaagaacaaaaatgggtggacggttgggccgggggagggaaacggggaggagatattgaggtggtgggcggggggatggggg

SEQ ID NO: 27039 - DNA, 396 bp, Zea mays
  Clone ID: LIB3180-011-P2-M1-A1
tctgtaaaaaacaattattctattgggatgagattcaggatgaggtttgaaggggaagaggcccccgagcagaggtttactggtacaatagttggctgtgaaaatcttgacccactatggcctgattccagttggagatacttgaaggtgcgctgggatgagccttctactatcccgcggccagataaggtctctccctggaagatagagcctgcttcatcacctcctgttaatcctctccctctttctagaggaaaaagacctagacaaaatgcaccttcaccttcccctgaatcatctgttctcacaaaagaaggtgcaaccaagattgatactgattctgctcaaacaccacattaaaattcggtcttgcaaagtcaagagcagatgagcttt

SEQ ID NO: 27040 - DNA, 127 bp, Zea mays
  unsure at all n locations
  Clone ID: LIB3180-011-P2-M1-A10
ttgtggacgcgtgggccgcctccgcccaccggtcgccgccgncgaggtgttctcgtcggccgcggcggaggcggagagggcgatacgggacgggccgtggaacgactggagccggtccgagatccaa

SEQ ID NO: 27041 - DNA, 248 bp, Zea mays
  Clone ID: LIB3180-011-P2-M1-A11
tcttacctgtccgtgggcgaccgcgtggcgctggagccgggcgtcagctgctggcgctgccgccactgcaagggcgggcggtacaacctgtgcgaggacatgaagttcttcgccaccccgccggtgcacggctcgctggcgaaccaggtggtgcacccggccgacctgtgcttcaagctccccgacggggtgagcctggaggagggcgccatgtgcgagccgctgagcgtgggcgtgcactcgtgccg

SEQ ID NO: 27042 - DNA, 162 bp, Zea mays
  Clone ID: LIB3180-011-P2-M1-A12
tcttctataacagcatgcgaaacttggcatccatgcgcagtagtcgtccaagacgggggctctgtatatggaggctgcctgcattgcatgtagcacccaccgttggctaactatgaggtgtattttggatccttgcagtaagaatctcagaatctatgccct

SEQ ID NO: 27043 - DNA, 326 bp, Zea mays
  Clone ID: LIB3180-011-P2-M1-A2
tcgattttgagcattcagaaacacaccaagcgaagcgcactagcaacgacctaacaacaatggctaccaagatattagcccttcttgcgcttcttgccctttttgtgagcgcaacaaatgcgttcattattccacaatgctcacttgctcctagggccattattccacagttccttccaacagttacttcaatgggcttcgaacacctagctgggcaagccaacatgcaacaacaagggctttgggcgagcggcttacaacaaccaattgcccaattgcaacaacaattcttggcacattttacaatacaaggcattacaacgcaa

SEQ ID NO: 27044 - DNA, 296 bp, Zea mays
  unsure at all n locations
  Clone ID: LIB3180-011-P2-M1-A3
tttacgcgtncgaccaatctgaaaggcatggccagaatgatcagcacttcagaagaaatgcacaggttggttcaatatcatgcaattggggaaggcgaataggtgcgcttattgccaaggctatggagaaagttggcaaagagggtgtcatcactattgcggaccgtaacaccctttataatgagcttgaagttgtggagggtatgaaattagaccgaggtgtcatctcttcgtgctttattacccactcaaaaacccaaaaatgtgaactggaagagccacttatcttaattcat

SEQ ID NO: 27045 - DNA, 330 bp, Zea mays
  Clone ID: LIB3180-011-P2-M1-A5
ggctcttgtctccaggctccagccggaggaggtgctggttttggacgcggtccggagcgggacgtaccggggccgcctcgccgcggacgagcccgtggaagggaagttggagacccgcgcggcgcgcgcgcggggaggcgtgggggctgccaaggcagtccaggctctggtcccacccggcagcgtggtggacgggctcggcgccgccgtgctcgcggagtgcgagatccggggcaaggcggccagcatggtggtgacgtggccggcggacgccaggcccgcggagtttggggtcatgcggcgcgttgcggcggaacttggcgttgacac

SEQ ID NO: 27046 - DNA, 305 bp, Zea mays
  Clone ID: LIB3180-011-P2-M1-A6
ctacaactttgttggtcgtttattggggccgcgaggtaactccctgaaaagggttgaagcttcaacccaatgtagagtttacattcgaggacggggttctgtgaaagactctgttaaggaagacaagctgagggataaacctgggtatgaacaccttaatgaacaactgcatgtgcttgtggaagcagagtttccagcagatatggttgatgtgcgtcttaatcaagctgtgtccattctagaggatcttcttaaaccaattgacgagtccatggactactacaagaagcagcaactgagggagc

SEQ ID NO: 27047 - DNA, 244 bp, Zea mays
  Clone ID: LIB3180-011-P2-M1-A7
tcgcctggcccggctgccccaaatgcgtcggcatcgcgccgtcgctgctgcacaccgtcgatgactcccgccccttcgaacgccgccggcgacctcttcgctgccaacctcacgggcgcgctccttgcggttgcctcctccgccttcattggcgtcagcttcatcgtcaagaagaagggcctacgccgggccgtcaccgtcggcgcccgcgcaggtgttggaggctatgggtacctcttggagc

SEQ ID NO: 27048 - DNA, 407 bp, Zea mays
  Clone ID: LIB3180-011-P2-M1-A8
gccatcatgtcgcgcaggctataccaacacgcagcggtgatgtctgcttgggctccggctgcctatacgctcgtcttgctcctgtatcttctagcaggtgctgtcgtcactgctaagaccaacaatggtgttgatcctggtcctaggcagcaggagccctctatgcccgtggactccagcggtgacgaagccctctctgcgttgacctgcactgaaccttctcgcgctcggcagttggcagtcctgtcctgtggaccgtatgacgtgtttatttatgggcggcgccttcgtctccactccccaccgaaggaagcgagaagcccagaagggatggcaaccggtagtgaggccttcaaagcagctgaggctgtggttgactggcataaacaggacagcaagaggatgct

SEQ ID NO: 27049 - DNA, 344 bp, Zea mays
  Clone ID: LIB3180-011-P2-M1-A9
gaaacacaccaagcgaagcgcactagcaacgacctaacaacaatggctaccaagatattagccctccttgcgcttcttgccctttttgtgagcgcaacaaatgcgttcattattccacaatgctcacttgctcctagtgccattattccacagttcctcccaccagttacttcaatgggcttcgaacacctagctgtgcaagccaacatgcaacaacaagcgcttgcggcgagcgtcttacaacaaccaattgcccaattgcaacaacaattcttgccacatctaacaatacaagccattacaacgcaacagcaacaacagtttctaccagcactgagccacct

SEQ ID NO: 27050 - DNA, 333 bp, Zea mays
  Clone ID: LIB3180-011-P2-M1-B1
gatctttctccctcaatagtcttcattgatgagattgacgcagttggaacgaagaggtatgatgctcattcaggaggggagcgtgagattcaaagaactatgttggagctgctgaatcagctagatggttttgactcacgtggagatgttaaagtcattctagcaacaaaccgcattgaaagtcttgatccagccttgcttcggccaggccgtatagaccggaagattgaattttctctaccagatattaaaactagacgacgcatcttccagatacacacatcgaaaatgacattagctgatgatgtgaacttggaagagtttgttatgacc

SEQ ID NO: 27051 - DNA, 236 bp, Zea mays
  Clone ID: LIB3180-011-P2-M1-B10
tttctagtccgctgcctccgcgctcccccaaaacccaccaccggcacgccggaatcctagccttcgccaaccagtcgccatgagagagatccttcacatccagggcgggcagggcggtaaccagatcggggccaagttctgggaggggatatgcgacgaggaccgcattgatcacaccggaaagtacgccggcgacttcgaccttcaactggggcgcatcaacgtctactacaacg

SEQ ID NO: 27052 - DNA, 350 bp, Zea mays
  Clone ID: LIB3180-011-P2-M1-B11
caagaatgctgcctacattggcacccctggcaagggtatccttgctgctgatgagtccactggcaccattggcaagcgcctttccagcatcaatgtcgagaacgttgaggagaaccgccgtgcccttccggaggctctattcttgtggcctggggctctccagtacaatcagcgggggaatcctcttcgaggagaccctgtaccagaagaccaaggatggcaagccttttgttgatgtcctcaaggagggaggcgtcctccctggcatcaaggttgacaagggcaccattgaggttgttggcactgataaggagaccaccacccaaggccatgacgaccttggcaagcgc

SEQ ID NO: 27053 - DNA, 212 bp, Zea mays
  Clone ID: LIB3180-011-P2-M1-B12
tttctgtcgtccttgccatttcccaccctacttgggctaggcggcaggacggacgcggaccggcaggggaggagaacacacgaccgcgacggaatcgcgaggggtaggcgaggcgaggcgaggcggccaccgagggaggagcagtccagcagagcgtaaggggcgcgagggatggacgccaacgggtgcggggagaatgacgacgcgcgggc

SEQ ID NO: 27054 - DNA, 358 bp, Zea mays
  Clone ID: LIB3180-011-P2-M1-B2
gtgatattaaggctctgcagaagaacctagctgccagagaattgctgtaccaacaccagcataataaaaggatgaggtgtcccagcatggtacagcttctcttcaataccctgtactacaagcgattcttcccatattacgccttcaatgtgctcggtgggcttgacagcgaggggaaaggatgcgttttcacctatgatgcaataggttcctatgagagaaccggttacagtgctcaaggaacgggatctactttgatcatgccagtcctggacaatcaactaaaatcaccaagtcctctattactccctgtcagggatgctgtcacaccattggcggagtcagaggccatcgatct

SEQ ID NO: 27055 - DNA, 310 bp, Zea mays
  Clone ID: LIB3180-011-P2-M1-B3
atgtttttttttttaggctctgcagaagaacctagctgctagagaattgctgtgcgagcatcaacataataaaaggatgagctgtcccgtcctggcacagctactgtccaatgcgctggactacaagcgattcttcccatattacgccttcaatgtgctcggtgggcttgacagcgaggggaaaggaccactttttcacctatgatgcaggatgttcctatgagagaacccggtacagaggtcaccgatctagatgtaccatgattacgccagcgctggtccatctacttaaatcaccaattgtgccatt

SEQ ID NO: 27056 - DNA, 218 bp, Zea mays
  Clone ID: LIB3180-011-P2-M1-B4
ttttcttgtccatatgtacttcaagtgtagacggtggcgggacgctcacaatgtttgcaccttgatcagagagaggaattcccatgtttatgaggcgtttttcaagggttatggagacgactacttgatctaaggattacgcactagagtctgaatatgccagatactgtggatagacatcttaaatgcacatactttgttgggtgcaagctagcagt

SEQ ID NO: 27057 - DNA, 190 bp, Zea mays
  Clone ID: LIB3180-011-P2-M1-B5
cccttcttttctatcccttggcccgccggtccgccaagggcattggccttgggaatgccggttcccaacaagtttaattgattgggaggccccggctaatcccttgggaaaaagaatccttctttcaccaccccgaccaggggttttgccttggcccccgggaatttgaacaaaccttcaaatccccgca

SEQ ID NO: 27058 - DNA, 355 bp, Zea mays
  unsure at all n locations
  Clone ID: LIB3180-011-P2-M1-B6
cgtgtcgcgtgggcgcgccgncgccaacgcaacccttgcagccccaatccctcacagcaaccatggctggcgcgcaggagtccctctctctggtgggcacgatgcgcggccacaacggcgaggtgacggcgatcgcgaccccgatcgacaactcgccgttcatcgtctcctcctcccgcgacaagtccctgctggtgtgggacctgaccaacccggtccactccaccccggaatccggcgccaccgccgactacggcgttccctttcgccgncttaccggncactcccacttngtccaggacgtcgtcctcagttccgacggccagttcgccctttccggctcctgggatggaga

SEQ ID NO: 27059 - DNA, 374 bp, Zea mays
  unsure at all n locations
  Clone ID: LIB3180-011-P2-M1-B7
tcgtcaccgggggcatcacacaacacctccggacctcccctcccggtcgacgcctcgacggtccgctcccttccaaaaacccacagcccgcttcgacgcttccttccaaaacccacaggccgcttcggcgcttcctcacaaaaacctaccacctggcacttttacttcaccacacacccacacccccgngccatgggctnttcttccccgaccttccttttcttcccccaccttattcattttcggcttcaacccctacccagcgtnccgccggttcaccttactacccttccctttctgcgcttccttccggttcaccttcactcggttcggcttaaccgaccccaccttccttccctaccggttggcttttt

SEQ ID NO: 27060 - DNA, 402 bp, Zea mays
  Clone ID: LIB3180-011-P2-M1-B8
gcgcgtgctgcttcaccgaatcgagtcagaccctgtccgaatccgagccaagggatggcaaccggtagtgaggcctcgaaggcagctgaggctgtggttgactggcataaacaggacagcaagaggatgctccatgcggtttaccgtgttggggatctggaccgtacaatcaagtactacacggaatgctttgggatgaaactgctgaggaaaagggatgttcctgatgagaagtacaccaacgccttccttggctttgggccagagaacaccaactttgcagttgaattgacatacaactatggcgttgacaagtatgatattggaacgggctttgggcatttcgcaattgctaatgatgatttagctgagaatatcaaatccaagggtggcaagatcacc

SEQ ID NO: 27061 - DNA, 229 bp, Zea mays
  Clone ID: LIB3180-011-P2-M1-B9
gcatttgcatctgagttcctgattgttgtattccagtttcttctgtgagttttgtgggatcgcgaggaggaaggatgtcgtgctgcggaggcaactgcgggtgcggcgccggctgcaagtgcggcgccggctgcggagggtgcaagatgtacccggacatggctgagcaggtgaccaccactacccagactctcatcatgggtgttgcaccgtccaagggcgggttcga

SEQ ID NO: 27062 - DNA, 345 bp, Zea mays
  unsure at all n locations
  Clone ID: LIB3180-011-P2-M1-C1
catgncgttcgccgcctccagttctgtggtcgtgttttctgccatcagccagcccgtctgccgtcgtgagatctcatggcaacgagtgcatctactgatgctagcagcagcgaaggaagttttccagtcgcaaataacactgccatcgcaaaacaagtcttggctgctgcttgtatggtgatgatgagaaaaaaccattggggaggtatgccgagatacttgaaagaactggaaagggtttgggagggcaacacgaggattaggtgtagactctgtaaccatgtttataatggaagatattctagagttaaagcacatatgttggaaaattccgggttttgggtg

SEQ ID NO: 27063 - DNA, 405 bp, Zea mays
  Clone ID: LIB3180-011-P2-M1-C10
ttggaaagcagcaaccgcgttggagcttgcgcaggccttctcaacgtccatgtctgataccgcaccacagaaccggttgaccagcgttcccagtccaagagttcctcttagcccaggggctagggatcagtctggcttctcaaggctcactgacagcaggacgttacgctccagcccttcccagcgaaagataaatggctactgatcgcttggcacacatattacacgtgtcacgatgacagttggcctcgatgaagcgccccgctgtatcttcatactcaactgcccctgcgtggagaagtccaattgttgctttgtcagatggtggcacgtgagtggtgataatctcaatgatagcaaacaaaaggctcctctttcacaaggttctggtcagtgatttatgac

SEQ ID NO: 27064 - DNA, 340 bp, Zea mays
  Clone ID: LIB3180-011-P2-M1-C11
tttttcctgaagaatgatgatatactggccaaggaggcaaagttgaagataaaacgagtcgatccaacattagacatggaggcagacactggagatgattacattcatcttccggaccatgggattcaccgtgatggtagcaaagagacagtcgatgctgacagtgagttggcgaggaggacgctgtctcaggacctgaaccgtcatgcagctgttgttcttgaagggagatctcttgatgttgagtcaactgatccaaagactttagctgaagcccttgcaagatccaagaaagaaccaccttctacttctaatgttgatgatgataatcatgagagac

SEQ ID NO: 27065 - DNA, 322 bp, Zea mays
  unsure at all n locations
  Clone ID: LIB3180-011-P2-M1-C12
tcnccccgatcccctctcgttcctccctggctccctcgtcgcctcatcaatgcaagatccaatctttgctgctgccactcggcgatccgatcgttctcgatcaaggtcggtggccatggctcgctgccgccatcacctcctcctccttcccgtcttacttgccttggctgctgctgctgcggcgcagagtcatggggaagcctccgccgtcttcatcgatgcctcgtcgcaccgctaccttcgggaccagcaagccgaccaccaagacgcttcaatgtcggtaaatgaaggttctgccggtggttcttgcttgcttgggttt

SEQ ID NO: 27066 - DNA, 356 bp, Zea mays
  Clone ID: LIB3180-011-P2-M1-C2
tgaatacgttttcactcatggaatcactggtgggggacactatatactacaggggggattggctacaacacctgcaatgttcaacaggtcacttacaggagatgagagaagtcatttacctgtttatggagccataatgataacagcaagccatctacgctacaatcggaatgggctcaagtatgatacaagaaaactattgctaaataaagctgatatcaaagatagacctgagcgggctttcaaaatatatcaggaatctgcacattataacctgtaagaacatggagaaggtttgaaagtagatagcaataatgcgtactttcgtgttattttatgcttttggtcaggtacaa

SEQ ID NO: 27067 - DNA, 376 bp, Zea mays
  Clone ID: LIB3180-011-P2-M1-C3
tttttatcgtgcacctgtggagccctactaaacgggcgggatgcaagtgcttttatgtctgcacaagtcctgtgaaactgtttactgcgacctgcagattttactcttggagtgccctgagtagattttagcaataatatccaacatgtaacatgttacggacatgtacccaaacgtgatccagttttagttaagaaacaccaacaccaaagacgaacgctgtttaatatagatatagaaattacaaggtcttagaaattacaaaaagattaccgggcgggcggcattttaggggccactgtttacttacttgggctttcaaggaaaattttttttttttagggggacctctatttcatttaattggccgtccttt

SEQ ID NO: 27068 - DNA, 69 bp, Zea mays
  Clone ID: LIB3180-011-P2-M1-C4
tagtggaccgccggccaaccacaaccaacggggggaggcccaagaacacgggcggcccaaaaacccaca

SEQ ID NO: 27069 - DNA, 379 bp, Zea mays
  Clone ID: LIB3180-011-P2-M1-C5
tctttatagccgcactgtgagagagggacgcggcctgttgtcccggcttttagacgcaacttccatcgctgcgaagctatccattcgtgttcgtcatggccgccagcgtcaccgtggaaaacctcaaccccaaggtcttaaaatgtgagtatgcagtccgtggggagattgtcatccatgctcagcgcctgcagcaacaactacaaacacaaccagggtctcttccttttgatgagatcctctattgcaatattgggaatccccaatctcttggtcagcaacctgtgacattcttcagggaggttcttgctctttgtgatcatccgtgcctcttggaaaaagaggaaaccaaatcattggtcagtgctgatgcaatttc

SEQ ID NO: 27070 - DNA, 250 bp, Zea mays
  Clone ID: LIB3180-011-P2-M1-C6
tcggtgatatcgtccaccacgatgacgaggcacccaaaatccctggatgctccaacgattttattctggttaaagtgcaaagctgggtcaatggcaaagagggtggcgaggttgttggcgtccgtgctcggtttggtccaaaaattgtcttcaaggagaagcacgccaaccgaacttaactcacgcttgcagaccctattgactggtggtcttctccggaacattaaggttcctggagatgttcttttag

SEQ ID NO: 27071 - DNA, 99 bp, Zea mays
  Clone ID: LIB3180-011-P2-M1-C7
cttggacgcgtgggttgagaatgaagacatagatgaagcctttaggtgtataagagagctcaaccttccatttttccatcatgagggtgtgaagcgtgc

SEQ ID NO: 27072 - DNA, 366 bp, Zea mays
  Clone ID: LIB3180-011-P2-M1-C8
tgctaatcgcgagcgggcgacctttttttttttttttgagagacgatgcatgtgatggctattcagggaggcccatacaagccatgtgcacattcgcaatgcgggaacaacggtaaaaagctatctagtgtagcgaaaacccaatacgtcgacccatgacttggcaagcactaggatcaaccatcaggcactggtcggctgcacgaagtgctgagccacgaagcggcgctggaactttacggtggctgacttgggcaggtcagagcgcgatgaacaccctcttgggcaccttgaatgactgcaggattccgcgacagtgctccagtaacttcatcttccgcagagccaaaccttcctgcggcatca

SEQ ID NO: 27073 - DNA, 290 bp, Zea mays
  Clone ID: LIB3180-011-P2-M1-C9
tcgcgcgagcggccgctcgcgatctagaaccttcctctctcgcagcaccggctctcaacctccgccgccgctcgcccggggcgtcacccacccgcgcagaaggcccccgccgctcaaactaccggtgccctaaaccccgatattcttcttcgcctccctttcctcctcagcacccaaaccccgaccttcagggttccgccgccatgccgcagggagaccacatcgagcttcaccagaagcgccatggcaagcgcctggaccacgaggagcgcaagcgcaagcgcgaggcg

SEQ ID NO: 27074 - DNA, 380 bp, Zea mays
  Clone ID: LIB3180-011-P2-M1-D1
agccgaccacccgccgaaggccagagagaaatatctcatcttctctgcaccggatcggttcaatcgagagcgagggagaaagggaggtggtgcgtctaggggggccgagatttagccggtttggagccagataggggtatgagctgctttgcgcaccggcggcggtccgacgttcgccgtcgtcaggacggactactcgtattcgtgttcttcctctcgatctgacatctgccacttcttagaaaatccccagatcaaccgagaaatgatggggttgattgagtccttgcaacgcaaggctgttgaagaaggcaagatggctgcaggggatgcctaggaaatatggtgatggtgacttcggggaaaaaagggggtgcttt

SEQ ID NO: 27075 - DNA, 232 bp, Zea mays
  Clone ID: LIB3180-011-P2-M1-D10
tcgtcgcgacgaggtgttcgtgcccaagaagaaggaggcgctgccgtggtacaccccgtacgtgtacaacaacccggtcggccgggtggtgcacatcgtggtgcagctcaccctcgggtggccgctgtacctggcgaccaacgcgtcggggcggtcgtacccgcgctttgtctgtcacttcgacccctacggtcccatttacaacgaccgtgagcgcgcccagatttttgtt

SEQ ID NO: 27076 - DNA, 116 bp, Zea mays
  Clone ID: LIB3180-011-P2-M1-D11
ttctgacttcacgagggcaacaagcacttggggggcattctaaagccggcggggggcccctaccagaacatcaacctccaatctctcacggaaaccatctagttaacattaatatt

SEQ ID NO: 27077 - DNA, 186 bp, Zea mays
  unsure at all n locations
  Clone ID: LIB3180-011-P2-M1-D12
cgtctctgctcgtcccctcggtttctcagactgnnctccctcgnngtctcatacgaaaacctctcctcgtgtttatattccctctgcgtctcctnnctccgcttctcttccacataantcctaccacggcaccaanctcgcatcgtgtggctcacgtcaagatcccccgtccccgcatattcctaa

SEQ ID NO: 27078 - DNA, 197 bp, Zea mays
  Clone ID: LIB3180-011-P2-M1-D2
taggtactggtgccactggtggattgggagggcttggttcaccagatttgagtagtttgcttggtggtcttgcttgcagctcaagaactggtgcttctggtggtttaggaggtttgagatccccaatgtgtaaaatgtgcttgggaactgttgcatatactttgtgacaacatggttgtgactttcccgatttttgt

SEQ ID NO: 27079 - DNA, 333 bp, Zea mays
  Clone ID: LIB3180-011-P2-M1-D3
tcgtgctcaacgaccaagtggccgccgggctggcggccaagagcggggaccggtgcgcctacgactgcttccgccgcttcctcgacatgttcggcaacgtcgggatggacatcccccacgcgctgttcgaagagaagcttgaagccatgaagaaagccaagggggtgaagaacgacaccgacctcaccgtcaccggccttaaagagctggtgagccagtacaaggacgtctacgtggaggctaagggagagccattcccctcagaccccaagaggcagctggagttggcagtgctggccgggttcgactcctgggagaagccgggggcaaaga

SEQ ID NO: 27080 - DNA, 289 bp, Zea mays
  unsure at all n locations
  Clone ID: LIB3180-011-P2-M1-D4
tatgcaatggtgaagaagcatcgatccgggaggaggntcaacaatagctttaggtagaactaaataacccgaggaggagctagtaggaagaggcatggataatcatcaacttgtcgccatggcagcgggggctcaaccggcgagcccgaccttggcggacgttgtgcacaagatcccgcccggcgacgggccttacgcgagggccaagcacttccagctggtggagaaggacctggacgcgtcgatcgcgtggttctggaaggcgaacagcgcgggcgacaagttggac

SEQ ID NO: 27081 - DNA, 323 bp, Zea mays
  Clone ID: LIB3180-011-P2-M1-D5
tttttctttctatcagggtgcttctcctcgggttttcggtgctgctcaagccaggacatgttgcctttgagggtattatcttcctgtcattcttgatgatgctgtcctgcacgactgttgggatactcttgctggtttactaccctgtagctgattcattggccctccgagatataggccagagggacatagcataaatggtgccttatgatgattactactatgaaggcacatcgcttgtggcccaccagagtttccgagaaatcgagcggaattctgacacttcaacggagccgggatccatatcctttcggacaatgatc

SEQ ID NO: 27082 - DNA, 375 bp, Zea mays
  Clone ID: LIB3180-011-P2-M1-D6
tttttgtctcgctgccccgattcgccacgaagccgcactgtgagagagggacgcggcccgttgtccccggcttgtacgcaatccttccgtcgctgcgaagttgatccctcgtgttcgccatggcccccagcgtcgccgtggaaaacctcaaccccaaggtcttgaaatgtgagtatgcagtccgtggcgagattgtcatccatgctcagcgcttgcagcaacaactacaaacacaaccagggtctcttccttttgatgagatcctgttctgcaacattgggaatcctcaatcccttggtcagcaacctgtgacgttcttcagggaggttcttgctctttgggatcattcattcctttttggaaaaagaggtaacc

SEQ ID NO: 27083 - DNA, 388 bp, Zea mays
  Clone ID: LIB3180-011-P2-M1-D7
agcgtgctcatttatctgttgctgaaaggctgcttaaagagtttggttgttctatctgccgggcggtgattaaagagccacttacaacaccatgtgctcacaacttctgcaagacttgtttgcttggtgcatatgatagccagtcctctatgagggaaagaagccgtggtggtcggactctaagggcacagaagattgtgaagacgtgcccttcctgccctactgacatctgcgacttcttagaaaatccccagatcaaccgagaaatgatggagttgattgagtccttgcaacgcaaggctgttgaagaaggcaagatggctgcaggtgatgccgaggaatctggtgatggtgactcggaggaaaaatggggtgctttggtgaaagg

SEQ ID NO: 27084 - DNA, 374 bp, Zea mays
  Clone ID: LIB3180-011-P2-M1-D8
ggcatggtaaagcactccaagctgctctttcatcgggaattctacagcttgtaggtactgatcactgcacattcaactccacacagaaagcttttggttctgatgattttcggaagattcccaatggtgtaaatggtcttgaggaacggatgcatatactttgggacagcatggtggagactggcaagatttctgtaaccgactatgtcagagtgacaagcacagaatgcgccaagatcttcaacatattccctcgaaaaggagcaatcctggaaggatctgacgcagatatcataatcctgaaccctggaaggagctttgtgatgggtgctctcacacaccattcgaggtccaacaccaatgtgtacgagggc

SEQ ID NO: 27085 - DNA, 319 bp, Zea mays
  Clone ID: LIB3180-011-P2-M1-D9
tctaccgcagccgccgcccgctcgctcgcctgcgctccggcagcgagctctatcccccgcgacgagcagcagctgccaccgacgcacgcagaccggggaataaatattggtattggtagtgtgatatctataagaagtcaagatggtgaagttcacagctgaagagctccgtgctatcatggacaaaaagaacaacattcgtaacatgtctgtcattgctcatgtggaccatggcaagtctacgcttacagaattcctttggggcagctgctgggattattgcccaggaagttgctggtgatgttcgcatgactgatac

SEQ ID NO: 27086 - DNA, 362 bp, Zea mays
  Clone ID: LIB3180-011-P2-M1-E1
ttgggtcttcagaccattagctttatctactccagagcgcagaagaacccgatcgacaccatgagggtgttgctcgttgccctcgctctcctggctctcgctgcgagcgccacctccacgcatacaagcggcggctgcggctgccagccaccgccgccggttcatctaccgccgccggtgcatctgccacctccggttcacctgccacctccggtgcatctcccaccgccggtccacctgccgccgccggtccacctgccaccgtcggtccatgtgccgccgccggttcatttgccgccgccaccatgccactaccctactcaaccgccccggtctcagccttattcccagtcacacccatg

SEQ ID NO: 27087 - DNA, 109 bp, Zea mays
  Clone ID: LIB3180-011-P2-M1-E11
gtcttgttccatcattgatccgggtgtcgcttttttagtagtctgatggactgttagtagtttgcgttgcgtcggttgagagggaacgttggtggtggtggtgtgtttg

SEQ ID NO: 27088 - DNA, 393 bp, Zea mays
  unsure at all n locations
  Clone ID: LIB3180-011-P2-M1-E12
tctcgaaaaatcagtgatacaggggttacaaccattgctgggggaaaatcaattagaggagggcacatagatgggcccagtgatgatgcaaaattctcaactgattttgaaatcaagtacatcagcagtagctgctctctcttggtcattgatagaggaaaccaagcaattcgagaaattccactcaacgatgatgactgtgcatatcagtatgaagctggttttccactagggtttgcattgctttgtgctgctggcttctttggttatatgcttgggatgctccaacgccggcttttaggaatgtcatcaacaacagatgatccttaagcgcctncaagacccagcattgcaagtatccctccatcataccagaagcctttaaatccttat

SEQ ID NO: 27089 - DNA, 133 bp, Zea mays
  Clone ID: LIB3180-011-P2-M1-E2
tcggtggaggtttagaggattaggcttatttacctgatacttcaagaactccatggtggaacctatagggaacatgaacgggacggagctctactggctttacatgaccgcgaaacattcacagatacaaggg

SEQ ID NO: 27090 - DNA, 214 bp, Zea mays
  Clone ID: LIB3180-011-P2-M1-E5
gttttttgttgtcggcatgtaggaagatgttccagatggttgctgtttgtttctaattgctacatgggggctgaacatccatcccccaagttatcgccggtttctgaaccaggccttatttacacataaattttgccccttctgtatcgtggttctgtttgtagcttgttggagtctacaaactacaaagaggctaataaaccacttttattgg

SEQ ID NO: 27091 - DNA, 239 bp, Zea mays
  Clone ID: LIB3180-011-P2-M1-E6
gctcgagcgacctcactcggcagctcgctcgctagctgatcacgactgctcgctcggctcgaccgaatggcgccgcggctgctggcgtgcttcgggcgcggcggcggcggagcgacggcgtcggcgccggacgacgcgacgggcgagggccagctggaggcgccccccgctggcccggtgctggtggagctggtcgggtcgcaggggtgcggggcgtaacacgaaccaaatcccgccgc

SEQ ID NO: 27092 - DNA, 262 bp, Zea mays
  unsure at all n locations
  Clone ID: LIB3180-011-P2-M1-E7
cctcactaattctttatcttccgagatacatacgcaggcctcatgttatgtgtggcgggtcccccttcccntgcttttttaatattttataattaacaactccataattcaactttttcttntnnnccttatatcgtttttttctccaatctttttttcctnttaatccacccctgtnttcctttttctttttcaaaattnttttatttttttcttttagatttttcattattatttactataattctcttttttttttctt

SEQ ID NO: 27093 - DNA, 351 bp, Zea mays
  Clone ID: LIB3180-011-P2-M1-E8
tttttcgctgcatttgtttagcgggagttcgtcgaacaagcagcgctggcggtgcttgcgcgaatcttttgagtgaagctccccgtcacatcagtcctcttcttccccggtcgtcgtcctatgcttgtccctgtctcggcaattctgggatactaaagaggaatcggtgaaggtccggtcttcgattccccgagatttgcatctgaatcttcttcttcttctcttttgcctccatggagtcttttgctgcgtgccactccatcgagcgagtctagcgcgcgcgacacagtagcagcagcaaagtcccgtcggggaagccggaggtcccgttgcttttgttatcccatgggg

SEQ ID NO: 27094 - DNA, 238 bp, Zea mays
  Clone ID: LIB3180-011-P2-M1-E9
tcaaacagtttgctgacgaggttatctctggcccagtcatgggggagctggggaccgatgcatttgaggtgcttaatccggtagcggcattggctggcatcgcttttccggtgttcttgaatgatttacaaagcacagtacctaaagactctgacccgcatcgaggactggaatgttttcggatttaaaacaaccaactggtggatcattgtcctatgggttcgagaagaaaaaatat

SEQ ID NO: 27095 - DNA, 277 bp, Zea mays
  Clone ID: LIB3180-011-P2-M1-F1
ttatctcgtttcaaatccatccatcctcgtttcctccgtcccgcagcatctcaaccccatggccaagatcaagatcgggatcaatgggttcggcaggatcggaaggctggtggccagggtggccctgcagagtgacgatgtcgagctcgtcgccgtgaacgaccccttcatcagcaccgactacatgacctacatgttcaagtacgacactgtgcacggacagtggaagcaccatgaagtcaaggtgaaggactccaaaacccttctctttggtgag

SEQ ID NO: 27096 - DNA, 135 bp, Zea mays
  unsure at all n locations
  Clone ID: LIB3180-011-P2-M1-F10
gactcactaatagggaaagactggtancgcgctgcagtgtacacggtaccaggaattacccagggntcgaacccacagcattttctgtacatagttcataagaatcgtcgagcaggaccgccgcgtgtgtttttt

SEQ ID NO: 27097 - DNA, 271 bp, Zea mays
  Clone ID: LIB3180-011-P2-M1-F11
ctcgtggttcacggatggccttgacgactcgttgcaagacattgatctttcaggcgccctggagatcccggacgatgacctcacccagctgggttttatatgagaaggaagcacttgttgcttgctctgtgcatatatgttctttttttgggtgcttacctaatgtatggtagtagatataattaaccggtttaatctccctgccacaaccctgtaatcgaacctgcatggcatggaatggttagttgcagatgagttattcgattctcgt

SEQ ID NO: 27098 - DNA, 408 bp, Zea mays
  Clone ID: LIB3180-011-P2-M1-F12
ggggtatgcttgctgccttgctctcctgttcatctccgtgctaaacctctgtcctctggtattctgaaccatcgagccatggctgccaagctgactcgcctccacagtcttcgcgaacgccttggtgccaccttctcctcccatcccaatgaactgatagcactcttttccaggtatgttcaccagggcaagggaatgcttcagcgccatcagctgcttgcggagtttgatgccctgtttgatagtgacaaggagaagtatgcaccctttgaagacattcttcgtgctgctcaggaagcaattgtgctccccccatgggttgcacttgctatcaggccaaggcctggtgtctgggattacattcgggtgaatgtaagtgagctggctgtggaggagctgagtgtttct

SEQ ID NO: 27099 - DNA, 145 bp, Zea mays
  Clone ID: LIB3180-011-P2-M1-F2
tcgtaatcttttctcaaatccatcaaaccgcggttgtttcccacactataatggggacctcccagccaatatcaagatcaaaaacatggcgagcggacaaaccagaaggctgagaaagaaaggcggcaagaggggtgacaatgtc

SEQ ID NO: 27100 - DNA, 333 bp, Zea mays
  Clone ID: LIB3180-011-P2-M1-F4
gaaaaagacaagaaccatgggggtggtcttattcccgagggtcttgtcgagagaattcctttaccatatgctctgcttcaagaaatccaaggccttcatggcaaaggtgcctttgctgatgatatctattattaagttttaaccttggcacatgaacttttttaggtttttcccccttttaataagaagcagctacttttccatccctgaactgatgattcaactcaactttctcagattgagacagagaagcttctagcccaattagtttaaactgagaagaacaaaccttttaaggagggcacttacaaaggaaagaagtttaatgcaatc

SEQ ID NO: 27101 - DNA, 412 bp, Zea mays
  Clone ID: LIB3180-011-P2-M1-F5
aagagaagagggaaactatgctcggttgataaagcaaatgtgctggaggcatccatgctttggaggaaaaaggtgactgcactagcctctgaattccctgacattgagctctcacacatgtatgttgacaatgctgcaatgcagcttgtcaggaatcctaagcagtttgatacaattgtcacaaacaatatttttggtgacatattatctgatgaagcatcaatgattacgggaagcattggaatgcttccatctgcgagtgtcggtgaatctggacctggtctttttgaacctattcatggctctgcccctgatattgctggacaggacaaggccaatccattagctacaattcttagcgcagcgatgctattgcgatatggcctaagagaagaaaatgctgcaaggagaa

SEQ ID NO: 27102 - DNA, 395 bp, Zea mays
  unsure at all n locations
  Clone ID: LIB3180-011-P2-M1-F6
ctcgccgcggcgaccatccccgcagttctcactccagtcttcacacacctntcacgagcgcgcgcgcgcgcgttcgccatggcgccgtctaagcctttattccccgtcgccgtacccgtccccgacccgttcgacgaggtcgtgcgcgagttcggcccactgctccggatctacaagagcggccgcattgagcgggccctggtggccccggccgtggtgcctgtgcacgccgcctgcactggtgtgctttccttgggcgtttgtcattgaattcctcacctgggcggttttgttcccatctcaagggttttgccccggatcttagttggtctaggttcaattgtcactatcttttttttactatttctttaatgcttcgcgtgcttatttgtatt

SEQ ID NO: 27103 - DNA, 370 bp, Zea mays
  Clone ID: LIB3180-011-P2-M1-F7
tcgggtatcagcaacactggcgctggacgaagtgtgccaaccaccaacagtgcctacaccaccaatttgagtggtccaaggtatggcgagtctgcaaaccagctcgcgcagcaggaaagcacgtacaccggggtgaccactccagtgtcggcggcacggaatgtgcagcagacctgcgtgtcttgcgggtcaagtgggcacaacgtgcagaactgccctgcaggaacgtacaggcagcaagcggctgcaagcgcagcaagcttctacggttcttcgcagcctcgcaatggactgtgctttaaatgcaaataggctggacactttggccaatttttgtccactactggcttctgctccccagcagcagcag

SEQ ID NO: 27104 - DNA, 407 bp, Zea mays
  Clone ID: LIB3180-011-P2-M1-F9
tcggtgctagcaaaccttgctgcatactctcagcaacatcagtttcttccattcaaccaactggctgcattgaactctgctgcttatttgcaacaacaattaccattcagccagctagttgctgcctacccccagcaatttcttccattcaaccaactagcagcattgaactctgctgcttatttacagcagcaacaactactaccattcagccagctagctgatgtgagccctgctgccttcttgacacaacaacagttgttgccgttctacctgcacgctatgcctaacgctggcaccctcttacaactgcaacaaatgcttgcattcaacccacttggtttgacaaactcaacagtgttctaccaacaacccatcattggtggtgccctcttttagattgctta

SEQ ID NO: 27105 - DNA, 177 bp, Zea mays
  Clone ID: LIB3180-011-P2-M1-G1
ccacccttcaaatatggccacttccaccggtacttctcttttggcgctgccggaaattcatggtaactatttttttggtgcggctacatcagaatctcataaggcaatttgtcaggttattgggacattcaacttgcatgaggtggtcaacaaggccatctctggttcctgatgggg

SEQ ID NO: 27106 - DNA, 95 bp, Zea mays
  Clone ID: LIB3180-011-P2-M1-G10
ttctcccgttggtggatcttggcactgatcagggttgtttggtttgctttggcgggctaatggcgcccgcttcatgtgggcgttcgtcgcaaagg

SEQ ID NO: 27107 - DNA, 408 bp, Zea mays
  Clone ID: LIB3180-011-P2-M1-G11
ggggcgcgagggttaccacaatccacagggatcaaccggacgccgcgggtgaccaacccacccgcgcttaaccccgtcagatccccagatccccctcccagctagccatgggcgcgctccgctctggtcgccggccgcactggcactgctagccatggccgccgacgccgcctgccggagcccgctggtctggctcttcgcgctcgtcaccgcactcttcttcttctcctggtacctactcctcgactccgccgcgggcccagccggcgcccgccgccccaaccagtggctccgcctcggcggcggcgggcggcgctccggtcccggtaggaaatgcgaccccgcggaggcgctgctgcgagtgttcatgtacgacctgccccccgagttccacttcggactgctcga

SEQ ID NO: 27108 - DNA, 362 bp, Zea mays
  Clone ID: LIB3180-011-P2-M1-G12
gcacaatagtgtaccaacaatggcagccaaaatattttgcctccttatgctccttggtatttctgcaagtgctgctacggcgaccattttcccgcaatggttaccaagctcctatagcttcccttctttccccgtacctctcaccagcggtgtcttcggtatgtgaaaacccaattcttcaaccctacaggatccaacaggcaatcgcagctggcatcttacctttatcacccttggtccttcaacaatcatcagccctattacagcaggtacctttggtgcatttattggcacaaaacatcaaggcacaacaactacaacaacttgtgctagcaaaccttgctgcctactctcagcaacag

SEQ ID NO: 27109 - DNA, 223 bp, Zea mays
  Clone ID: LIB3180-011-P2-M1-G3
tcatagcggcagtgcgtagagaggatcgtcgaacagaacagcatgaagatggtcatcgttctcgtcgtgtgcctggctctgtcagctgccagcgcctctgcaatgcagatgccctgcccctgcgcggggctgcagggcttgtacggcgctggcgccggcctgacgacgatgatgggcgccggcgggctgtacccctacgcggagtacctgaggcagccgtagt

SEQ ID NO: 27110 - DNA, 387 bp, Zea mays
  unsure at all n locations
  Clone ID: LIB3180-011-P2-M1-G4
ttttgttcgcacaccccgttcgtgccacactggcacctaaccccccgtccttccccacgatcccgaggctactagcactaggcgtcgtcctcggcagcaacggcggctgggctcccgccgatggcggngttcctcgccgccggcggcttttgcctcggcggcaccggcggcgagttgtcgtggtcggcgcggccctgccccgggagtctcgtggcgagctttcccagcgccgggcggctccggcgccccgcttcgggcgtgcggtgcggaggtggggttttgcccgcggccgcggggacgggggcggaagcggaggaagggggccgcttcgctggctggttccgggaggcgtggccttacatacggggcccccggggcagcaccttc

SEQ ID NO: 27111 - DNA, 350 bp, Zea mays
  Clone ID: LIB3180-011-P2-M1-G6
ctcgtttccgggatgccaagaggagacccagcagcagcagtatggatacggatatggatatggacaccatcaccatcagcatgaccaccacaagatccaccgattcgagcagggcgacgtggtggccatgccggccggcgcccagcactggctgtacaacgacggcgacgcgccgcttgtggcggtctacgtcttcgacgagaacaacaacatcaaccagctcgagccttccatgaggaaattcttgctggctgggggcttcagcaaggggcagccccacttcgccgagaacatcttcaaagggatcgacgcccggttcctgagcgaagccctgggcgtcagcatgcacg

SEQ ID NO: 27112 - DNA, 162 bp, Zea mays
  Clone ID: LIB3180-011-P2-M1-G7
tttctcggattgagcgcatcggtgcgcactcccacatccgggggctagggttggactcgtccatggaggcgcgcgatacctcggagggcatggtcgggcagcttcacgcgcgccgggccttggggctcatactccagcttatccgccagggcaagattgccg

SEQ ID NO: 27113 - DNA, 170 bp, Zea mays
  Clone ID: LIB3180-011-P2-M1-G8
tcgctgtattcccattccaagtccccgctcttctattcccaacgacgagcggggagcttcttggtccctgctcggagctcgttgcaacaggtgccgccatgtctgccgcgaaccagctcggcgctcaggtcagcaacatttacgccacgggtttgcttgacgatcagttt

SEQ ID NO: 27114 - DNA, 175 bp, Zea mays
  Clone ID: LIB3180-011-P2-M1-G9
gtcccctgctccattctcagccgccgccaatcccttcccgtgctccgcaaccgctgagtgagaagaagagatggccggcaagggcgatggcccggctatcggcatcgatctcggcacgacgtactcttgcgtcggcgtgtggcagcacgaccgcgtcgagatcattgccaacgac

SEQ ID NO: 27115 - DNA, 397 bp, Zea mays
  unsure at all n locations
  Clone ID: LIB3180-011-P2-M1-H1
gggagatccgagctactgggacaagatctcacaaggcggcctgcagagaatctatgagaagtacacctggaagctctactccgagaggctgatgaccctgaccggcgtgtacgggttctggaagtacgtgagcaacctggagaggcgcgagacccgccgctacatcgaaatgttctacgccctgaagtaccgtagcctggcaagccaggttccgctgtccttcgattagtacggggaaagaagaagaagaagaagcccaggccggagaaccatcgcctgcatttcgatctgtttcaccgcaattcgcattgttagtcgtgtattggagttatgtgtacttggtttccaagaactttggntccttggttttttttctttcttggttgagcgtttttgg

SEQ ID NO: 27116 - DNA, 356 bp, Zea mays
  Clone ID: LIB3180-011-P2-M1-H10
tcgttccctcactctcgttccatttccccatctcccagatccaattcgcgagttctttcttctctgccgccatggcgctctctgtggagaagacctcgtctggacgggagtacaaggtcaaggatctctcgcaggcggacttcggtcgcctcgagattgagctggccgaggtcgaaatgcccggccttattgcgtgccgcgccgagttcggcccgttcaagccctttcgcggcgctaggatcttggggtctcttcacatgaccattcagaccgccgtccttattgagacccttaccgggctcggcgccgaggtccgctggtgctcctgcaacatcttcttcacgcaggaccacgcc

SEQ ID NO: 27117 - DNA, 251 bp, Zea mays
  Clone ID: LIB3180-011-P2-M1-H11
cttcgttctctcacccagtcactctcgcgttcagcgcgagccgagcccagccggtgggccggtctctgaaggcggagccataaaggcgtcggcgacggcaggatgatgagcggcagatcgggcggcagggacggcgaggcggccggccccgtcatcaggatcagggtttcccacggagccacctttcgcgaggtcgtcgtgccggcgcaagctaccttcggtgagttgaagaggatccttgttcagactac

SEQ ID NO: 27118 - DNA, 212 bp, Zea mays
  Clone ID: LIB3180-011-P2-M1-H12
tcgcgcccgctgcctgactggcattattggcttccgggcttcgctattcatccgaccgtccgtgggttcttccttcggttcccggtacccggcccggcccggcgagaagcttcgggctagctagcaaggtagctaggcacctacccgtgctttggttcggttgggtggcgccataaccattgccgaggagcgagggagcaacccggcgggca

SEQ ID NO: 27119 - DNA, 324 bp, Zea mays
  Clone ID: LIB3180-011-P2-M1-H2
ccaggggatcataaaactgagttcttctggtgagagggaaagagtttatgactcagatcgggacaaaataaatgcaattcacatcattgatttcagtgatctgtccattggggatcctatatgtgacataattccgctgcacttggatattttccggggtgatagtgaccttctcaaggaatttctacggagctatcaacttccccttctgaggggggaatcaaccaccgatgtctacagatcagtgcgaaactcgaagttcagcagggcatcatatcgcgcgatgtgctactgtatattacacgaggacaacggtcttggagc

SEQ ID NO: 27120 - DNA, 342 bp, Zea mays
  Clone ID: LIB3180-011-P2-M1-H4
tctgtcaagatgagtcggcaccctgaggtgaagtgggctcagaggatcgacaaggtttacatcactgtacagttacctgacgcaaaggatgctaaggtcaatttggatccagatggtgtcttcaaattctctggcagtgctggtacaaacttgtttgaatggaaactggtcttgatggccaaagtaaccgttggggttggaaaataagggtggggggcaaggccatattctgtattgtagaaaaagcttaagccaaatggtggaagaaacttgttcgagatgatcaaagggcaccttactttgtgaaagttgattgggacaaatgggttgatgaaaatgatg

SEQ ID NO: 27121 - DNA, 325 bp, Zea mays
  Clone ID: LIB3180-011-P2-M1-H5
ctttcttctcatggctacttcgctcagtccaatgtgcttggataccctgacactggcggtcaggttgtgtacattctggatcaagtccgtgctttggagaatgagatgcttctgaggattaagcagcaaggccttgatatcactccgaagatcctcattgttaccaggctgttgcctgatgctgctgggactacgtgcggtcagcggctggagaaggtcattggtactgagcacacagacattattcgggttccgttcagaaatgagaatggcattcttcgcaagtggatctcttgttttgaatgttggccatacctggagacac

SEQ ID NO: 27122 - DNA, 266 bp, Zea mays
  Clone ID: LIB3180-011-P2-M1-H6
ataaggaaagccggcacgcctgcacggtaccggtaacggaattgctggacccacgcgtgcttagtattcactggcaagagagtgagcgagcgagcagaggcagcgcaacaatggcggccgcaataggactcttcggccaggtgccgccgcttccctcgtcgctgcccctgtccctgctgctgctcctcctcctgtgctggttccggcacctcgtggggatggagcacgtcccggggaggagccgccagggagtgcggcttcgatgg

SEQ ID NO: 27123 - DNA, 343 bp, Zea mays
  unsure at all n locations
  Clone ID: LIB3180-011-P2-M1-H7
ggggaccacaccacgcctccgggcagaactccgcgccggcggcgccgccgggggccgtggggcagcaggcggtggcgctgcggctgtccggcgacaagaccatgctgtacaggtgtaggatcctggggacgcaggacacgctgttcgacaacatggtgcgccagtttctttacaactgggacatgcaaggctccatcgacttcattttcgggaacgcgaggtccctgtaccaggtacgcaaataacgtagcagaaatgaattctataattttcttttcttttttttctttttacaactgacgtgttagagcatcttcgaggagactnctcatttttttttttt

SEQ ID NO: 27124 - DNA, 198 bp, Zea mays
  Clone ID: LIB3180-011-P2-M1-H8
tcgcaggcagcatctgcatctctcgcccacctccgctccgactgctgctgctggtggtagggaggcggagaaggaggccccagcgcccgcccggcggccggatcagagacgcagcaaccaccacccatggcggacgtgcacgaaccttttgtgcgccgtaagaggaagaaggttttgagactccaacttggggaaaca

SEQ ID NO: 27125 - DNA, 313 bp, Zea mays
  Clone ID: LIB3180-011-P2-M1-H9
tcgctccattggactgcttgctccctgttgaccattgggtattctgaaccatcgagccatggctgccaagctgactcgcctccacagtcttcgcgaacgccttggtgccaccttctcctcccatcccaatgaactgatagcactcttttccaggtatgttcaccagggcaagggaatgcttcagcgccatcagctgcttgcggagtttgatgccctgtttgatagtgacaaggagaagtatgcaccctttgaagacattcttcgtgctgctcaagaagcaattgtgctccccccatgggttgcacttgctatc

SEQ ID NO: 27126 - DNA, 211 bp, Zea mays
  Clone ID: LIB3180-012-P2-M1-A10
tgctggttcgtgaggttctccggggttcggcttcgtgggtaagcggatcagagaaggcggcgtcagatgttgagtaccgctgcttcgtcggcggcctcccctgggccacggacgaccactcccttcacaacgccttcagcacctacagcgaggatctcgagttcaagatcatccccgatcgggagacacatagagatccggtagcttcgga

SEQ ID NO: 27127 - DNA, 204 bp, Zea mays
  Clone ID: LIB3180-012-P2-M1-A11
gtctgtttacaaacatgccctcaagcttatgcccacgcgagtgagaagtgagaatctcctaggaaagagaaacaacgaagactcgaaacgagtacaccaacctttctttctcttctctcgcttctgcggcgaattttcttgtcccgtgccggccgccgtgtctaccctgagccaccgtccctaccaacgcctggcgtgaagaca

SEQ ID NO: 27128 - DNA, 221 bp, Zea mays
  Clone ID: LIB3180-012-P2-M1-A12
tcgtcctactgcatctccctcgctctcgtagcctcgttcgcttagcctactgcccgccccgccccgagccgagcagagcgcagccctatccggagctgggatggcggacgcgaagcagcagcagcagcagccacagcaggcggcagcggcagccaccggcgtgtggaagacggtcaagcccttcgttaacggcggggcctctgggatgctcgagacctgcg

SEQ ID NO: 27129 - DNA, 197 bp, Zea mays
  unsure at all n locations
  Clone ID: LIB3180-012-P2-M1-A2
ctagntctagatcgcgaacngccaccctttttttttttttaangnctggggggncngactctgaagagtagcataatttaccaaccagaaacccgaaacttatgttctgaggatcgcgtaacagccacaagttttaattatgtaacttgggcagcaaaattaatgtattnntgttatggggtaaggttgacaacaaa

SEQ ID NO: 27130 - DNA, 219 bp, Zea mays
  Clone ID: LIB3180-012-P2-M1-A5
ggaagttctgattttatactctgccctgaatacatttgatcctggtgatatcacggagacaatagcaaagtgtaagaagtcaaaaattagatgctctgttattggtcttgctgcagagatcttcatttgcaaacatctatgtgaagagactggtggatcttacacagttgcactggatgagtctcatttcaaagagttgttactggaacatgctccccc

SEQ ID NO: 27131 - DNA, 215 bp, Zea mays
  unsure at all n locations
  Clone ID: LIB3180-012-P2-M1-A6
agtctagatcgcgagcggccgccccttttttttttttttttttttttttatttttttntcctttttcccccttaaaaccaaaacttttttttgatgcattttttattggtcctcccccacatgattatgggcggcggcttaccgcatttttcccttttttgatagggaggggtggtttggggggttttcccaaattttatgattcaggtgggggg

SEQ ID NO: 27132 - DNA, 87 bp, Zea mays
  Clone ID: LIB3180-012-P2-M1-A7
tcggcgcctgcagcgggagaaggccgccgcgcaaattgaggcccgccagttcaagcgctacgcccagggccgcgaggacagggagcg

SEQ ID NO: 27133 - DNA, 71 bp, Zea mays
  Clone ID: LIB3180-012-P2-M1-A9
tctcatcaatgagaagacctgcaatgctctcctcttgtaagtgaaccaaatcgggtctgtgaccgagagta

SEQ ID NO: 27134 - DNA, 127 bp, Zea mays
  Clone ID: LIB3180-012-P2-M1-B10
tgcattgattcctccccggtccccacatcctgccgccaatggatgtcgacgggcccgcccccgccgacgcctctgccaggcccgccaccaacggcgaggcccccttcggcgcccgcgaggtcgacgt

SEQ ID NO: 27135 - DNA, 187 bp, Zea mays
  Clone ID: LIB3180-012-P2-M1-B11
gtcgactcctgcgtcctagtcgactccgaagaggtgatgagagcacgaatcggcggatgtggactccaccggcttgtctcctttgggccacacgttaggtggccgtatactgttccaggtttgtttgatttattaactctcattttctttatattgttatcatctcactttctatattattttttat

SEQ ID NO: 27136 - DNA, 318 bp, Zea mays
  Clone ID: LIB3180-012-P2-M1-B12
atcccgtcgcatcccatcccactaccacccatctcgtcgtccgccgattcgatccggttcttccaacccaggggcagtgatggcgacgaagaggagcgtgggcaccctcggcgaggcggatctgaaggggaagaaggtgttcgtgcgcgccgacctcaacgttccgctcgacgatgcccagaagatcaccgacgacacccgtattcgcgcctccgtgcccaccatcaagttccttctcgagaagggcgccaaggtcattcttggcagccacctgggtcggccaaaaggtggcaccccaaaatacaaattgtagccttt

SEQ ID NO: 27137 - DNA, 352 bp, Zea mays
  Clone ID: LIB3180-012-P2-M1-B4
tttcttatgagttatagttcaataataaatctaaaagagggcaccaccaatgatgggttgttggtagaacactgataggtttgtcaattcaagatgtttgttggcatccgtaacaacatagaagagcccagagctgaacgttgtctctgtttgtgttactttatttttttttttgatttttgtttttgtttttttttctttttattttttattttttttttatttttttattttttttttttctattttatattctattattttttgttttctttttgtttttttattaattttattttttcttttttgtttattttttttttgttttatttttttatttatatttttttat

SEQ ID NO: 27138 - DNA, 382 bp, Zea mays
  unsure at all n locations
  Clone ID: LIB3180-012-P2-M1-B6
cgcccatcttggacgaggcagccaccactctccagagcgacgaggaagtcgtgattgctaagatggacgcgactgccaatgacgttcccagtgagtttgacgtccaaggctacccgaccttgtacttcgtgaccccgagcgggaaggtgacatcctacgacagcggcaggacggcggacgacatcgtcgacttcatcaagaagagcaaggagaccgnaagcgccgtcaccaccaccaccacccatgcgccaccggcattcgagaaggcagccgccgccgagcccgtcaaggacgagctgtgagcatccaaggtgtggacggctgtggctgcgtaagcatgggaggaaaacctggcgcttacgtgccttcaacgcctagtttt

SEQ ID NO: 27139 - DNA, 313 bp, Zea mays
  Clone ID: LIB3180-012-P2-M1-B8
atttattgataaatgcagcatgccatatacattgcatgactcatttgcatctgaagttttgtcgtgacctatggtccgaccgtaccggtacaacttagcatcatacgttgcccgaggaggggtacgatgcagcttcatacccttagaggtatgaaggcagaggacatatgcattgcattcatatgcattcattgaagtggtatttgcagatggtgtggttttatactctaagaggtatgaaggcagaggacttacacattgcattactatgcatacatcgaagtgatatttgcaggtattgttgacgtaagaa

SEQ ID NO: 27140 - DNA, 153 bp, Zea mays
  unsure at all n locations
  Clone ID: LIB3180-012-P2-M1-C1
gtgcctccatnaaggcccctgtcccttgctagttcagagttgggtgcgaccatgggtaatgagtactcccacatcaacattgtggttattggtcatgttttctttgtcaagccttcctcctcatgacaccttttctacaatctagctggcttt

SEQ ID NO: 27141 - DNA, 350 bp, Zea mays
  Clone ID: LIB3180-012-P2-M1-C10
ttctgctttttcgatctgtgcagcaaatctgaggtctctagcgaccgtgaaggaggttcaatcgtcggcatggcgctcgtattgcatagtggggctggaaacaagaatgccttcaaagcacttattgctgcaaaatacagggggatcaaaggtgagttgaccaaggattttgagatgggtgtcttcaacaagacccctgagtttcttaagatgaacccccttgggaaggttcctgttctggagacttctgatggccctgtttttgagagtaatgctatcgcacgctttgttgctcgcttgaaggatgacaaccctctttttggggcctcccatattgaacaagcccacgt

SEQ ID NO: 27142 - DNA, 195 bp, Zea mays
  Clone ID: LIB3180-012-P2-M1-C11
tcgtgtgcgtaccaggtggccatggccggcgctgagatggatcagaatcagaagaacatccccttccccatgccgatgcaattttccatgctgcccgacttctccttggacccggtgcccccctactacccgtaccccaacgctggcgcggggatgccgatgctttctatggcagcaggtataggtggtggcgcc

SEQ ID NO: 27143 - DNA, 251 bp, Zea mays
  Clone ID: LIB3180-012-P2-M1-C12
agcttctgtcacgcgtccgggagaaggtggctaagactgtatatgtggaagagcggacgtgttgttgagcgtaaccttctgtctgttgcatacaagaatgtgattggggctcgtcgcgcttcatggcgcattagtttcttccattgtacaaaaggaggtgtcctgttagaacgttgagcatgtgtaccttatcaaggaatatcttggcatgatcgtagtttgtacctgtctatatatgatataggcaattt

SEQ ID NO: 27144 - DNA, 128 bp, Zea mays
  Clone ID: LIB3180-012-P2-M1-C2
tttcttactcctcgtccgtccgtcccccatacgggcacgcctttgagtctacagagctgccatggacggtggaagagagcattatgctccttcagtgtttcattcaagtataaagtaccattatatac

SEQ ID NO: 27145 - DNA, 228 bp, Zea mays
  unsure at all n locations
  Clone ID: LIB3180-012-P2-M1-C3
tcgtgattaccccgcgcttctcctctaccgcgcgtgccacctttcgagaggctggagccctgatcccacgctgtgggcggcggtgttaaggagtntaacgttagcgaggtggcggccggtggcactgcttgtagtggcgctgacagcggttctgtcatcagttcagtggacggatgctctctcagtgacggtgaccgacacctaatgaatttcactagttcgttcata

SEQ ID NO: 27146 - DNA, 264 bp, Zea mays
  Clone ID: LIB3180-012-P2-M1-C4
tttgtcgatttaaaagcattgcgaccacagacagggcgcgcttcaaggcctttggggtttgagataacaaggaggagaggtggagatggcggtcacgatcacgtgggtgaaggcgaggcaaaacttcgacagtcgcggcaaccccaccgtcgaggtggacttgggcctttgcaacaggagtttctccaggtgggccgtactcagcttcacattcacatgaataaattgggacttgagatttttgtgatagtggatccttctttt

SEQ ID NO: 27147 - DNA, 116 bp, Zea mays
  Clone ID: LIB3180-012-P2-M1-C5
ctcgtagagagaaggaaaaatatccccaaaccctagctcccgatctcgatggcgaaccctcgcgtcttcttcgacatgaccgtcggcggcgccccggcgggccggatcgtgatgga

SEQ ID NO: 27148 - DNA, 177 bp, Zea mays
  Clone ID: LIB3180-012-P2-M1-C6
ttcttcttatagagtaagcaaaacctccttaagcccttgctcccgatctagatggggaaccctctctttttcttagacaagaccctgggtattgccccgagggaccggatcttaattgagctactctccaacgaggctcccaaaaccagttttaacttccatgccgctttcacgggc

SEQ ID NO: 27149 - DNA, 227 bp, Zea mays
  Clone ID: LIB3180-012-P2-M1-C7
tcttctgttcgctagctgtgcatcatccgtcgttctggcgagcgagcgagcgagggagagacctagcttgactgaccggacgtcagcaggccgagaacgaatcgcgtgtttgtgcatgagccatggcggaccaacagcagccacagcatcagccgcaagagatggacctcgttcgtaccggaggcctcgaactgccttcagggttccgtttttcacccgagcgactt

SEQ ID NO: 27150 - DNA, 333 bp, Zea mays
  Clone ID: LIB3180-012-P2-M1-C9
tgttcggttctttttcaccaagatcaaatgcactttcttgttgtgcatgaaagggagattgccatcttttaaactacaaaactagaaccagtgtagcagtggcctgttcgagagaattcacctccaatcacacatgccacattctcgtgtgatagtcaactgatctatgcaagctttatggatgccactgtttggcatatttaatgggtcgtgcttgagacttcaatgtcggatttttccagcttcgtatctttcttcaaatatcagttcgagcgttcatcctgttgtggttgcggcacactccttcggtagcaaagccagttgctttagggc

SEQ ID NO: 27151 - DNA, 112 bp, Zea mays
  Clone ID: LIB3180-012-P2-M1-D1
tctgttctagtctcttactatacagctactggggacccccttgaccctacagaggatgctctcttccagggctgtctcgtagaagacgtctgttaatcacatggccagggct

SEQ ID NO: 27152 - DNA, 427 bp, Zea mays
  Clone ID: LIB3180-012-P2-M1-D2
atttctctctttcttgcagcttgacctgcttgcgatggttctactataaaggagtggggctgtactctacaggcccgctatacgcccaattgtccagaatcccagatccttagcctctgatgtactaagtctgcttcacttcccaagttctaccttccctggctaattcccataggatacggaggactgttctcatgaatgtagcgtttagtctacataaacgacgagtcttatcagaacgactactgtgataaccgagtttctaatacaaagcataccttattgaactttgtgccaaaaaacctatgggaacagttcaggcgcttcatgaatcaatatttcttgttgatagcttgtctgcaactatggtcacttatcactcctgttaatcctgcaagtacctggggcccacttatatttatctttg

SEQ ID NO: 27153 - DNA, 267 bp, Zea mays
  Clone ID: LIB3180-012-P2-M1-D4
gggggggtaattaacatatatatgaggttttgggtcacgattattttggtccaaactcgaatttggttcttacaaccatcaattattagcacaaccaagcagattacttacaccaaacgagacattttccacacatgccatggttccgggcatgttcttagttggtcattcatacacacacattagttaccaacttctggtttttaccggattttcaaaccatgcatgcattatattttacaaaaagcaatgcagatattgattttt

SEQ ID NO: 27154 - DNA, 310 bp, Zea mays
  Clone ID: LIB3180-012-P2-M1-D5
tgatttgtggcgcaccaaggtgaggtgaactgcctggcttttaacccggggaacgtatgggttgttgcatctggttctactgacaagactgtcaaattatttgatcttaggaagattgattcttctctgcacacctttgactgttacaaagaggaagttttttcaagttggatggagtccaaagaatgaaactgtacttgcgtcctgttgtcttggcataatgctcatgttctgggatcttagcatgatcgatccagaactatctccatatgttgctgaatatggtcctttattgctctatgttcatcca

SEQ ID NO: 27155 - DNA, 255 bp, Zea mays
  Clone ID: LIB3180-012-P2-M1-D6
tagcctacgccttttcctcctccttggcttgttcctcgctgcagctctcggcggcgaggtcctgggcgccgtcgacaaaccaccttcctcccccgtctctcgtcgtctcggaaggaacggccgtccgtcgcgccaaggattcaaggtgcgtgcaccgcgcttcttgcagagagaaaggtgtgggtgctgtgttgggaggaggtctgctgctgcagctcatagtaagccctcattctcttcagaggcttaagtacc

SEQ ID NO: 27156 - DNA, 372 bp, Zea mays
  Clone ID: LIB3180-012-P2-M1-D8
aaaaattttcccgttcacctcgcctgcgggacaactggggcaaccgccgccgcccgtctgcccgccccccctacgcccagctgcccagatccgagccctttgcccggcgatcacaccaggcctgctcagctgacctcacctggacaatcaagctgaagagaaatatcatagtgtgcatggtttttcaggaatgaagcgttttgtctacataaatgatgagtcttatcagaacgactactgtgataaccgagtttctaatacaaagtataccttattgaacttcgtgccaaaaaacctatgggaacagttcaggcgcttcatgaatcaatatttcttagtgatagcttgtctgcaactatggtcacttatcac

SEQ ID NO: 27157 - DNA, 140 bp, Zea mays
  unsure at all n locations
  Clone ID: LIB3180-012-P2-M1-D9
tnctcgttaactttggatgntgaacatacaggagactccatttttgagtcaaaagaaaacaaaaaaaaaaaaaaaaaaacaaaaaaaaaaaaaaaaaaaaaaaactaaaaaaaaaaaaaaaaaaaaaaactacggggggt

SEQ ID NO: 27158 - DNA, 274 bp, Zea mays
  Clone ID: LIB3180-012-P2-M1-E10
gctagatttgtattactgttattcacttgacatgatgcaagaaaaggggaggtgcacctaaaggattatatcaaatttttattctcgaatgtgcaagagaactgcacatctttatattaagggggtgtttgcatacaccttgtccttattattcagtggcattactttattgtgtttacatttatacattttctatttatttcatttatttccctatgtttttcctatattttatatatttttaactattttctttatcattgttatttatttt

SEQ ID NO: 27159 - DNA, 94 bp, Zea mays
  unsure at all n locations
  Clone ID: LIB3180-012-P2-M1-E11
tgctcggttagaagcaacaagcgnacagaaaggaagaggtacataagtgagcagggagcccccaatactcgccaagacgaacaactcgtcccaa

SEQ ID NO: 27160 - DNA, 103 bp, Zea mays
  unsure at all n locations
  Clone ID: LIB3180-012-P2-M1-E12
taaagaaagctcggacgcctgcacttaccgttccgtaattcccgtttccacccacttgnctgtgtattgcgcatttgcaaacacacccgcaagtgcttctctt

SEQ ID NO: 27161 - DNA, 329 bp, Zea mays
  Clone ID: LIB3180-012-P2-M1-E2
tcgtttcccaacaattctcttctatccagctgggaagaaaagctttgagcctggcacttttgagggggagcggacagtggtagatatgtacaggttcatcaagaaacatgctagcatccctttcaagttgaagcgccaggagtcaagaagggagagcatccagacggatggtgtcaaggacgaactgtagggcaggccatgcattgatagatagctgagttttgaattttggttttataaaattaggtccgtcaccgaatttcgcgttttcagcttaaacatcacctaaatctgtttctttactatattaaagcaccagtttcaacggt

SEQ ID NO: 27162 - DNA, 203 bp, Zea mays
  Clone ID: LIB3180-012-P2-M1-E3
ttcgtagttttatatcgcgagcggccacccttggtatttttttttacaagagaagaaagactttataatttcatacaatatgcttctcacgaaagtactactacataccatataacttgagctaatacaacaagcaaaccataatcaatccccggtatgaaaggtaacaaggttacaaatgtggcaataaccaaaccaccctt

SEQ ID NO: 27163 - DNA, 367 bp, Zea mays
  Clone ID: LIB3180-012-P2-M1-E4
acccgtgcgtgcgctctctctctttctcgtgcggcaactgcgagggcggcgacgcccgacggcagggtgcccaggccttctttggtcccatcgcgaggccatagttgcatcattcgcctgagacgactgcccaccgccaggactgatctcctcactaggcgcgtagaggtgaagagaataacttgacaatgagcagcataagcacaggtttcgatctgtctgtcaccaccctctccccagatggtcgagtcttccaggtcgaatattctaccaaggccgtcgacaacagcgggacttgtggtgggatcaagtgcaaagatggcattgtccttggtgttgagaagctggtaacctcaaagatgatgct

SEQ ID NO: 27164 - DNA, 191 bp, Zea mays
  Clone ID: LIB3180-012-P2-M1-E5
ttcctatccagatcagcaaagcggcagtgcgtatagaggatcgtcgaagaggacagcatcaagatggtcatcgctctcgtcgtgtgcctggctctgtcagctgccagcgcctctgcaatgcagatgccctgcccctgcgcggggctagaaggcttgtactgggctagcgccggtctgacgtccatgttggg

SEQ ID NO: 27165 - DNA, 162 bp, Zea mays
  Clone ID: LIB3180-012-P2-M1-E9
ttgttcggtctcatctccatcgtcaaccacatgaggacccttctacagatcgagcagaagggcctctcccaggtgcacatagatgctgtactagaccatgcatcacctcacccacggccatcttgaccggcattcatacgcccatgcacatttgtgcttctt

SEQ ID NO: 27166 - DNA, 72 bp, Zea mays
  Clone ID: LIB3180-012-P2-M1-F1
ccggcaaattctattccttcccccttccttcggcgggcgcgcgcgggggagttccaaacccttagaccggaa

SEQ ID NO: 27167 - DNA, 152 bp, Zea mays
  Clone ID: LIB3180-012-P2-M1-F10
agtcgtcgttcgtgtattgcagccatcgcacggcaaattggccagcagcggcgggaggtggtgtttttagcctgcctggtttccttcctgcgcttgatattttgtctcctcgaattccccctattatacttaaattttctattattctgata

SEQ ID NO: 27168 - DNA, 255 bp, Zea mays
  unsure at all n locations
  Clone ID: LIB3180-012-P2-M1-F11
ttcgtcttcaaatctggcaaaaatgtccttattgaattctatgccccctggtgcggacactgcaagaagctggcgcccatcttggacgaggcagccaccactctccagagcgacgaggaagtcgtgattgctaagatggacgcgactgccaatgacgttcccagtgagtttgacgtccaaggctacccgaccttgtacttngcgaccccgagcgggaaggtgacatcctacgacagcggcaggacggcggacgac

SEQ ID NO: 27169 - DNA, 404 bp, Zea mays
  Clone ID: LIB3180-012-P2-M1-F12
ttcttgttgtctcctgttccaccacctactgtacaatttcaaaatgattcctacaaagatcctcaagctccactcgctgattcctacaaagatcctcaagcgccaccccctctccctcctctccagaggaggcttggaaagcctcggctaggacttctgagtagaaaaggctatatgactgaacctgcaagggtaatagatcctgttttgcagatatcaatgcaagagatggatattaggccaggtttgcttgatccaacggatagatctatagaaccagtaccctgtcaagaaatcaaagaagatagatgtgagagttctttgatagatcataatgatcaaaatgtagattttgatagattattcgccagggttgcagttactgatgttgcaaggactgaaca

SEQ ID NO: 27170 - DNA, 310 bp, Zea mays
  Clone ID: LIB3180-012-P2-M1-F2
tcgctgttctaccgccttcttctcttgtctagggctcctctcgactatggccggcgccgccaaggtagaccccagccccaacccgtcgccaactacagcctccggcctctccaagaccaagacgcgggaggccgaccgccgccaacgccgccgcagcaaggccaagaagaacaagtccgtcactgaggctgatgcccaggacgctgacgggggagccttcagcttcgacgccaaggagaactccgatcccaacccctatccacattgttttggttgatattgttttcttgccatagaaggtcttgctttt

SEQ ID NO: 27171 - DNA, 154 bp, Zea mays
  Clone ID: LIB3180-012-P2-M1-F3
gttctagctgatcccacccgaatgctagggaggacttattgaccgtgcggaacgagccagaaaacaggtctagccgccgctcggcacctctgatccggcctgccgccggtgagcgatcaccttgaaaactgcggatcccatgtcagccatcaag

SEQ ID NO: 27172 - DNA, 144 bp, Zea mays
  Clone ID: LIB3180-012-P2-M1-F4
tttccgggttgtctccacagcgttcttgttggttttcccaagttttttttcacaagaattttttgtttgctggcttggaaattagtttacctaatccgttgggggacctgtggttcctttgggtgcctccaagttttttccttt

SEQ ID NO: 27173 - DNA, 329 bp, Zea mays
  Clone ID: LIB3180-012-P2-M1-F5
gctattaagacttcatgaccaggcaaacattgccatcatagattacttgttcacgcgacaactgcaaggatgtcaacaagacgagatattttaagcttccacgaggttaccactaagcctatactgttggacgtccgcacgtgttgtaaccgcaatggaaggcgagaccggccttgcccgataccttaacggctagggcctgtgcatgtcggcgtcgtctacatagaccctcttttactcactgtattgaaggtttgcttcgtgtattctatctctatgccactggttctttttgtatttgtttgtagtttttttttttatatgtcttt

SEQ ID NO: 27174 - DNA, 415 bp, Zea mays
  Clone ID: LIB3180-012-P2-M1-F6
gcgaattctaagtggctctacatcgccccgacggggatgtacgggtgcgtgaactacctcaaggagaagtatgggaatccaacgatctacataacggagaacggaatggaccagcctggaaacttgacccgagaccagtacctgcgcgacgccacgagggtgcggttctacaggagctacatcggccagctgaagaaggccatagaccagggagcgaacgtggctggctacttcgcctggtctctcctcgacaacttcgagtggctggcagggtactcgtccaagttcggcatcgtctacgtggacttcaacacgctcgaacgccacccgaaggcgtcggcctactggttcagggacatgcttcagaagcattgagatctccagagccgagcctgagcacggaaggtaccatttt

SEQ ID NO: 27175 - DNA, 285 bp, Zea mays
  Clone ID: LIB3180-012-P2-M1-F7
tctagcgagtcggcgcgagcctgaccagccacctagctgaacccgaactggcgcacgaaccctagctactacctactagacgtccctgcccccttcccctccggaggtgctggattcacccctcctctccctagcgggtcccggcgcggacgcaaggcaaaggcaaaaggcgacagaggtggccctgcagtccaccaattagcggcttttgggctcggcaagaacgccattttcatcgtctccggagctatcggatccattcttacatgtggattagtctggtct

SEQ ID NO: 27176 - DNA, 409 bp, Zea mays
  Clone ID: LIB3180-012-P2-M1-F8
tttgatatgtatggcttcaccgtagacccaggttacaaggaatggacaaggtacttctcagaggtaagaaagggacacactccactacatggtagagcatattatcagatgatggaatgtcttggtctggtgaaaatccattcaccgatgcaaggagatcctggcaggacagtgaggtggctgcctaccaaggctaccatcgaggctgctagagttgcttccgagaagttgttgaagagacctggtgctggaagtgatgatcctctggggacttgcaccatgataaagaagcgcaagaaagggaaggcgccaaacagatctggtctacgagatgctgccatgaagcacctcgaggacatgaaaggtgccaccaggtatcccttggagcgaaatgcagggggtggttacc

SEQ ID NO: 27177 - DNA, 353 bp, Zea mays
  Clone ID: LIB3180-012-P2-M1-F9
tccttcttccaaagcacccgaaccctagtgatctcggaaccctagccgcgcgcggatctcggcttttccccttcctccacgccagccatggacgaggacttcgagatgcctcccgccggcgccgatgagatgatgggcgacgacgagatgggcgacttcggcggcgacgagggcccggtgatgaaggtgggcgaggagaaagaggtcggcaaggaggggctcaagaagaagctgctcaaggagggcgagggctgggagactcccgaggtcggcgacgaggttgaagtgcattacacgggcacgctccttgatgggacaaaattcgacttaagccgtgatcgttgagaaccctt

SEQ ID NO: 27178 - DNA, 407 bp, Zea mays
  Clone ID: LIB3180-012-P2-M1-G1
gttctagatcgcgagcggacggccttttttttttttttttgaacacaagggtcttgaacatcacaaaatacaatatcgaatgctcatgtaaaatgcattttaacctttcaccattgatcaagtcagtccgaccaaacaattacactgttgcgctttacaataccaaaaccatgaatgctaactcttaggtattcaatatacaagcgattcattctatttaactacttgaaacatgattcatcaacatagaagtctgtcgtagaacaatgaggtcaggaaacacctttatgagggcatatcatggaggaacaacaactacaacaacctgtacaggaaaagcttgatgtacactatcatttacaacagatcattccattcaagcatcgatctgcattgtcctttacttc

SEQ ID NO: 27179 - DNA, 154 bp, Zea mays
  Clone ID: LIB3180-012-P2-M1-G10
gtcgccatgggaaccaggaatcttacgcggaaccgcgccgcttccatggcgacggcatccactacgctgctcctctcccttgccttcctcgccttcgcctgggcggcgtcgccgtcgccggatgcggaggcgatctcccggttccaggagttcc

SEQ ID NO: 27180 - DNA, 71 bp, Zea mays
  Clone ID: LIB3180-012-P2-M1-G11
tctttcgggcgaagaggcaaccagggagcatgggcgggaccgcaccactgccagggggacatcatcctctt

SEQ ID NO: 27181 - DNA, 299 bp, Zea mays
  Clone ID: LIB3180-012-P2-M1-G12
tcttgcggaccaggtaagcagcagcaggaaccctagcaccgccgcatccgcaggcatgggtatcgacctcgttgccggtgggaggaacaagaagaccaagcgcacagcgccgaagtccgacgatgtttatctcaagctccttgtcaagctctaccggttcttggtcaggaggaccaagagcaacttcaatgctgtcattcttaagaggctcttcatgagcaaaaccaatcgcccaccaatcttcatgcgccggcttgtcaagttcatggtaggtaaggagatggacatttgctgggatt

SEQ ID NO: 27182 - DNA, 192 bp, Zea mays
  Clone ID: LIB3180-012-P2-M1-G2
ctctacctgcagctgcagaaatagggtcatgtcctgctagcttgagagctctggtacggtgtaacaaggtaccggagagagagagagttgcaaactagctagggcacagggcaaggcatgggccggcttgcattatattgggatcggatctgggggcgaacgagctagcatcaacttgtagaagagagaggg

SEQ ID NO: 27183 - DNA, 288 bp, Zea mays
  Clone ID: LIB3180-012-P2-M1-G5
ctgttggagagggacaaacaagaaaaccggctggaccttaccagctgacgccgtggtccactagcgccttcctcttccgtcgctcggcttgttcaaccgccttctacagataggctaccccacggtttcaagggctttttcataactactaaatgtaagaatagcatttcttatccaacaactcattaagagttttattaagtcttagattttgtgttcctttatgatataaagctattatctgcttgttgaacattaaatctagttttttcttttaattataaatat

SEQ ID NO: 27184 - DNA, 243 bp, Zea mays
  Clone ID: LIB3180-012-P2-M1-G6
tcgcagaccattagctttatctactccagagcgcagaagaacccgatcgacaccatgagggtgttgctcgttgccctcgctcttctggctctcggtgggagcgccaccttcacgcatacaagcggcggctggggctggcagccaccggcggcggttcatttatcggcggcggtgcatctggcaccttcggttcacctgccaacttcggtgcatcttccacacgcggtccacctggcggcggcg

SEQ ID NO: 27185 - DNA, 201 bp, Zea mays
  Clone ID: LIB3180-012-P2-M1-G7
tcagccaaatcggcctatagatcaaacgctgcactgtagggagcgtgaagccagcggcgaatggaatccctagccgccacctccgtgttcgcgccctcccgcgtcgccgtcccggcggcgcgggccctggttagggcggggacggtggtaccaaccaggcggacgagcagccggagcggaaccagcggggtgaaatgctct

SEQ ID NO: 27186 - DNA, 384 bp, Zea mays
  unsure at all n locations
  Clone ID: LIB3180-012-P2-M1-G8
tgtaacgaatgtcggtgcggccgtgctggccgtggagccgcatagcgcagcagtcacaaccccggtggcttcgatcggtcctgctgccacgccggcgtcgaggggcaagaaaccgcggaggcctcgtatactgcgtggccggaacgcggtctcagctgggttgtctatctaacttccgtgttcttttttggattctcttttagattcccgagttaagattttcaattccatnntgtctggcttcattattatttggttctttgctggattcttttaatgtgacatttattaattgtttaatcttgaaatctctcgttggctcctttttttatttattcttttttttttgattctttccttttttcttttattttatttagtcta

SEQ ID NO: 27187 - DNA, 229 bp, Zea mays
  Clone ID: LIB3180-012-P2-M1-G9
tggcggagaccctcttcagatacatcgccccggagcaagtccccgtccagttcggcggcctgtacaaggaggacgacaccgagttctccaccttcgacgccgtcaccgagctcaccgtgaaaccgtcctccaaggagaccgtcgagatcccagccaccgagaactccaccgtggtgtgggagctccgcgtgctgggctgtgaggtgagctacggcgccgagttcacccc

SEQ ID NO: 27188 - DNA, 184 bp, Zea mays
  Clone ID: LIB3180-012-P2-M1-H10
ttcccatcccgaccccgtcttgccaccggctacacgctctcggagtctcggtcgctgcttgccaccgaccacaccctctctatcgacgccgcccaaatggaggccatccggaagcaggcctcaaagctccgggagcaggtagctcggcagcagcaggcggtgatgaagcagttcgggggcgggt

SEQ ID NO: 27189 - DNA, 73 bp, Zea mays
  Clone ID: LIB3180-012-P2-M1-H11
gctggacttcctcgagccggagtctctggctgtcgctcttgctcttaaaccacctgggccgcccccctttggg

SEQ ID NO: 27190 - DNA, 150 bp, Zea mays
  Clone ID: LIB3180-012-P2-M1-H4
tctttggtgacctttgggacaaacaccatgttgaaactgatcatggccaagataatggtctggaccaagaagttccttatgaagccgaacgaacccttgattaatcaaattaatcaagtgggacagagaatgtgtaatttgatcttgctt

SEQ ID NO: 27191 - DNA, 308 bp, Zea mays
  Clone ID: LIB3180-012-P2-M1-H5
tcgatgctcttcgtcctgcaccacaaccaaaaggagcagttccggccgcccgtcgtggataatggttcagcgatccaggaagtccctcgtgaaaaagtgaatttctcagaagaacttttgagcagcacatcatttgctcgccaattagtggatcagatgactctagcaaaggcatatgtcatccttgcaaaagagcaaggtaatcttcagcttgcatgggagcttagttcacagataaggaattgtcaaagattgctatcttaaggggcaggttatggaagagcaatcactaaagatgaagcccattc

SEQ ID NO: 27192 - DNA, 369 bp, Zea mays
  Clone ID: LIB3180-012-P2-M1-H7
ggaaagcaatggcggtaacaagacatttacaagcatggatgaactaatttctgattatgagactggtgctttgcatcctgctgatgtcaaacctgcactggcaaaagcaataaatgaaattttgcagcctgttcgtgaccacttcaacaacaataacgaagccaaagttctactaaacactgtcaagaagtacagagttaccagttgaggagcggaaggtgttcatctttagggtgaatgtcgctgattgaaattcttctatgcttattctgttactaatgccaccactcattttagatcaagcattgagccattggttatcagagtacaatctctctatacaggcattttggtggcaggggccttgtc

SEQ ID NO: 27193 - DNA, 183 bp, Zea mays
  Clone ID: LIB3180-012-P2-M1-H8
tggcatttatttgtcactgatcgttgatcagcctagctagctagcgctgtggtcctgcgtgctaatggcgcccgttcaatgtgcgcgttcgcagagggtgttccacttcggcaagggcaagagcgagggcttcattaccatgaaggaactgctgggcgttatgggctcgaacctggctggtga

SEQ ID NO: 27194 - DNA, 334 bp, Zea mays
  Clone ID: LIB3180-012-P2-M1-H9
tggacttctactcatctgggcaaccactttttctggactcaaatgctgcagcttctatggacacagcaattcacgaggatgattctgaaatagttgccatgataaaagaattattggagactcgtattcgaccagctgttcaagatgacggcggtgacattgaataccgaggattcgacccagaaacaggaacagttaagcttaaaatgcaaggtgcctgcagcggctgtccaagttcgtcagtcacattgaagtctgggatagaaaacatgcttatgcactatgtgcctgagtttggcatgcttcttttggaacaagtggaaggaggtgaaca

SEQ ID NO: 27195 - DNA, 404 bp, Zea mays
  unsure at all n locations
  Clone ID: LIB3180-013-P2-M1-A12
tctagactgtgacgatccagccagctgcaaaggactcggctgtggtcctcttncctaccaagaccaagaagctttnctcaccttcgaagcttatccacaagtctgtgatgcgcaaggagttccgcaagatggccaaggctgtgaaaaaccaggttagtgacaactactacaggcctgatctgaccaagccagctcttgctaggctaagctcggtgtaccgcagcctccaggttgccaagtccggtgtcaagaagaagaacaggcagtcctaagcgctaagtttgtgttctgtcagggggcatgttggtgctcgtagtcccagcttatatttatctatggtccaacagttgagacttgttagaactgagcaaaccatgttaagatgctgctgtgtgtcattcctt

SEQ ID NO: 27196 - DNA, 183 bp, Zea mays
  Clone ID: LIB3180-013-P2-M1-A2
caatgctcacaagctcctatagcttcccttcttcccccataccttccatcaatgatagcttcagtatgtgaaaacccagctcttcaaccctataggctccaacaagcaatcgcagcaagcaacatacctttatcacccttgtttcaacaatcgccagccctatctttggtgcagtcattggta

SEQ ID NO: 27197 - DNA, 282 bp, Zea mays
  unsure at all n locations
  Clone ID: LIB3180-013-P2-M1-A3
attcgagtgcgcacacgagcagacccccgcagacagccaggcacactcgcgcgaccatgtaccgggcggcggctgtcatctcgaggtcctcatcagcactgcngaggcagctcgcgcggggcgtggccggggagctgccgcgtctgttggcgcgagggtatgcggccacggcgaaggaggtgtccttcggcgttggcgcccgcgccgccatgctgcagggcgtcaacgacctcgccgacgccgtcaaggtcaccatgggccccaaggggcgcactgtgatca

SEQ ID NO: 27198 - DNA, 352 bp, Zea mays
  unsure at all n locations
  Clone ID: LIB3180-013-P2-M1-A4
tcggcagggacataattttttattatatggaagatattgtgcttcaaatttgngctaatgactataataactgtngttgagtacttgaatgtacaagctcgcgagccgagcgagccggctcgcgagcctatatcgagccgagcctctttaccgagctcgcgaagtgactgggccgagcctggctcgtttccagccctagtaagaaagataatctgatggataagcagttcttgaaagatccaagtgaaatcacatgggatattggtgataagaaactcaaggagattgtagcatcaaggggaaagaaaggtcctggaaggttcaagcgtgttgaacaattaacatttttgac

SEQ ID NO: 27199 - DNA, 75 bp, Zea mays
  Clone ID: LIB3180-013-P2-M1-A5
tcgcgccactacacgggctccagggtcgcgcaccaccgcatgttccgcggtggctggcagggctcctcggcgtcg

SEQ ID NO: 27200 - DNA, 267 bp, Zea mays
  unsure at all n locations
  Clone ID: LIB3180-013-P2-M1-A6
tcgcttcctctcgtcttccctcttcctctccgaagatacaaggcgccgtcccaggtagaggtagggtcgccaccannctggaggagctgctcatcttcacccggggcggcctcattctgtggtcgtcctgccgggcgctcggcgccgcagccctcaagggctcccccatcgacgccctcattcgctcctgtcttctcgaggagcgatccgccgacgccagctttttccaggacaaattacgcccttaagtgtgacctttcacaacga

SEQ ID NO: 27201 - DNA, 182 bp, Zea mays
  unsure at all n locations
  Clone ID: LIB3180-013-P2-M1-A7
tcgctcctccattggactgcttgctccctgttgaccatngggtattctgaaccatcgagccatggctgccaagctgactcgcctccacagtcttcgcgaacgccttggtgccaccttctcctcccatcccaatgaactgatagcactcttttccaggtatgttcaccagggcaagggaatgc

SEQ ID NO: 27202 - DNA, 225 bp, Zea mays
  unsure at all n locations
  Clone ID: LIB3180-013-P2-M1-A8
tcgaaaaaaacagagaatccaatagaaaggaacaggaaagggacgcccgtctcancacgtcccgcaccccccggcgccttcatggctgccctgggcctgctcctcctcctcctagccgtcgccggtgccgccaacgccgcggcgcccggcggcagaatgtccatcatcttctacaacgaggagcacgccgcgcgcgggctggagcggacggagccggaggccccg

SEQ ID NO: 27203 - DNA, 352 bp, Zea mays
  unsure at all n locations
  Clone ID: LIB3180-013-P2-M1-A9
ttatattttatgcctcatatgtctgtgcatatgggtgggcatgaacttctataagaaacagcggtagtagtcattctttgttattgtaaaagcaataaacactaaatgtattttntcatcagtaagctgcttattcagaaacatgccaaacagctctctgctgtaaatgtctggcctaatgtacgctgtacccccctccccaaaaaaaggaaagaaaattccacgatgcctattgagtcttgacctgtgttttggccttttatcacaaacattggttaattacttaattatggcattcatgtacatgcagatagataccaaagatattctttttatatgtggtggcgctttc

SEQ ID NO: 27204 - DNA, 274 bp, Zea mays
  unsure at all n locations
  Clone ID: LIB3180-013-P2-M1-B1
acccacccgnccgtgcggtataatctaggcactgaacagcggtgcatgctttgctttgccgagctaanagcgccccctccatgtggccgancgtcgcagagggtgttccactncggcaagggcaagagcgtgggccacaagaacatgaaggagctgctgggccgcaagggcccgaacctggcggagatggcctgcatcgcgctgtccgtgccgccggggttcacggtgtcgacggaggcgtgccatcagtaccaggaggccagtcgcgccctcc

SEQ ID NO: 27205 - DNA, 416 bp, Zea mays
  unsure at all n locations
  Clone ID: LIB3180-013-P2-M1-B10
attgagaccaactagcaacatagaaagcacaatagtgtaccaacaatggcagccaaaatattttgcctccttatgctccttggtctttctgcaagtgctgctacggcgaccattttcccacaatgctcacaagctcctatagcttcccttcttcccccgtacctctcaccagcggtgtcttcggtatgtgaaaacccaattcttcaaccctataggatccaacaggcaatcgcagctggcatcttacctttatcacccttgttcctccaacaatcatcagccctattacagcagttacctttggtgcatttattggcacaaaacatcagggcacaacaactacaacaacttgtgctagcaaaccttgctgnctactctcagcaacaacagtttcttccattcaaccaactagctgc

SEQ ID NO: 27206 - DNA, 281 bp, Zea mays
  unsure at all n locations
  Clone ID: LIB3180-013-P2-M1-B11
cgttcgttcagttcatccgtgttcttgtttgcgaggtcgagagagagaggatgtcgtgctgcggaggcaaccgtgggtgcggctccggctgcaagtgcggcaacggctgcgnagggtgcagcaagatgtacccggacatggctgagcaggtgaccaccaccacccaggctctcatcatgggtgtcgcaccatccaaggggcacgccgagggcgggttcgaggcggccgcccgagctgagaacggcgggtgcaagtgcgggggcaactgccagtgcgacccc

SEQ ID NO: 27207 - DNA, 387 bp, Zea mays
  unsure at all n locations
  Clone ID: LIB3180-013-P2-M1-B12
cggacgcgtgggtccgaatccccgacgcaacccttgcgtggtggcgtcaccacccaaatcccaccatccggatctgccgatccgccgccgccatgtcccgctcggagcgccgnctcgcctcggccgtggtgcgccttcccggccgctccagggtctccgcctcgccatccccgcgccgccgctcccagtccccatccccgcgccgcgaccgccgccgccgcgaccgctccccgatcccttaccgcgatcgctccccaagtccatatcgagcccgtcgccgtgaccgctccccgagcccttaccgcgatcgccgcgaccgctccccgagcccttatcgcgatcgccgccgccagtggtcaccctaccacaacgaccgcggncgggacc

SEQ ID NO: 27208 - DNA, 69 bp, Zea mays
  unsure at all n locations
  Clone ID: LIB3180-013-P2-M1-B2
tgttgggtccacccgnccgtttggtcctagatctggagcggntcaagaaccagaaattgtacggtcata

SEQ ID NO: 27209 - DNA, 103 bp, Zea mays
  unsure at all n locations
  Clone ID: LIB3180-013-P2-M1-B3
tcgcccaagcgcacgcagcaccgtcgtcgaactcttccctttacggcggcattggagatggcggcgaatctagaggncgtgccgnctctggatctgtgcactt

SEQ ID NO: 27210 - DNA, 363 bp, Zea mays
  unsure at all n locations
  Clone ID: LIB3180-013-P2-M1-B4
gtggataaaaaactttgttaccaatttcatgaagaaagttagtaatatatgatgntgacttgcaagttgcaaccaccaaataatttgttggacgtccatagctagaatgctacattntgtgtagaataactaaacatgattaatgttttcagtgtggtgtagaccaactaaacatgattaatgttttcagttttagaatgtgatcaagccatgttctgttgtcaatttctacctttctatatttggggctttgagctgacttccaagttggaaatattataattcggatggagaaggtccttagcctcttatgaaatactctctggacatcaagggcaagcactattatgagatggctcgact

SEQ ID NO: 27211 - DNA, 415 bp, Zea mays
  unsure at all n locations
  Clone ID: LIB3180-013-P2-M1-B5
gttaacccaattcttcaaccctacaggagccaacaggcaatcgcagctgggagnttacctttatcacccttgttccntcaacaatcatcagccctattacaacagttacctttggtacatttattggcacaaaacatcagggcacaacaactacaacaacttgtgctagcaaaccttgctgcctactctcagcaacagcagtttctttcattcaaccaactagctgcattgaactctgcttcttatttgcaacaacaacaactaccattcagccagctacctgttgcctacccccagcaatttctttcattcaaccaactggcagcattgaaccttttctggtttatttacagcagcaacaaccactaccattcaagcagctagctggtgtgagccctgctacctttttgacaca

SEQ ID NO: 27212 - DNA, 404 bp, Zea mays
  unsure at all n locations
  Clone ID: LIB3180-013-P2-M1-B9
tcgtacaggaattggtgctagagcaagaagaaggccttcagcaagtatgtcctcaaatatgacattggcgcaggcaagaaagaaatccagttgcagcttgngaagatgaagaagtncgcttcagttatccgcgtcatcacccacactcagatcagaaagatgaagggtttgaggcagaagaaggctcaccttatggagatccagaggtcaatggtggcactatatagtggacaaggtggactggactacggctacaagttcttcgagaaggaggtccctgttgatgcgctgtgttccagaaggatgagatgattgacatcattggagtcaccaagggtaaggggtacgaaggcgtggtcactcgctgggggttacccggcttcacctaaagactcacaggggtc

SEQ ID NO: 27213 - DNA, 406 bp, Zea mays
  Clone ID: LIB3180-013-P2-M1-C1
cctgcacgcttgaaaccgacgacgaggccatatgctggggaattgcatattgtgtcaagggtggtccagaaaaagagctaaaagcaatacagtacttggagagaagagagtgtgagtacgaccagaaaatatccattgatttctacaaggaaggagatcccttgaaaccagctgtgacgggcgtcttagtgttcgtttccactccagatccaattggcaacaagtactatcttggccctgctcctctgcaggatatggcaaggcaaattgctacagccaatggccctactggctataatagggattacctgttctcaatggagaaagcattagccagcattagcccacgaagatgattcgatcatagagcttgcaaacgaggtgaggaaggtgctcaacagaacaa

SEQ ID NO: 27214 - DNA, 396 bp, Zea mays
  unsure at all n locations
  Clone ID: LIB3180-013-P2-M1-C11
catcagggaggggaagaagcggctgccgttggagttcgcgcggtgggcggcggtggaggatttctccgactgcgtggacccctaccagatcaccttcgactaccggacgctgctggtgtcggattggacgcgccttggcttcgcggaggtggactacgggtggggcccgccagcccacgtggtaccgctgacgaacctggactacatcgccacgtgcatccttgtcaagccattggcccacaagccaggggcgaggctcatcacgcagtgcgtgacgccctaccgcgtctcgcgctttcacgacgccatggtggacatgaactagcgccccgccttgtcctgcgttcaccaaacgccttntgtcttcgccggccttccgttttttgtttttttttt

SEQ ID NO: 27215 - DNA, 400 bp, Zea mays
  Clone ID: LIB3180-013-P2-M1-C12
ggcggcggaagtaagaggcgatggggcactccaacgtgtggaactcgcaccccaagaactacgggcccggatcccgcgtctgccgggtctgtgcgaaccctcatggactgatcaggaagtacgggctgatgtgctgcaggcagtgcttccgcagcaacgccaaggacattggcttcatcaagtaccgctgaagtcagctgggcgggctatctgaatgccatctcttggacagtgtagtagaggcgatgccacaattttaattactgtcatttagatgttcccttcagaactctgctatttaagtccgccatgtttgtgatggagaactgaaagctttgtttgttatacttgtttatgagttacctgtgctttgcctaagcttcttgtcttctactctcat

SEQ ID NO: 27216 - DNA, 410 bp, Zea mays
  Clone ID: LIB3180-013-P2-M1-C2
gcatcccccacctcatcggcccccgcgtgcggcggcgggcgactctacctgacctggcctgcgtcctcccgctttccagccagcaagccagactccgcccctctccgaaggctccgatcgtctggtttcgtccagatccggctccgctgaggctctagatcgcgtcgcgcacgatgcaacgcgacctgtcgcggtcgctgtctccgccgcgccggcgtcggcggtcgccatcacccgagcggtaccgcggccggaggggccgtagggaccgaagccctagccgtagcaggtccccctatcgcccctcgtataggtgaccacatcttccgacacacgccacagaaatctggcgagtcttcgttttatttttttggggtttgtactgtaaaaaatttgaggcgatgctgatc

SEQ ID NO: 27217 - DNA, 81 bp, Zea mays
  unsure at all n locations
  Clone ID: LIB3180-013-P2-M1-C3
ggtcttcagaccattagctttatctactccagagcgcagaagaacccgancgacaccatgagggtgttgctcnntgccctc

SEQ ID NO: 27218 - DNA, 366 bp, Zea mays
  Clone ID: LIB3180-013-P2-M1-C4
tagcaacatagaaagcacaatagtgtaccaacaatggcagccaaaatattttgcctccttatgctccttggtctttctgcaagtgctgctacggcgaccattttcccgaaatgctcacaagctcctatagcttcccttctttccccgtacctctcaccagcggtgtcttcggtatgtgaaaacccaattcttcaaccctacaggatccaacaggcaatcacagctggcatcttacctttatcacccttgttccttcaacaatcatcagccctattacatcagttacctttggtgcatttattggcacaaaacatcaaggcacaacaactacaacaacttgtgctagcaaaccttgctggctacttt

SEQ ID NO: 27219 - DNA, 95 bp, Zea mays
  unsure at all n locations
  Clone ID: LIB3180-013-P2-M1-C5
tcggttttttgatatattctctctctctctggggtggaaaaaaaggggttcaggggnaaagggcatcgacttacctggntttgaggttttttatg

SEQ ID NO: 27220 - DNA, 183 bp, Zea mays
  unsure at all n locations
  Clone ID: LIB3180-013-P2-M1-C6
ntcggtttaagctttgcaacaactgatagccgaattgcgcgcgccggtccctaaaaaaatgcaagtactaggtagtagatnagatgcatttcccagtaattttttnttattatatatactcagcacgggaaggaggggagacactctgttcaaccaccagccgagttcgcagaggcacttcag

SEQ ID NO: 27221 - DNA, 315 bp, Zea mays
  unsure at all n locations
  Clone ID: LIB3180-013-P2-M1-C7
ctcacacagatctcgtacccggcagtggcgacgaatctcgcggggcggaggtggnggcgcgactgaggcggtgtcggctccgacgaactcgcagccaccgggggatacgcagcagcnacaccggcgtactccatcgacgttcatatttaaggacttggtttggataattctactcgtcaacaaaagtgattaaaaatggtggttcttgcagcttcaatcgtttcaaagtcgggaaaagcacttgtttcaagacagttggttgacatgtttggcataaaaattgaaggataactggctgcgttcccgaaactggtt

SEQ ID NO: 27222 - DNA, 297 bp, Zea mays
  unsure at all n locations
  Clone ID: LIB3180-013-P2-M1-C8
gttggtttgtggaaccttcgagggggcgcttgttggttatatggaattggttggggaatttttctgggacatggcgntatatcattatatgtggggaggttcttcactttctgtantgggtttcagatattatatatgtgttcttatgcttggagtgaagatggttgccactctggaatgtcttattgngcataccacaggcatagtgtgctgtctgtactttcattaagcgtgccttgccgcttaaaaattttgctcttgggaaaaggttagctttttacctgaaattgttatgcg

SEQ ID NO: 27223 - DNA, 417 bp, Zea mays
  Clone ID: LIB3180-013-P2-M1-C9
atcgcactgccgtgccgaggcctgccaccgtgtcgcgctcctggctcgtcttcctcctcgaccaggtgttcacgtacctgatcctggcggcgggcgcagcggcggcggagctgctgtacctcgcctacaacggtgacaaggaggtgacgtggagtgaagcttgcggcgttttcggcagcttctgccgtcaggcgcgcaccttcgtcgccatcaccttcggcaccgtcctctgtttcatcctcctgtccctcatctcctcgtaccgccttttcagcgcctacgaggcgcccccgtcgtcggcgctcggcagcaagggcgtcgagatcgccgcctacccgcgctgaagccgctggagggaggcctcgttgcaaatctctgttatgcgtagtcgatcatgtaataatggcttatcgcata

SEQ ID NO: 27224 - DNA, 422 bp, Zea mays
  Clone ID: LIB3180-013-P2-M1-D10
gggacgggaaggggaataagctgaggggaaggcaaggcaagcaggaatcggctggattgcgcgccgacttcctggccgagtttttctagccatccgagcgaggcagtcccatctgcgaagacccggttccgttcggcggccatgcggatggtttctctgcttggtctgtcaggtaggctggcgtgtggcgtccccctgattgatgtccaagtgaagtgatcttggtttggagttctgcaattgctcttgtcgtgctgggctctgctcagttacttgttgatctgcggtagcttggtcttgcttattccgatcgacaataaagatagcaaagcttttcttcgtgttcgtgcaaaatctgtgcttttacctttcttgcgcttatagcagcctgcctgtgaagaagtccctgtttcaaatccagc

SEQ ID NO: 27225 - DNA, 323 bp, Zea mays
  Clone ID: LIB3180-013-P2-M1-D11
tcgcgcgcatcgcattcaccggccaccggcgagctttctttctttctttcttttttctttgagaagaggaagaagaggggaggcgcgacaaaaagggcgccgcgcccccgcattgcccccgacgccggcatctcttcctcgctctccttctcccgatctgatccgaagcgcggcgtcgacgacgacgacctaagggcacgatgcattcgaccaacctgctgctggaggagcccattcggatggcctccatcctggagccatccaagaccagtttctttccggcgatgaccaagatcgtcggcacgctcgggcccaagtcgggc

SEQ ID NO: 27226 - DNA, 343 bp, Zea mays
  Clone ID: LIB3180-013-P2-M1-D2
gaaaaaaaaatctaaccctagcatccgcagcgctagggttcgggggttgcgatggcggcggctgcgagacatcgggggacggtgaagtggctcaacgacaccaagggctttgggttcatatacccctaggacggcagcgaagatctatttgtgcaccagtcgttgatcaagtcggagggcttacgctcgctcgcggagggcgaggaggtgcagttttccaactttgatggagactacggcccgtctaaaggcggtcctaccaatcaccgctctggctgcattcaataaggtcggcgcttagcttatatttggcgctgacagccctgctattcaggagaatagg

SEQ ID NO: 27227 - DNA, 410 bp, Zea mays
  Clone ID: LIB3180-013-P2-M1-D3
atcgggttctcccttcctcttcctgtttccgcgcgcgagatcgccgccccgggtgggctctagatcccgatggcctcgcgccgccgcaccctgctcaaggtcatcatcctcggcgacagcggggttgggaagacgtctttgatgaaccaatatgtgaacaagaagttcagcaaccagtacaaggctacgattggggcggatttcctcaccaaggaggtgcagttcgaggacaggctcttcactctgcaagaaaggtttcagagtcttggcgttgcattctaccggggagcagaattgtgtgtcctagtctatgatgttaattctatgaaatcgtttgataatcttcacaacctggcggtgagaggttctaattcaggcgagccccatcagatcctgacaattttcccttt

SEQ ID NO: 27228 - DNA, 431 bp, Zea mays
  unsure at all n locations
  Clone ID: LIB3180-013-P2-M1-D5
tcgtggacgcgtgggcggacgcgtgggcgaagccagtacattaaacacttcgtcaaccccaaccgtagtagtgctcaaggggagacggatgaggaggaggaagcggtataaagccgcggcgtcgttcgtcggcagccgcgtcctgagtcgctcgcagtcgcagccgacgccttttcctcctccttgtcttcttcctcgctgcagctctcgccgccgaggtcctgggcgccgtcgacaaaccaccttcctcccccgtctctcgtcgtctcggaaggaacggccgcccgtcgcgccaaggattcaagggtgtgggagctgagttgggnaagggactgctgctgcagccatgaaggccctcattctcgtcggaggcttcggcacccgcctgcgcccgctcacgcttagcgtncccaagccgctcgtggatttcg

SEQ ID NO: 27229 - DNA, 404 bp, Zea mays
  Clone ID: LIB3180-013-P2-M1-D6
gttgctctgaaagcacttgtagtaatccatagacttcttcgtgagggtgatcctacatttcgagaagagcttcttaactttacacaaagggggcgtattctgcaactttcaaactttaaggatgactcaagtccaattgcttgggattgttctgcctgggtgcgcacatatggtttgtttttggaagaaaggttggagtgcttcagagttctgaagtatgatgttgaagctgagcgtttgtccaaacaaggtcaaggtcctgaaaagggtcacagtagaaccagagagttggattcacaggatctgttagagcagctgccagcattgcagcagttactataccgactcgttggatgtcggcctgaaggagctgcaaataataactacctggtgcaatacgcttt

SEQ ID NO: 27230 - DNA, 391 bp, Zea mays
  unsure at all n locations
  Clone ID: LIB3180-013-P2-M1-D7
ntcgttttgctcctcccctgcctcgcctctctctctctctcccctctcctcgccttcagcttctgctcggcccgctcgcgntcagctgcgcgcgcgtctgcggtggccgtgaaggacagcccgagggacgcgccgggtgcactgatctgggggccgcgtgtccccggtggtggggcgaggcggcccccgcttccaagaatgtgaggtcccgctacacaaggggtggggcagcttggagtggctggttcttttgcatatgcgctttctattggtggtgtcatttcaaaggaggccatagtcttctggattttggatgccttgttatctggaattggtgaccatagatgtcatttcgtagcataatccgtgatgttagggatggctttcgcag

SEQ ID NO: 27231 - DNA, 397 bp, Zea mays
  Clone ID: LIB3180-013-P2-M1-D9
cattggactgcttgctccctgttgaccattgggtattctgaaccatcgagccatggctgccaagctgactcgcctccacagtcttcgcgaacgccttggtgccaccttcttcttccatcccaatgaactgatagcactcttttccaggtatgttcaccagggcaagggaatgcttcagcgccatcagctgcttgcggagtttgatgccctgtttgatagtgacaaggagaagtatgcaccctttgaagacattcttcgtgctgctcaggaagcaattgtgctccccccatgggttgcacttgctatcaggccaaggcctggtgtctgggattacattcgggtgaatgtaagtgagctggctgtggaggagctgagtgtttctgagtccttggcattc

SEQ ID NO: 27232 - DNA, 387 bp, Zea mays
  Clone ID: LIB3180-013-P2-M1-E1
tcggcaagtttaagcttcaccttcaaccatgggtaaggagaagtcccacatcaacattgtggtcattggccacgtcgactctggcaagtcgaccaccaccggccacctgatctacaagcttggaggcattgacaagcgtgtaatagagaggtttgagaaggaggctgctgagatgaacaagcggtccttcaagtatgcttgggtgctcgacaagctcaaggctgagcgtgagaggggtatcaccattgatattgctctgtggaagtttgagaccaccaagtattactgcaccgtcattgatgcccctggacaccgtgacttcatcaagaacatgatcactggtacctcccaggctgactgtgctgtccttatcattgactccaccac

SEQ ID NO: 27233 - DNA, 424 bp, Zea mays
  unsure at all n locations
  Clone ID: LIB3180-013-P2-M1-E10
tcggcctgccatctgcttgctgacagggaaatttatcacgccagagcttaacaatgttgccagcctgtggttcatgtcacttttcatctgcatttttgctacgagcatcctggaaatgagatggagtggtgtaggcatcgatgactggtggagaaacgagcagttttgggtcattggaggcgtgtcttcacatctctttgctgtgttccagggactcctcaaggtcatagctggtgtagacacgagcttcactgtgacatccaagggtggagacgacgaggagttctcagagctgtacacattcaaatggacgacccttctgatacctncgacaaccctgctcctactgaacttcattggagtggtagctggcatctccaatgcgatcaacaacggatatgaatcatggggccccctgttcggg

SEQ ID NO: 27234 - DNA, 265 bp, Zea mays
  Clone ID: LIB3180-013-P2-M1-E12
tctatccacccacagccaccacccacccccaacagcagccgctagaaccgccggacaccgccgtcgttgccccccgggaggctcaaccttccctcccgggggcagccacaccccagtcgccgctccctagcagccgccgcattcttccctctctcttcagtcgccgcatggccactgccttctcgtcgctccgctttctcgggctgctcaagcaacccgacgacgccagcttccagttccacggcatctaagcgcttgagctcga

SEQ ID NO: 27235 - DNA, 419 bp, Zea mays
  unsure at all n locations
  Clone ID: LIB3180-013-P2-M1-E2
gcgcctctacatttcttctctctctgctcctccgcctccgcctgatccatccaagacagggatcgccatgtcggactcggaggagcaccacttcgaatcgaaggccgacgctggggcgtccaagacctacccgcagcaggctggcaccgtccgtaagaacggcttcatcgtcatcaagaaccgtccctgcaagggtggtggggnttctacctccaagactggtaagcatggccacgccaaatgccactttgtcgccatagacatattcaatgggaaaaagcttgaagatattgttccttcatcacacaactgtgacattcccgatgtgaaccgtactgagtatcagctgattgatatttctgaggatgggatgtgagccttcttacttcagatggcaacactctaggatgtcttagact

SEQ ID NO: 27236 - DNA, 423 bp, Zea mays
  unsure at all n locations
  Clone ID: LIB3180-013-P2-M1-E3
tcggcgcctctacatttcttctctctctgctcctccggctccgcctgatccttncatgacagggatcttcatgttntactcggaggagcaccacttttaatcgaaggccgacgctngggcgtccaagacctacccgcagcaggctggcaccgtccgtaagaacggcttcatcgtcatcaagaaccgtccctgcaaggttgtggaggtttctacctccaagactggtaagcatggccacgccaaatgccactttgtcgccatagacatattcaatgggaaaaagcttgaagatattgttccttcatcacacaactgtgacattccgcatgtgaaccgtactgagtatcagctgattgatatttctgaggatggatttgtgagccttcttacttcagatggcaacacctaaggatgatcttagac

SEQ ID NO: 27237 - DNA, 121 bp, Zea mays
  unsure at all n locations
  Clone ID: LIB3180-013-P2-M1-E4
ctaatttttttgagcacaacacctgcggtcccttggtgcttttttcagggggtttttttttttttaaaaaaaaaaaaaaaaantttttatttttttttttttttttttttttttttttttt

SEQ ID NO: 27238 - DNA, 54 bp, Zea mays
  unsure at all n locations
  Clone ID: LIB3180-013-P2-M1-E6
nntcttttttttgcctctgcaaccccatcatcgccaaggggttctcgggcgggg

SEQ ID NO: 27239 - DNA, 342 bp, Zea mays
  unsure at all n locations
  Clone ID: LIB3180-013-P2-M1-E8
ggtcgtcgtcgtcgtcgtcagccatgagcaaggacaagcaccacaagcacgagcaccacctgcggcgttgctgcgggtgcatggcgtcgtgccttctggcgctggtccttatcgtggccttcgtctcgctggtggtgtacctggcgctgcgcccctcgaagccgtccttctacctgcaggacctgcagctgcgcaggcccatctcgctgggcgacccgtcgctgacggcgtcggcgcaggtgacgctggccttccgcaaccccaacgaccgcgtgggcatcttctacaagcgccctggcgtgttcgtcacctaccgcgacgaggccntgcggtgcccgtgtc

SEQ ID NO: 27240 - DNA, 153 bp, Zea mays
  Clone ID: LIB3180-013-P2-M1-E9
cacaagtcgtcgtaggcagcgagcgtctctcctctcccacgcatcgcgccaaggaagagagagagatcgccgctccccttctcggcgtcggtggtgcgggtgccctccctcctcgagcgagatctgtctggtcacagatctatctgacaaaat

SEQ ID NO: 27241 - DNA, 353 bp, Zea mays
  Clone ID: LIB3180-013-P2-M1-F10
tcggaccgacgcgcccgttttctcctgaaaacagaaggctccggcctccggcatccgccaaaaaggggaaaaaaggagagataacacacacacacacaaaccccaatcccctgcggcggcgatggacccgtcatcggcgggctccggcggcaactccctcccgtccgtcggccccgacgggcagaagcggcgcgtgtgctacttctacgacccggatgtgggcaactactactacgggcagggccatccgatgaagccgcaccgcatccggatgacgcactcgctgctggcgcgctacggcctcctcaaccagatgcaggtgtacacgcccaacccggcccgcgaccgcgacc

SEQ ID NO: 27242 - DNA, 321 bp, Zea mays
  Clone ID: LIB3180-013-P2-M1-F11
atgattttggattcaagctgaagaagaggctatggttaatagagtactaaaggagatagtcttgtcaaaggtagttgccattgaacaattgcaatctgatatggcatcttcacttcacatccaagatgttatgagaaatgagatccgaagagtccaggatgaagatgaactttcttgcataacccacaaagctaagcagttggagcttcaggtatcatgtgtaccttgcatatttcatatctattttccctaataaactagcagttcatagtttttatctaatcaaagtaggattttggtaacagtttctctttcataatg

SEQ ID NO: 27243 - DNA, 204 bp, Zea mays
  unsure at all n locations
  Clone ID: LIB3180-013-P2-M1-F12
ttcagagcagacccggatttcgctcttgcggtcgctggggttttagcatnggctgatcagttcgatccgatcccgctgcgaaggcgagatggcgttcgcggtttctggggcgttgctcgttggggccgttagggcttctcgactcaccggcggccgggatggaagtgtagtctcttggctcaccggcctagtttaaactcggga

SEQ ID NO: 27244 - DNA, 390 bp, Zea mays
  unsure at all n locations
  Clone ID: LIB3180-013-P2-M1-F2
tgagttactaaacaagtactactaccttaacggaccggacctaataagcaaccattcctcaagcgccgttccactcactacgggatacactcctagagtagttggagcatatccctccgttgcattccactattgattacgatttccatacctgtccgggaggtgaagcagaggaagggcacccctcgtctatacgatagggaatatatcgatagaaatatcgggaatagctcagttagggtatgtgcggagggagggcattcaattctatgtgcaacggaaagggatgtatttacctgttcataacagcaatggaatacctattcaatatagttatatatatctacttatntatatctacttatttatatctattgattaatatctact

SEQ ID NO: 27245 - DNA, 271 bp, Zea mays
  Clone ID: LIB3180-013-P2-M1-F3
atggaatgggacaaagaagaaagggaatcttggaatggctctctgcaagaaatggaacacaaaagggaatctgggaatgacttgtacagaaacacaattgtctggggggtagttccgagttcactcgtttggaacacagtagaacctttgcatgtaaagaacggcttcgatgatcttaagtttcaaaaaaaagcaaaggttttctgttagattttacccagcttctttggataaggttcttaacaggccttttttggtagctctactcttc

SEQ ID NO: 27246 - DNA, 282 bp, Zea mays
  Clone ID: LIB3180-013-P2-M1-F4
gccagatattgaaaggaccaattggaccaggcaacagaatcatagatatggtcacaggaccatacaaactcattagacggtgtgaaatgactgcaattcttatacagtacgcgctgccaaggtgatttttttctctcattatttaacaaactaattacaattgatgcagtttccctttgatgaaggttgattctagtgccaatcctgttgccgcttgtccacggcagtcagggcagagcgataggatttgtttgcaattaacctgatcgtggcctcgtccac

SEQ ID NO: 27247 - DNA, 421 bp, Zea mays
  Clone ID: LIB3180-013-P2-M1-F5
gtttcaaatccatccatcctcgtttcctccgtcccgcagcatctcaaccccatggccaagatcaagatcgggatcaatgggttcggcaggatcggaaggctggtggccagggtggccctgcagagtgacgatgtcgagctcgtcgccgtgaacgaccccttcatcagcaccgactacatgacctacatgttcaagtacgacactgtgcacggacagtggaagcaccatgaagtcaaggtgaaggactccaaaacccttctctttggtgagaaggaggttgctgtgtttggctgcaggaaccctgaggagatcccgtgggggttcggtggtgctgaatatgttgtgagtctactgggttttcactgaccaggagaaggctgcagctcacttgaagggggtgccaaagaagtgtcatctctgc

SEQ ID NO: 27248 - DNA, 422 bp, Zea mays
  unsure at all n locations
  Clone ID: LIB3180-013-P2-M1-F6
gaccaaagcagaccagaatccgccctaccaatgcgcctcccagatcggcggtccacccggaggcggcgatggcgtcctcgcatgcgaacctcgacaagatgcagcttcgccagagctaccgcaacgtctggcacaccgacatgacgaacgccattcaggccgacttcccctactgctgcctcgcgctgtggtggtgagccatccatcgaccctgcctagcagatctcaccgtcaccgtcttctgcgggctttgagtctcgaacccctagccttccgtagatccgaggacacttaatttgtcgctgtggctagggttattgncaggtttggtctccaagggttccgcgttgtgcattgccgctttttcgaggagcatatcctgaactaaattgntgcagtataaaagctcattctacattata

SEQ ID NO: 27249 - DNA, 254 bp, Zea mays
  unsure at all n locations
  Clone ID: LIB3180-013-P2-M1-F7
cgtcgtttacgcgtncgnccacgcgtnncgccacgcgtgcgtccaacgcgtgcgtccacgcgttctgccacgcgttcgtcacnnctaaacccagaacccagcccggcccaaccctagtcgtcgtcggcgcgcgcgcgcgggattacaccactggcggcngcacccccatggccgggccgtcagaggacgcgttggggcgcgcgctcgcgggtcgcaaggctgccgtggacccccaagcctaggccgtgcgcgcg

SEQ ID NO: 27250 - DNA, 314 bp, Zea mays
  Clone ID: LIB3180-013-P2-M1-F8
tcgccaacaccacctcgcctgcgatctccgtagcctccgtcgcgtcgagcatcgatcatgtcggcctactgcggaaagtacaaggatgagctcatcaagaatgctgcctacattggcacccctggcaagggtatccttgctgctgatgagtccactggcaccattggcaagcgcctttccagcatcaatgtcgagaacgttgaggagaaccgccgtgccctccgtgagctcctattctgctgccctggtgctctccagtacattcagcggtgtgatcctctttcgaggagaccctgtaccagaagaccaaggat

SEQ ID NO: 27251 - DNA, 414 bp, Zea mays
  unsure at all n locations
  Clone ID: LIB3180-013-P2-M1-F9
cacgaatgcctcctcgagcgggagccatggcggcggcggcggcgagggcaagggcggcgctgctgccctcctccccctccccatcgccgctgttccgcctcccgcgccgcttcctttcactcaccgcgactcgctaccctctctactacgacctcatcgtgcatcgccccgcggaccccaatccccccaaatcctccgccgccggggccgaccggcagccgcagccagcccccgaagagcagacgctcgaccgcgcaaagcgccggtacctccgcaagcgccgcagccgcctactccccgaccctgacgccaccaccaccactaagccctnctccttgtcgtcggagttcgtcgagctcaggccccgaagtggtggacttcccgcgcctgcacgcgcgcgaggaggcgctctac

SEQ ID NO: 27252 - DNA, 391 bp, Zea mays
  Clone ID: LIB3180-013-P2-M1-G1
ctcctcctggtggtgatttttcagaccctgttacctccgcaaccctcagtattgttcaggtcttctggggtttagataaaaagctcgctcaaaggaagcatttcccatctgtgaattggctcatttcctattcgaaatactccaaggcccttgagtctttttacgagaaatttgatccagatttcattgatattaggacaaaagcacgtgaggtgttgcagagggaggacgatctgaatgaaattgtgcagcttgttggtaaagatgcgctggcagaatctgacaagattacgctggagacagcaaagcttttgagagaagatatttggcacaaaatgcattcaccccatatgataagttctgcccattctacaaatctgtttggatgatg

SEQ ID NO: 27253 - DNA, 423 bp, Zea mays
  Clone ID: LIB3180-013-P2-M1-G10
ttttgaacgagttccagaccaacctggttcggtacccgaggatccacttcatgctctcctcctacgcaccggtgatctcttctgcgaaggccttccacgagcagctgtctgtggcggagatcaccagcagcgcgttcgagccggcttccatgatggtcaagtgcgacccacggcacggcaagtacatggcttgctgcctgatgtaccgcggcgacgtggtgcccaaggacgtgaacgccgcggtggccaccatcaagacgaagcgcaccatccagttcgtggactggtgcccgacggggttcaagtgcggcatcaactaccaggcgccaacagtggtgccgggtgccgacctcgccaaggtgcagcgtgccgtgtgcatgatctccaactccaccagcgtcgtcgaggtgttctcccgcatca

SEQ ID NO: 27254 - DNA, 396 bp, Zea mays
  Clone ID: LIB3180-013-P2-M1-G2
tcttctgttagggcgtgtcacacaagatccggaggcagatcgaggacctcgagcgcgccggaggggtcgagagtgggaccctcaccgtcgatggcgttcctgtcgacacctacctcaccaggtttgtgtgggatgagggcaaataccccacaatgtctccgctcaaggagattgttggcagcatccagtcacaggttgccaagattgaggatgatatgaaggtgcgagcagcggaatataataatgtaaggagccagcttagtgcaatcaacagaaagcaaagtgggagcttagcggttcgtgatctttccaatctggtaaaaccggaggatatgatcacctcggaacatcttgtgacacttcttgcaatcgttcccaagtactcccaaaaagact

SEQ ID NO: 27255 - DNA, 422 bp, Zea mays
  Clone ID: LIB3180-013-P2-M1-G5
agcgttcgttttaccgggaacgccttactgttggcttaagggccagtcgttgcggcagcagggttgccagcagctcaggcaggtggagccgcagcaccggtaccaggcgatcttcggcttggtcctccagtccatcctgcagcagcagccgcaaagcggccaggtcgcggggctgttggcggcgcagatagcgcagcaactgacggcgatgtgcggcctgcagcagccgactccatgcccctacgctgctgccggcggtgtcccccactgaagaaactatgtgctgtagtatagccgctggctagctagctagttgagtcatttagcggcgatgattgagtaataatgtgtcacgcatcaccatgggtggcagtgtcagtgtgagcaatgacctgaatgaacaattgaaatgaaaagaaaaa

SEQ ID NO: 27256 - DNA, 243 bp, Zea mays
  unsure at all n locations
  Clone ID: LIB3180-013-P2-M1-G7
tttttgtcgcgtgggcacaaccacaggtggtggcggtctaacaacacgcttgggctaacgcttgcacccttttacaactgcaacaaatggtggcattcaaacaaattggtttggccaaaccaagaggattttaaccacaacccaataatggggggggccttttttagaattcttatgaggtataggtcaataaataaggtttttggcttgaaaaaaaaaaaaataaanaaaaaaaaggggggg

SEQ ID NO: 27257 - DNA, 252 bp, Zea mays
  Clone ID: LIB3180-013-P2-M1-G9
ttgcgatccgtcggtggtgtcggagcggtggaggaggatggccgacgtgcagggagacaacgaggcagctctggaggacgacgctttccccgacgacgggcccttagatacggaggagggaggtggaggaagaacccatcagcggaggcgacgaggaagaggaggaggacgtcgacggcctcgccagcttccttgagtcggagatcctctccggatccagcgacgaggatcctattgacgagcagcggcagc

SEQ ID NO: 27258 - DNA, 75 bp, Zea mays
  Clone ID: LIB3180-013-P2-M1-H1
ttttagagcagacccggatttcgctcttgcgggcgcttttgtaaagcatggggggatcaaacgatccgtccgctg

SEQ ID NO: 27259 - DNA, 390 bp, Zea mays
  Clone ID: LIB3180-013-P2-M1-H10
gaccgggttccacatgggccgcctcagcgtcgactgtaacgtcgtggagccggcggacgtcaagaaggtggccaccacattgcaacgcgcccttaaagggggcgggaccgccggcgtccgaggagatggtgaggaactgcatgatccaggatctctcctggaagggccctgccaagaactgggagaacgtgctgctcagcctcggggtcgccggcggcgagccaggggtcgaaggcgaggagaatcggcccgttcgccaaaggagaacgtggcccgtgccctgaagagttcggcctgcaaggcccctgatctcgcgcgtggtgcaaagatgttgggacatcttcttatatatgctgtttcggttatgtgatatggacaagtatgtgtagc

SEQ ID NO: 27260 - DNA, 282 bp, Zea mays
  unsure at all n locations
  Clone ID: LIB3180-013-P2-M1-H11
tcggggctgaggcctgaggctcataaggcacgcaccatgccaaacggtgtccagtatatataataaaagacaancaacgacaccgaaaaaacataataaactacaactccaggngcgttacaaacaagagggcacgtcgcgtcccgtcgagaagcgctgcacttgtagctggattgcatgcaccaacacaggagtgtttttccacttttctaaaccctctgaccccggccctgacctcaaaacccatgactactttgtttgaaacacaggggggacgccttc

SEQ ID NO: 27261 - DNA, 245 bp, Zea mays
  unsure at all n locations
  Clone ID: LIB3180-013-P2-M1-H12
gtcgagccactctttcgcccgcgcgtttnttaccacccaccgcgcgcactgcggcgaccgatagcccagatagagccgatgtcgcagccatgggtggagaaataccggccgaggcaggtcaaggatgttgctcaccaggaggaggggattagggtgcttaccaacacccttcagaccgccgacctgccgcacatgctattctacggcccgccggggaccggaaaagaccaccaccgcactagcca

SEQ ID NO: 27262 - DNA, 266 bp, Zea mays
  Clone ID: LIB3180-013-P2-M1-H2
atcactgtctcccctccctaccttcgcaagtttgcgcctaaaccctagctcgcttcccaatggcgccgaagaagcgcaaggccgatcccgccgagtccgccgacgctgcggaggcagccgccggcaaccaccgccaggagccagcgccctcggagcccaagccccgcgccaccatctactttcccatcaccgacgacccggcggagcccgacgacgaggaggacgaggaggatggcgcttgcgactactaggaccacgtggaggac

SEQ ID NO: 27263 - DNA, 415 bp, Zea mays
  unsure at all n locations
  Clone ID: LIB3180-013-P2-M1-H3
tcgatcactgtctcccctccctaccttcgcaagtttgcgcctaaaccctagcncgcttcccaatggcgccgaagaagcgcaaggccgatcccgccgtgttcgtcgacgctgcggaagcagtcgccggcaaccaccgccaggagccagcgcccttggagcccaagccccgcgccaccatctactttcccatcaccgacgacccgccggagcccgacgccgaggaggacgaggaggatggcgctggcgacgacgaggactacgtggaggacatcggcaagctgctcgagccactgtcgcgggagcagctcgtcgcgctgctccgcacggcggcggagaccagccccgctacgatggcggtcgtgcgccgctccgtggaggcggaccccggcagcaggaagctctttgtccacggcct

SEQ ID NO: 27264 - DNA, 428 bp, Zea mays
  Clone ID: LIB3180-013-P2-M1-H4
tttgttttcgttgcgtgggtaggggaagaagcaggcggccaggcgcagagtcgcaaaagcagactcggaagcagcccatgcccgagccgaagcggggaggcgacgccgctgcactaccactcacccggtcagcgatttgccgccttgcgggagccagttttggcgtcggcgtcggcggggagttcccggagaggggttctggcgaggatgagcggcagcggcagcggcggagggggagccagggggccgtcggggcccgtgccggcttccgcgaggaagctcgtgcaggggctcaaggagatcgtgaaccgtcccgacccgggaaatttacccggcgctgcgggagtgcggcatggaccccgacgaggcgggcagtcgggtcctctgccaagatacttttcaagaggtaaagagcaagcgtgataaga

SEQ ID NO: 27265 - DNA, 308 bp, Zea mays
  unsure at all n locations
  Clone ID: LIB3180-013-P2-M1-H5
gtttcaccagcgacaacaagggcacatgcaaggcacagaaacatcagcggctgctgtgttgtttatgttaaaaagcnaccaccacaacggagggcgccatcaaagcggcaacaacagcaccaacaccaacaagaaggggggggccaacagcaacatgaccaacaatcacaagggcatgggcaacaacacgaacagagccatgagcaacaccaaggacagagccctgaacaacaactacaacaacttgtgctagcaaaccttgctgcctactctcaggaagcagnaggttctttgcattcaaccaacta

SEQ ID NO: 27266 - DNA, 376 bp, Zea mays
  Clone ID: LIB3180-013-P2-M1-H6
ttcgccgatggagtcgcttgcctcgcaagcgaggccggcggcggtgctctggctcgccggcttcttccaggccgcgcgcctccaccgcgttgtctccttctgcgccagctcgagggcactatccatcaggattgcacagtgcttcctgctgaacgggcttatcttccttgggagcttgcttacacttacatcggtggtcattccaactctactgtggatactacctgagcgatgcaatcaagcagcagggccatctttgtgaacacagggcagccatatctatctattcattcttgcgctccggccttgttgagattttttatgtattttgggtttatccactttatgtcttcagcttcatattaagtacgaattg

SEQ ID NO: 27267 - DNA, 386 bp, Zea mays
  unsure at all n locations
  Clone ID: LIB3180-013-P2-M1-H7
ngtcggttgcctgttgagaagtgcctgagggatgccaagatggacaagagcaccgtccatgacgttgtacttgttggtggcttcactaggatccccagggtgcaacaactgctccaggactntttcaacggcaaggagctgtgcaagaacatcaaccccgatgaggctgtcgcctatggtgctgctgtccaggctgccatcctgagcggtgagggcaatgagaaggtgcaggacctgcttttgctggacgtcacccctctgtccctgggtctggagactgctggaggagttatgacagtgctgatcccgaggaacaccaccattcccaccaaggaaggagcaggtattcttcacctactcggacaaccagcccggtggtcctgatc

SEQ ID NO: 27268 - DNA, 369 bp, Zea mays
  Clone ID: LIB3180-013-P2-M1-H9
cggacgcgtgggctcgttcctgtcgcgcagccacgacctccacttccacatcttccccggcggcggcgcggtcagttgaaccatggcggactccaaggccacctcggcggtcaccctccgcacccgcaagttcatgaccaaccgcctcctggcccgcaagcaattcgtgcttgaggtgatccaccccggccgcgccaacgtctccaaggcggagttggaaggagaggcttgccaaggcgtacgaggtgaaggaccccaacaccatctttgtcttcaagttccgcacccacttcggaggaggaaagtccactggtttcggcctcatctacgacaacctcgaggctgcccagaagttcgagccgaaatacc

SEQ ID NO: 27269 - DNA, 335 bp, Zea mays
  Clone ID: LIB3180-014-P2-M1-A10
caaaaaaacaaaaatatatatcccaatcctattccttgcttgtctgaagcgatcccggcccccccggatctcccataactttctttctggccggcgcaatatagaagcaagacaaaattgctgcggcgcctgcccgcgcaaaggaaataattagcacttgtttgccaaatgcagcttctgacgcatggctagttcttaaggatactttattgtcattgcataccatgaagattgattactaaaggtcttaccaaactcatatttttcatgatcttgcatttaactgcattcctaaattagactgttatgcttaaatacaatttaatcataaattt

SEQ ID NO: 27270 - DNA, 430 bp, Zea mays
  Clone ID: LIB3180-014-P2-M1-A12
ctggacgtcagcctagcaattagctcatcgactccagattggagaactcgacaccatgaaggtgctgatcgttgcccttgctctcctggcgctcgctgcgagcgccgcctccagtacaagcggcggctgtggctgccagacaccaccgtttcatctaccgcctccgttctatatgccgcctccgttctatctgccgccgcagcagcagccgcagccatggcaataccccactcaaccaccgcagctaagcccgtgccagcagttcggatcctgcggcgtcggcagcgtcggcagcccgttcctgggccagtgcgtcgagttcctgaggcaccagtgcagcccggcggcgacgccctacggctcgccacagtgccaggcgctgcagcagcagtgctgccaccagatcaggcaggtggagccgcttgaccgg

SEQ ID NO: 27271 - DNA, 329 bp, Zea mays
  Clone ID: LIB3180-014-P2-M1-A2
ttcccatctcctccaccctccacccagccggcgccgtcgcctaaggagaagagggtccggccgtctccttgccccgatggcgtccgagaagaagcagtccaacccgatgcgggagatcaaggtgcagaagctggtcctcaacatatccgtaggggagagcggcgaccgtcttacccgcgccgtcaaggtgctggagcagctcagcggccagacccccgttttctccaaggcgaggtacacggtgcgctcgttcggtattcggcgtaacgagaagatcgcctgctacgttacggttaggggcgacaaggccatgcatcttgtttgagagc

SEQ ID NO: 27272 - DNA, 291 bp, Zea mays
  Clone ID: LIB3180-014-P2-M1-A4
agactattgatgttactgatgcaatgggatccaacataagaattgacagcggaggacctgaagttatgcgtgttggtccacgtctcaatgaggacattaatgaggaatggatatcgggtaaaacacggttttgttatgatggtttgaagaggcaaagactaaatgaccctatgatccgtggtcctgctggcaggtttaaggcttcgacgtggcgtgatgctcttgcagttattgatgtgtgttttggattaacttaaatctaaagtaatggccggtgttttataaatactt

SEQ ID NO: 27273 - DNA, 359 bp, Zea mays
  Clone ID: LIB3180-014-P2-M1-A5
gtactttgctggtgacactcatgaagatggttcatttggcaattcatttgagttcacaaaaaacaatatatatggcacccacgttcttcttgaggcttgcaaggtcactggccagatcaggaggtttattcatgtcaggactgatgaggtctatggagaaactgatgaagatgctgaggttggtgatcattacgcctgacagttggttccaacaaattcgcatttagcttcaaaagccggggctgaaatgctttgcatggcatatgggagatcttatggacattctgagataaccactcagtgcaacaacgtgtattggccaaatgagtcccatgagaaacttaatcccaaactcattc

SEQ ID NO: 27274 - DNA, 195 bp, Zea mays
  Clone ID: LIB3180-014-P2-M1-A7
ggccgcccttttttttttttttttgcaatgttcaacccatacatatattaacatgtaagcaatttacaaggcatccagaactactacaaagaagcatttaagcagcggtccaacaaactgcccaagcattcaagagtcatcacaaccgcgagcaaacctttcatattatcagctaatagtatcatcaaatgcacc

SEQ ID NO: 27275 - DNA, 124 bp, Zea mays
  Clone ID: LIB3180-014-P2-M1-A9
ttgtttacgcgttcccctcctgcatgcaacgggatcttttcctacagatccaggatggccattctccttgcgaccttgccatcccttgtgctcacagagagctactatgtttcttcttattaag

SEQ ID NO: 27276 - DNA, 403 bp, Zea mays
  Clone ID: LIB3180-014-P2-M1-B12
tcgggggaagaacattcaggaatacaagggccctagggaggctgatggcattgtggattacttgaagaagcaggttggccctgcgtccaaggagatcaagtcaccagaagatgcgacggcccttatcgatgacaagaagatctacattgttggtatcttcgctgaattcagcggcaccgaatttacaaacttcatggaggtcgcagagaagctgaggtctgactacgactttggccacactttgcatgccaaccacctcccacgtggtgatgcagcagtggaacggccattggtcaggctgctgaagccatttgatgagcttgttgttgacagcaaggattttgatgtcgctgcactgatgaagtttattgatgctagcaccattcctagagttgtaactttt

SEQ ID NO: 27277 - DNA, 366 bp, Zea mays
  Clone ID: LIB3180-014-P2-M1-B2
cgagtctcgtccacccgtcgtcctcctagctcctctactcgccagtcgccatgggcaagattaagatcggaatcaacggcttcggaaggatcggcaggctcgtggccagggtcgccctccagagcgaggatgtcgagctcgtcgccgtcaacgaccccttcatcaccacggactacatgacctacatgttcaagtacgacaccgtccacggccactggaagcacagcgacatcacactcaaggactccaagacccttctcttcggtgacaagccggtcaccgtctttggcatcaggaaccctgaggaaatcccgtggggtgaggctggcgctgagtatgtcgtggagtccaccggcgtcttcactg

SEQ ID NO: 27278 - DNA, 184 bp, Zea mays
  Clone ID: LIB3180-014-P2-M1-B3
gtgagttacaagtcgggggattaagtgtaggtgggattggaacttaaacggtggagcctttactcatcatttctgcaaggcagggggaatatttttaggttttgtaaagttcatacagggatcttgatttttatatttgttggaactggaggttattgcaatgaaaaatttgagttaattttta

SEQ ID NO: 27279 - DNA, 297 bp, Zea mays
  Clone ID: LIB3180-014-P2-M1-B5
ccacgcgtccggtcgtcacacacactcagactcagccagtccgctgcctccgcgctcccccaaaacccaccaccgccacgccggaatcctagccttcgccaaccagtcgccatgagagagatcctccacatccagggcgggcagtgcggtaaccagatcggggccaagttctgggaggtgatatgcgacgagcacggcatcgatcacaccggaaagtacgccggcgactccgacctccagctggagcgcatcaacgtctactacaacgaggccagcggcggccgcttcgtcccgcgc

SEQ ID NO: 27280 - DNA, 210 bp, Zea mays
  Clone ID: LIB3180-014-P2-M1-B6
acgcgttctgctgcaccaccacaccacacgatcgcccgcaacactttagctagaagctagacggattaagtaaggtctgtgcttaaagactcgattggttaggacttgggagtaagctactagctagaagctccagtagtcgatcgacagcaatggccaacttcgctgctcagattaaggacaagttcctcggcctcgtcgaccgtgtcg

SEQ ID NO: 27281 - DNA, 336 bp, Zea mays
  Clone ID: LIB3180-014-P2-M1-B7
tcgaggagatcttcctccgcgagcttatctccaactcttccgatgcgctggacaagatcaggttcgagagtctcactgacaagagcaagctcgatgcgcagcctgagcttttcatccaccttgtcccagacaaggccacgaacacgctctccatcatcgacagcggcatcggcatgaccaagtccgaccttgtcaacaacctcggtaccatcgccaggtccgggacgaaggagttcatggaagcccttgctgccggcgctgatgtgtccatgattggccagttcggcgtcggtttctactctgcctacctcgtcgccgatagagttgtcgtgacca

SEQ ID NO: 27282 - DNA, 324 bp, Zea mays
  Clone ID: LIB3180-014-P2-M1-B8
tctacaccttcttctccgtgaagcgcttcatcggccgcaagatgaacgaggtagacgaggagtccaagcaggtctcgtatcgcgtcatcagggacgacaacggcaacgtcaagctcgattgcccggcgattggcaagcagttcgcagctgaggagatttccgcacaggtgctgagaaagctggtggatgatgcatcaaagtttttgaatgacaaagtcacaaaggcagtgatcacagtccctgcttacttcaacgattcacaaaggtcagcaaccaaagttgctggccgtattgctgggctgtgaggtttgcccattataaatg

SEQ ID NO: 27283 - DNA, 402 bp, Zea mays
  Clone ID: LIB3180-014-P2-M1-B9
tctcatttattgagtcgccatggccaacaaatgagataagaactcaaccgttgaagccttcgctcatcatttctgcaagcaaggatgaatctgttaggctatggaatgtccatacagggatctgtatcttgatatttgctggagctggaggtcatcgcaatgaagtattgagtgttgacttccatcctagtgatattgaacgttttgcaagttgtggcatggacaacactgtgaaaatctggtcaatgaaagaattttggctatatgttgacaaatcatattcatggactgaccttccatcaaagtttccaacaaaatatgtccagtttccagtcttgattgctgcagtacactctaactatgttgattgtacaagatggcttggtgacttcattctatcaa

SEQ ID NO: 27284 - DNA, 408 bp, Zea mays
  Clone ID: LIB3180-014-P2-M1-C1
gtctcgactagtcaaagcggcaactgagcaattaaacaaattaccgttctaccattccttttggaaccgtacaaccaaaccctcattggatctcgcaaatgatattctcagcatgttcaccgcaagggaaatgggaaaggtgttcttcacaaatagtggttcagaagcaaatgactcacaggttaaactagtgtggtattataataatgcactgcgaaggccagacaagaagaaatttattgctcgctcaaaatcgtaccatggatcaaccttgattgcagctagtctatcaggtctgccagcgcttcatcagaagtttgatctaccagcaccttttgtcctgcacacagactgccctcactactggcgattccgtcttcctgatgagacagaagaagagttttcaac

SEQ ID NO: 27285 - DNA, 411 bp, Zea mays
  Clone ID: LIB3180-014-P2-M1-C10
tcggccagcagccatggcgtcctccctttcttccccagcgccaccctgcttcagccggctccccctccatgctccctccctagccgagcttctctctcccctgctggttcccatgcgtgcaaggagcactaaggccagcgcccttgccctctgctctagccatggcgtgggccttctctgctccgggctcgcagtcgcccatggcgctctccccttctccgcggcgttcggtagcaggaaagagcagcgccccttccttctttcccatgaccggcgctccctgtccttctccccatggcgcccgtgccccagctctaggtgctcggcttctccatttcagaaggccggccttggtagccgctgttgccatgagtgccatggccgagcgccctgtttcctgctccatggctc

SEQ ID NO: 27286 - DNA, 235 bp, Zea mays
  Clone ID: LIB3180-014-P2-M1-C11
gaagtatatgcattctgtgtaatctatgcatcggattgcagctggaacttccgtggaaattgacagtgatgtgtcgacataggaactgcgatttggttcaatgaccacgtagagggaatgtactggcgggatccttttatttatagcagatagtgttggtgagggaggcctatgtcgcgttttcttgactgagcaagtacagccgactgctggctataaagatgcttccaacgtt

SEQ ID NO: 27287 - DNA, 145 bp, Zea mays
  Clone ID: LIB3180-014-P2-M1-C12
aacgcattgccctttctgttacgtgttttattttattgtgtttctgtgggcgtatatctgatttgtgacgtgtcccttgcttctcccatgtgaattccacaagaactatgagaaatttcaggttggtgatcaacattacaaaaat

SEQ ID NO: 27288 - DNA, 381 bp, Zea mays
  Clone ID: LIB3180-014-P2-M1-C2
ttgtggtgaccaagtgaatgctgctattcggcgccctaataatttaactccttgctattccttttcaaaccaagcacccaaaccttcagtgggtctctcaaatgatattgttagtatgtacaccgcaagggaaaagggaaaggtgatcgtcacaaatagtggttcagaagcaaatgactcacaggttaaactagtgaggtattataagaatgcactgagaacgccagacattaagaaatgtattggtggctcaaaatcctactatggatcaaccttgattgcagttagtttatcaggtctgccagctctttatcagaagtttgatttaatcatatcttttgtttctgacacagactgaccttactactggtgattcttttt

SEQ ID NO: 27289 - DNA, 397 bp, Zea mays
  Clone ID: LIB3180-014-P2-M1-C3
ttcagcgccgaaagagagggagagccaagtcgccttccgccgcgacgcacgatggatcgcgcgcagttgctcctcgtcggactcccggccttgctcttcttctccgacctcactcacatattcgcgccgccgccttcccaccttcgccacccccatcaccaccctcctcaccaccaccatccgcatccgctgcatcatccccactcgcctcatccccacccgcacccgccgcatcatccccacccgcacccgtcgcaccaccaccagcaccccgacccctccacggcaatcatacaggagccacgtgtggatgaggctggattcggcagcacagtggagctgcaattctgtgcctcctgctcgtacaagggaactgcagtgaccatgaagcgcatgc

SEQ ID NO: 27290 - DNA, 260 bp, Zea mays
  Clone ID: LIB3180-014-P2-M1-C4
ttttcactgcccaccggtctctctcacacaacacagggatataagcccagtccacgagatctcccgtagaccagtggcgagtgaagggaaggaacgaaacagagcccgatcctagcgacaggccagggaagatcgccatgatgatgatgggcgaaggcgtgagcgtgcctccgtggtcccaccacttccaacttagcggagttgtcaataaattttttgttttactttaatttttgccctcactttttaatatctaatcc

SEQ ID NO: 27291 - DNA, 102 bp, Zea mays
  Clone ID: LIB3180-014-P2-M1-C6
tttttaaaacaggagtattggtacttactcgggagctttttcaagtaagcctggatctaatgcttctggtgataaaaggaaaaggccaactttcaaaaacag

SEQ ID NO: 27292 - DNA, 285 bp, Zea mays
  Clone ID: LIB3180-014-P2-M1-C7
tcggaacaatcccttccactcccctcccctaaacccctcgccgcccgcggggctcgccggccggcgcccctccaggcccccactccctccgcgtgggcgcgatgccaacggcggtgccgacgcccaaggcggtggtccaccagcggttcggcgccaaggcgcggtacacggtcgaggaggtgcgggaggacgtgggcggctgcccgggccttgtgccgcataccaggaacgtttaccgtttcgctctcgtcctactggtctctatctgtatgttcctctctggta

SEQ ID NO: 27293 - DNA, 261 bp, Zea mays
  Clone ID: LIB3180-014-P2-M1-C8
tcgtgacaaacagttaatttttcgagtgaacaaagagacgggggcacagtagtagaccgcggaatccgatctgacccaaaagaaaggaagcaagtcaacacaacgccccaccaccccgaatcccaaacggaagagggcactcggcgaggcaggtggcgattctgctgtcaccttccgtcgtctccatccccttccattttcggcgagggtcaaagcaggcctcttgctcttgggggtggtttgagagagggagagaacatg

SEQ ID NO: 27294 - DNA, 329 bp, Zea mays
  Clone ID: LIB3180-014-P2-M1-C9
tttttcgactcgtcctccgcattccccgtttgccttgtttaccattcctgccgaaaacacatcctgcgatcctcgaagcctccgccgagcatcgatcatgtcggcctactgcggcaagtacgcggatgagctcatcaagaatgctgcctacatcggcacccctggcaagggtatccttgctgctgatgagtcaactggcaccattggcaagcgcctttccagcatcaatgtcgagaacgtggaggagaaccggcgggctctccgtgagctcctgttctgctgccctggtgccctccagtacatcagcggtgtgatcctttttgtggagt

SEQ ID NO: 27295 - DNA, 297 bp, Zea mays
  Clone ID: LIB3180-014-P2-M1-D10
cttctgaccccttcggcggtttgccgccttcggcgacacctactgcctccctcagctgtcgtcgccatgggcagaaggcctgctagatgctatcgccagatcaagaacaagccgtaccctaagtccaggtactgccgtggtgtccctgaccccaagatcaggatctacgatgtcgggatgaagaggaagggtgttgatgagtatccctactgtgtgcaccttgtctcttgggagaaggagaatgtttccagtgaggcgctcgaggctgcccgcatagcctgcaacaagtacattacc

SEQ ID NO: 27296 - DNA, 343 bp, Zea mays
  Clone ID: LIB3180-014-P2-M1-D11
tcttttcgccgtcgtcgcaggaggacccgcgatgtctcactttgggaggtcaggcccgccggacatccgcgacaccttctcgctcctcgtcctcaacatcagcttccgcaccacggccgacgacctcttcccgctcttcgagcgctacggcaaggtcgtcgacgtcttcatcccgagggacaggaggaccggggactcgaggggtttcgcgttcgtgcggtacaagtacgccgactaggcgcagaaggctatagatcggctcgatggccctgatgtggatgggagaaacatcatggtgcatttttgaaagttcggtcccaatgctttgccaatctccaaagga

SEQ ID NO: 27297 - DNA, 133 bp, Zea mays
  Clone ID: LIB3180-014-P2-M1-D12
tagacttggtgctgtgaaagactgcttgatgatttgcgggtttgttgctgtgtaaaaaaaggtcccatggctcccagaagaccatgaaggttcggatgcaataaggaatagaatgtggacagcattttggttt

SEQ ID NO: 27298 - DNA, 204 bp, Zea mays
  Clone ID: LIB3180-014-P2-M1-D2
tgaagaattacccaaccgtgagcgccgagtacagcgaggccgtcgagaaggccaggcgcaagctccgcgccctcatcgccgagaagagctgcgcgcccctcatgctccgcctcgcgtggcactccgcggggacgttcgacgtgtcgtcgaggaccggcggtcccttcggtactatgaagtgcccgtcggatctggcttacggcg

SEQ ID NO: 27299 - DNA, 145 bp, Zea mays
  Clone ID: LIB3180-014-P2-M1-D3
tacgcagccggcccaagcccaaaaacctgtgtccatcctctactctgatgccgacgatggccgacgccgccaccacgccgtactccctcctcctcccgctcgccccgacccccatcggccgggctgggggcgaggcgatgtgggc

SEQ ID NO: 27300 - DNA, 321 bp, Zea mays
  Clone ID: LIB3180-014-P2-M1-D4
gtgaatggcggcgcggatctcggaggcggccggtgtcaacgggagaaagggcgtctctgcgcccgtggtcttggggcttgcgcatgggtgcggtgagttctttaccaatatcttttttgtcaccctggccactcatgctcttctggtctctttcacctgtttttacttttttttgttatccttttattattttttttttcttctaaatttttttttctattttttatttctttttttttttcttccttttttttcttgtcttctttttgttttttcttattttgtcttgtattttttttctctttttctcatttttctttt

SEQ ID NO: 27301 - DNA, 360 bp, Zea mays
  Clone ID: LIB3180-014-P2-M1-D5
gttcgtcacgcgtcagacccacgcagcgcaccttctcttctccgccgcgtcgccgccgaacatcagcatcggatcgatggagggctgggacaaggggaccaagagcacggtgggcgagatcccgctgctgtcgacgcgcgcgggtccgcgggacggcgaggcgtggcggcagcggctcaaggaggagtaccgcgcgctcatcgcctacaccttggtgaacaaggccaaggacaacgactggttccgcattgccgccgccaacccggagggaacccgctgggaggggccctgttggtacgtccacaactcttcgacggtatgaagtttccttttcagatcgacatatcttgtcgcctaccc

SEQ ID NO: 27302 - DNA, 286 bp, Zea mays
  Clone ID: LIB3180-014-P2-M1-D7
tcgaataagaactcgaattcttatcgatactggaactcagagcataggggggaaagtcgatttatggatggaatcaaatacgcagtatttacagaaaagagtcttcgtttattgggaaagaatcaatatacttttaatgtcgaatcgggattcactaagacagaaataaagcattgggtcgaactcttctttggtgttaaggtagtagctgtgaatagccattgactacccggaaagggtagaagaatggtacctattcttggacatactatgctttacagtcgtt

SEQ ID NO: 27303 - DNA, 440 bp, Zea mays
  unsure at all n locations
  Clone ID: LIB3180-014-P2-M1-D8
tcaacgcgtctcgctcaacaaggcanatcatagaaagggtggaatccagtgagcaacctaatagagcaaccaagtgtgcgaccacagatattttcccttccttatgcgtccttgctcttntctgcatgtgtgtgctaaccgcgacaanttttccctcaatgtgtcacaagcgtcctatagcgttcccttcttcccccataccttccatcaatgatagcttcagtatgtgaaaacccagctcttcaaccctataggctccaacaagcaatcgcagcaagcaacatacctttatcacccttgtttcaacaatcgccagccctatctttggtgcagtcattggtacaaaccatcagggcacagcagctgcagcaactcgtgctacctgtgatcaaccaagtagctctggcaaacctttctccctactcttagcaacaacaatt

SEQ ID NO: 27304 - DNA, 296 bp, Zea mays
  Clone ID: LIB3180-014-P2-M1-D9
tcggtccccactactgctactgcgagacagcgcagcacaggctgccgcccgctggccgctgcgagcagagagaatccaagaacgcgcaagagccccccctcgtcaccgccgtccatgggcggcgctgcgggcgaggcgatgtgggccgctgttgtggcggcgacggtggtcttcttggccgtcgaggtttcgggtgccgcgtcggcgttgccacggttcgcggaggcgcctgggtaccggaacggggaaggttgctcaactacccttgttttaacattattacctccttatttttg

SEQ ID NO: 27305 - DNA, 350 bp, Zea mays
  Clone ID: LIB3180-014-P2-M1-E1
tttctcctttcccggagagtggatccgccatgccaatctgcaccattctgagggaaacctagatccggactcctagccgtcggccatggccacgcgccgggccctctcgtccattctccgctccgcctctcgcattcgctccgcctcaccgtccccatgcccgcgtgcgccgctccaccaccgcccgtcccccgcgggcttcatactcaaccgtgtagccgcctacgccttcttcgccacggtccaggccgtgcccgcttcgccaccttctttaaccggcaagaaaaccggtggcggcaagatcaccgatgtgttcaccggcgctggctccatttgtcatgtgtgtcagg

SEQ ID NO: 27306 - DNA, 279 bp, Zea mays
  Clone ID: LIB3180-014-P2-M1-E10
ttctattgagaccaacaagcaacatagaaagtggaatccagtagcaacaatagagcaacaatggcgaccaagatattttccctccttatgctccttgctctttctgcatgtgttgctaacgcgacaatttttcctcaatgctcacaagctcctatagctttccttctttccccatacctttcatcaatgatagcttcagtatgtgaaaacccagctcttcaaccctataggcttcaacaagcaatcgtagcaagcaacatacctttattacccttggtt

SEQ ID NO: 27307 - DNA, 215 bp, Zea mays
  Clone ID: LIB3180-014-P2-M1-E11
tgtgccagtgcagctgcacaggatgatgacgatgtccctgagcttggccgaggagagacatttgaggaggctgcggaggtgaaagaggtgcctgcagcggcaccagaagagaagtaaagacttgtatatttcaccccttcatatacccattgcttcggaaggggctcccacagtcttacccttgcgcccccgacaaattgcgtatatacttattg

SEQ ID NO: 27308 - DNA, 258 bp, Zea mays
  Clone ID: LIB3180-014-P2-M1-E12
ttttgcacgcaacgcaaaaacaagcacaagcacgcgcgatccgatctgggccggccaagcagccacccatccatggcgactagggtttggctcaccgccctcctgcttggtttcctcgtcgccgcctcccccttcaccggccgagttgctagagctgaatccgaggaagatgctgctgcagctgaggttgttgaaggggctgatctaggtattgtgggtgatgattcacaggttttcagttgatgacctttaagttct

SEQ ID NO: 27309 - DNA, 319 bp, Zea mays
  Clone ID: LIB3180-014-P2-M1-E2
tgtgacggttgctctagatccgttcatcctggtggttttgtgaggtcgaaagcggctagcgaattataagatgctggacaagctgtggtacgacttttgtggtctttttcttattatttttactttatttaattttatctttcttatattattatattttttatgtttatattttattttatattatttattttattattttattattactatttattttttttcattttatattatctatttatttttttatatatttatattaatatttaattattaattctttttattttttatatattatcattttatttattat

SEQ ID NO: 27310 - DNA, 444 bp, Zea mays
  Clone ID: LIB3180-014-P2-M1-E3
tttctcttcgcgggccttccccggacgtcgagcaaccttctcaaaactggtgcggacaagaaaaatcctactgtttaattaaaacaaattattgcgactgttctttagtattcttactcaattttttttttgtccagtgttttttatgttaaattgttaaaatttaatcattctcgttttttctttctcattatctatttatttattaaattattcttattcattttttttttatcttttttatctatattaatatattatctttatttattattttcttcatttttatttatattattaacttattttttatttatcatttatttttatatttttttatctttttaaattctttattatttattttttatgtatttttatttctattttattttttctctattaattattttttatatatatatttatattttttttattaat

SEQ ID NO: 27311 - DNA, 253 bp, Zea mays
  Clone ID: LIB3180-014-P2-M1-E4
tcttggacgcgtgggctggtacaagggcccaaccctacttgaggctctggacttgatcaatgagccaaagaggccttcagacaagcccctgcgtttcccccttaaggatgtgtccaaaatggtgggattggaaccgttcctgttggacctgttgagactggtgtcaataagcctgggatgggtgttacttttgggcctacaggtcttacatactgaggttaagttcgttgtgattcctcttgaggctttttca

SEQ ID NO: 27312 - DNA, 275 bp, Zea mays
  Clone ID: LIB3180-014-P2-M1-E5
tcgttcgcttgcctttgtccgtccttccatccgtgctagctcatttcatgggtcggtcgcctctagaggaccctcgccatcctggccaagcgcaccaccaaacccccagcagcggccctagggttcgcgcctcggggcgtcggcaccgtcacctgcggcgatggcggggcaggagcgtaggacaatcgatctggaggagggatgggcgttcatgcagaagggcatcaccaagctgaagaacatcctcgagggcaagcccgagccgcaattcaatt

SEQ ID NO: 27313 - DNA, 375 bp, Zea mays
  Clone ID: LIB3180-014-P2-M1-E7
tcttaactagcaacatagaaagcacaatagtgtaccaacaatggcagccaaaatattttgcctccttatgctccttggtctttctgcaagtgctgctacggcgaccattttcccgaaatgctcgcaagctcctatagcttcccttcttcccccgtacctctcaccagcggtgtcttcggtatgtgaaaacccaatttttcaaccctacaggatccaacaggcaatcacagctggcatcttacctttatcacccttgtttctccaacaatcattagccctattacatcagttacctttggtgcatttattggctcaaaacattagggcacaacaacttacaacaacttgtgctagcaaaccttgttgcctactttt

SEQ ID NO: 27314 - DNA, 236 bp, Zea mays
  Clone ID: LIB3180-014-P2-M1-E8
tgttggactcccagaggcggccgtggtgggggtctttttatagtatgggggggttaaatattattattcctattttttcttttatttttttattcttttttttttattatttatttatattttttttattttttttattttttatatttaatttattttatttttatttaattatttttttttttttttatttttttattatttttattatattttatttttattttatatttttt

SEQ ID NO: 27315 - DNA, 330 bp, Zea mays
  Clone ID: LIB3180-014-P2-M1-E9
tttctaatatctcgagaatgatcctgttcccgcttcccaccacagaaaagccgggccaagccaacataaaacaagcccgcccgtcattttcgtcacccctgacgctcgacgcctctcctcctctcctcccccacccgtccatcgccccctccctccggtctgcgctcccacagcctcacccctgcgcccccgccgattcgcgtcgccctttgttggaaggaacgatggagcagaccttcatcatgatcaagcccgacggcgtccagcggggcctgatcggggacatcatcagtcgctttgagaagaaagggttctacctcaaggggatta

SEQ ID NO: 27316 - DNA, 265 bp, Zea mays
  Clone ID: LIB3180-014-P2-M1-F1
tcatgattctgaaagcaggaaaggagatcggcactttactcaagaaggcgggctcccttgccactcctttaccttgagatgacgacgacgatgaagaagaagcatcagcagcagctcctcctcctcctttctctcatgtttctcgttgctgtcacagcaaccgctgttgctgtcgaaccacattcacagctgcatgtgcaggtgcatcatcatcatttagcacagattatgattaacaggtccaccagattccttttattcttat

SEQ ID NO: 27317 - DNA, 341 bp, Zea mays
  Clone ID: LIB3180-014-P2-M1-F12
tctgagaccaactagcaacatagaaagcgcgatagtgtaccaacaatggcaggcaaaatattttgcctccttatgctccttggtctttctgcaagtgctgctacggcgaccattttcccacaatgctcacaagctcctatagcttcccttcttcccccgtacctctcaccagcggtgtcttcggtatgtgaaaacccaattcttcaaccctataggatccaacaggcaatcgcagctggcatcttacctttatcacccttgttccttcaacaatcatcagccctattacagcagttaccttttggtgcatttattggcacaaaacatcagggcacaacaac

SEQ ID NO: 27318 - DNA, 377 bp, Zea mays
  Clone ID: LIB3180-014-P2-M1-F2
taagatacgtaacgtttacgtgggttatacatgcctttttttttgttagagattgatgatcggactacctttttacaagtactgtccagagagctacccttcacatgcatgcgtgcgtgcacgtccttcctcgctctagggggtaggcagaccaatatgcaagctgttaattaggccatgttgttgttgtcttgttgatcccggccggaccacgtgcttctcgtcgtctccttctcgcgaagcacatgcctgcacgtacggagtcggagacacatcagtttaggccggacggtttggacgaccgattggtttttaattagctacaggtttctaacattagtttttcgatagcgcgagtgtgtgtttgagatttttta

SEQ ID NO: 27319 - DNA, 395 bp, Zea mays
  Clone ID: LIB3180-014-P2-M1-F3
gtggcaccatcgctatggacggcacggaggggctcgtccgcggacagcgcgggctcaacactggctcccccatcaccgtgcctgttggcagggctacccttggacgcatcataaatgttattggtgaaccgattgatgagaagggtgacataaagacaaaccacttcctccctattcatcgtgaagcccctgcctttgttgagcaggccactgagcagcaaattcttgttactggaatcaaggtcgtggatcttcttgcaccctaccaaaggggtggaaagattggcctcttctgttggtcacgtgtgggtaatactttgcttaacattgaagttgatcaacattgtttcttatgtctctcgttgtttatattttattcttctacttctaatttg

SEQ ID NO: 27320 - DNA, 266 bp, Zea mays
  Clone ID: LIB3180-014-P2-M1-F4
gccacggcggcttccggctcgtgcgcgcgcgcgcgtgtccgggcgagaagagctgccaagggatggaggcgctgaggaagcaggcgagcaagttcaaggagcaggtcgccaagcagcagcaggctgttataaagcagttcagtactactggctatgagcggtcagattccattgtaattgatgaggttgaactacatagacattaacagcttgagaaatcgtatacttttactttttcttgaagggattttcagaatgacatattt

SEQ ID NO: 27321 - DNA, 184 bp, Zea mays
  Clone ID: LIB3180-014-P2-M1-F5
gcggcagtgcgtagagaggatcgtcgaacagaacagcatgaagatggtcatcgttctcgtcgtgtgcctggctctgtcagctgccagcgcctctgcaatgcagatgccctgcccctgcgcggggctgcagggcttgtacggcgctggcgccggcctgactacgattattggctcttcatctttt

SEQ ID NO: 27322 - DNA, 146 bp, Zea mays
  Clone ID: LIB3180-014-P2-M1-G1
aaaacaacaccacaaattcctcacttacaacatttaacactaaaacaaggccaaaataaccctactttaaaaacctttcttttcaccacttctttaccaaatcaaaaaccttaaaacatcactactcattttctaccatttataaa

SEQ ID NO: 27323 - DNA, 186 bp, Zea mays
  Clone ID: LIB3180-014-P2-M1-G10
ttttcaactcgacggccaaccgcgccaccctgccgcggcagccatggtgcatgttaacttctaccgcaactatgggaagactttcaagaagccaaggcggccgtatgagaaggagcgcctagatgctgagctgaagctggttggtgagtatggtctgcggagcaagctctagctattgctcgtgca

SEQ ID NO: 27324 - DNA, 196 bp, Zea mays
  Clone ID: LIB3180-014-P2-M1-G12
tttctccgcaagccgtccgccttgcccttcacgaaggcttggtcctcctccggggatctccactccccccttcacagatccgttccttcagctagggttagcgttcctctgcagcgatggcgatcaagcggaccaaggctgagtagatgatcgcgtacgacaagaagctgtgcagtctgctctatgagtacaccaa

SEQ ID NO: 27325 - DNA, 361 bp, Zea mays
  Clone ID: LIB3180-014-P2-M1-G3
ttatcaaatggatttgaaattgatgttgtcacatatggaacactcattaatgggctatgcaaggctggtaggactcaggttgctttgaagcttttaagaggcatgcgaattaaagggattagacctactccaaaagcttacaacccggtgatacagtctttgtttagacggaataatttaagagatgctcttagtcttttcagggagatgactgtagttgatgattctatttgttgctcttatctttatcttatttttttcgtgtttattgtttttatttatattttttttttatttaattttttttattttatttcttattatatttatctatatcctataatatttatctatctcatat

SEQ ID NO: 27326 - DNA, 314 bp, Zea mays
  Clone ID: LIB3180-014-P2-M1-G5
tttccgacaagtagaccaatctacccaacactttagggttcagcatgctgtggttgcattgtcgcgcatctttgagcaatgagcaagattgggttgctcctccctcccggaggcactgctgaaccatacatggaggaaggagactcgggtcatgggcaccctttaccgtgagaagcgttgtagcctacaccaccaacatttctctttcttttacttcttcccaggtgtactatgaacttcggtgcaggtgcagcggaccttttatattatctgcactttgctggggttcaggggggtaggcctttgatttattg

SEQ ID NO: 27327 - DNA, 397 bp, Zea mays
  Clone ID: LIB3180-014-P2-M1-G9
gttcctgtaggtaatattgcagcccgacggcgacgccctactgctttcctcagtgccagggggtgcattaaaattgttttcagtttattatgttttagtgtctatattattttcttattatatttatttatatattttttaatacttattacttatttattattattttatatattttttaatttttttatattttaattttttactttattttttctcatttttatctatttatttttttttttttttatttcatattttttttttatttttatttatataattttattttttttatattatatatttttttaacatatattctaattactattttacatcttatttatttgtactatacttttatatctattatatatctttctaattattatta

SEQ ID NO: 27328 - DNA, 386 bp, Zea mays
  Clone ID: LIB3180-014-P2-M1-H1
tttcgcagttctcctctcaggcggtggctctttcgtccgcgcagcagctcgccgctctggtgctcgaggccacctcccacccggccctcttcgccttctccgagctcctcgccctcccggccctctccatgctcgctggcactcagtactcgtcttcactggacttgctccggctcttcgcctatggcaccttgaaggactataagaataattcgggatcccttccagcattgttgcctgatcaggtccgaaagctaaagcaactcagtgtgctaactctggcagagtcaactaagatactaccatatgatcagcttatgcaagagttggatgttttcaacttaagagaacttgaagattttctaattaaagagtgcatgtattca

SEQ ID NO: 27329 - DNA, 141 bp, Zea mays
  Clone ID: LIB3180-014-P2-M1-H10
tttttgggtcttcagaccaatagctttatctacgtcagagcgcaaaagaacccgggcgacaccattagggtgtttcatcttttcactatattcaatttaataaatttagattgttttgttcttaaatcatattaattcttt

SEQ ID NO: 27330 - DNA, 295 bp, Zea mays
  unsure at all n locations
  Clone ID: LIB3180-014-P2-M1-H2
tcgctacngactagagggggagagagagaggcgaggaagtatggagagagcacggggtctatatctaatattgattctattgcaaatgtttttatatatattaaattattatttttattatatattttttttatttttttaataattattattattattttattatttatttatattatattatatttatttaattatttttttaatttttttttatttaattttatttattattataattattttatattattttatatttttatttaatttactttttatttatattatttta

SEQ ID NO: 27331 - DNA, 406 bp, Zea mays
  Clone ID: LIB3180-014-P2-M1-H3
tcgaagccgccgcctgctcgctcgcctccggtccggcagcgagctctatctcccgcgacgagcagcaactgccaccgcgcaagcagaccggggaataaatattggtattggtagggggatatctataagaaggcaaggtggttaagttcacaactgtagagctccgggccatcattgacaaaaagaacaacatttgtaacatgtctgtcattgctcatgaggtccatggcaagtctacgcttacagatatccttgatgcagatgttgtgattaaagtccatgtagttactataataatttttaatgactcctactatttcaaatatatttattacttatttttttctttattaaattatatttgctttattatctttttatttaaaattcttatatatatatttaa

SEQ ID NO: 27332 - DNA, 424 bp, Zea mays
  Clone ID: LIB3180-014-P2-M1-H4
tctgaaaatatcaaaacttgaagctgaatgccaaagattacgtggccttgttggaaagaagttacctggtcctgcagcactagctcaaatgaaaatggaggtggagagcttgggtagagagtatggagaccacagagtacgacgatctcctgcaaagaattctagtttccatcggcccatgtctcctatgtctcctgttcctgattacgcaatcgagaacatacagtacatgcagagagagaatgagtttctgactgctcgtttattaacaatggaagaagaaaccaagatgcttaaagaggcattgacaaagcgaaacagtgagctggaatttttaagaagcatgtatgctaagacagcatgaaagcttccgagcttttaaagtcaattgttgactggaaaccaacatttaagttcaactatt

SEQ ID NO: 27333 - DNA, 391 bp, Zea mays
  Clone ID: LIB3180-014-P2-M1-H6
taatgatctgttcgaccaagcataccccagcggataagtgaagtgtcgtcggttcattaataaagcttttataaacatttttttttttttttattttatttttcaaatatctttttttattttttttttttatattggttttaatctatatttgttttatttattttcatattaatttttattatatttttttatttgttatttttattattttgtataattttattattattattttaatttattatttttttttttatttttttttatttatttttaattatgatttcttttctttatttatttatttttttttcttatatttatatatttttattttttatttctaatttatttatctcttatatattattattattattctatttat

SEQ ID NO: 27334 - DNA, 126 bp, Zea mays
  Clone ID: LIB3180-015-P2-M1-A10
ccctttttcttttttttttttgaccccggatcaggagggatcttttactccaccagtccgggcccattaatttactggcagtacaaatggaccgatcggggcttaactacacacgcaagcatttgg

SEQ ID NO: 27335 - DNA, 351 bp, Zea mays
  Clone ID: LIB3180-015-P2-M1-A11
tttccccttgtcgtcgcttcggttcaagcgaggaagagagagagttgtacaagcggcgccggcggccgcactgtagagtaccttgagcttgttcactgccgtcgcggcctcaaagcaagccacatcatcgatggcggacgcagctcacgtcttcctgctggtagcggtggccgccgcgctcgccggccgctcagacggcgcgtggtgcgtgtgccgcccggagcttgcggacagcgcgctgcagaaggcgcttgactacgcgtgcggcgccggcgccgactgcaagcccattctgcagagcggcgcctgcttcgccccggacaccgtcaaggcccactgcttctacgccgt

SEQ ID NO: 27336 - DNA, 356 bp, Zea mays
  Clone ID: LIB3180-015-P2-M1-A12
ttaacctcctttgctctcccccacctcccggtccggcagcagagagcgggggtgcagagagatcgagatccggaggccgcgagtgggagcgccaccaccagcgactgcggcaatggcgggcacggtgacggtcccggggtcgtcgacccccttcacgccggtgctcaaggacgagctcgacatcgtgatcccgacgatccgcaacctcgacttcctggagatgtggcggcccttcttccagccctaccacctcatcatcgtgcaggacggcgacccgaccaagaccatcaaggtgcccgagggcttcgactacgagctctacaaccgcaacgacatcaaccgcattctcgggccca

SEQ ID NO: 27337 - DNA, 272 bp, Zea mays
  Clone ID: LIB3180-015-P2-M1-A2
ggttggtcccacgcgtccgtgctgtttgtaggagatgatcttctcgttaccaaccccaccagggtcgccaaggccatcaatgagaagacctgcaatgctctcctcttgaaggtgaaccaaatcgggtctgtgaccgagagtatcgaagctgtcaggatgtccaagcgcgccggatggggagtgatggcaagccacaggagtggcgagacagaggacaccttcattgctgacctctcagttggcctgtctacgggccaaatcaagacgggagc

SEQ ID NO: 27338 - DNA, 417 bp, Zea mays
  Clone ID: LIB3180-015-P2-M1-A4
ttttctctctccctcgctagagcaaaaaccttgccacgaatcgccgacactccaacccggaagaggcaacgaggtgactccgcgcctcggtaatgggtgacagccaatactccttctcgcttaccactttcagcccgtcgggaaagcttgtgcagatagagcacgcgctcacggctgtcggatccgggcagacctccctagggatcaaagctgccaacggtgtagtgattgccactgagaagaaactgccttctattttggtggatgaaacatctgtgcaaaagattcaggcactaacaccaaatattggagttgtctatagtgggatgggtccagattttcgtgttctggtgagaaaaagtcgaaagcaggcacagcagtattatcggttgtacaaggagcatatacctgtaacac

SEQ ID NO: 27339 - DNA, 269 bp, Zea mays
  Clone ID: LIB3180-015-P2-M1-A5
tcgtggaagtgcgcgacgacgtgccgctgctcggcttcatcgggcgtctggatggacagaagggcgtggacatcatcggggacgcgatgccgtggatcgcggggcaggacgtgcagctggtgatgctgggcaccgggcgcgccgacctggaacgaatgcttgagcacttggagcgggagcatcccaacaaggtgcgcgggtgggtcgggttctcggtgcctatggcgcatcgcatcacggcgggcgcccgcgtgctggtgatgcccctc

SEQ ID NO: 27340 - DNA, 197 bp, Zea mays
  Clone ID: LIB3180-015-P2-M1-A6
tcgttgatctccggcggaggcgagcaaccgcgcaccatgagtgaagaaggaacgctgatgcacgctggtgaccctcttgaggccatgcacaaacaactagcgtcatcatggttacaaacatccattgggtttatgtatggggagccattgaccaagagataacgcttatgcaagtggtgtggttgcaaccacaagat

SEQ ID NO: 27341 - DNA, 174 bp, Zea mays
  Clone ID: LIB3180-015-P2-M1-A7
tcttatcgatcgccgacccctcgagcaacgcgatcgcccgccgacccgacggcggcatggacaccgaatacctgcaacaggggagctcctagtggtggcacacgacgggcgccgtgtcgtgtggagccgcgcagcagcagaagcgccagcggtgccagggttctttcagcgatc

SEQ ID NO: 27342 - DNA, 58 bp, Zea mays
  Clone ID: LIB3180-015-P2-M1-A8
acaaacgagcacatctgatatatttcattctttggattaaatctggataccttcattt

SEQ ID NO: 27343 - DNA, 393 bp, Zea mays
  Clone ID: LIB3180-015-P2-M1-A9
tgggtttttgattttagccgccgccgctgctcatctcacatccctcgagaagacgcctgctcctcgccgatcgatacgatggccgtcttctccgacctccacaccgccgacggcctcaagtccctcgaggctcacctcgccggcaaaacctatgtgtctggtgactccattactaaggatgacattaaggtcttcgccgcggtgccgtcgaagcctggcgctgagtttcctaatgccgcccgctggtacgagaccgtctctgcggctgtagcctcaagattccctggtaaggctgttggtgtaaatctgcctgcgggatcagctcctgcggcagctgctcctgcggatgaggctgaggatgatgatgaccctgatctttttggtgatgaaact

SEQ ID NO: 27344 - DNA, 404 bp, Zea mays
  Clone ID: LIB3180-015-P2-M1-B1
tgtttcagggaacctgcggcgttggcagcaccccgatcctgggccagtgcgtcgagttcctgaggcatcagtgcagcccgacggcgacgccctactgctcgcctcagtgccagtcgttgcggcagcagtgttgccagcagctcaggcaggtggagccgcagcaccggtaccaggcgatcttcggcttggtcctccagtccatcctgcagcagcagccgcaaagcggccaggtcgcggggctgttggcggcgcagatagcgcagcaactgacggcgatgtgcggcctgcagcagccgactccatgcccctacgctgctgccggcggtgtcccccactgaagaaactatgtgctgtagtatagccgctggctagctagctagttgagtcatttagcggcgatgatt

SEQ ID NO: 27345 - DNA, 319 bp, Zea mays
  Clone ID: LIB3180-015-P2-M1-B12
tcttctaacctcgcgccggagtcgtcgcccacgatggcctaccgatccgcagtgctcttgcccgccctcctactggccgtcgccgtcgtcgtggcctccgccgccgccggggatgggaggcggcgggaggagcatactgcggaccgggcgaaccggtagccgacacacggctataacaccagctttgcgcagaacgccgggtacgttaccgttatcgagcagcgtagtgctgcactcttattctgtttcattgagggccagaaggacccgcggtccaagaccccttttccttggatccaccgatggtctggatgcctcg

SEQ ID NO: 27346 - DNA, 417 bp, Zea mays
  Clone ID: LIB3180-015-P2-M1-B3
ttttaacgacggagaaaaggacacaacccagcccgccctaaaaccctcccaccatcatgtcgctctccacactcagccacccggccgccgccgtcgtcgggagcggaaaatcccttttcccggctggcccggcggcgcagtccgtacatttccccaaggcacggctccctgtccccgccgccgtctccgccgctactgcggctgttcacgcggaggatagggtttcgtcgctgactcaagtctccggcgtgctggggtcgcagtggggcgacgagggaaagggcaagctcgtcgacgtgctcgccccccgcttcgacatagtcgcgcgttgccaggggggagcgaacgctggacataccatctacaactcagaaggcaagaagtttgctctgcatcttgttccatctggtattctcc

SEQ ID NO: 27347 - DNA, 396 bp, Zea mays
  Clone ID: LIB3180-015-P2-M1-B4
tctgctgaatggatcgaccggcgaagtgatcctcggaaagcagccgctctgcccaccagccctcagtggcgatctgggaacattcatgtcctgggtggatgacgttagaaagctcaaggtcctggcaaacgcggatacccctgaggatgcattggctgcacggaacaacggggcagaaggaatcgggttatgccggacagagcacatgttcttcgcttcggatgagaggattaaggctgtgaggcagatgattatggctcccacagttgagctgaggcagcaggcgctggatcgccttctgccttaccagaggtctgacttcgaaggcatcttccgtgctatggatggactttcagtgactattcgacttctggacccttccctccacgagttcct

SEQ ID NO: 27348 - DNA, 424 bp, Zea mays
  Clone ID: LIB3180-015-P2-M1-B5
tgttgtgccgctttgggttggggtttaagcgcgtgtaagggaggccggaggcgacgaccacggcgccggcgtcggagaagaagaagcagacaactctcgtatatgtcttcttgccccttttccgatctggtggtcgtagcgctcatcatcgccgtcgtcgccgtcatcctccgcgccctcgcttgctctggccgatctatgcgcaaggggctcaacggctggaacaaatcctcgtcgatgctcacggacgggttcggggtgaagtattccggattcctccacataaggccgtgcggcttctgtagaggagattgacggattcggccgatttgcgctcgtctccgtcattttttttttgcacccagagtttcttgtttttctttagaagttttgcccccatagttttggcaattttggcgacaag

SEQ ID NO: 27349 - DNA, 414 bp, Zea mays
  Clone ID: LIB3180-015-P2-M1-B6
tgctccgctttggggcggggtttaaacgcgggtaatgtatgccggaggcggcggaccaccgcaccggcgtttgaaaaaaacaaccaaaccactctcgtatatgtcttcttgccccttttccgacctggtggtcgtagcgctcatcatcgccgtagtctccgtcatcctccgcaccctagcttgctctggccgatctatgctcaaggggctcaacggatggaacaaatcctcgtcgatgctcacggacgggttcggtgtgaagcattccggattcctacacataaagccgtgcggcttctgtataagagattgaccgattctgccgatttgcgctcgcctacgtaattttttttttggaccccaagattcttgattttctttagaagtattccccccatagttttggcaattttg

SEQ ID NO: 27350 - DNA, 279 bp, Zea mays
  Clone ID: LIB3180-015-P2-M1-B7
tatcaaaagaaaagagcagcggagcggagcatgctcttcctccggtgccagcctcgcgtcccgtccgcgtccgcgtccgcgccgccttttcgtccccgcgtccgcgtcgcggctccactgggcgtgcgcgtcaccggcgggaggcgagggcaggcggtggtcgcgatggcgtccgccgacgctcgcttggcggggattgcctcctccatccgcgtcatccccgactttcccaagccagggatcatggtccaagacatcacgacacttgtggtcgaaccc

SEQ ID NO: 27351 - DNA, 371 bp, Zea mays
  Clone ID: LIB3180-015-P2-M1-B8
ttccgatcatcgcaccacctgtagcccacctcgctctcgagtctcgacccagcgacgagatggccgcggtggatctgaccccaaggacgcccaagaaggcctacggcggcgacggcggcgcctactacgagtggagccccgccgacctgcccatgctctccgtcgcctccatcggcgccgccaagctctcgctcgccgccggcggcctctccctccccagctactccgactccgccaaggtcgcctacgtcctacaaggcgcgggcacctgcggcctcgtcctgcccgaggcgacgaaggagaaggtggtggcggtgaaggagggcgacgcgctggcgctgcccttcggcgcggtgacgtggtggcacaac

SEQ ID NO: 27352 - DNA, 364 bp, Zea mays
  Clone ID: LIB3180-015-P2-M1-B9
tttaagaacgacaccgaccttaccgccaccggccttaaagagctggtgagccagtacaaggacgtctacgtggaggctaagggagagccattcccctcagaccccaagaggcaactggagttggcagtgctggccgtgttccactcctgggagagcccgagggcaaagaagtacaggagcatcaaccagatcactcgcctcagaggcaccgtcgtgaacgtgcagtgcatggtgttcggcaacatggggaacacctatggcaccggcgtgctcttcactaggaaccccaacaccggagagaaagaagctgtaccgcgagttcctggtgaatgcccatgggcgagatgtgggtgctggaaatcag

SEQ ID NO: 27353 - DNA, 417 bp, Zea mays
  Clone ID: LIB3180-015-P2-M1-C1
tttggcagtgacacagtggcattttactgcgcctgcgcctgtgcgcctgcgcctgtgcgcccaccagtcacaaggcccatatcctcctccgctccttcctctccgtctctcccctccagcattgcggtggagagggaagcaagaggtatcggagatagagagagaaagggcgaaaaacagaagggaacagcaacggagcagctgatcaggggctgacgcgcgcgacaatgctgctcaagagggtggcggcggacgacggcttccgcgccggcgccggcgccggcgtagggaggccacggctcttcgccatgccaaggctgctggtcgggctcgaggcgcccaggtgcggcgcaccagactgcgcctcgccgatgacggcgcgcaacccgacgtcgccgctcgatctcaggcccttcg

SEQ ID NO: 27354 - DNA, 226 bp, Zea mays
  Clone ID: LIB3180-015-P2-M1-C10
gctgttccgttgttgtatcttgtcactgatcagggttgtttgctttgctttgccgcgctaatggcgcccgctccatgtggccgttcgtcgcagagggtgttccacttcggcaagggcaagagcgagggcaacaagaacatgaaagagctgctgggcggcaagggcgcgaacctggcggagatggcgagcatcgggctgtcggtgcccccggggttcacggtgtcga

SEQ ID NO: 27355 - DNA, 407 bp, Zea mays
  Clone ID: LIB3180-015-P2-M1-C11
ccacaacctgaagagcataatcaagaagaagtacggtcaggatgcgacaaatgttggggatgaaggtggttttgcacctaacattcaggaaaacaaagaaggccttgaactattgaaggcagccatagaaaaggctggctacactggaaaggtggtcattggaatggatgttgctgcttctgagttcttcggtgagaaagacaagacttatgatcttaatttcaaggaggagaacaacgatggctcaaacaaaatttcaggcgacagcctgaaagacctgtacaagtcctttgtttctgagtaccctatcgagtcgatcgaagatccatttgatcaggatgactggagcacttatgccaaactcactgatgagattggacagaaagtgcaaattgtaggaaatgatc

SEQ ID NO: 27356 - DNA, 273 bp, Zea mays
  Clone ID: LIB3180-015-P2-M1-C12
cgttccggatttcccgggtggcccaaaacgtttttcctcctccggtgtttctccccgttccagctagactgtcctgccaccctcgctgttgaatccggttaagcttccgaagttccacctcgtactacaggtcgatcgcgttcgctgtaccccactccgtgctccagaaatgagtcgccggcggattgctaaccccatggtccgccgtcgctggggaggtggacaactgtacggtgctgtctggccaacggctacgcaggatgtaggggaggc

SEQ ID NO: 27357 - DNA, 230 bp, Zea mays
  Clone ID: LIB3180-015-P2-M1-C2
aaatttatctgggtactcgaggattattacagtcacaaatccattgacaacattgtaatcttgagtggcgatcagctttatcggatgaattacatggaacttgtgcagaaacatgtcgaggacgatgctgatatcactatatcatgtgctcctgttgatgagagccgagcttctaaaaatgggctagtgaaagatgatcatactggacgtgtacttcaattctttgaaaa

SEQ ID NO: 27358 - DNA, 231 bp, Zea mays
  Clone ID: LIB3180-015-P2-M1-C4
tggagaaatgttcttgactttggatacacccgaggagcgctttcagtggttatcaatgaagtatgaatggatgacaatgaacaagaagggctagttagagctactttgttatgcatttatcgtgtcattttttgtttttaccttaccaaacttatctattagaataaattcaaacattctggggaaacaattagtagaaaatttatggaaattttctggtgtgtggtgggc

SEQ ID NO: 27359 - DNA, 309 bp, Zea mays
  Clone ID: LIB3180-015-P2-M1-C5
ttttcccgttgttgtatcttgtcactgatcagtgttgtttgctttgctttgccgtgctaatggcgcccgctccatgtggccgttcgtcgcagagggtgttccacttcggcaagggcaagagcgagggcaacaagaacatgaaggagctgctgggcggcaagggcgcgaacctggcggagatggcgagcatcgggctgtcggtgccgccggggttcacggtgtcgacggaggcgtgccagcagtaccaggaggccgggcgcgccctcccgccggggctctgggcggaggtcctcgacggcctgcggtggg

SEQ ID NO: 27360 - DNA, 383 bp, Zea mays
  Clone ID: LIB3180-015-P2-M1-C7
gctggtatagcttacgcaagagcttagactgggggactttgcactagtagctgggagagcgaaccggacatactggcagcctggcattatacgcaatgccgccggccacaagcacgcgcccgccgtttagtctaccggtaccattgctgacggaggtcgtttccgtggcgctcctgtcactcgtgtgctttcttgtagctgctgatgcaagcagatcgctgtactaccactaccaccttcggaagcaccggaagcaccactggcaccaccgcgcggagaactacagacacatttccctgccccctgccgcgccttctactggcgctgatagcgattcttccgccggaccggtgggtcttgctccagacatatagcagaacact

SEQ ID NO: 27361 - DNA, 388 bp, Zea mays
  Clone ID: LIB3180-015-P2-M1-C8
ttttaacaatgaagcagaaagtaataacttagattgtgttgataaagtgactctacttgaaaataaggtgcagcctgagccagtaaaagacaatggttctggtctctgcccactgttgcctcattcatcttctgatcctgagtttgaggggcctactgatgctggatttgatgttaaggctgcagtgaaggtatgctcgccggaggaatatgaacaacttaaatctgagaggacaaatttggagggagagttagcaaagtgcaacaaaataatagaagaaacaaaggttagattaagtgatatggagaaaaacctggaaaacctcacatctaagttggctgacagtgagaaatcaaatagcttgagtgagacacagttgaagtgtatg

SEQ ID NO: 27362 - DNA, 401 bp, Zea mays
  Clone ID: LIB3180-015-P2-M1-C9
tctgggtttcctccgcggcagacggcgatggcggagaccgtgcttctccacgtcgcgcccatggatctcctcgcgcttgccgacccatgcgggcccaccgcaccggcgtcctcttccacgcgccgtcctggccagaggaggaaggggaggagcgcgtgtgggccacaaccacaaatcccatccctcttccttctcaaacaccatcgccgtcaccgtgtcatcgcgggccgaagtcctctctcctccatctcaagcgatggcatgaggtggatctgtagcacgtaccaggacgcggtcgacgacgagctagggtgcgcgttcccgcccgtcttccccaccgaggcgctggactgccacgcttctgttgccactggacgtttgcgccgccatctgccgtgagc

SEQ ID NO: 27363 - DNA, 418 bp, Zea mays
  Clone ID: LIB3180-015-P2-M1-D10
gatgagcttgttgttgacagcaaggattttgatgtcgctgcactgatgaagtttattgatgctagcaccatccctagagttgtcacttttgacaagaaccctgacaaccacccatacctcatgaaattcttccaaagctcagcccccaaggctatgctgtttttgaacttctccaccggaccttttgattctttcaagtctgcctactctgctgccgcggaggaattcaaggacaaggaaatcaagttccttattggtgacatcgaagccagccagggtgccttccagtactttggcctgaaagaggaccagacaccccttatcctcatccaggatggtgactccaagaagttcttgaaggttcacgttgaggctgaccagatcgtctcttggttgaaagagtactttgacggcaaat

SEQ ID NO: 27364 - DNA, 417 bp, Zea mays
  Clone ID: LIB3180-015-P2-M1-D11
gttgccgaaaactggtagtagccggggggccgtaaccgtatcctaagatcagcggcgagcagataccacaccactctactgacgcccgacgagcagtgtaacatttttcttcagccatgggtaaggagaagactcacatcaacattggggtcattggccatgtcgactctggcaagtcgaccaccactggccacctgatctacaagcttggaggtattgacaagcgagtgattgagaggttcgagaaagaggctgccgagatgaacaagcggtcattcaagtatgcgtgggtgcttgacaagctcaaggctgagcgtgagagaggtattacaattgatattgccctgtggaagttcgagaccaccaagtactactgcactgttattgatgccccgggacaccgtgacttcatcaaaa

SEQ ID NO: 27365 - DNA, 426 bp, Zea mays
  Clone ID: LIB3180-015-P2-M1-D12
tcttccggctgccggagactggaactagccggggcgccttcaccgtgtcctgaggtcagcggcgagcagataccacaccactgtactgacgcccgacgagcagcgtaacattttccttcagtcatgggtaaggagaagactcacatgaacattggggtcattggccatgtggactctggcaggtcgaccaccactggccacctgatctacaagcttggagggattgacaagcgagtgatggacaggttccagaaagaggctgccgagatgaacaagccgtcattcaagtctgcgtgggtgcttgacaagctcaaggctgagcatgagagatgtattacaatcgatattgccctgaggaagttcgagaccaccaagtactactgcactgatattgatgccgcaggacaccgtgacttcatcaaaaat

SEQ ID NO: 27366 - DNA, 352 bp, Zea mays
  Clone ID: LIB3180-015-P2-M1-D2
gcgcaaaagcggcggaggaattatatggattaagagggccgataagtcaatacacaacaaagctttatatgacacattctgtgcatttgggaatatactttcatgtaaaattgcaacagacccttcacgagaatcaaggggctatggttttgttcagtttgagaaggatgaatctgcacagtctgctattgataaactcaatgggatgcttatcaatgacaagaaagtgtttgttggaccttttgttcacacgcaggacacggaaaatgtctcgagtcatatcaaatttatcaatgtatatgtgaagaatctgtcaaatactgttaccgatgatgagctgaatgagattttt

SEQ ID NO: 27367 - DNA, 300 bp, Zea mays
  Clone ID: LIB3180-015-P2-M1-D4
tttttctcttcgtctgcgcccccacaaaaccctagacgccaccctcccccgccgcgcgccgccgcccgcggacatggatctccttcgctctcatctccacaaggtccggatccccgagccaaccaaccgcatccacaaggacgagtgctgcgtctccttcgacactccgaggtcagagggaggcctgtacgtggacatggtctcgttcctggggttcgggagggagtacgtggagtggaacttcgagaagacggggaaccccgtgtacctccacatcgttcagcgccggaagccggagcc

SEQ ID NO: 27368 - DNA, 240 bp, Zea mays
  Clone ID: LIB3180-015-P2-M1-D5
tctgtcggctgccgcagactggtagtagccggcgcgccgtcaccgtatcctcagatcagcggcgagcagataccacaccactctactgacgcccgacgagcagtgtaacattttccttcagccatgggtaaggagaagactcacatcaacattggggtcattggccatgtcgactctggcaagtcgaccaccactggccacctgatctacaagcttggaggtattgacaagcgagtgatt

SEQ ID NO: 27369 - DNA, 228 bp, Zea mays
  Clone ID: LIB3180-015-P2-M1-D6
ttactaggatgaaggagggccagaatgacatctactacatcactggcgagagcaagaaggccgtggagaactcccccttccttgagaagctgaagaagaagggctatgaagtcctgtacatggtggacgccatcgacgagtatgctattggccagctcaaggaggtcgagggcaagaagctcgtctcggccaccaaggagggcctgaagctcgatgagagggaggatg

SEQ ID NO: 27370 - DNA, 387 bp, Zea mays
  Clone ID: LIB3180-015-P2-M1-D7
ttgtcgtttcgagatcgttcacgccttcgggtgcgggaactccaccaataaggccaccggccggagcaatggggagcacggggtgcgagccggaggtgacccgcgccaacttccccgacggcttcgtcttcggcgtcgccacctccgcataccagatcgaaggagcgagaagagagggaggcaaaggagacagcatatgggatgtatttacagatgacaaagaacgtgtcttagacagaagcaatgcagaaattgcagttgaccactaccatcgatacaaggaagacattgagctcatggcaagtctaggttttagcgcatacagattttctatatcttgggcacgtatatttcctgatggctttggggaaaagatcaatgagcaag

SEQ ID NO: 27371 - DNA, 292 bp, Zea mays
  Clone ID: LIB3180-015-P2-M1-E1
tttttcaccctccccttcttcccatcgcgaactcacaagagaaccaagtagacgagggagaaggagatggcgaagaagaaggagaaggcggtgaacgtgtcgggcaagccgcggcacttgaacgacgtcaaccgccccaatgacaagaagggcgcgggcggcggcgccggtggctggagcccgtccgaggataccgggcggcggctcaagatgtacaagacgcggcccaagagggaccgcttcgggaaggtgctcaagaacgattttcagtctaaagagctccccaacaccc

SEQ ID NO: 27372 - DNA, 387 bp, Zea mays
  unsure at all n locations
  Clone ID: LIB3180-015-P2-M1-E10
tttaccaactagcaacatagaaagcacaatagtgtaccaacaatggcagccaaaatattttgcctccttatgctccttggtctttctgcaagtgctgctacggcgaccattttcccacaatgctcacaagctcctatagcttcccttcttcccccgtacctctcaccagcggtgtcttcggtatgtgaaaacccaattcttcaaccctataggatccaacaggcaatcgcagctggcatcttacctttatcacccttgttcctccaacaatcatcagccctattacagcagttacctttggtgcatttattggcacaaaacatcagggcacaacaactacaacaacttgtgctagcaaaccttgctgnctactctcagcaacaacag

SEQ ID NO: 27373 - DNA, 308 bp, Zea mays
  unsure at all n locations
  Clone ID: LIB3180-015-P2-M1-E12
tttttcgcgcgcaccgttcctcaccgncggcctctgctcctcttccgccgccggaggatctcgtatcgccggagaccatgtaccgggccgccgggagccaccttcgctccctcaagcatcatggtgcttctaggcttgccagtacaagtgttgcgaagcagtcctcaagtggtctgttcagctggcttcttggtggaaaatcaagcgaactcccttcccttgatgttccactcccaggcattagcattccctcacctctaccagattttgtagagccatctaagacaaaagtcactactcttccaaat

SEQ ID NO: 27374 - DNA, 404 bp, Zea mays
  Clone ID: LIB3180-015-P2-M1-E2
tctcgccacctctccttcggcatcgacgaggcgaaaccctagcgccggagtcccgctccctcctcccacgacccatggcgtcggatatggcgtacgcgccgccgatgaaggcgggcaaggccgggttcgaagctggcatgatggatccgcagcacaggatccgcatcacgctctcctccaagagcgtcaagaacctcgagaaagtctgcggggatctggtgaagggcgccaagggtaaggagctcaaggtcaagggccccgtgcggatgcctaccaaggtgctccacatcaccaccaggaagtctccctgtggcgaaggtaccaacacctgggatcgctttgagatgaagattcacaagagggtgatcgatctcgtcagtacaccaaacgttgtcaagcagatc

SEQ ID NO: 27375 - DNA, 368 bp, Zea mays
  Clone ID: LIB3180-015-P2-M1-E4
tcgttccgtcatgctgcgtgcggcggcggctgccgccgccatattcccggggcgggtcgccgctgcgccggctgctgcggcggcggaggaacttaggtatccgctgctcagggttattgggacgctgaggggcagccgcggctcggtgctgctggggaggagggtgcgtttctgctacaactccttcgggagcgactgcgaagtggcggctgcagatgcggaggcgaatgccgaggatgcgaccggtgcggaagaagaagcgggcagcaaggcgtcttgcgacatcgtgccgaccagcaccaatatcgacgactgcctctctgttatagcgttaccttttccacatcggccactcttttctggatttt

SEQ ID NO: 27376 - DNA, 324 bp, Zea mays
  Clone ID: LIB3180-015-P2-M1-E5
tctgatgaaacacgcgcaattctggacctcaaggtccagtatcggacaaggagagggcggccatatgtccctggaaactatggcggaaggacctgttttggcagatagtatgcgcagagactattgaacaaatggcatattgttgatgtggttcgagtgccattgcagcacaagatctccggccgggtgcttgaatgggcttggcacacctatctgtgcaagccgtcaagctacaacaagctgctgtcgtgagggtcttacaacatccaattaaacaatcgcagctacaattcttggctcatgtgaccatgcctaccatctctt

SEQ ID NO: 27377 - DNA, 333 bp, Zea mays
  Clone ID: LIB3180-015-P2-M1-E6
tcttgcacatgaaagccgccacaatgtgtgaatttactcgtcaggaattcattggtggactgcagtcaattggggtagattcaatcgagaagtttcgtggaaaattaccatcattacgagctgagctaaaagatgacaataaattccgtgatatatacaactttgcattcacttgggcaagggaaaagggtcaaaagtctctctcactggagactgctattggaatgtggcagttgctatttgctgaaaggaactggcctcttctggatcattggtgtcagtttttacaggtcaggcacaataaagccatatctagagacacatggtcccagc

SEQ ID NO: 27378 - DNA, 399 bp, Zea mays
  Clone ID: LIB3180-015-P2-M1-E7
ttggaccagaggatgtgcacctgagagccgtcaccaaggccgccgccgctttcggcggccctcgaacgcaccctgttcctatcatcacacgaaccaccatttataaatgcaagaacttctcggtacggggatacgatacgacgacgatccagctgtgaaacgcatgcgttaagttgctagcgtgtgatgtacgtacgatctggctgcaggtcgtggtgttcctgctgcccccaggcgcgaccatccctctgcacaaccacccggggatgacggtgttcagcaagcttctcctcggctcgctccgcgtcacgtcctacgactgggccgaggccgaccaacgtcccgtcgccgtcggcggcgatcgcccactgctgaggctggcgaagctggtgctggacg

SEQ ID NO: 27379 - DNA, 380 bp, Zea mays
  Clone ID: LIB3180-015-P2-M1-E8
tttttggttttacaagatgtgatgaacaatcctgccaactttgctaagcaccaagcgaatcctaaggtgggccctatcatcgcaaagatgatggccaagttcaatgggtcccagtgatggttatgtcgcagtcaggttttgtgagcagcaagcaaaggtttgttggacagtgaacaggtgttcttttcgtgcatctggtctgggagtgtgtttagcttgtgatgaagaacatgagtgtgtgtgttggtcgtggtgcatctggaggtgcgatgagcatgtgatgaaaaaaaaaccaaacggctctatggtgatgtatgcaaaaagttgctttcgaacttgatttctcaattcacagatggtttgacagtttcttgaatttt

SEQ ID NO: 27380 - DNA, 95 bp, Zea mays
  Clone ID: LIB3180-015-P2-M1-E9
tccccacaaccatgaatccacatgctgctgaatttgtgcctggaaaaacttcgcaacaatctgatgtggctggcagagaacccagtcctgctaat

SEQ ID NO: 27381 - DNA, 402 bp, Zea mays
  unsure at all n locations
  Clone ID: LIB3180-015-P2-M1-F1
tcttatcaatcgagttgagtttgttcattccaagtcattattgcatagagatatcaagcctgataattttctcatgggtctcgggaaaagagaaaaccaggtttatgttatcgattttggacttgcaaagaagtacagagatacatcaacacaccagcacattccatacagaacaaagccggagggatgacatggaataaaaaacaaaagtattcgggaaggttggtttaatacactgtcagccttccatggtagggcctgaaagctgggaacaaaaaacaaaagtatgaaaagatcagcgaaaggaaaattgctacttcaactgaggctctctgccgtggatatcctaccaaatttgcttcttacttncattactgtcgctcacagcgtttcgaagatgca

SEQ ID NO: 27382 - DNA, 318 bp, Zea mays
  Clone ID: LIB3180-015-P2-M1-F10
tgttaggacggggagaggaacaaagaaacatataacgatctgcaggaaggactaaggaggcaggaagtcgcagaacagaattggggatgtccaattaacaccccttgtaattactaaaactgtgagcgaatgttgcgtttttcttgcactccccccttcgccctcctaattaaactgcctaatgttcaggattagtttttctccagcttcaaaataacaacgcatagatggttttgatgttctgtcctctgtccaaaaaaaaaaaaaaaaaaataaaaaaaaaaaaaaaaaaaaaaaaaaaaaaaaaaaaaaaacaag

SEQ ID NO: 27383 - DNA, 317 bp, Zea mays
  Clone ID: LIB3180-015-P2-M1-F11
ccgggtggcccagctctttcgacccccaaccctagctcccgggcacgccccttccccgcttccgggcgctggtgacacccgctcgtacgaaacactgggcggggtgcctacggcggccatggcgtaacgggctggaggcaacgcgggcggccatgagaccggaaggtggagcggttggggcgcgagctcaacgggcccgtacccggtgacgcttttagcccaccggtcgcacatgctgactcgcgtctcacctcgcagctcgggaattacgggacaggacatgctggaagatgagatcacactatttactgacccac

SEQ ID NO: 27384 - DNA, 353 bp, Zea mays
  Clone ID: LIB3180-015-P2-M1-F3
ttttacacacactcgcgaactccatttcgatcccatttgaaatcaacccatcctcgtttcctccgtctagcagcctctcaccctcatggccaagatcaagatcgggatcaatgggttcggcaggatcggaaggctggtggccagggtggccctgcagagcgacgacgtcgagctcgtcgccgtgaacgaccccttcatcagcaccgattacatgacctacatgttcaagtatgacactgtgcacggacagtggaagcaccatgaggtcaaggtgaaggactccaagacccttctctttggtgagaaggaggttgctgtgtttggctgcaggaaccctgaggagatcccatggg

SEQ ID NO: 27385 - DNA, 358 bp, Zea mays
  Clone ID: LIB3180-015-P2-M1-F4
tcaacaagcaacatagaaagtggaatacagtagcaacaatagagcaacaatggcggccaagatattttccatccttatgctccttgctctttctgcatgtgttgctaacgcgaccatttttcctcaatactcacaagctcctatagctgcccttcttcccccataccttccatcaatgaccgcttcagtatgtgaaaacccagcccttcaaccctacaggctccaacaagcaatcgcaacaagcaacttacctttatcacccctgttctttcaacaatcgccagccctatctttggtgcagtcattggtacaaaccatcagggcacaacagctgcagcaactcgtgctaccagtgatc

SEQ ID NO: 27386 - DNA, 292 bp, Zea mays
  Clone ID: LIB3180-015-P2-M1-F5
tctatctcgttctccgcggcagctggtgtttcgctcccttctcgccctccgacggctggttggcagccggcgccggcgccgccaaacgctaggtgctgaggccttcgccagtgtcttcgacggcgacgagcacgtaccagcatcatgtcggaaagaggtcgcctggcaggacgattgattgataaccgcagcagaaggtaccatgtagtccctctagttgaggatcccagaggccatcctgaagtcctcgtggatggggatcgggggggctactctgacattcgggggggtc

SEQ ID NO: 27387 - DNA, 256 bp, Zea mays
  Clone ID: LIB3180-015-P2-M1-F6
ttttcgacgaggacgaccgacgacgcacgcagagatccggcgtactgcaaattttgaaaactgaactgtaagatggcatcagcagagctttcccgtgaggaaaatgtgtacatggcgaagctcgccgagcaggcggagaggtacgaggagatggttgagttcatggagaaagtagccaagactgttgactcggaggagctcactgtggaggagcgaaacctcctgtctgttgcatacaagaacgtcattggagccc

SEQ ID NO: 27388 - DNA, 403 bp, Zea mays
  unsure at all n locations
  Clone ID: LIB3180-015-P2-M1-F7
tgcgcctncatntcggcctctgtcccttggaaggtcaatcttaacttcaaccatgggtaaagagaaatcccacatcaacattgggggtattggccatgtcgactcttgcaagtcgaccaccacaagacaccttatctacaagcttggaggcattgacaagcgtgtgatcgagaggttcgagaaggaggctgctgaaatgaacaagcggtccttcaagtacgcgtgggtgctcgacaagctcaaggctgagcgtgagagaggtatcaccattgatatcgctctgtggaagtttgagaccaccaagtactactgcacggtcattgatgcccctggacaccgtgacttcatcaagaacatgatcactggtacctnccaggctgactgtgctgtccttatcattgac

SEQ ID NO: 27389 - DNA, 363 bp, Zea mays
  Clone ID: LIB3180-015-P2-M1-F8
ttttatacacagcacaggcagttcgagagagagagagagagagagagagataaagatgtcgtggttcgggcaccaccaccacaaccagccggctcccccggcgtcgggccccaaccaggtgttcaagatcttctgccgcgccaacgagaactactgcctggccgtccgcgacggcgccgtcgtgctggccccggtcaaccccaaggacgaccaccagcactggtacaaggacatgcgcttcagcacccgggtcaaggacgaggaaggcatgccggcgttcgcgctcgtcaacaaggccacggggctcgccatcaagcactccctcggccagtcccacccggtcaagctcgcgcctttcagccc

SEQ ID NO: 27390 - DNA, 270 bp, Zea mays
  Clone ID: LIB3180-015-P2-M1-G1
tggactcgactagctcgaacaccacaaccgtgccctttttaattagcccataagcaagcgccgccgctagtaggctcttacgctcgatgccaaaagcccgatccttacatgggcattggctaccatgccacgaatcgcgcgctgtgcagcctcgccgagggcaagcttccggaggaggcgatcgaaggcaccgtcgatgagccgctagtgcacgagccagatgccgaagtatgacacagggcactgacagaggaagcagacacagggcaa

SEQ ID NO: 27391 - DNA, 385 bp, Zea mays
  Clone ID: LIB3180-015-P2-M1-G10
tctgatgagtcggagcctcggaggagggagagggcgaagagtagggggaaccaaatcttgaagggtaaacggagagttctttcgtggaggaggaagggggggacagcaggaggagggtagaggtagctcaatagatctactgctgtcgggggagttaatgcaaagctgagttgctgcacgttggctttcttcagagatggcttcagctggtgtagccccatctgggtacaaaaacagcagcagcactagcattggtgccgagaagttgcaagatcagatgaacgagctaaagattagagatgataaggaagttgaagcaaccataattaatgggaaagggactgaaactgggcacataattgtcaccactactggtggcaagaat

SEQ ID NO: 27392 - DNA, 335 bp, Zea mays
  Clone ID: LIB3180-015-P2-M1-G11
tttttcaaccctagccgcgatccgacaacgcctccatccctagccgactgctggaagcttcagagctcaagagtcagggcgccatggcgacagagacggagaccttcgcctttcaggctgagatcaaccagctgctctcactcatcatcaacaccttctattccaacaaggagatcttcctccgggagctcatttccaactcttccgatgcgttggacaaaatcaggttcgagagcctcactgacaagagcaagctcgatgcgcagccggagctgttcatccacattgtaccagacaaggcttcgaacacgctctccatcatcgacagcggcatc

SEQ ID NO: 27393 - DNA, 335 bp, Zea mays
  Clone ID: LIB3180-015-P2-M1-G12
tgtagtacacagagctcgaccccccctccccttgcttcgctcgtccagccctgaccacccgcatccccgtcagtcatggcagcggcagcaggcggaggcgcggtgcgtgcgctgtcccagaaggagcaggacatacagatgatgctcgccgacgacgtccaccttggcaccaagaactgcgatttccagatggagcgctatgcctttaagcgccgcaccgacggcatctacatcatcaaccttggcaagacatgggagaaactgcagcttgcagcgagggttatcgttgccatcgagaacccgcaggacatcatcgtccagtcccgccggcccta

SEQ ID NO: 27394 - DNA, 355 bp, Zea mays
  Clone ID: LIB3180-015-P2-M1-G2
tcaggaaaatcgcagagaatgagggggatcctcttcgggccccggcggcagccgccgccgctcccgctcttccccgccgccaagcgctcctcggcacccgcgaaccttcttttcgctcgcctctatcgcttcctcccggccagccccatcctccggctccttctcctcctcgcactcctctccctcatcccgccggccttcttccacctccgtctccgctgcttccaccaaatgcgcgagaagaagtgcgggtggatcgcgaggccacccatggtgtgcgcgcacggcggtgactccaccaacgccttccccaattcgatggacgcatttcggatggctctcgacgcgcgggtcg

SEQ ID NO: 27395 - DNA, 377 bp, Zea mays
  unsure at all n locations
  Clone ID: LIB3180-015-P2-M1-G3
ttttctgaaaaaagtgtatttgcagaacaaccaatttactggttatatcaatgtcttagccaatctcccccttgaaactttgaatgttgcgaacaaccatttcactggttggattcctagtcagcttaagaaagataacagtctacagactgatggaaattcttggagcacaggaccagcgccaccttcaccttcatacacagngccgncttctncaaaaccattggaatggcgcaggccagaaatgctgatgggtcatcaagttctggtgggagatcntggataggtgggtggagtgtagcangaatcattatatcgttggctgttggtggatcaggtgttgcattttttgtgatcaaaagaagaaaacgcaaagc

SEQ ID NO: 27396 - DNA, 372 bp, Zea mays
  Clone ID: LIB3180-015-P2-M1-G4
tctttgacgcgtgggcttgcgcgtacgcgtacacagtcccgatccgaatcgtcctcctcgcgagcctcgccgatcccccactcccctcccctcgcttcaagatgcagatctttgtgaagaccctcaccggcaagactatcaccctcgaggtggagtcttctgacaccattgacaatgtcaaggctaagatccaggacaaggagggcatccctcctgaccagcagcggcttatcttcgccggcaagcagcttgaggacggccgcacacttgctgactacaacatccagaaggagtcaacccttcatttggtgctgcgccttacgggaggcatgcagatctttgtcaagaccttgactggcaagacaatcaccc

SEQ ID NO: 27397 - DNA, 350 bp, Zea mays
  Clone ID: LIB3180-015-P2-M1-G5
ttttctacatacccccatcttcttccttaccctcatcacagatatcatattctcctcatctttctctctcccatcctccctattatttattggaggctacttattgatggtatcttaattatttttcctctcatcttcctccttttgaaggagtacattttatttttgccagcgttcctgtagtactattagtgcttcctaccccttcttctctggctacttacttcttctgcatctctttccctttccccccctctctggcctgcttgccttctacatactcttattcctctgaggtccgtctctcctcttcccagttgtccttgccttccacctttttcacctacccc

SEQ ID NO: 27398 - DNA, 317 bp, Zea mays
  Clone ID: LIB3180-015-P2-M1-G6
tttaccttcgccaccttcaccctcgaatcgttccccaccatggcgtcgcagggatcctccgtcttcgccgcactcgagcaggccccggaggaccccatcctcggagtgaccgttgcctacaacaaggatcccagccccgtgaaggtcaacctcggggtcggcgcctaccggaccgaggaagggaagcccctagtgctgaacgtggtcaggcgcgccgagcaaatgttgatcaataatccgtcacgtgtcaaggagtacctaccaattaccggtctggctgaattcaataagctgagcgctaagcttatttttggcgc

SEQ ID NO: 27399 - DNA, 138 bp, Zea mays
  Clone ID: LIB3180-015-P2-M1-G7
gctcataaagaggactcaagatttatgtgattgagtgaggatacagatctcaccagtataaggcaatgatgattaaccagggcatatagtctttttatagatgctcggcactgaaacattatactgtagttatatgga

SEQ ID NO: 27400 - DNA, 379 bp, Zea mays
  Clone ID: LIB3180-015-P2-M1-G8
ttttgacaggaaccctgacaaccacccatacctaatgaaattcttccaaagctcagcccccaaggctatgctgtttttgaacttctccaccggaccttttgattctttcaagtctgcctactctgctgccgcggaggaattcaaggacaaggaaatcaagttccttattggtgacatcgaagccagccagggtgccttccagtactttggcctgaaagaggaccagacaccccttatcctcatccaagatggtgactccaagaagttcttgaaggttcacgttgaggctgaccagatcgtctcttggttgaaggagtactttgacggcaaattgactccgttcaggaagtctgagcctattcctgaggtcaacaatgag

SEQ ID NO: 27401 - DNA, 393 bp, Zea mays
  Clone ID: LIB3180-015-P2-M1-G9
tcttgacgcgtgggtagttctagatcgcgagcggccggccttttttttttttttttttttttttttttttttttttttttttttttttttttttttttttttttttttttttttcaaaaaaaaaatttttaataaaataaaaaaaaaatttctttaaaaattgaaataaaattgaaatttaaaaaaaaaattaaaattaatttttaaaaggaaaaaaaaattaaaaaaatcaaacctattccctttaaaaaaatctaataaaaaccctttcaaatttaaaaaaaacttgtgtttttaaaaaaaccaaatttttggaaaattgtttaattttttataaaatataataaacccaaaggtaacaccttattttttccttataaacaaatttttttt

SEQ ID NO: 27402 - DNA, 310 bp, Zea mays
  Clone ID: LIB3180-015-P2-M1-H1
ttcggacgcgcgcacgcaaagcagaacgctcccctcccggccttcccttcctccccgccctccgaagtccgaaggccagaagcttccggaagccagcccaagccatgaacgccgccagcaccgccgccgaggaccccgcgcctgccgagaccgtgcaagtgccgcgcgggcaggaggatctgatcgacttcatcgactggaccggcgtcgagtgcctcaaccaggactcgtgccacagcatcgtcaacgcgctcaagcagaagttgagagacgactaggggctgtaccctcgccagcgaattcggacgag

SEQ ID NO: 27403 - DNA, 352 bp, Zea mays
  Clone ID: LIB3180-015-P2-M1-H10
tatctcatccgtggattggcacctcctgtatctcgagagactgaactgaacgtgctcttaccgtgtttgcagtgacgctgggctccggttcggaccggttttcacgcctccgaaggccgggcaggcaggcagcacccgcggagacgcggagcctccactcctcgtatcgcttcctcctctggatctagccgacgccgccctcattctgtcacccaccgacgtcgccgtcgccgtcgccacctatatcacccaccgcctctgaagaagaagacgcggatccgagggtagttaactgctgaagaagaagatccggtacggagaagacgcggagcagtacttctccgatctggat

SEQ ID NO: 27404 - DNA, 253 bp, Zea mays
  Clone ID: LIB3180-015-P2-M1-H11
ttcgtgctttcctctaccggatctgcttgtgagcccggtgtcagtattactggggcggtgcgcgctctctctttcctcgccttcgccggcggcgacgagcttgagctcgagctggatgctggaatagaacacaaccgccgtgtgttcgaacccatgaacgtgcactactgaaagttgcgcagccattgatgctcagattgacacttgatgcagtgacggccgctcgccgagcaagaggttaaggcactgcgcg

SEQ ID NO: 27405 - DNA, 292 bp, Zea mays
  Clone ID: LIB3180-015-P2-M1-H12
ttcgcctcccagatctcgctcgctcggcgccagttgcctcgcagtttggatcatctcatacctcggcgaagatgagggagatcctgcacatccagggagggcaatgtggcaaccagattggcgccaagttctgggaggtggtgtgcgatgaacatggcattgaccctaccgggcggtacactggcaattccgaccttcagttggagcgtgttaatgtctactacaatgaagcctcctgcggacgctttgttccccgcgctgttctcatggatcttgagcctgggacaatgga

SEQ ID NO: 27406 - DNA, 357 bp, Zea mays
  Clone ID: LIB3180-015-P2-M1-H2
tgcttgtctagatcgcgagcggcgcccttgggttttttttttttgttttgggggcgaaatgtcgacgagacaaataaaaaaaagtaagaatacccggccacgaccgacagttattgcggcggcgcggccggtagcttacacaatcgaccactgctacaataaaggaggggtagattatgatcaaaagatggcctgaaatttttattctcctttttccagagagcctcccgtttctgatccttctccagtccctttcaccaaaagcgtacgtactccgcagctacggcggcgcggcggtcacctacgcgcctgctgcggctgcgggtggggcgcgacgcgcgttcgcctagcaacgtt

SEQ ID NO: 27407 - DNA, 397 bp, Zea mays
  Clone ID: LIB3180-015-P2-M1-H3
ttctccagttcttcccatttcccagccgccgcggcgccacgcagacctagcagagaaacacccacccgagatggcgatggctctgcgccgccttgcgggcgtgtccggatcgccgtcggcctcctctgccgcggccacggtgctactccggtcggcgctgacccgcccgatctccaccggcttccgcgaggagcgcgacaccttcggtcccatccaagtccccaacgacaagctgtggggcgcgcagacgcagagatcgctgcagaactttgacattggcggggagcgtgagaggatgcccgttcccatcatccgtgcctttggcgtgctaaaaaagtgcgccgctaaggtgaatatggactatggccttgatccaacaatagggaaggccataata

SEQ ID NO: 27408 - DNA, 387 bp, Zea mays
  Clone ID: LIB3180-015-P2-M1-H5
ttgaataagttaagtgatgaagataggaagggtcagctgaaattacatggtggacaagcagttaaagaaaaggactatgccggtgctttaaaattgtacaccgaggcaatcatgttggaccctgccgatgccacactgtattcaaatcggagcttctgccatctgaaaattggcgcagccagggatgctctggttgatgctaatgcttgcataggcctgcagcctgactggccaaaagcttactaccgtaaaggagcttgcctcatgtcgcttaaggagtacaaagaagcacgggatgcattcatgggagggttgaaactggatccttcaaatttggacatacaaaatgcttaccgggaggcagaagaggcgatgatcaaaaatcat

SEQ ID NO: 27409 - DNA, 417 bp, Zea mays
  Clone ID: LIB3180-015-P2-M1-H7
tttaggatcaaacctatttcctctcacatctatctcaatctcagcttagaaggcttcttttcccactaggatgtattacaaaggatgaggttcgcagactggctactcaaatggcccttcctaaccaaggtaggaaagactcacaagggatatgctttcttggaaaggtcaagtttagtgagtttgttgaaagacatataggagaaaaggaaggaatcatactggaagctgagtccggagattacctagggatacaccgtgggttttggttttatacaattggtcagcggcaaggattacggcttcctggaggaccttggtacgttgtagagaaagatgttcaaaacaatgtggtttttgtatcaaggaattattattcattggataagcggaggcgcacatttcgtgttggatcac

SEQ ID NO: 27410 - DNA, 98 bp, Zea mays
  Clone ID: LIB3180-015-P2-M1-H8
tcttaataaaccctggtgctctcacactggcgttgtggtgagcagtgagctcttctattatccggcaggtctggcacactagtgccactatatgagcc

SEQ ID NO: 27411 - DNA, 66 bp, Zea mays
  Clone ID: LIB3180-015-P2-M1-H9
ttggttgcatttgcatctgagttcctgatggttgaattccagtttcttctgtgaggtttgtgggat

SEQ ID NO: 27412 - DNA, 357 bp, Zea mays
  Clone ID: LIB3180-016-P2-M1-A11
tcgcgccacccacccacccactcgcttcagccgcctccgccgcgcgtaccaagcaggtggagacaggatgccggctggccacggcctgcgctcgcggacgcgcgacctcttcgcgcgccccttccgcaagaagggctacatcccgctcaccacctacctccgcacctacaagatcggcgattacgtcgatgtcaaggtgaacggcgccgtccacaaggggatgccgcacaagttctaccacggccgcaccggtcgcgtctggaacgtcaccaagcgcgccatcggcgtcgaggtcaacaagcaggtcaatgggcgcatcatcaggaagcgtatccatgttcgtgtggagcatgtgca

SEQ ID NO: 27413 - DNA, 278 bp, Zea mays
  Clone ID: LIB3180-016-P2-M1-A12
tctgccgccgccgctgcagtgtccatagccaccgcaggagactgagatggggggttttgtcaagacccacaagagcaatgcgtacttcaagcgtttccaggtgaagttcaagagaaggctcgctggcaagacagactacatggccaggataaggcttattaaccaagacaaaaacaagtacaatacacccaaatacagaattgttgtgcgatataccaacatggacattacagtacaaatcatttttgcttgtatagcatgttatatggtttcttgct

SEQ ID NO: 27414 - DNA, 313 bp, Zea mays
  Clone ID: LIB3180-016-P2-M1-A3
tcgctccagctggccaccccatcctcgtcttctccaattccaaagtaagaaagccacacgcgaggccgaccgaggaagtccaatctcatggcgctctcctgcatgaggtgccccgcgggcgccggcgccgccttcgcccgacgcgccgcagcgcagccgttggccgcggaggctgcggtctccttcgccagatgccgcggcttcgggaggtccgccaccgctgcgacttccgcctggttttggcgcaaccatgccgttgcctcacagggagtgaaagctcccatggatgctgatgtcaagatgctgtcatacc

SEQ ID NO: 27415 - DNA, 408 bp, Zea mays
  Clone ID: LIB3180-016-P2-M1-A4
caactgagggccgcaacctctggtcaggcgttcccccagtgtgtctttgaccattgggacatgatgggctcagatcctttggaggccggctcccaggctgctcagctggtgctggatatccgcaagaggaagggtctcaaggaacagatgacccctctttctgagtttgaggacaagctctaaaatttttggctgttggtgatactgtttcatctgccggtttaatcatcaattcgtctactgtaatagcagcgacttcaatattttattttgttttagttgtcaaatgcacctgtttttgaacaatatttgtgatgtagtgccctgccgcgcttagagtctgagactattttgttatctgctgtgatgtttcagatgaaacagagttgatgtctggtttagtaaatg

SEQ ID NO: 27416 - DNA, 356 bp, Zea mays
  Clone ID: LIB3180-016-P2-M1-A5
tgccaagagagtgagcgagcgagcagaggcagcgcagcaatggcggcggcaatagtactctccggccaggtgcggccgcttccctcgtcgctgcccctgtccctgctgctgctcctcctcctgtgctgctccggcacctcgtggggatggagcacgtcccggggaggagccgtcagggtgtgccgcttcgatggcttggctgatgcaaacgacccgcaagaggaccgttttattgcagcaggtccaacctaaccatcagcaggtttctttttctttctttccagcccaaacaccaaccaaatggggcccctggtagtttcgaaaaaatctttcatgtcagaaataatgccctgttt

SEQ ID NO: 27417 - DNA, 73 bp, Zea mays
  Clone ID: LIB3180-016-P2-M1-A6
tttgtcagataggcctgatgagttggaaaggggtgaattagcgggcgggaggggtattaactggaaagggtac

SEQ ID NO: 27418 - DNA, 321 bp, Zea mays
  Clone ID: LIB3180-016-P2-M1-A7
tcggcaacaatgagcagccaggaatcccttttggaacaagggctacacgggttgatggtgatagccaacgtcgaatatctgttgtttctccatcttacttcagcaatgggtaaattatactcatccctcgggagttatgttatgactatgctacgaaaatatgagattttgaattcatgcattgtactctgagaagatggaaccatttttttagtaaaatgaatctaaacaaacagtgaacacctgagtctcttagcagatgtgagatatcatctgtgaacactgttaaaaaaattctttaccatatttcttgatgttaca

SEQ ID NO: 27419 - DNA, 324 bp, Zea mays
  Clone ID: LIB3180-016-P2-M1-A8
tcggcttccttggcaccaccgcctcccctcctctccttattaccaccacctagctagcagcggcagcggcagcgccggcctgttgtgctgctcgctcagacagctctgctagctgcatcctcctaattctccaggtctctctctcctctcccaactcccaagtcccatccggatccgagacgctggaggcggagcgcccccccgggacggcggcggcgacgatggggcgcggcaagatcgagatcaagcggatcgagaacgccaccaaccgccaggtgacctacttcaagcgccggacggggatcatgaagaaagcgcgcgagc

SEQ ID NO: 27420 - DNA, 76 bp, Zea mays
  Clone ID: LIB3180-016-P2-M1-A9
tcggccgctcgccgcatcaggtagtaggggctagctagccatggctcggatggccgccatggtggtggtgatcatt

SEQ ID NO: 27421 - DNA, 179 bp, Zea mays
  unsure at all n locations
  Clone ID: LIB3180-016-P2-M1-B1
tcgacccccggcactcgcaagcagcgctcattagtcactagggttttaaactttgcccccgatccgcctcgccgccggcgtcgtncttcgccggaaatccaccaccctacacccagccggagacgactatggtgggtttcggctcgatggcgggctacgggatccagtcgatgctcaag

SEQ ID NO: 27422 - DNA, 178 bp, Zea mays
  Clone ID: LIB3180-016-P2-M1-B10
tcgccgtcatcgatctcgtttcaaatccatccatcctcgtttcctccgtcccgcagcatctcaaccccatggccaagatcaagatcgggatcaatgggttcggcaggatcggaaggctggtggccagggtggccctgcagagtgacgatgtcaagctcgtcgccgggaacgacccctt

SEQ ID NO: 27423 - DNA, 265 bp, Zea mays
  Clone ID: LIB3180-016-P2-M1-B11
tcgggagcaccatagctacaaggatcccgtaactgaatttctggaatgcttatatgttaactatgattttgatggtgctcaacagaaactcatagagtgtgagcaggttatactgaatgatccattcctgggaaagcgcattgaagagggaaattttgtcagtgttcctttgagagatgagttccttgaaaatgctaggctttttattttcgagacatactgccgtattcatcggtgcatcgatatcagcatgcttgctcagaag

SEQ ID NO: 27424 - DNA, 401 bp, Zea mays
  Clone ID: LIB3180-016-P2-M1-B12
tcgataaactaacatgttatcttttgtgcagaccatgctaagcagtaagcacggaatcaaacgacaagctgagtgcaagaagtacctgcaacactgggttcctgtgtagcgccttcctgccgcgcggtcgccctgcagcaaccgagtgacctctgcgcgggggcgacggaggccttgagggggaccctgccgttcttcacccccgccgccgcggcgtccaaggcatggagcctcgtggcggaggaaggcgggaagctgcatgccatggagttgatggatcgacgcgctgatggcgcgagcgcaggttgccacgaagggataagctggagcttaaagccgtgaaagacggttctgcaagctatgctgctctagaaaagaaagcagagctgtatgaaaaatta

SEQ ID NO: 27425 - DNA, 355 bp, Zea mays
  Clone ID: LIB3180-016-P2-M1-B2
gacaacccgtcagcccctctcgtttttcatccgccttcgccttcaaccgggtgcgctccacgccttcttcaggaaagcgagagcttctgcataagaacaacaaatcaaaagcgtgatcagctcggtgccaacaaaacctcaacaaccaagtttcatgtctgatctcgacgtccagctttcatctgcctttgatccgtttgctgaggcaaatgctgaggactctggtgctggtcctggaacgaaggattatgtgcatgtgcgcatccagcagcgcaacggcagaaagagtctgactacagtccagggtctgaagaaagagttcagctataacaagatcctcaaggatctgaagaag

SEQ ID NO: 27426 - DNA, 395 bp, Zea mays
  Clone ID: LIB3180-016-P2-M1-B3
gaaatctgacccgggccacactccgctgctccgccatggcgatccgctccaaggcctggatctcgctgctgctcgcgctgaccgtcgctctctccgcccgggcggaggaggagcccgccgccgcggcggagggcgaggccgtgctcaccctcgacgtcgacagcttcgacgaggccgtcgccaagcaccccttcatgggcgtcgagttctacgccccctggtgtgggcactgcaagaaacttgctccagagtatgagaatgcggccaaggcactttagcaagcatgacccaccgattgttctcgctaaggttggagcttacgaggtgaagaacagtcaagatgttgagacattccgacaatgcttaattgatgaggattttgctcttaagtgacc

SEQ ID NO: 27427 - DNA, 385 bp, Zea mays
  Clone ID: LIB3180-016-P2-M1-B4
taaacgttttgcagcgaccccttgttttgctctccgtcagtttgctggccagcaagcggccttgggattggattggagctctcatcagctcctatcttatcaccagagccagacagacagtcatcgtctccgatccgatccatctccgtcttcgtcctcctcgctcgacaacccaccaaggagcaagagaagaagatcgacgacgacgacggctgccctctgcgttcctcaagaataatactccgttgcgtcccttccgtgctccaagaaagatccggctgcgggccacacgatgagcaatcttaagcttggcgtcgagggtaccagcgctcacgatctccctcccgaagagcagggcacggcgaaccctttcgtggaggtcgag

SEQ ID NO: 27428 - DNA, 133 bp, Zea mays
  Clone ID: LIB3180-016-P2-M1-B5
cttcaagaggggatcatcagattgggcttattattccttattactccaggcaaggatcggactttcacttaaatgactgtacccagaaactcacaaagtgagagccggctatactgaatgatccattcctggg

SEQ ID NO: 27429 - DNA, 285 bp, Zea mays
  unsure at all n locations
  Clone ID: LIB3180-016-P2-M1-B6
cacaggcagttcnagagagagagagagagagggcagaggctaaagatgtcgtgggttcgaccaccaccaccacaaccagccggctcccccggcgtcgggccccaaccaggtgttcaagatcttctgccgcgccaacgagaactactgcctggccgtccgcgacggcgccgtcgtgctttccccggtcaaccccaaggactaccaccaccactggtacaaggacatgcgcttcaccacccgggtcagggacnaggaaagcatgccggcgttcgcgcttgtcaacaa

SEQ ID NO: 27430 - DNA, 301 bp, Zea mays
  Clone ID: LIB3180-016-P2-M1-B7
tcggagagagcgcggctcacttcaaactaccgctttctttctacttatgagaggtgcactagaaagacagaagtggaaagagacagagaggagactagtaaagccaatttcacctaaaaagcggaaaatgacactaacttctactgtgggcaagtcatcatttccagaatggattcagtcgtagaatgctgaagtagagcagtaccaaggttcggttttgggacagacagaaagttggataagaggattcgtcttagccccaacctcgagagaataatttgcaatctttcggtatttcatt

SEQ ID NO: 27431 - DNA, 399 bp, Zea mays
  Clone ID: LIB3180-016-P2-M1-B8
atctgacccgggccacactccgctgctccgccatggcgatccgctccaaggcctggatctcgctgctgctcgcgctgaccgtcgctctctccgcccgggcggaggaggagcccgccgccgcggcggagggcgaggccgtgctcaccctcgacgtcgacagcttcgacgaggccgtcgccaagcaccccttcatggtcgtcgagttctacgccccctggtgtgggcactgcaagaaacttgcttcagagtatgagaatgcggccaaggcacttagcaagcatgacccaccgattgttctcgctaaggatgatgctaacgagtagaagaactggccgcttgtaccaagtaacagaaccaggggtttcaactctcaagaattttaggggacccagggaagga

SEQ ID NO: 27432 - DNA, 319 bp, Zea mays
  Clone ID: LIB3180-016-P2-M1-B9
cagctcccgaaatccaaattgaaacagttgcaggcgattctgagctcgggttttgttccggggacggattcctgtgccggcggacgggatgtcaggccctctcgaccgatttgctaggccatgctttgaagggtttgtacataacgatgaaaggaaagagagcagatctgatgcagacaactcagaaggagataagaagactaagattgggtctttcaagaaaaaagcaattaatgcggggaacaaattcaggcattccttgagaaggagaagcaaaaaaaagaccgaaaggggggattccatcaaggacataagggac

SEQ ID NO: 27433 - DNA, 358 bp, Zea mays
  Clone ID: LIB3180-016-P2-M1-C1
tcgcgacaagccacaacttgaggccggtgacaaaattataatgccaccatcagctcttgatcgtcttgcatctctgcatattgaataccctatgctatttgaagtccacaatgcagcagcagaacggacttcgcattgtggtgttctggagttcattgcagaagaaggcatgatctacatgccatattggatgatgcaaaatcttctgttgcaagagggagatatggtgttcataaaaaatgccaacctccccaagggcacatatgtgaagttgcagcctcatacaacagactttctagatatttcaaaccccaaagcaatcttggagaaaactttgcggaacttttcttgtctaact

SEQ ID NO: 27434 - DNA, 392 bp, Zea mays
  Clone ID: LIB3180-016-P2-M1-C10
tcgcagaaacacaccaagcgaagcgcactagcaacaacctaacaacaatggctaccaagatattatccctccttgcgcttcttgcgctttttgcgagcgcaacaaatgcgtccattattccacaatgctcacttgctcctagttccattattccacagttcctcccaccagttacttcaatggccttcgaacacccagctgtgcaagcctataggctacaacaagcgattgcggcgagcgtcttacaacaaccaattgcccaattgcaacaacaatccttggcacatctaacaatacaaaccatcgcaacgcaacagcaacaacagttcctaccagcactgagccacctagccatggtgaaccctgtcgcctacttgcaacagcagctgctt

SEQ ID NO: 27435 - DNA, 255 bp, Zea mays
  Clone ID: LIB3180-016-P2-M1-C11
tctagatcgcgagcggcggccctttttgggttttttttttttgtgtggggggttttattttttttttttttttttttttgttttttttttttgtagcgggaaaaaattcaaacaaaataatggttatttgtggggaacccccggggggatgggggcccccttctgggggacccctcatatggaaacaaaaagggggcccccccaacggaggggtggtgcctcggcaaggcagggttcatcaaagagaaccgggtg

SEQ ID NO: 27436 - DNA, 371 bp, Zea mays
  unsure at all n locations
  Clone ID: LIB3180-016-P2-M1-C12
tcggcctccaccttcctccccagccgcaagcagagcaagaaccggagctggggatcgattccgcgccgcctgatctgcgatcgggactcgatcgtgcataatccgaggttcttcctctctgtcgtctccgatccagacgggtgtgcctggtctgcatcttcatcctctgcaagaaatcacacatctcgtggcgcaccttgcatcagccgcggccggcacctntactctcgcccgccccctatgtcgtaagcgcgcaatcagaactcccgatcacccgcacgctggtgcgccagtgtcgtcttcgccaccatgaactccatcgagcccttaacaggctggtgaagctggcggcccgcgcttttacgatgacg

SEQ ID NO: 27437 - DNA, 431 bp, Zea mays
  Clone ID: LIB3180-016-P2-M1-C2
atcacccccttcccctcttctcctgccacacctccgccagcgctagggttttatttttgcattgctgttgctggtggtggttaccttcttctctctctcagtcgtctccctcgcagctgcagtcgtcgtagcagatcttatctcaaaccctaccgaccaacagctgcttgctcgggacgggaaccggagttggattgcgatggcgctgcagtacgtggaggcgcagcggcaggcgcgcccggacctcgccgactggtatgcttccctcgccgacctctaccagcagaagctatggcaccagctcaccctcaagctcgaccaattcctacagctccaggccgcacagaccggagacactatcattcagcttctacaacaatttcatcactgattttgagaccaagattaatctgctcaagcctgcccatttt

SEQ ID NO: 27438 - DNA, 232 bp, Zea mays
  unsure at all n locations
  Clone ID: LIB3180-016-P2-M1-C3
tcgcttcgccaaactcctgctcggcgaggacatgtccggcagcggcaagggcgtttgcaccgcgctcgccatcttcaacgccatcaccaacctcttcgccaccgtgttcggcgagctgtggaggctggagccgctcgcgaaggcgaggaaggcgatgtggacgcgggagatggagtggttgctctncgtntncgncttcatcgtngtgctcacccccttcattcaggagctc

SEQ ID NO: 27439 - DNA, 379 bp, Zea mays
  Clone ID: LIB3180-016-P2-M1-C4
ccgtcatcgatctcgtttcaaatccatccatcctcgtttcctccgtcccgcagcatctcaaccccatggccaagatcaagatcgggatcaatgggttcggcaggatcggaaggctggtggccagggtggccctgcagagtgacgatgtcgagctcgtcgccgtgaacgaccccttcatcagcaccgactacatgacctacatgttcaagtacgacactgtgcacggacagtggaagcaccatgaagtcaaggtgaaggactccaaaacccttctctttggtgagaaggaggttgctgtgtttggctgcaggaaccctgaggagatcccgtggggttcggttggtgctgaatatgttgttgagtctactggtgttttcac

SEQ ID NO: 27440 - DNA, 329 bp, Zea mays
  Clone ID: LIB3180-016-P2-M1-C6
ctggagctctagcaattatatcacccatggccgttggcgttgtcttccggattttgggccactacactggtcagcctcttcttggagctaaagttgtagcctccatgctgatgtttgcgacggtcgctgggattctcatggcactcttcttgaacactgctggcggcgcctgggataatgcaaagaagtacattgagactggcgctcttggtggcaagggcagcgagtcccacaaggctgcggttactggcgacacggttggagacccattcaaagacactgttggaccgccgctgcatgttcttatcaagatgctcgacacaatcact

SEQ ID NO: 27441 - DNA, 104 bp, Zea mays
  Clone ID: LIB3180-016-P2-M1-C8
tgtcgttcggtctgattgtgattgcggcagcaccgtcgaccacgagcccggcgtaaggctcctcctcctgccgtttcagggtgcactttctccattgctcattt

SEQ ID NO: 27442 - DNA, 105 bp, Zea mays
  Clone ID: LIB3180-016-P2-M1-C9
tcgctatgcttatccttgtatgctgtacactatcattcatttgatgagcaataagctgtttggtaactcagtctcacctggataaggagaaactacgattttccc

SEQ ID NO: 27443 - DNA, 425 bp, Zea mays
  Clone ID: LIB3180-016-P2-M1-D1
tcgatgaagtattggacataccacttccagaattacaagcgctgaagacattaaaagttacctaccatcatgccacaaaagatgaggtgtcagttcacagtataagattaccaaaaaacagcactgttggcgatgtgctgaatgatatcaaaacgaaggttgagttgtctcataccaatgctgagctaagattacttgaggtcttttatcacaagatatacaaggtatttgcaccaaatgaaaagattgaaaacatcaatgatcagtactggacactgcgtgcagaggaggttccagaggaggagaaaaatcttggccccttcgatcgtttgattcatgtatatcattttacaaaagacactcaaaaccaaacgcaagttcagaactttggagaacctttttttatggttattcgtgaggatgag

SEQ ID NO: 27444 - DNA, 135 bp, Zea mays
  Clone ID: LIB3180-016-P2-M1-D11
tcggctgcccgtcacccgccggtctgttccagccagcctgcgccggtcccaggggcccgccattccgccgcgcgccgccggcagggcgccgcgttccgggaacgcgcgcgtgcggtgcgggcgcggtttgttttt

SEQ ID NO: 27445 - DNA, 387 bp, Zea mays
  Clone ID: LIB3180-016-P2-M1-D12
tcggcgctcgtgaggctgagcggaattactgcagagggccaaggtgtgaaggttgaatcctcagcagttccttcagccccaactccagatgttgctgaagcacaggccccagctgctgaggaggaggacgatgatgatgttgacctttttggtgaggagaccgaagatgagaagaaggctgctgaagagcgtgctgcagctgccaaggcttctggcaagaagaaagaatctgggaagtcatcagttttacttgatgtgaagccatgggacgatgagactgacatggccaagcttgaggaagctgttaggagtgtccagatggaagggctgctctggggcgcattcaagcttgtcccagtcggatattgtattaagaagctccaaatc

SEQ ID NO: 27446 - DNA, 424 bp, Zea mays
  unsure at all n locations
  Clone ID: LIB3180-016-P2-M1-D2
tcgcaaaatccgaaacggttcgaacgatcagaacgattcagcttcagctcctgaatccagcagcaatggatcgctcccgctccaagcgcggctaccactacgaccaggactccccggcgncccgcttcaagcagggcttcgaccgccgcaacggtggcggccagaatgcttactcgagctatcaccggcgggggcccctcggcggttatcaccaagatctcaagggattcgccccaaatgaaaaggttggaaacttttatgattcgtactggacacttagtgcatatgaagtttcagaggatgttaaaaattctggccccttcgtacgtttggataatttattataaatcttaccaaagacctttaaatctctaatgctagctttaatatccttgggagaaccctttttttattggattttttc

SEQ ID NO: 27447 - DNA, 273 bp, Zea mays
  Clone ID: LIB3180-016-P2-M1-D4
gggcaagactcgcagcccggacaaggtaaggcgacgtacggcagcgatggcgccggtggtcatgatgagcatgtgcgtcgtcgtgtcgctggtggcggtgcagctgcaggccacgagcagcgacggcgccacggccacaccgtccgtggtgctgccgccgatgacggtgccccgtgtgcgcggccggttggaggccggtcgtaagctgcaagccgttgacgccgtcgggatgggcatggactccgtggtgcgttggacggtggtgcttatcac

SEQ ID NO: 27448 - DNA, 92 bp, Zea mays
  Clone ID: LIB3180-016-P2-M1-D5
ccactttgttgtttgtccgtaacccgcccatctgtttcatacaatctgcgccggtgccaggggccccccaatccgtcgcgcgccgtcataat

SEQ ID NO: 27449 - DNA, 281 bp, Zea mays
  Clone ID: LIB3180-016-P2-M1-D6
tcgaattcacacgcttgggcgagcaagccttgttccggaagcgcgcggacgacatgctgatgctgcacccgaggttggtgtcgtcgagcgccgtggacgacgaggaccactgcgagagctgcgcctgctactgcgccatggtgtcctgcgtctcgctgctgctcttcatcgtgctggctgccgcggtcagcatcccgagggcctgcgccatcgccggcgtcatgctgctcctgctggggctcgtcggctggctcgtgcccacggggaatggagccggtccg

SEQ ID NO: 27450 - DNA, 71 bp, Zea mays
  Clone ID: LIB3180-016-P2-M1-D7
ttggatgcggacgctcgggcgagcaagggggggtcaagaagcgcgggggggggattactaatctataccct

SEQ ID NO: 27451 - DNA, 108 bp, Zea mays
  Clone ID: LIB3180-016-P2-M1-D8
ttcgtttgcaaaaccggagctgcccccgtgccaaggcgagagcaactgcaagctgctcgtctcgtccaataatagccgcaggagcgcaagcgcgaccgaattcgggcg

SEQ ID NO: 27452 - DNA, 420 bp, Zea mays
  Clone ID: LIB3180-016-P2-M1-E1
ttttcatcggccacccacggcggcggagcatagcagtaagcaagcagcggagacgccggagagcggtgaagaagcatggagatggagcagctctgctcgctgctccgcgacctcgacgcgctcaagcagcatcccgacgatctcacttccaccatcgatcggatgcgggagcggctagtggcgatgatgaatccggcagccggtgccgcttctcgatccaagattaaggacatgagtgcagaagtggtggacaacaatccctacagcagacttatggcgttgcaacggatgggcgtagtggagaattatgagcgcatcagggactactccgttgccatcgttggcataggtggcgttggtagtgttgccgcggagatgctcactagatgtggaattggacggctgttggtgtatgactac

SEQ ID NO: 27453 - DNA, 385 bp, Zea mays
  Clone ID: LIB3180-016-P2-M1-E10
acagaaagcagcagcaccggtggcactcaggtcccatgcaattgtttaggctctgctttgtggatataatcaaatctaagatcggtttctggaagaagttcaacctcatattcctcttcttcctgctccggaagctgatactacccttctactccttcaccctcttctgcgtcatcctccccatgacgatgttcgtccccgaagccgagctccccgcgtgggtggtgtgctacatcccggcgacgatgtccattctcaacatcctcccgtccccgaaatccttcccgttcatcgtcccgtacctgctgttcgagaacaccatgtcggtgaccaagttcaacgccatggtctccggcctgttccagctggggagcgcctacgagtg

SEQ ID NO: 27454 - DNA, 67 bp, Zea mays
  Clone ID: LIB3180-016-P2-M1-E11
tcggcaccctgctcattatccgatccgggtactgctccatgaacttagagaggatctgcttgcccat

SEQ ID NO: 27455 - DNA, 224 bp, Zea mays
  Clone ID: LIB3180-016-P2-M1-E12
tcgggcaagccccggttttatgcataaccggtatatatgctattttactacacttaatgtttgtaggcttggactgggcacttaagtgtaggaggtgactgaaaccctaattgcatgaacttaagaattctaatgagatgggtactaagatggttgggtgaggagcttctttaataaataggatcttggtagaaggctagtggattttttaggacttgggcgag

SEQ ID NO: 27456 - DNA, 428 bp, Zea mays
  unsure at all n locations
  Clone ID: LIB3180-016-P2-M1-E2
tcgccccacgaaaccagagcaaattccggcgagccggtgcggtgcggcggaggaggcccagggagacgccggcgcgagaaggagcatcaggaggaggcagcggagatggatccggactcggtgaagtcgacgctctctaacctggccttcggcaacgtcattggcgtcggcgcccgggacctccaaaaggaaatggtggctaaagacaaggctcaatcagcacctgcaagccatgatgaagttgatcttgatgagctgttggatgacccagaacttgagaagttgcacgcggagagaattgctgcccttaagaaagaagttgagaagcgtgaagtgctaaaaaggcaaggtcatggtgaatacagggagataactgaaggngacttccttcgggaggttactggcagtgaaaaagttatatgccattt

SEQ ID NO: 27457 - DNA, 357 bp, Zea mays
  Clone ID: LIB3180-016-P2-M1-E3
tcgcgcgcagccaccagacgatccgtcgacgttgaccatgctgtggggaccgcccggcgaggtgcccgttgccggcttcgctgcggcaccggaagggcgaccggatgcgttcgctggcagcgcgtcgtgcctgccgctcgcgaggcaggtcggcggccagcagggggcgcgcaacttcgtggtgtcgccgctgtcgttccacgcggcgctcgcgctggtggccgcgggcgcgcggtgcgagacgcaacgggagctcctgcgcttcttggactccgagtcgctgggcgagctgcaccgcgccgcggcgacggcgctgttcggccggctcagtgacctcccgcaggcgttcttcgcctg

SEQ ID NO: 27458 - DNA, 384 bp, Zea mays
  Clone ID: LIB3180-016-P2-M1-E4
tcgcagtgttgattgagccctactcaagggtggagattgcacatatagcggagatgattgaattgcccattgaccatgttgagaagaagctgtcgcagatgatccttgacaagaaatttgctgggacactagatcaaggtgctggctgcctcattatctttgaggattctaagacggaggatatcttccctgccactctcgaaaccatttcgaatgtcgggaaggttgtggacagcctttatgtgaggtcggccaagatcatggcttgaaagcagctagtcttacctgtttgctttgatttcatttccagtctgtcgatgtactcagacatttatttcttcaatattgacagtttattgcgaccgttcaggttcatgtgaccaa

SEQ ID NO: 27459 - DNA, 83 bp, Zea mays
  Clone ID: LIB3180-016-P2-M1-E5
tcttattttagatagaacactactcaagggcggagatcgtacatatagcggcgatgagcgaatatcctaatgaccatgttgag

SEQ ID NO: 27460 - DNA, 309 bp, Zea mays
  Clone ID: LIB3180-016-P2-M1-E6
tctcctccggctagggtgttcacgcctgccgcggcgaagcttctgccctccccggcgtcgggctctggtcgtcgtcggccgggaagatggctggcggcttcagggtacttcatctggtcaggccctttctggctttcttgccagaggtgcagagcgcggataggaagataccattcagagaaaaagttatctacactgttatttctctcttcatttttctggtgtgcagccagctcccactctatggcattcattcgacgactggagctgatcctttctactggatgcgtgtaatcctcgcataaaacc

SEQ ID NO: 27461 - DNA, 427 bp, Zea mays
  Clone ID: LIB3180-016-P2-M1-E9
tcgtcaacatccataaattatcgcgcgtgcacgtcaatgcacaatgctgatcccaatccagccatcaaggtcgtcgtctgccgggccgccggagtcgtcggggcgggcgtccaggtgggggtggccacctccgacgagacggacggctccaactaccatgaaccggcgccggaggtggactgtatttcccaggccgtcagcctgatcgactgcatcgactacgtccagaaggggagcagcgcgcgccgtccgtccgatgtctgctgcggagaggtcaagactcgagctgtcagctttatattactgggactatttttgtaattttaaagttatctatttttcttaatctatacttttattcagaatttatttgtgaggcatgtcttttttcgtatttttatttattatttcatttcttgttttaatt

SEQ ID NO: 27462 - DNA, 331 bp, Zea mays
  Clone ID: LIB3180-016-P2-M1-F1
tcgcttcgtcagccccttctccggcaacgagcacctaacaggctgaaaaaaaatcattgatacacgtacgccgtcagaggctgcagtatattctgtgagaatggcatggggtcaaggtgctaagaggtccatactagggcttctctttcgttctcagcaccaaactgctcgggcatactcttcttcagcattccagactcaccaattgagcactcatgttccccaagatggagtgtttattaggagattcggctctgaggtgtcttcttcagagcaaatgaaccttattaagcaactcagacaaagaacgagtgctccaatcaaagatgtc

SEQ ID NO: 27463 - DNA, 313 bp, Zea mays
  Clone ID: LIB3180-016-P2-M1-F11
gccgtttttcctcgtcctcgatccagccccctgccgcttccagctccgatcgatctgatccctccccaccaccacgcccatggcggaccaactcaccgacgaccagatcgccgagttcaaggaggccttcagcctcttcgacaaggacggggatggttgcatcacgaccaaggagctgggaactgtcatgcgttcactggggcaaaaccctacagaggctgagctccaggacatgatcaatgaggtcgatgccgacggcaacggcaccatcgattttccagagtttctcaaccttatggctcgcaagatgaag

SEQ ID NO: 27464 - DNA, 335 bp, Zea mays
  Clone ID: LIB3180-016-P2-M1-F12
gacaggccctgagaccctgtcagggatgtccggacgcacacgcgcgaaggcgattatacgcctctgtcccgttacaccgaaaaactttggtgaccacacggcgatccggcgcgttgagttcaccacttattctagtcagcacccgcttatgctttcttgcttgacccctatgagagtcgtgtgcccacaacaaggcgtaataatgggccttttggggccttgtttttctgtggtggagtgcatgacgaaagaggaactctttgtccccctcctctctctttgggaacaactgtaccgcgatgtttgcctcacggggacgaaaaaagaactggtgc

SEQ ID NO: 27465 - DNA, 233 bp, Zea mays
  Clone ID: LIB3180-016-P2-M1-F2
tgctcacctgggtgcggagcgtcattcggacacggagatacagcgagcattgcgacgatggagttcgtgaaccctttcaccggtttgcgtgtctgcggtcgccgtcccaacgagaatcggcaactaaaggtcgagggctgctatagtttgcgttcataccgggtacgctctgatcaggaggggctacagcatgggaaaagccaatgtttacagcctacaagaggctaaaagca

SEQ ID NO: 27466 - DNA, 407 bp, Zea mays
  unsure at all n locations
  Clone ID: LIB3180-016-P2-M1-F4
agaccattagctttatctactccagagcgcagaagaacccgatcgacaccatgagggtgttgctcgttgccctcgctctcctggctctcgctgcgagcgccaccttcacgcatacaagcggcggctgcggctgccagccaccgccgccggttcatctaccgccgccggtgcatctgccacctccggttcacctgccacctccggtgcatctcccaccgccggtccacctgccgccgccggtccacctgccaccgncggtccatgtgccgccgccggttcatctgccgccgccaccatgccactaccctactcaaccggcccggtctcagccttattcccagccacacccatgcccgtgccaacagccgcattcaagcccgtgccagctgcagggaacctgcggcgtt

SEQ ID NO: 27467 - DNA, 125 bp, Zea mays
  Clone ID: LIB3180-016-P2-M1-F5
acactctgtttcattatctttacctactccagagcgcagaagaacctgatcgacaccaggggggtgtttattccacccctcactatcctggaatctcgcagttagcgccaactccattcatacaa

SEQ ID NO: 27468 - DNA, 321 bp, Zea mays
  Clone ID: LIB3180-016-P2-M1-F6
tcggtcagacagggctcccacaggccatcaccacaacacacaaagacagctcagagcaggtcacacacaggctcctctcccccgttgcgcaacgcgctttcccccacttcacccgcctcggcgccatggctaagctcgcgctggcgctcctcctcctgctggccgtggcggcgtccgcgtcggccagcagcgggagccacctggatctcgacctgggcttcctctcctctggggaccgccggagggagtgccgcgggacggtggccgagtgcctcgccgaggagtcggatgaggagggcctttgcctggccggatcccacc

SEQ ID NO: 27469 - DNA, 123 bp, Zea mays
  Clone ID: LIB3180-016-P2-M1-F9
tcgtgagaagaaagtagaacaaaaacagactgtaaataaaaaaatactggctggtttaaatgtaatcccttaagtgtatacctaaataaacaaattaggtcggtcggtttagttgattctagt

SEQ ID NO: 27470 - DNA, 422 bp, Zea mays
  unsure at all n locations
  Clone ID: LIB3180-016-P2-M1-G1
tcgcccacgcgtncgcccttataaaacctagctcctcaagctccagacgcagtcgaccgccgcagaccgggagtagtcgacgcgccgtcactgaatcctcagatcacggctagccgtaatcacgccactctgctgactcccggcgagcagtgtaacattttccttcagccatgggcaaggagaagactcacatcaacattgtggtcattggacatgtcgactctggcaagtcgaccaccactggccacctgatctacaagctcggcggtattgacaagcgtgtgattgagaggttcgagaaagaggccgcggagatgaacaagcggtcattcaagtatgcctgggtgcttgacaagctcaaggccgagcgtgagagaggtatcacaattgatattgctttgtggaagttcgagaccaccaag

SEQ ID NO: 27471 - DNA, 364 bp, Zea mays
  unsure at all n locations
  Clone ID: LIB3180-016-P2-M1-G10
tcgaggagatcaatccaatattgctgtttcagaggaacaaactccaacatataatggagaaacaccagaagatcatcatgtagaatcaaatgaaggaacgatggggaatgaaactgacaatatcattttggcacacggaatcaaagatgaaatacagaagtcagcagaactaaaggacggtccatgtgatttgtctgaaactgttttaacaactcggagaagtgagaacatgattgatgaagataatgttcaaacttatggcaatgatacagtagaggcttcaaacagtatccatcaagtcaaagaagagccagatgctggaaccgaacataattcaagccaaaatgntagtgaatgttgtgga

SEQ ID NO: 27472 - DNA, 282 bp, Zea mays
  Clone ID: LIB3180-016-P2-M1-G11
cggacgcgtgggggaaagggagaaaatttcatatagcaattgtttcgcgtataggagggagaacaaaggtcgcgtctcgaaagttcttgccttgttgggaagggatggcgtcggaggtggaggacgacgcggcggtgccgggcgcgccgctggtcgccaatggtgcagccgacgtccgcctgaggagggatcaggccaaggctattttgtccaagcaggccgtccagatctccaccaaggcctagcagcactagcgcttcatttttaaggtcacacactttg

SEQ ID NO: 27473 - DNA, 372 bp, Zea mays
  Clone ID: LIB3180-016-P2-M1-G12
tcgtattgctcgattatgatggaactctggttccccaaacttccctcaacaaggaacctagtccacaggttttgagcatcatcaataccctttgctcagatagtagaaacatcgtttttcttgtcagtggtcgagacaaagataccttgggaaagtggttctcctcatgtccaagattggggattgcagctgaacatggttacttcttgaggtggtctagagaagaagagtggcaaacatgcactcaggcattggacttcggatggatgcaaatggcgaagccagtgatgaatttatatacagaagcaactgatggatcctacattggggccaaggaaagtgccttggtgtggcaccatcaggatgctgacc

SEQ ID NO: 27474 - DNA, 167 bp, Zea mays
  Clone ID: LIB3180-016-P2-M1-G2
tcggcattcactgccaagagagtgagcgagcgagcagaggcagcgcagcaatggcggcggcaatagtactctccggccaggtgcggccgctttcctcgtcgcttgccctgtccctgctgctgctcctcctcctgtgctgctccgggacctttgtggggatgtgagca

SEQ ID NO: 27475 - DNA, 415 bp, Zea mays
  Clone ID: LIB3180-016-P2-M1-G3
caactcgccgtcgtcttctgcggttctgccgtctacgcctccaatttggcctctctcccttgcaagtttaagcttcaccttcaaccatgggtaaggagaagtcccacatcaacattgtggtcattggccacgtcgactctggcaagtcgaccaccaccggccacctgatctacaagcttggaggcattgacaagcgtgtaatagagaggtttgagaaggaggctgctgagatgaacaagcggtccttcaagtatgcttgggtgctcgacaagctcaaggctgagcgtgagaggggtatcaccattgatattgctctgtggaagtttgagaccaccaagtattactgcaccgtcattgatgcccctggacaccgtgacttcatcaagaacatgatcactggtaccttccaagctga

SEQ ID NO: 27476 - DNA, 253 bp, Zea mays
  Clone ID: LIB3180-016-P2-M1-G4
tgctccgacgcagccacaaaatggctcgcgtctggtcttttctgaacggccgttacatgcgcctcttctagtacactactattacgggcaagttctatatatgtacctattgcgataccctatgcgcccgcagcgggggtagcgccatcccagacagcaccgatggtcggcaccctctggactaggtccacatccagattgacaggcacgaagccctatgtcaacgtcggctcgattgggctcgaccttcacg

SEQ ID NO: 27477 - DNA, 200 bp, Zea mays
  Clone ID: LIB3180-016-P2-M1-G6
cgtacgcgtgggttatgatcgtcgtcaggtcatgctggataggcttatctggagtacacagtttgagaatttcttggcgaccaagtggacgactgcaaaacggtttggtcttgaaggcgctgagacttttgatcctggcatgaaggagatgtttggtagagccagctgatccttggttgtagagagtatttgatcattgg

SEQ ID NO: 27478 - DNA, 249 bp, Zea mays
  Clone ID: LIB3180-016-P2-M1-G9
tcgaaccgcgtggggccgttcaccgtgccggcggcgtccctctccaccttcgacgtcatcagcgtcatggtctgcatacccatctacgacaaagcgctggtgccgctggcccggcgcgccacgggcaaggagcggggcctgtcgcagctgcagcggctgggcgttggcctcgcgctgtccgtggtcggcatggtgtacgcggcgctgttcgaggccaggcggtctgtcgcttgttcaatctatttcttt

SEQ ID NO: 27479 - DNA, 202 bp, Zea mays
  Clone ID: LIB3180-016-P2-M1-H1
aaaaggcttagtggcttttgtaatcgggtgggttccgggggcctggaatatggaggtccggaaccggcccggttacctttaaaaacctttgccgggctcaaggattaaccaggggtcctacaataaacctaaaaagggggtattttttaaagggctggccatcctttattttatggggaagtggcggccaccatttaatcca

SEQ ID NO: 27480 - DNA, 385 bp, Zea mays
  Clone ID: LIB3180-016-P2-M1-H10
cagtaactagctagcagatcaaacaagtagcgacagctcgacaaagatttgtgagagtgatccggcgctgagaagagatggctaagatcgccgcagccgccgcggcggcggcggcgctgtgcttcgcggccctggtggccgtggccgtctgccaaggcgaggtcgagcggcagaggctcagggacctgcagtgctggcaggaggtccaggagagcccgctcgacgcgtgccgccaggtcctcgaccggcagctaaccggcggcggcgtcggcggcccgttccggtggggcaccgggctccggatgcggtgctgccagcagctccaggacgtgagccgcgagtgccgctgcgccgccatccggagcatggtcaggggctacgagga

SEQ ID NO: 27481 - DNA, 348 bp, Zea mays
  Clone ID: LIB3180-016-P2-M1-H11
attgagaccaactagcaacatagaaagcacaatagtgtaccaacaatggcagccaaaatattttgcctccttatgctccttggtctttctgcaagtgctgctacggcgaccattttcccgaaatgctcgcaagctcctatagcttcccttcttcccccgtacctctcaccagcggtgtcttcggtatgtgaaaacccaattcttcaaccctacaggatccaacaggcaatcacagctggcatcttacctttatcacccttgttcctccaacaatcatcagccctattacatcagttacctttggtgcatttattggcacaaaacatcagggcacaacaactacaacaa

SEQ ID NO: 27482 - DNA, 407 bp, Zea mays
  Clone ID: LIB3180-016-P2-M1-H2
cggatctcgctcggccatcgggactgtacaaggacgagagggagaagagaacagcggattcatcaccgccaggcgtcaggtcagagtgtgttaagacaagatggtggcgaatggcgacgcacctgctagagggagtgcggcggcagctgcaagcctgcgcaggcgtaggaccacaagcggtgctgctgctggcggaggtggtgccagctcgatgctccagttttacaccgatgaggctgcgggccgcaaaatgtcaccaaacaccgttctgatcatgagcattgggttcatcgctgttgtcgctatgctccatgtttttgggaagctgtaccgcaccttcaactaggttggtactaccataaccaaagaaacagaggccaccaagagaggagccttatagagccatt

SEQ ID NO: 27483 - DNA, 408 bp, Zea mays
  unsure at all n locations
  Clone ID: LIB3180-016-P2-M1-H6
acgcactctgccctcctcgtcatcggctcgtgcgtctacaccttcggccggcgcgtgatccggatcgacgacgccgaccccagatccctttcctttccggcgtattcccgtccgcccgtccgtcgatcccacattccttccaggccttcaagcagtgaaggagccttatgagctggttggctggggctttactccaattctggtgctactaagatgggccagggcctgctcagcaacaagtctgggacaagactaagcatagatgaaatagcaggcgcttaccatttcttgctcttgctctcccccgtggtttccttttgggactgcattttccgctngannngattcttaattaaacctgagtgggtgtagcagcatcctgcattcacccagccattttttcaacag

SEQ ID NO: 27484 - DNA, 217 bp, Zea mays
  Clone ID: LIB3180-017-P2-M1-A1
tcgcggacgcgtggggttcaacgaatggactctggaactgaaggccatggctggtaggatcattaacatgaggcaacaactatttaatgcgctgaaattcaaaggaacccctggggaatgggggcatattatttaacaaaatgggcaggttacttttacttggcctaataggcgaccaagtgcatttattggggaggaattccacatttattttgca

SEQ ID NO: 27485 - DNA, 402 bp, Zea mays
  unsure at all n locations
  Clone ID: LIB3180-017-P2-M1-A10
gttgnttcctcaccctaccccctcgctgcgggggcctacccgtgggcctggggggtctccctaccgctaaccctagaccagcacccgagatctactccgcgcaaacagccatggcggagacgctcgacatgaccctcgacgacatcatcaagaacaacaagaagagtaactcctcatctcgcggggcccgccgcaaccgcggcggatccgcccctggcggcgggaccggcggggtcgggccgaccaggcgcccctttaaaagggctgggaacaggcaggcgccctaccagccgccgaaggcccccgacgctgcgtggcagcacgacatgtaccctgcggtcgccgcaagaggcggcggcggcgggagggtctcggctctcgagaccggcgccaagctctaca

SEQ ID NO: 27486 - DNA, 402 bp, Zea mays
  Clone ID: LIB3180-017-P2-M1-A11
gggaaggaagcatgttcgggcaccaccacggccacggcgggcaccaccaggccccgccgccgcacgagcagacgctgttcaggatcttctgccgcgccgacgaggcgtactgcctcaccgtgcgtcacgacgccgtcgtcctcgcgcccaccaacccccgcgacgagtaccagcactggtacaaggacatgaggcacagcacgaaggtgaaggacgcggagggccagccagcgttcgcgctcatcaacagggccaccggcctcgccattaagcactcgctcggccagtcccatcccgtgaagctggtgccctacaacgcggagtacctggacgagtcggtgcttgggacggagagccacgacgtgggcaagggcttccgctgcattcgcatggtcaacaaca

SEQ ID NO: 27487 - DNA, 408 bp, Zea mays
  unsure at all n locations
  Clone ID: LIB3180-017-P2-M1-A12
cggctcggcctgaccgtaccggaattgaattcccgacccaacccacgttattgctttaacacggatggctaacatggtggttgancttgacaagacggcgggctgctccaatcatatttgcagtaaaattttgactggattgagtgggacaccaaggccctaacgaagcgtgatgcattagaaaatgtttaccagtgggcatttggtcgaccaacattactacaggatcgtggtagggatagtgatgatgaacactttcgagatagggactatgatgtggatggacttgctaggaatttaaggccggcgtttaaatattgcatctactagtacgatgatattgaccaggctcaagcatcacttgagcgggatgatcaggatnnanattttgatgatgaatctgaacaa

SEQ ID NO: 27488 - DNA, 201 bp, Zea mays
  Clone ID: LIB3180-017-P2-M1-A4
tcttttacaaatgacaccacgggaacagcatttacttgcaaaagagagagcgagcgaacaaaaggaacgcaacaaatggggggggaataagaattttccggccaggggcggccgtttcctttggggttgcccttgaccttgttgttgttcttcctcctgggctgttccggaacttggggggaatggagaacgtccggggag

SEQ ID NO: 27489 - DNA, 356 bp, Zea mays
  Clone ID: LIB3180-017-P2-M1-A6
caaaaccctaaccccgcggacccacctggcggcggcggcggcggcgatggcggaccgcggaagaaaaggaggacctcctgcggcgtcggcggcgctcaaggaccaggggaatgagcagttcaaggcggggagctacctcaaggctgccgcgctctacacgcaggccatcaagcttgaccccgacaacgccaccctttacaggaaccgagctgcagcattcctgcaattggttaaacttagcaaagcgcttgctgatgcagagacaacagtcaggctggagccacaatgggagaagggtcattttaagaaacgttgtgttttggaggcaatggaaccctatgaagaggcgaaaggtg

SEQ ID NO: 27490 - DNA, 386 bp, Zea mays
  Clone ID: LIB3180-017-P2-M1-A7
tcgggtcttacaaagagcacgaatgaagcaaggatcaaggaaaaccttgttgcttatgaatcggcaatttcagatgacctggttgcaaagatctgtgagattaagcacgctaggcttcttagaggcaactttaatgcgaatacatggagcgtttacaagacccaataagagctctgggatggtgaactttaagaaggacgccggtggacgaactgactgctgagcaaggagcaagcagcggtgcattagggcccgtcagatcatttcacctgcaaagttgctcttttgaaatgaagggtcaatgctcggaagctctggtgccatcctgtatcacgaactattgagaaatttatcggtgattgtactttgtgctacgggatgtgctg

SEQ ID NO: 27491 - DNA, 233 bp, Zea mays
  unsure at all n locations
  Clone ID: LIB3180-017-P2-M1-A8
tncgnccgcatgcccgatcccgctcgctcgccgncaagtggccaagagctcggatcggcttataccttggcgaaaatgagagagatcttgcacattcagggagggcaatgtggcaaccagatcggtgccaagttctgggaggtcgtgtgtgacgaacacggcattgacactacaggtcggtacactggcacttctgaccttcagttggagcgcgtcaatgtctactacaatga

SEQ ID NO: 27492 - DNA, 137 bp, Zea mays
  Clone ID: LIB3180-017-P2-M1-A9
tctttcttttcgtacaccgtcttcctctttctttcaataataaaatgagaatgaggccaccagtgggaaaccaagggaaaatgggaaaggagcccaagggaaccattccgccgccgccggcccgcaagttgaagaaa

SEQ ID NO: 27493 - DNA, 410 bp, Zea mays
  Clone ID: LIB3180-017-P2-M1-B1
tcgattttctgcagcttccttctcgggatgtttcaaagcccttgattattccaatctgcgatgttataaagtctcagtcaacaggacaattggcagcttatggaaaattggaaactggagccatccaaattggttctaaggtgttagttctaccttctgggcaagaggcgactgtgaaagccattgagcgggactctaattcatgcaccgtagcgagagctggtgataatgtggcaatttgtttacagggtattgatggaaaacaactaatacctggcggggttctttgtcaccctggattccctgtgcctgtagctaaccacttggagctgaaggttctagtcctggacatcactactactatttttgttggctctcaagtggagctttacatacatcatgtgaaggag

SEQ ID NO: 27494 - DNA, 404 bp, Zea mays
  unsure at all n locations
  Clone ID: LIB3180-017-P2-M1-B12
tcttaactagcaacatagaaagcgcaatagggtaccaacaatggcaggcaaaatattttggctccttatgctccttgggctttttgcaagggctggtacggggaccatttttcccgaaaggttggaaggttctatagctttccttttttccccgtaccttttaacaacgggggctttgggattgggaaaacccaatttttaacccttcaggattcaacaagcaattacaggtggcattttacctttatcacccttgttccttcaacaatcatcagccctattacatcagntacctttggtgcatttattggcacaaaacattagggcacaacaactacaacaacttgtgctagcaaaccttgctgcctactctcagcaacagcagtttctttcattcaaccaac

SEQ ID NO: 27495 - DNA, 323 bp, Zea mays
  Clone ID: LIB3180-017-P2-M1-B2
cccttcgcttaaatttggggccctttgaaaaaagggcactttttcttaaagattatttacggggggcctgtccagttccggggccttgttgaacccgttattgcttgcttccgggggggccttaatggtcagtaactgttcaacaactgttggtttggaatctaggaaatgggcaccacgcttcgattacattttgacccaacaggcgtttgtgactgttgacaagaaagcaccgatcaaccaagacctcatcagcaacttcatgtctgaccctgtgcacggtgccatcgaagtctgtgctcagctgaggcccaccgttgaca

SEQ ID NO: 27496 - DNA, 282 bp, Zea mays
  Clone ID: LIB3180-017-P2-M1-B4
ttataatgcttcaagctgtaaaggaaaggaaggcaaaggatgggaatgcatttgctcgtgaaatgctcgatgaacgaacgaagaaggccgaaacatggcaccataatgctgccaaccgtgtggcatattccaaaccagctgatcctatcacttgtgcaacatttgctcaagatgtcattgaaggtagagcaagcgttttacaagcttacgagcacaaacaccaagccctggtatttggacctggaaggattggtgggggtggtctaaccaggggaaggggaa

SEQ ID NO: 27497 - DNA, 376 bp, Zea mays
  Clone ID: LIB3180-017-P2-M1-B5
tcggtgaaagcggtcagaattggagtgcactcgacgcgtcgagccgagcggtcgaagtcccattccgttcccggcccgagggccgagcctcgaattgagatatgatggggctgccaagcccgatgaatagtacaagataggggagactgtcactggtgcaacattggctgaagatgtcattgaaggtagagcaagcgtttaacaagctcacgagcacaaacaccagcccctgatatttggacctgcaagtattgttggtggtggtctaaccagtgaaagggaaagaatgacagctcaagttttttagcctagcttcaggatgccaacaatgagcattgaagaagctggattgcgcgagattaaaatgattgagaaa

SEQ ID NO: 27498 - DNA, 318 bp, Zea mays
  Clone ID: LIB3180-017-P2-M1-B6
ccgcgtccggccgtccgcttccctttccttggataaccacgggacccggccggccggccggcgggaagcgaaagcgaagcgagcaaacccagccatggagaaggcgatcgatcggcagcgggtccttctggggcaccttcttcccttcccctccggcggcttcttgcaagcttaacttgcggcgtcggcgtgcgcggccggggacagcgccggctaccagaggtccttcttcttcggggacgatgtcgtcgtcgtcgctggctacaagacgccgatatgcaaggccaagcgaggaggcttcaaggacacctacccaaa

SEQ ID NO: 27499 - DNA, 365 bp, Zea mays
  Clone ID: LIB3180-017-P2-M1-B7
tcggtcactcaacacagcacaggcagttcgagagagagagagagagagagagagataaatatgtcgtggttcgggcaccaccaccacaaccagccggctcccccggcgtcgggccccaaccaggtgttcaagatcttctgccgcgccaacgagaactactgcctggccgtacgcgacggctccgtcgtgctggccccggtcaaccccaaggacgaccaccaacactggttcaaggccatgcgctttaacaccctttttaaggtcccccttaggcatgccgtctttaaatgcttgtctacaaggccacgccactcgccatcaagcactccctctggctgtcccacccgggcaagctcgcgcctttc

SEQ ID NO: 27500 - DNA, 148 bp, Zea mays
  Clone ID: LIB3180-017-P2-M1-B8
tcggggggtgactgactcaagagaagggcctggtcataggctgctgcattatgaatttctgatcatgtcttatgtctgtactctgaatcaactatgtatgagatctcatctcctttctcctactgaatgaatgaatcattattggctt

SEQ ID NO: 27501 - DNA, 186 bp, Zea mays
  Clone ID: LIB3180-017-P2-M1-B9
tcggctacaacacacacacacacacatgcataatggttggtacatggtaaaactatagcaagctaaagtcgatcgctcggctataggctgaccactattaccaagtccaacttcattggttcttggcttgtagatagaccggccagaattaaaaaacttgcttgcttctaaatatattattaagag

SEQ ID NO: 27502 - DNA, 291 bp, Zea mays
  Clone ID: LIB3180-017-P2-M1-C1
atctaacaatacaagccatcacaacgcaacagcaacaacaggtcctaccagcactgagccacctagccatggtgaaccctgccggctacttgcaagagcagctgcttgcattcaacccacttgctctggcgaacgtaggtgcaaaccagcaacaacaacaggtacaacaggttctggcaacgctcaatcaactagccatggggaaccctggcggctacgtacaacaacaacaactggtttcatttagcccgctcgcttggggcaatgcgcctacatacctggaacaacaat

SEQ ID NO: 27503 - DNA, 279 bp, Zea mays
  Clone ID: LIB3180-017-P2-M1-C10
tcggcaaggcttgtctgctgggggcatatgataaccagtcctccgtgagagaaagaagccatggcggccgcactctgagggctcaaaagatcgtcaagagatgtccatcctgtgcaactgacatcagcgacttcctagcggatccacagatcaaccgagacataatggatgtgattgagtcactgcaacggaaaggcgacaccaccaccaaggacgacgctgcttcatatggatatggggctgacaaggccgaggaattccgtggtggtgacctgcaag

SEQ ID NO: 27504 - DNA, 157 bp, Zea mays
  Clone ID: LIB3180-017-P2-M1-C11
tcggctccctgttgaccattgggtattctgaaccatcgagccatggctggcaagctgactcgccttcacagtcttcgcgaacgccttggtgccaccttcttctcccattccaatggactggtagcactctttttcaggtatgttcaccaaggcaagg

SEQ ID NO: 27505 - DNA, 259 bp, Zea mays
  Clone ID: LIB3180-017-P2-M1-C2
aatcggaggcggccgccctttttggtttttttttagggggggggggaaacacccgccctttgctggattttgggaccaaggcgaccggtaaccaggattcaatttccaggagtgggaaatttcctttttttccaaatttttttggggttccagaagctcccaaattgtgggagaagacaccatgccagggcattattgttacttacactgaacgccaaatccaacacatgtaagttcttggcggaccactaaattttta

SEQ ID NO: 27506 - DNA, 155 bp, Zea mays
  Clone ID: LIB3180-017-P2-M1-C3
acattcacaatgtatgagttcgacgcttcagtcaatggtgcacttgttatcaaggttccaagactgcccgatttttccctagatgttgatctcattgtcgaagtggttgaacaggaaaggccaaaatgcatatttctgacatccccaaataatcc

SEQ ID NO: 27507 - DNA, 175 bp, Zea mays
  Clone ID: LIB3180-017-P2-M1-C4
tgtttgtccaccaggcacctttaaagggggaatccggtggcaccattggggcgccatgggggcccaaaaaattttccctccttttggcccttggcttttttacaagggggggtaacccgaaaattttccctcaatgtttacaaggttctttagtttccctttttcccccaaacct

SEQ ID NO: 27508 - DNA, 402 bp, Zea mays
  Clone ID: LIB3180-017-P2-M1-C5
gatgcacactacaagcagaaggtgacagaagagagggacaaacttgttgaggtcaccaaagagttgagcgagttgacacaaaaagtaagcgagagtattgaattggagaggaaggtgcaggaccttgagcagaagctgcagctagcttattccaagtctgacgaacaggcagtggatactgtggagtcgagatcccgtgaattcagcctggattcatcaacgacttcaggcaagcagcaagacaaaactcaggctgtctcaccaaacccaaccctgcaaggagtgcaagaaccttccggcatcatggccttcaagttcatcctgggagttgccctgctgtctgtactaatcggcgtgtttcttgggaagcggtactagcgctcaggtcgtgctgaaagggct

SEQ ID NO: 27509 - DNA, 275 bp, Zea mays
  unsure at all n locations
  Clone ID: LIB3180-017-P2-M1-C6
gcgcccgttgttgtatcttgtcactgatcagtgttgtttgctttgctttgccgtgctaatggcgcccgctccatgtggccgttcgtcgcaaagggtgttccacttcggcaagggcaagagcgagggcaacaagaacatgaaggagctgctgggcggcaagggcgcgaacctggcggagatggcgagcatcgggctgtcggtgccgacggggttcacggngtcgacggaggcgtgccagcagtaccaggaggccgggcgcgcccttccgacggggc

SEQ ID NO: 27510 - DNA, 223 bp, Zea mays
  Clone ID: LIB3180-017-P2-M1-C7
tcgtcgtgcagccggcggcggcatcggggacatggtggccacgagcgatcggggggggctagtccgaaactccggcgagcaggtgaagatcagcaacgctgaggcgagccctaatgacatctacttgtacggctcatggtgcccgccatgcaggaggtacacgcccaagcttattgaaatatacgaaaaactggcctcacactgcaagagcttcgaggttgcc

SEQ ID NO: 27511 - DNA, 407 bp, Zea mays
  unsure at all n locations
  Clone ID: LIB3180-017-P2-M1-C8
tctgccacacacaagatagcaaggacggcggcgcggagctagggttttgatccgccacgccggctaagctgcaccattccgacgaagccatggagagggagctactggagacgttcgatgcggccaagaaaggcggncgacgctacggcaggacagggcgactcgccggaggctggccgctgnctcgacgcgctgcaccggctgcgcgacatacgcgtaaacaccgacatnctcgtcttcacgcaagttggcaaacgtcttcgacctcttactaagcaccctcactcgggcattcaggcagtcgcatcagacctttttgggtactggaaaaaggttgtccttgaagagacaggaaagaaaaatgggagctcagagaatgaaaaatcaatggactcttcaggaaaggt

SEQ ID NO: 27512 - DNA, 54 bp, Zea mays
  Clone ID: LIB3180-017-P2-M1-C9
tcgcaaaccctgccctggcaccggcggcgccatggtgcttgaggcaacgatgat

SEQ ID NO: 27513 - DNA, 407 bp, Zea mays
  unsure at all n locations
  Clone ID: LIB3180-017-P2-M1-D1
tctttttggggccttattaaaagtttaactttcggtttgaaaggttaaggggggggctttccgggggttaaaaaggacccccgggttcaaaaaaacggttgggccggattaccaggtggccatggccggggctgagatggttcagaatcagaacaccattccggccttcccaatcccaatgccgttgaagttgccactgcccgtgccaatgcaaatgcattttcccatcttgcagatttgccatggacccggtggccnctactaccccaacccaaatgccggcgcggngatgatgccgnctatggcattggcaggtatgggtggcgccggcgggctccagatcaacggcgctctgttcggcaatccggtgcccgcgccgctgccgatgaacttctaccaccaccaga

SEQ ID NO: 27514 - DNA, 231 bp, Zea mays
  Clone ID: LIB3180-017-P2-M1-D10
tcgttcacgcgcgcgaccgacttccccggggtcaccgactacactaccggggtgtgctactaccaactctcgaaaccctacccaacccatgagagatcgatcgttcgggcccgaattacccagccgtgagcggaggtatcggtcaccgccattggcactaggaaccccgagccgattccacgccgtcaagacgtagttgagcttgcatctgccaaccccatttttctttca

SEQ ID NO: 27515 - DNA, 139 bp, Zea mays
  unsure at all n locations
  Clone ID: LIB3180-017-P2-M1-D11
ngtcgttcaaccacaccaccccacaacaggggggcacactttacactaccggggggggacacaacaaaatctcgaaactcaacttcaaccacgggacattgaccggaaatgcgccaattccccatccgctagcctccga

SEQ ID NO: 27516 - DNA, 373 bp, Zea mays
  Clone ID: LIB3180-017-P2-M1-D12
cgcaaattgcaccaagaaatccatcgagaggccgtcgacaggggaattaatggcgtcgtcgtctagcagcagccaccgccgcctcatcctcgcagccgccgtcctgctctccgtgctcgcggctgccagcgccagcgccgggacctcctgcgtgccggggtgggccatcccgcacaacccgctcccgagctgccgctggtacgtgaccagccggacctgcggcatcgggccgcgcctcccgtggccggagctgaagaggagatgctgccgggagctggcggacatcccggcgtactgccggtgcacggggcttagcattcttattgaccgccgcgatcccgccgggccccggacgcgcagcttgagggccccc

SEQ ID NO: 27517 - DNA, 386 bp, Zea mays
  Clone ID: LIB3180-017-P2-M1-D2
tctgcaataacggcgataacccagacctccacgggactggtcaccatgcttcggtccgctcctaaccaaaggctcccaaccattcttcgatggacctgacctcgccgtaacacgacttgatctactactcactaatggggcgccagctaagcgaagaacttgaccatatgcaggataggaacacgctacaacctgtctgctacctaattttcgtcacatcggagtgcactgcacggccagtatgccaccaaggccgtcgacaacagcgggactgttgttgggatcaagtgcaaagatggcattgtcctgggtgtcgagaagctgataacctcaaagatgatgctggaaggatcaaaccgaaagatccattcggtgcaccgtcactc

SEQ ID NO: 27518 - DNA, 174 bp, Zea mays
  Clone ID: LIB3180-017-P2-M1-D4
acttccgttttggtgcttgatgccacaaggggggaaaataaaggcccaagtggttaatgggtcaacttccacttgggagattttggaaatagtagaatagagtttttgttttgtcaaaaacttttattggctcttattggctctattggcaaaaggtgggtttttttggggaga

SEQ ID NO: 27519 - DNA, 93 bp, Zea mays
  Clone ID: LIB3180-017-P2-M1-D5
tcttatgaaagagggggtgaagccaaaggggggggaaataaaagccaaaggggggaagggaacaactaccacttgagagaatctgaaaatagg

SEQ ID NO: 27520 - DNA, 365 bp, Zea mays
  Clone ID: LIB3180-017-P2-M1-D6
tcgcggacgcgtgggtgctctcatctgcgtacacggtctccctctttctgtcagtagtagagtgagagtgaggcaaccagtgggagacaaggggaaatggggaagggagcgcaagggaacgatgcggccgcggcgggccgcgaggtggaagaaaacatggcggcgtggctggttgccaagaacaccctcaagatcatgcccttcaagctcccgcccgtcggcccttatgatgtccgcgtgcgcatgaaagcaggggggatttgcggcagcgatgtgcactacctaaaggagatgcgcatcgcgcacttcgtggtgaaagagccgatggtgatccgtcacgagtgcccgggcgtggtccaggaggt

SEQ ID NO: 27521 - DNA, 371 bp, Zea mays
  Clone ID: LIB3180-017-P2-M1-D7
tttctcacacagaaaaccctatccggcggcaccgaagcggactaccaggtaagcaggatcggccagcccgccggcgtcatgaagcgcaatcacccgcgtcacgagcttccgccggaagtgccgcaaggcgcactttacggaccctgtactcacgacaccacgttctaatgtgcctgcagctgaataaatggcttcgtcacatgcccaacaagttcttcatccatttcccttatgacgaccaggtgcactatgaacgtattgtctttttattggccattttttgcactattttaggtatattttcttcctttatttttttatgaaattatacgttgatgattggttactaattaacttctttctttttttgt

SEQ ID NO: 27522 - DNA, 357 bp, Zea mays
  Clone ID: LIB3180-017-P2-M1-D8
tcgcccacgcgtacgcccgtcttccccttcctcgccgcctacactacagggctttgctcctcccaactctcgaaaccctacccacccgatgagagatcgatcggtcgagcgcgaattccccagccgcgagcggggggatcggccgccgcccggggtgctggggcccccgcgccgcgggccggcgtacaagacgaagttgtgcgcgctgtggcagcgcggcggctgttcccgcgacacatgcagcttcgcgcacggacacgccgagctccgccggttccccggatcgcgcacctcgttcccaccccgcgccgggagaagagattatagagctggtgactttagagataggttcgatag

SEQ ID NO: 27523 - DNA, 97 bp, Zea mays
  Clone ID: LIB3180-017-P2-M1-D9
ttgttcgtgggcgtgaacgacctcttcatgatcacggattacattacctggatgttcaagtacgaaaccttggaacgccaatggaaggacaagggaa

SEQ ID NO: 27524 - DNA, 404 bp, Zea mays
  Clone ID: LIB3180-017-P2-M1-E1
tcgcttgcacccgtaaggggggaccaaatttgcggggccgaagcgccacaaaagccgggttgaattccaccggatttcaaacacccggggggaacccccaaccgggcaattcttcaaacgttattagttaaaggcttggattggattaataagcaataaccagaagggttaaaaaatgggggttttgcaacaatcaatcggttcaaaagtcgggaaaaggaactttgtttaaagacagtttgttgacatgtctcgcataagaattgaaggattacttgctgcgttcccgaaactggttggaactgggaagcagcacacttatgtcgaaactgaaaatgtgcgatatgtttatcaacctattgaaagtttatatcttctacttatcacaaacaagcagagcaata

SEQ ID NO: 27525 - DNA, 219 bp, Zea mays
  Clone ID: LIB3180-017-P2-M1-E10
tgtcggctggacatcgagtttgtaccgggaaacagcttggtagtataaccactgaagatggtcagtgggaggccgcatggtgaattggactcatggttcaagagcctcatggtgacctctagcagcgagagggggcaggctgggagtggtggtccagcgccaacattaacaggatggaaggacctttcgatggagcttctggtgcggataatatccaca

SEQ ID NO: 27526 - DNA, 327 bp, Zea mays
  Clone ID: LIB3180-017-P2-M1-E12
tctgctgctcggacgacttcgaggctgtgaggtggctcgcgaacaagcacggggtcaccgtgatccccgggagcgccagcggaggccccctgtacatacaaatgtccttcagggggctcaaggtagaaaacaccaagctggcttgtgagaggctcacacgcggtctgcaagagctggttaccgctggaacggtgaagtgaccgatacatagctgttaggtaaagcttcaattttgcaacactgctaattgcccctggatttattcgtggtgctattagcgcgctatgttgctcgcttgaaggatgacaaccctcttttcgggtcttt

SEQ ID NO: 27527 - DNA, 145 bp, Zea mays
  Clone ID: LIB3180-017-P2-M1-E2
tttttggggctggccagggtaagtttttttgctttggaaaagttttcttacgcaggaccaaaattttagttttagacagggcaacagaatccatggactttgcaacagatgcaatcctgcaaaaggtaataaggcagaagtttta

SEQ ID NO: 27528 - DNA, 400 bp, Zea mays
  Clone ID: LIB3180-017-P2-M1-E3
ttgtcgccgaatccgagactctgatctcgggttcaccgcagcgcacagagcacccctgactcccggcccgatccgcgctctcctctccgacgcttcagtcatggcaggaatggcacccgagggttctcagtttgatgctaagcactatgattctaaaatgcaggagctgctgagcactggtgagactgaggagttcttcacttcatatgatgaagtttttgaaagttttgatgacatgggccttcaagagaatcttctgagaggcatttatgcatatggttttgagaaaccatctgcaattcagcagagaggaattgttcccttctgcaaggggcttgatgtcattcagcaagcacaatctggtacagggaaggacagaaccttctgttctgggatcttg

SEQ ID NO: 27529 - DNA, 300 bp, Zea mays
  Clone ID: LIB3180-017-P2-M1-E4
tcgtatgcatctgctaagaacaagttatccaggtgcccatatcggaccagagccaaccattggctttgcatcaaaatcactacttgtcagcaaaggggaaacgaaatcattgaacttgtatgtaacttccaaaggcttcaacttttcgatgtaaaggtttttcaagccatcgataacagaagtgacggctgtcagaggtatcttctttgatgactttgagctaaaccatttgtttgttaaaggagattgttcctgaggatatccatccatttctggatcaacacgctacaccaaatgctt

SEQ ID NO: 27530 - DNA, 217 bp, Zea mays
  unsure at all n locations
  Clone ID: LIB3180-017-P2-M1-E5
cgttcggtccnttctaaaatgtacaaagggattagggaccattcaagggcgcttgggggtgtattaaaagaaagtggtaaaagcttggaagaacttaaaagaaaatattgatagggttaaccaaaaggtgaacactattcttaattggggatttcaaaaccgcaaaaaatatttttccaacaagaaggaccggctttcaagttaattgaattggttt

SEQ ID NO: 27531 - DNA, 291 bp, Zea mays
  Clone ID: LIB3180-017-P2-M1-E6
cttgtgcagatatcctcctccttgatgtggctcctctcaccctgggtattgagaccgtcggtggagtcattaccaaattgatcccgaggaacactgtcattccgaccaaaaagtcgcaagtgttcaccacctaccaagaccagcagaccactggcttcattcaagtaaggacgcgcattctggttctggcttctttggattggcagctgggtgcttggtagtaatatgaccttgttgttttggcttgggatccaaacatacaagtctttgggggtgagcgcaacatgacca

SEQ ID NO: 27532 - DNA, 331 bp, Zea mays
  Clone ID: LIB3180-017-P2-M1-E7
tcttcccgtcatcgatctcgtttcaaatccatccatcctcgtttcctccgtgccgcaacatctcaaccccatggccaagatcaagatcgggatcaatgggttcggcaggatcggaaggctggtggccagggtggccctgcagagtgacgatgtcgagctcgtcgccgtgaacgaccccttcatcagcaccgactacatgacctacatgttcaagtacgacactgtgcacggacagtggaagcaccatgaagtcaaggtgaaggactccaaaacccttctctttggtgagaaggaggttgctgtgtttggctgcaggaaccctgaggagatc

SEQ ID NO: 27533 - DNA, 315 bp, Zea mays
  Clone ID: LIB3180-017-P2-M1-E8
gttggatatacctctgtatgtgagtgaggccaatgagagccctcgtaggcgtgaggttcgcttaggcgtgcttgctgctgctgttgcagcttgcaagagcgtcgcatgtcgtctacaactacaaggacctcgaagcccaggcttgttgggcgacggaccaggtgcccgccgacatcgtcaaccccctgctcaaggacgtgtaccactttcagccccccaagaactggatcaatgatcccaacgcgcccatgtactacaaggggtgggaccatttcttttaccaatacaatcccaagggcgcccgttggggcaaca

SEQ ID NO: 27534 - DNA, 350 bp, Zea mays
  Clone ID: LIB3180-017-P2-M1-E9
gctggatatacctctgtatgtgagtgaggccaatgagagccctaggagggggggggttcccttcggcgggcttgctgctgctgttgcagctcgcaagagcgtcgcatgtcgcctacaaccacagggacctagaagcctacgctgctactagaacagaccaggtgccgacgtccatcctcaaccccctgctcaggacggtcttccactgacagcctccctagaactggatcaatgctcccaacgcgcccatggactacaaggcgtggtcccattttttgtaccagtacaaacccaagggcgccttatgtttctacatcattttggcccacataggagtagtttgaatcttt

SEQ ID NO: 27535 - DNA, 367 bp, Zea mays
  unsure at all n locations
  Clone ID: LIB3180-017-P2-M1-F1
gttttccggggaagttggggtttcgttcccttttggccctccgacggttggttggaagccggcgccggcgccgccaaacgctaggtgctgaggccttcgccagtgtcttcgacggcgacgagcacgtaccagcatcatgtcggaaagaggtcgcctggcaggacgattgattgatacccgcagcaaagggtaccatgtagtccctctagttgaggatcccagaggccattctgaagtcctcgtggatggggatcggaggggctactctgacattcgtggngttcagcaacgtcggngctaccctgacacccatctgcttgaggaacctaggggctaccctggtgttcgtgtggtcgaccataggggc

SEQ ID NO: 27536 - DNA, 400 bp, Zea mays
  Clone ID: LIB3180-017-P2-M1-F10
atccggagcagccgcagtcccaccgaccccgccgccggtcggcctgcatcttctcgccgctgcctctcgtttctcttttcaataatcaagatgagccgtggtggtagtgccggtggtggtcaaaggtctctgggttatctctttggaagcggggagccccccaaaccagcagtggcaccagctgcaagtgctccacctgttgagaaaccatctgctgcaaagactgatgcggccaagcaggttgctgctggggttaccagccaaaccaataactaccacagggctgatggtcagaacactggcaacttccttacggaccgtccttcaaccaaggtccacgctgcttctggcggtggctcttccctgggctaccttgtcggtggcaactgatgcccgtgct

SEQ ID NO: 27537 - DNA, 61 bp, Zea mays
  Clone ID: LIB3180-017-P2-M1-F11
tcggtcgtcccgtcctccgctgggcatcgaaagtcgaacgccttcccccttccttccttcc

SEQ ID NO: 27538 - DNA, 53 bp, Zea mays
  Clone ID: LIB3180-017-P2-M1-F12
ccctttttccgagcgcccgaaaggggaaggaaagggaaaagaacgccttttgc

SEQ ID NO: 27539 - DNA, 259 bp, Zea mays
  Clone ID: LIB3180-017-P2-M1-F3
gttggattctcctacagctgcagatatgcgtcacactggaaaggttgtaaactgaactgtaagatgggatgagcagatctttaccgtgaggaaaaatggtacatgccgatgcttgccgagcaggcatagatgtaccacgaaatggcagcttttatggagaaggcttcgaaaactgttgacatggctgagctcactgaggatgaccgcaacctacagtctgatgcatacaagaacgtcattggagcaccttctgcctgat

SEQ ID NO: 27540 - DNA, 275 bp, Zea mays
  Clone ID: LIB3180-017-P2-M1-F4
tgggctcaacgaccaaaagggcgacggggggggggtcaaaaggggggaccggttttcctacaaattctttcgccggtttctttacatgttcggcaacgttgtgatggacattccccacgcgctggttgaagagaaacttggaagcatgaaaaaaggcaagggggtgaaaaaacgaaacgaccttaccggcaccgggcttaaagaggttgggaggcaagaccagggcctttaccttggggcttaaggagaggcatttcccttagaacccaagaagc

SEQ ID NO: 27541 - DNA, 310 bp, Zea mays
  Clone ID: LIB3180-017-P2-M1-F5
tcgttcgatcatcggaccacctgtagcccacctcgctctcgagtctcgacccagcgacgagatggccgcggtggatctgaccccaaggacgcccaagaagggctacgggggcgacgggggggcctactacgaggggaggcccggcgacctggccatggttttcggcggcttcattggcgccggcaaggttttgcttggcggcggcgggcttttccttcccaagtacttcgacttcggcaagggcggctaagtgctacaaggggcgggcacctgggggcttggtctggccgaggggacgaaagagaagggg

SEQ ID NO: 27542 - DNA, 406 bp, Zea mays
  Clone ID: LIB3180-017-P2-M1-F6
cagtaccattagctttatctactccagagcgcagaagaacccgatcgacaccatgagggtgttgctcgttgccctcgctctcctggctctcgctgcgagcgccacctccacgcatacaagcggcggctgcggctgccagccaccgccgccggttcatctaccgccgccggtgcatctgccacctccggttcacctgccacctccggtgcatcttccaccgccggtccacctgccgccgccggtccacctgccaccgccggtccatgtgccgccgccggttcatctgccgccgccaccatgccactaccctactcaaccgccccggcctcagcctcatccccagccacacccatgcccgtgccaacagccgcatccaagcccgtgccagctgcagggaacctgcggc

SEQ ID NO: 27543 - DNA, 229 bp, Zea mays
  Clone ID: LIB3180-017-P2-M1-F7
tcggcgctcaactggtgcctcgccaacgtcgtctccccggcaggaggcgacacgctggtgctcgtccacgcccgccgcccgcgcccggtctacgccgccatggacagcgcagggtacatgatgacctcggacgtgctggcgagcgtcgagaggcacgccaacgcggtctcggcggcggcggtcgacaaggccaagcgcgtctgcgcggaccatccgcacgtcaaggtgg

SEQ ID NO: 27544 - DNA, 209 bp, Zea mays
  Clone ID: LIB3180-017-P2-M1-F8
tcgcggacgcgtgggcggacgcgtgggcggctgtgctcggcggcccctgtgttgatgtgcgctgctcaactgctgtgcccagcggccgacacctatgcggctctcctttgctcgacgtcgagttcgtccctgatctggctcaacgatttactggtttttatgccgatgctaaatagttggcgagggagaatttctcaacaatgcttgaa

SEQ ID NO: 27545 - DNA, 397 bp, Zea mays
  Clone ID: LIB3180-017-P2-M1-F9
tctgttgaatgggggcttaggtcatggactgaggaatatgagcttggacaggggtagttctggcaggtcgtttgggcatgcaaaccatcaacaaagttttgtttctaatcctatagagttggctgccaatggttggggtggcacatggagttctggaggtacatcatcttcccgtcctgtggtgtcatcatttggggcgtttagagggtggagttcattcgagtcgtcccctgcattgcctcattctgattggagagccaatggggcagcaccttatgactacacctcagtagactggagcctggacaccacgttattgaacccaacaacaaagagcgagcggctgtcggacacattgtcaaccatgttcattggtggcagatcaacaaggacacct

SEQ ID NO: 27546 - DNA, 362 bp, Zea mays
  Clone ID: LIB3180-017-P2-M1-G10
gttgatatatatagcgagcgggcccccctttgttttttttttttggggggggggggttttggaagcaactgacaattttgcaggggttcattaccacatgatatttttattccccttggggcttttttaatggcagggattttacaaggcgcatggaggacattgggagaatcattgataggttaatattagggggaatttatgtcatgtgatttggggattaaattaccacaacaggcacttagaggacacacatttggggggccaaatattttcagcttgggaaactttgagaggaactggttcgacttccgcaaaaagcagcaggtttagcttgattgttaggaaagagcacctgcacc

SEQ ID NO: 27547 - DNA, 391 bp, Zea mays
  Clone ID: LIB3180-017-P2-M1-G11
ctaaaataagtcccatggaggcaaacttataaaaaaggtgggtcaaaatatggagggattgcttaaggcaggcattaataaaaaccggatgcactccatataaattatgcttcttcggagcaattactaatggttaaaaccaacaaataacatttcattttggtggtaggatgacaaatcattggtacttcattcaattcggcaaccttaaacaccatttaatccattgggccaatggggtcttaaaaacgatctaatgtttgcaagaaccaaaaacgtcgtgccgtgcttgggctgtagcctcaacccggaatggttggcccgcccgacacgattatttttttattttacaaaaaaacatatatacctatatacaatttatattcaatat

SEQ ID NO: 27548 - DNA, 139 bp, Zea mays
  Clone ID: LIB3180-017-P2-M1-G12
tctgagaccaacccttaggacctcggggggatgcacccggctgtcgggatgctcacaaaaaggggtggcatgaactcccattgccccgtggtggcacgcgggtggggaaaatgctgtgtctcgggatgctctgggattc

SEQ ID NO: 27549 - DNA, 367 bp, Zea mays
  Clone ID: LIB3180-017-P2-M1-G2
aaatggcccggggcacaattcggtggttccccattgggaaacccttcaaaggcctggattttcttgttgtttcgcttaaccggggttttttccgcccgggcgggggaggaaccccccccccggggggagggcaaggccggcctaaccttgaacgtgaaaagtttcaacaaggccgtggccaagaaccctttaatggccgtggagttttacgccccttggggggggcactgaaggaaactggttcaaaagtatgagaatgcggccaaggcacttagcaagcatgacccaccgattggtctcgctaaggttgatgctaacgaggagaagaacaggccgcttgctaccaagtacgagatccaggggttcc

SEQ ID NO: 27550 - DNA, 384 bp, Zea mays
  unsure at all n locations
  Clone ID: LIB3180-017-P2-M1-G3
ctttgatgaggagaaggatacttcaacgagatgtggagatagaggttgaagcagttgataggacaggaacgttcataggttctttgtgggagtccaagaccaacatgggctctgtgcttctggaagctggacttgccaagctgagttcatttggcttggataggacctcagatgcttatatcctaacaagagctgaacagtctgcgaagcaacagaagattaagatatgggagaactatgtcgagggtgaaaatgcttccaatggatccacacctgaatctaaacaaaagcaaattctcaaggttgttgtcaccgaagttcttggtggtngtgagntttatgttcagacaatgggtgaccacgaggtggcttcaatttaacagc

SEQ ID NO: 27551 - DNA, 403 bp, Zea mays
  unsure at all n locations
  Clone ID: LIB3180-017-P2-M1-G4
gtttgttaatgaaaatcaagagcatagttcatccaatgcactgctcatgtctgaccactttgtgtttccgccgagtgagcacgagaacctgccaatacaaaccagtttcgatgagatacagcctgagaaggatgtgcagaaacctagtaccactgtggaggattatagtattaagaatgttgttgggtctgagagagttcagtttgatgatgaagggaaagacctctcagatgatgatgtggagatgagagatgacacacctgggtacggttcatcccacgctgaagatgatgcacatgggtttgttgttctcgatgatggtgttgagtccggtgaagattttgatgaaaaatcaggccacccttcagatcctgcagacagcangagctgtgatactggcgcc

SEQ ID NO: 27552 - DNA, 233 bp, Zea mays
  Clone ID: LIB3180-017-P2-M1-G5
ccttgcaaggtcaatctcacctgcaaccatgggtaaaggggagggccacatcaacattgggggtattggccacggtgactctggcaagtagaccaccacagggcacctgagctacaagcttggaggcattaacaagcgtccgatcgagaggattatgaaagaaactactgaaatgaacaagcgggacttcaagttcgcaaggaagctaaagaaggttaaggctgagcttgaga

SEQ ID NO: 27553 - DNA, 406 bp, Zea mays
  Clone ID: LIB3180-017-P2-M1-G6
accgcgggacatcacgatgatgccttcagcaccttcttcagccagactggtgctgggaagcacgttccccgtgcaatcttcgttgatctagaacccactgtgatcgatgaggtgcgcactggcacgtaccgccagctcttccaccctgagcagctcatcagtggcaaggaggatgccgctaacaatttcgcccgtggccactacacaattggcaaggagattgttgatctgtgccttgaccgtatccgcaagcttgctgacaactgcaccggcctccagggcttcctggtcttcaatgccgttggtggtggcaccggctctggccttgggtctcttctccttgagcgcctgtctgtggagtacggcaagaaatccaagctgggcttcactgtgtacccatctcccc

SEQ ID NO: 27554 - DNA, 88 bp, Zea mays
  Clone ID: LIB3180-017-P2-M1-G7
tttcgttcaagccgcccaagtgccctacgtgcagcccttcttacaagcctgcgggggcttgaaaagaaacgccgtatgtaataccata

SEQ ID NO: 27555 - DNA, 200 bp, Zea mays
  Clone ID: LIB3180-017-P2-M1-G8
tcgggatgacgttagaaagctcaaggtcctggcaaacgcggatacccctggggatgcattggctgcacggaacaacggggcagaaggaatcgggttatgccggacagagcacatgttcttcgcttcggatgagaggattaaggctgggaggcaaatgattatggcttccacaggtgagctggggcaacaagcgcttgatc

SEQ ID NO: 27556 - DNA, 355 bp, Zea mays
  Clone ID: LIB3180-017-P2-M1-G9
tcttgccgtcgaaacgccagtgagaaacagggctcttaggcttacaatggaggcctgatccattatgcccttcatgccttcgctggacgtaacggcaaccgtagatgaagccatgtgaatgggaacatacaataacaggcatgatatgcttatgagaggttaccacaccataattacaaactcgctgttcatgccctaaataattatcaacctggtcagttctaatgtcaaggatacagagtatcaaaacaaaggattcttagtgattattgggataggaaagagttatctacacttaaactttcaaaaagtatgaagcggaaaaaccaacaagtttataaatatttcaaaaagg

SEQ ID NO: 27557 - DNA, 89 bp, Zea mays
  Clone ID: LIB3180-017-P2-M1-H10
tgttgccatggcgagggccaccccgtcaagctggtgccctacaaccccgggtgccaggacgagtcggtgctgtggaccgagagccgcga

SEQ ID NO: 27558 - DNA, 166 bp, Zea mays
  Clone ID: LIB3180-017-P2-M1-H11
tcgctctcgagtctcgtccacccgtcgtcctcctagctcctctactcgccagtcgccatgggcaagattaagatcggaatcaacggcttcggaaggatcggcaggctcgtggccagggtcgcccttcaaagcgaggatgtcgagcttcgccgccgcaacgacccct

SEQ ID NO: 27559 - DNA, 316 bp, Zea mays
  Clone ID: LIB3180-017-P2-M1-H12
tcgggtgctctgagagattctagacctgctgccgttcacattgttttgattacctgagaagatgcctttggaaattcaagatagtgaggttgacattgtgattgcggcacttcggcccaacctgaccactttctttgaggcatggcgaccatttttctcccgtttccacatcattgtcgtcaaagatccagacatggcagaggatcttcaaatccctgcaggttttgatctcaaggtttacaccaagtcagatattaatgggttggttggtgcctcctcatccataaacttatctggtcactcatgccgttacttt

SEQ ID NO: 27560 - DNA, 393 bp, Zea mays
  Clone ID: LIB3180-017-P2-M1-H2
cgctttaccaaaacagctcctcgcccaagcattctctctgcctcgggctcgcgccgcctctcatcttccgggagtcagcggcggcggaatatggcggggaaatccaagggtgggaagaacaaagggaaggcgcaagtcgtgggtcactccgcctcagctgagccagaggtgctggcgactgatggagccgaattggttaatccagataacggggaagtaagcgaacccggggaagtaagcgacccccctgccacggaggatggtgtggcagatgtagagaaaggagacggggatgctcccgaggttgtgcagtctgcaaaaaagccagctgaaggagagcttcatctgtaccctgttcctgtcaagacacaatctggtgaaaagctcgagctg

SEQ ID NO: 27561 - DNA, 398 bp, Zea mays
  unsure at all n locations
  Clone ID: LIB3180-017-P2-M1-H3
gatgacaccactcatcttcttctcccccgcctcgttttcatcgccaccacgcctttcttctgcggtccttccccgtnccacttccaccccctcgccttcgccttcactgcagctgccgccatgcagagcctcctcctgcccaccgctgccgtggccccggtggcggctccgtgcggaaggcggaatctcccgggacgcctctccgtccgcgccttcgcgacggcggtagcggcaccgcggcgggagacggatcccaagaagcgggtggtgatcacggggatggggctggtctccgttttcgggaacgatgtagacgcttactacgaccgcctgctagtcggggagagcggcatcgggctcatcgaccgcttcgacgcttctaaggtccccacccgctt

SEQ ID NO: 27562 - DNA, 389 bp, Zea mays
  unsure at all n locations
  Clone ID: LIB3180-017-P2-M1-H4
atcttctctccttttgctcggaacgcacacaccggccggtccccgatctccgatcccctcgtcgatccaaagatgcagatcttcgtcaagaccctcactggaaagactatcaccctcgaggtggagtcttctgacaccattgacaacgtcaaggccaagatccaggacaaggagggcattcccccggaccagcagcggctcatctttgctggcaagcagctcgaggacgggcgcacacttgccgactacaacattcagaaggggagcaccctccaccttgttctccgnctcaagggaggcatgcagatcttcgtcaagaccctcactggaaagactatcaccctcgaggtggagtcttctgacaccatcgacaacgtcaaggccaagat

SEQ ID NO: 27563 - DNA, 194 bp, Zea mays
  Clone ID: LIB3180-017-P2-M1-H6
ccaaaaaaagccgacgccgaccaacctacttaattctcgacccacccctttggtctttctttgtgtaatataccctgggggcgtcacattgtttgggggcctgagaagatgcctttggaaattcaagatagtgaggttaacattgtgatcgtgtgacttcggcccaaactaaacaccttgttacacgcatggtg

SEQ ID NO: 27564 - DNA, 263 bp, Zea mays
  unsure at all n locations
  Clone ID: LIB3180-017-P2-M1-H9
gtctacacaagcggnggggggagcaaaatctgcgacaggtggccggggctacttatacactccgatcgcccccgggagttactcgacttcgcttccttttccttcttccagattcggacccggcttcgggtctcacgcactaagcaaagatggcaccaccatccatgtgtcttgcggcaaagggggggcttcccttttcggaacttatttaaaggggggttacacaaaggccagggtcagggaccctttccttggggcccaaa

SEQ ID NO: 27565 - DNA, 67 bp, Zea mays
  Clone ID: LIB3180-018-P2-M1-A10
ctgcaaattaggtaattacagttgcaccttttgtattttatagcaaacccagacttctatttgattc

SEQ ID NO: 27566 - DNA, 362 bp, Zea mays
  Clone ID: LIB3180-018-P2-M1-A11
tttcttgtcctacggcttttccctccttgtccagccccgaaacactcactcagcccgggttcccaggcgcaaatgccgttcggtgatggggtccaccgcttggaagcggctgccttaggtgatggcgcagaccggtgacaagacctgcgtggactgagcgcagctgaacccgtagtgggcgagcgtctcctatggggtgttcatgtgcctcgagagctcatgcaagcacctgaggctcggggtgcacagtaacttcgtgcgctacgttacgatggcctaggggtactgggagcacctggggctgaccgtggactggggtgagcaccgagtctacgactttgtcacagatggtggaagtggta

SEQ ID NO: 27567 - DNA, 361 bp, Zea mays
  Clone ID: LIB3180-018-P2-M1-A12
ggcggcgatgcagtcgttgcgccccgtgaagcaggcgaagcagcacgtgtgcacgttcgcgctgtacgcgcacgacccgaagcggcaggtggagacgcaccactacgtcttccgcctcaaccaggacttcctccagtgcgccgtctacgactccgacaaagccgacgcgcgtctcatcggcgtggagtacatcgtgtcgaggaagatcttcgactcgctgccggcggaggagcagcggctgtggcactcgcacgcgcacgagatcaagtcaggcctgtggacgagcccgcacgtggcggggctgctggagaaggcggagctggaccacatggcccgcacgttcggcaagttctggtgcacc

SEQ ID NO: 27568 - DNA, 294 bp, Zea mays
  Clone ID: LIB3180-018-P2-M1-A2
ggcagaggcttctagatctactggcagctcgggagcaacaaagccgaagcgtctcgcgtgcgcggccgccaccggggattagggatggcggcgaagaaggtgctcatgctctgcggcgactacatggaggactacgaggtcatggtcccgttccaagcgctgcaagcgtatggggtgtccgtggacgccgtctggcctagcaagaagggcggcgacatttggcggaccggcgttcattaactgaccggtcaccaaacatactttgagacaaaagggcataatttcacactggat

SEQ ID NO: 27569 - DNA, 405 bp, Zea mays
  Clone ID: LIB3180-018-P2-M1-A3
cccgatcctgggccagtgcgtcgagttcctgaggcatcagtgcagcccgacggcgacgccctactgctcgcctcagtgccagtcgttgcggcagcagtgttgccagcagctcaggcaggtggagccgcagcaccggtaccaggcgatcttcggcttggtcctccagtccatcctgcagcagcagccgcaaagcggccaggtcgcggggctgttggcggcgcacatagcgcagcaactgacggcgatgtgcggcctgcatcatccgactccatgcccctacgctgctgccggcggtgtcccccactgaagaaactatgtgctgtagtatagccgctggctagctagctagttgagtcatttagcggcgatgatttgagtataatgtgtcacgcatcaccatgggtg

SEQ ID NO: 27570 - DNA, 218 bp, Zea mays
  Clone ID: LIB3180-018-P2-M1-A5
tctttcctgttcttccggttttcccttccttgtcaaccccggaaccactaactgggccgggtttccgaggggcaattccgatccgttgatgggttccaccccttgaagccgcttgccttaggtgatggccaagccgggtaacaagacttgcgtggactgagcgcagcgtaacccgtactgggcgagcgtctcctatggggtgtccatgggcctcgagt

SEQ ID NO: 27571 - DNA, 243 bp, Zea mays
  Clone ID: LIB3180-018-P2-M1-A6
tctttcggacataccatgaagttgcaaagctaggctttccttcaaaatagggggagtctttgaaggtagcaatgagggtaccagcaatggtaaaaggttctgggaattgaaggaccttggtatgccaattcttttgggacttggtgggccaaatttctagggtaacatctagacattttccaaatttggttgtccatgtgtaacttcttaacatagatgatagctactctaacctatagagtt

SEQ ID NO: 27572 - DNA, 411 bp, Zea mays
  unsure at all n locations
  Clone ID: LIB3180-018-P2-M1-A9
tcgcacaaagccgacggagcgccgcgccaccatgtaccggcttctccggcggagcttctccatggctgccgagggttccgccgccgccgcctcttcatcttcacccccctccaccttcatgtcctcgaccccggggcaacatctgccggacgagctgtaccgccgcatcatgaatgtcgggcgcccaagcatcccgttatcccccgtcctggagcaatggaatcaagaaggccataccggcaagaagttcgtcatccaggccattcgtaagaagctcgttggccttcggcgctttgnccacgcacttgagctgtcgttctggatgaccgaccgcaggcaccttcacctttcgggcgttgacgtttcgttccgggtgtgactaattagcatggtgcacggtcttgagaaagc

SEQ ID NO: 27573 - DNA, 100 bp, Zea mays
  Clone ID: LIB3180-018-P2-M1-B1
tcggttttccccaacaaaaggatattcctcccctttcttaaaaagggtggcaaggttgggctttttgcccccgcaacggggcaaattcaggggccaaacc

SEQ ID NO: 27574 - DNA, 156 bp, Zea mays
  Clone ID: LIB3180-018-P2-M1-B10
ttcctggaccaagggatgcgccgatgcactgttttatccggagggacaaagaaaattaaaccttttttttttatttaagtttaacgcaggccttacgggtaaagggaaagttcttttggctggtcgaagggtcaaaccaggggcacattccggata

SEQ ID NO: 27575 - DNA, 266 bp, Zea mays
  Clone ID: LIB3180-018-P2-M1-B12
tcgtctagatcgcgagcggccgccccttgttttttttttttttggcgggaggaagaatttttttgaccttccggatagagagaaaacgaagcctggcccagaccaaaagaatctagggcacgcacccatgctaaatgaaagtcctgatccggaacatcaagtgaaacccgactacaaggaaagatactatataggagttgaagtacctgcacatgatccataagcaaacaggtcattttatgggccaaatcaacgaccctctaaag

SEQ ID NO: 27576 - DNA, 374 bp, Zea mays
  Clone ID: LIB3180-018-P2-M1-B2
tattaataagagtacctggtcctgccttgatgaaaataaggcttttctatcgaccgcagattctgctgtgcaattactcacagaagccaccaaaccagtttcaggatggaaggggattgagtatcgagcagcatttcctctacataagcctcccggtgctaacttctatcctcctgacatggacaaagcggagtttgaactttggaagagtaaactgacagataaagaacaaaatgatgccactgggtttttcaccgtcataaaacgacatgactctctgtcttcatcgtcattaacacaatcagatggatcggatcagaccaagactaaagatgatctttttattggtccatactccaaggagtatagaccat

SEQ ID NO: 27577 - DNA, 262 bp, Zea mays
  Clone ID: LIB3180-018-P2-M1-B3
tttctaatgagaatccataggctcacgtctttaaagcaaaaataccagggctggagaaagaccttgtcctcgtagaagttaaaggcatgccccaacctaagctcaagggggaactcacagggaatttgtctagattccgttcaccttgctcttcaaggcgctacccagtggttgatttcttggcttgatccgaccttcctataaccatgagttctttcttaccaagcccggcattgggaaccgagtgctttccgtcactttt

SEQ ID NO: 27578 - DNA, 97 bp, Zea mays
  Clone ID: LIB3180-018-P2-M1-B4
tcgttctgagcttagctcctaataccgtcgtcgttttgctccattcgaccgcccgttgccgttctatgcactctgccaactccacccgcgcttaaaa

SEQ ID NO: 27579 - DNA, 280 bp, Zea mays
  Clone ID: LIB3180-018-P2-M1-B5
ggatcatgggataagccaagagttcatggatgaagtttttgcccagagcaagaagttctttgaccttcctcatagtgagaaaatgaagcttctccgagacgagaagaatagagggtacacacccatgctagatgaaattcttgatcctgaaaatcaagtgaatggtgactacaaggaaggatattatattggagttgaggtacctgcagatgatccagaagcaaacaggccattttatggtccaaatcagtggccttctaaagaagtattaccaaaatgg

SEQ ID NO: 27580 - DNA, 187 bp, Zea mays
  Clone ID: LIB3180-018-P2-M1-B6
ccacaacctcaccggacgtgtcttcattccgaccggaggggtcaaattatacacggtgctctttccagtcatagatgaatgacactagtcactctgccattgttttcaagacttctatttttcacaactactcgcgtttcacctcaactccaaaaaattaatgtgtaacgaagactttttattttta

SEQ ID NO: 27581 - DNA, 77 bp, Zea mays
  unsure at all n locations
  Clone ID: LIB3180-018-P2-M1-B7
tcactataaagaaagcccgcacgcctgcatataccgaaccctaattcccatcncnacccacttgtcttttagagtac

SEQ ID NO: 27582 - DNA, 413 bp, Zea mays
  Clone ID: LIB3180-018-P2-M1-B9
gcaacatagaaagtggaatacagtagcaacaatagagcaacaatggcgggcaagatattttccatccttatgctccttgctctttctgcatgtgttgctaacgcgaccatttttcctcaatactcacaagctcctatagctgcccttcttcccccataccttccatcaatgaccgcttcagtatgtgaaaacccagcccttcaaccctacaggctccaacaagcaatcgcaacaagcaacttacctttatcacccctgttctttcaacaatcgccagccctatctttggtgcagtcattggtacaaaccatcagggcacaacagctgcagcaactcgtgctaccagtgatcagccaagtagctttggcaaacctttctccctactctcagcaacaacaatttcttccattcaa

SEQ ID NO: 27583 - DNA, 171 bp, Zea mays
  Clone ID: LIB3180-018-P2-M1-C1
cggatttcccggttggcccaccccttcctttgtattccgagggggccccccttttttttttttttaaaaaaataaaaaagggcccttttaatttttgggaagccccaaccctcaaccaaaaaactttttttttgaaccttacctaaaaaaaaacttaaaaaagggcccccc

SEQ ID NO: 27584 - DNA, 403 bp, Zea mays
  unsure at all n locations
  Clone ID: LIB3180-018-P2-M1-C10
cagaccattagctttatctactccagagcgcagaagaacccgatcgacaccatgagggtgttgctcgttgccctcgctctcctggctctcgctgcgagcgccacctccacgcatacaagcggcggctgcggctgccagccaccgccgccggttcatctaccgccgccggtgcatctgccacctccggttcacctgccacctccggtgcatctcccaccgccggtccacctgccgccgccggtccacctgccaccgtcggtccatgtgccgccgccggttcatctgccgtcgtcaccatgccactaccctactcaaccgccccggcctcagcctcatccccagccacacccatgcccgtgccaacagncgnattcaagcccgtgccagctgcagggaacctgcg

SEQ ID NO: 27585 - DNA, 354 bp, Zea mays
  Clone ID: LIB3180-018-P2-M1-C11
tctcaagtacaggaagcttgtcaatagcagctttgctgatctgcaaaagccacagatggagctggatggaaaggcttgcgctgctgttggtcagagtggcctcatggctctttatgatatgctatttacccaacttgatgtgtcctcctcgcaacttcttgtgacagatagtgattttgagaatccaaactttcgggagaggctctgcgaaactgttgagtcactattagaccttaaagttgtaccaatatttaatgaaaacgattccatccgcacttgaaaggctccatatgaggattcatctggcatattctgggataatgacagtttagctggtccttttggcttttgaac

SEQ ID NO: 27586 - DNA, 255 bp, Zea mays
  Clone ID: LIB3180-018-P2-M1-C12
tatctagcaacatagaatgtggaatcgaggagcaacaatagtgcaacagtggccaccaagatatttttcctgcttatgctccttgctctctctgcatgtgtgtgtaacccgacaatttttcctcaatggtcacaagctcctatagcttgccttctttccccataccttgcatcaatgatagcttcagtatgtgaaaacccagctcttcaaccctataggctccaacaggcaatcgcagcaagcaacataccttta

SEQ ID NO: 27587 - DNA, 414 bp, Zea mays
  Clone ID: LIB3180-018-P2-M1-C2
ctcatggctagttgtgcaagcccttgagcgtgctgatgagagccaaaagcgcattctatttgaaaattatggcaagaaagatccagcctgtgtggcaaaagtgaagaacctctacaaagaacttgacctagaggcggtatttcaggagtacgagaatgagagctacaagaagctgattgcagacattgaagcccagccaagcattgcggttcagaaagtgctgaaatccttcttgcacaagatctacaagaggcagaagtagggtgctcttggataaacgagctcaggagtcgttaccccttcgcatgcttgacataacgggactttctcacctggttcctttagtatgatgtggagcgtctagttaaaaaaaatggatgtagtatgaagtaccttgctgctctgaatattaac

SEQ ID NO: 27588 - DNA, 355 bp, Zea mays
  Clone ID: LIB3180-018-P2-M1-C3
cacaattatgagtgtaatggggattaatctcaaaacactgcgtccggaaccttgtgttgaagggtattctacacctgggggttattctgcaagagctgtgcaccctatagcacttgctaaagtcatgcagatagcaaggatgatgaaagaagagtttgctgatggacagtctctctctgccattggtggtgtggagactggcaatgatgctgctgagtttattcttcttggtgctgatacagttcaggtatgtaccggtgtgatgattcatggctatccccttgtgaagaagctttgcgcagagttacaggatttcatgagagagcacaacttttcatcaattgaagagtttcga

SEQ ID NO: 27589 - DNA, 243 bp, Zea mays
  Clone ID: LIB3180-018-P2-M1-C4
gcccgttgttgtatcttgtcactgatcagtgttgtttgctttgctttgccgggctaatggcccccgctccatgtggccgttcgtcgcaaaaggtgttacacttcggcaagggcaagagcgagggcaacaagaacatgaaagagctgctgggcggcaaggacgcgaacctggctgagatggcgagcatcaggctgtcagtgcctccagggttcacggaagtaacgaaggcgtgccagcaatacc

SEQ ID NO: 27590 - DNA, 141 bp, Zea mays
  unsure at all n locations
  Clone ID: LIB3180-018-P2-M1-D1
tctatcaaacaaagcttgccnnnnccctgttaggaatcccctaatgaccaattgtgaacctatttattcaattcaccattcccttccttgacccattctttgccataaaactttatgggattcccccttattcttttcatt

SEQ ID NO: 27591 - DNA, 173 bp, Zea mays
  Clone ID: LIB3180-018-P2-M1-D10
tttctgcttgtatggtggcacctaagagcatcatctcctacccacaggtctggaaagggcaagggtcgaggaagtggaagcttgaccagagcgacgggttcttcgtgcaattcgaggcaccggcgctgaggaagatatggtttgtgccaagcacaaaaaagatgggacggtca

SEQ ID NO: 27592 - DNA, 96 bp, Zea mays
  Clone ID: LIB3180-018-P2-M1-D11
tcttatcgatcgccacaggcaacaccacccggcgaggctacacgacaggcggcaggaggaaggaataaactcactgccagccagtgaagggggaga

SEQ ID NO: 27593 - DNA, 399 bp, Zea mays
  Clone ID: LIB3180-018-P2-M1-D2
gccactcaacgtcgagatcgagacgacccgagtccgccgcgcccgtgcaccaccgaccgtcgaactcccgaaagtaactctatttcttgatcaacatcaacatgtcgcgggaggataatgtttacatggccaagctggctgagcaagcagaacggtacgaggaaatggttgagtacatggagaaggtggctaagaccgtagatgtggaagagctcaccgttgaggagcggaacctcttatctgttgcctacaagaacgtaattggggcccgccgtgcctcatggcgcattatctcctccatcgagcataaagaggagtcccgtaagaatgaggaacatgttattcagatcaaggagtaccgtggcaagattgaggctgaattgagcaacatttgggatg

SEQ ID NO: 27594 - DNA, 309 bp, Zea mays
  Clone ID: LIB3180-018-P2-M1-D4
gtcggaagcggtcgaaactcgaaagggacaaagcagcgagcggcgccgggctccccctcccttcctcgcccctgatctacgccgatcgaaggccgggcggcgatgcttccttgcctgcacctctcggtccaacacacagattagatcagcgtcgaggacgtccgctgctgctccctgtggctgcggttttgcagcataagaaatatagctacacacagcttaatgcttgtcaggatcgatggcagatagggagcatcgaacagtatttgtcacggtggggacgacatgctttgatgctcttgtcatggc

SEQ ID NO: 27595 - DNA, 211 bp, Zea mays
  Clone ID: LIB3180-018-P2-M1-D5
tcggtctgtagcggtcgaaactcgaaagggacaaagcaattagcggcgccgggcgtggcccttcctttcttgcccctggtctacgccgatcgaaggccgggcggcgatgcttccttggctgcaccttttggtccaacacacagattagatcagcgtcgaggacgtgcgatgttgtatcctgtggctggggtttttcagcattcgaaatttt

SEQ ID NO: 27596 - DNA, 109 bp, Zea mays
  Clone ID: LIB3180-018-P2-M1-D6
ttctgtaaccagctggggctgcctctcgcgctcttgtttgccgatctggtgggaggcccgcaatgccagagctctcacggcggtggcggaagacccgcttaccttactt

SEQ ID NO: 27597 - DNA, 130 bp, Zea mays
  Clone ID: LIB3180-018-P2-M1-D7
ataaagaaatccgccacgcctgcaaataccgctccttaattcccaattcaacccacatcctccttctacaaccatctatcgctaccacccgagctcttctaaaaccaatcaagaaccactcacacaattc

SEQ ID NO: 27598 - DNA, 68 bp, Zea mays
  Clone ID: LIB3180-018-P2-M1-D8
ttttcctgcaacaaccagaaggagacgacaggggggctcttaaaaaagggggggggggacccaccaat

SEQ ID NO: 27599 - DNA, 387 bp, Zea mays
  Clone ID: LIB3180-018-P2-M1-E1
gggtcttcagaccattagctttatttacttcagagcgcaaaaaaacccggtcggcaacattagggtggtggttggtggccttggttttcttggttttggttggaggcgcaacctcaagcattcaagcggcgggttgggctgccagccaccgtcgtcggttcatctaccgccgccggtgcatctgccaccttcggttcacctgccaccttcggtgcatcttccaccgccggtccacctgccgtcggcggtccacctgccaccgtcggtccatgtgccgtcgccggttcatctgtcgtcgccaccatgccactaccctacttaaccggtcccggtctcagccttatccccagccacacccatgcccgtgccaacagccgtattcaagcc

SEQ ID NO: 27600 - DNA, 91 bp, Zea mays
  Clone ID: LIB3180-018-P2-M1-E10
tttgtaacacccccggacagacgggcgcgaacgcaaaccctaaaaacgggagccatggattcgggaggcggaggaaggaaccgcccgcaca

SEQ ID NO: 27601 - DNA, 350 bp, Zea mays
  Clone ID: LIB3180-018-P2-M1-E12
gaaacggcatcagtagcaaacggaggcgaccaccagcgacggggccagccgcggtccccaacgtcagaagatctcgtttcagctgcggcagggcgggcaacaccggcaccttatgggcgccgacgacgaaatcggcgcccgcattgaagcgcaagaaaaggaggcggagatccagaaggccattcgcgcccccgttgcaaacttcaaaaagccgggcgaccccttggctcttgaaggcgttaggagagcacttgtaaaagaccttggtttgaagatattattacttgatgcacattaaaagtttttttagcattgggtttacaaagttttggtgtatttgctgatgaaaa

SEQ ID NO: 27602 - DNA, 299 bp, Zea mays
  Clone ID: LIB3180-018-P2-M1-E4
atcagcggcaggagctctgggcagcgtgcgcacacgtgggttacctagctcgctctgctagcctaccatggctgaccaccaccggggcgcgacgggaggtggcgggggctacggcgacctccagcgcgggggcggcatgcacggcgaggcgcagcagcagcagaagcagggcgccatgatgacggcgctcaaggccgcgacggccgcgaccttcggcgggtcgatgctggtgctgtccgggctgatcctggccggcaccgtgatcgcgctgacggtggccacccccgtgctggtgatcc

SEQ ID NO: 27603 - DNA, 280 bp, Zea mays
  Clone ID: LIB3180-018-P2-M1-E5
tatagttgtaggagctctgggcagcgtgcgcacacgttggttacctagcttgctgtgctagcctaccatggctgaccaccaccggggcgcgacggtaggtggcgggggctacggcgacctccagcgcggtggcggtatgcacggcgaggcgcagcatcagcagaagcagggcgccatgatgacggtggtcaagggcgcgacggtcgggaccttcggggggtggatgctggtggtgggcgggcttattctggcccggtccgcgaacgtgctgacgggggcc

SEQ ID NO: 27604 - DNA, 350 bp, Zea mays
  Clone ID: LIB3180-018-P2-M1-E8
gacagtggaggtggagtcatgcttcaacatctacaatttcaaggtctagatccaggtcatggtggtcatctttccagaccaaccgcagctaatctttgatagccagcagaatcgggacgggcgcacagtctgctggtacaaacagctgacggggagctccctgcaccttacgctacctctgaggcatggcatacaactagctggtgaaagacatactggaaagaatattacgcttgaggcggattatgctgaacacagataccacggagctggccagcatgaagtacatgcggcgatgccaaaagatcaacaagaattcatttttggcgatcatcaaccaccggtcggtg

SEQ ID NO: 27605 - DNA, 238 bp, Zea mays
  Clone ID: LIB3180-018-P2-M1-E9
cccgttgcgagggcggaggcgccgatggccggggcgggggcgggtgcgggagcgggggcgctggccgggctcgcagcgtgcgcgacgctggcgtgcaacgtcgcaggcgccgtgctcttcctcctcagccaagacgacgagcggctgcggcgcgggtgtgcggcgaggttgggcgctggcggcgtatcgtcgcacccggtggaggagtgcggggatgaataggcactcgcgtcggacg

SEQ ID NO: 27606 - DNA, 305 bp, Zea mays
  Clone ID: LIB3180-018-P2-M1-F1
tctgtacccagaaagtaaagcttttgctcaaatgtttcagaagacttattcagggaaaatattggcatgtcacatgcagctgctgaatgcaattcgtggtggagactacttgccagatagggttatcaatcttgttctacagtatctgactaacagtgttacaaagaacagtatgtatcagatgatgcagcctcagattgatatacttctttttgagataatttttcctcttatgtgcttcaatgacaatgaccaaaagttatgggatgaagatcctcacgaatatgttcgcaagggctatgata

SEQ ID NO: 27607 - DNA, 170 bp, Zea mays
  Clone ID: LIB3180-018-P2-M1-F10
ccggtccgggccggggcgtgtggcttgcgctaataaatcttgtctcatgggaatgattgaaactatgaagcaacgtatcctagcggatggttagagcattaatggctcatattttgtcaggtctatgtgtcgccgtgaaacttttaatcaaatgagttcactcttttgcc

SEQ ID NO: 27608 - DNA, 402 bp, Zea mays
  unsure at all n locations
  Clone ID: LIB3180-018-P2-M1-F11
tctgagcccccaaaatcccatttccctctgccacaccacgcgctgcgcccgcctgattccgcccgccagccacgctcgcagatctcgcttggacgccctgattgcgtcgtatgaaagatcactgccccgccttccatcgtcgcccccatgccacgctccccttccattctcgctcacttncagccgcccccattcccagttgaaggagccgtccaagaaccgggaaccccatcaccggatcaggagcagccgtgtcgcgccactcgtgcgcctgcgcctcgaacctgactttggacgacgccgacggggaccaccctccctccgcatcgaagccgatgagcctctggtggggtgtccgcggtcgattgaccgattgagccaccaaacagcaccaatcgagcg

SEQ ID NO: 27609 - DNA, 204 bp, Zea mays
  Clone ID: LIB3180-018-P2-M1-F3
tgttgttactagagaggttgaaaggggttccaggtacacacgggatgccactggcttgcttgaagctatggcgggggattgctagccgttcatttgctcttgctggccgattttttcgttccggtgcttttccccccaagatttttctttgcaccagctgattctttcctacagaggatacaatcagggacggggatgttcaag

SEQ ID NO: 27610 - DNA, 254 bp, Zea mays
  Clone ID: LIB3180-018-P2-M1-F4
tcggagtacactggcaccattggcaagcgcctttacagcataaatgtcgagaacgttgaggagaaccgtcgtgccctccgtgagctcccattctgctgccctggtgctctccagtacatcagcggagtgatccttttcgaggagaccctgtaccatgagaccaacgatggcacggcttttgttgatgttctcaaggagggaggcgttctacctggcatcaaggttgacaagggcagccatgaggctgttggcac

SEQ ID NO: 27611 - DNA, 304 bp, Zea mays
  unsure at all n locations
  Clone ID: LIB3180-018-P2-M1-F5
caagatttataagatctttccacctcatgagaagatagagaacataaatgatcagtactggacattacgagctgaggagatcccagaggaagagaagaatcttggcccacatgatcgattgattcatgtttaccatttcatgaaagaccctaaccagaatcaacaaattcaaaattttggagatccttttttgatggttattcgggaaggtgagactgctgcagaggtaatggagcgcatccagagaaaacttagagttcctgatgatgagttctncaagtggaaagctgcattcatatccatg

SEQ ID NO: 27612 - DNA, 315 bp, Zea mays
  Clone ID: LIB3180-018-P2-M1-F6
gaggagggagagtgtgagtggactcaggaggcggcgggcgaaatgaagcttaacgtcaagaccctcaagggcaccaacttcgagatcgaggcgagccccgatgcgtcggttgctgaggtgaagaggatcatcgaaactactcagggtcagagtacctacccagcagaccagcaaatgctcatataccaagggaaaattctgaaggatgagaccactttggaaagcaacggagttgctgagaacagcttccttgttataatgctgtccaaggctaaggcatcgtcaagtggagcttccactgctactgctgcaaaa

SEQ ID NO: 27613 - DNA, 329 bp, Zea mays
  Clone ID: LIB3180-018-P2-M1-F7
cagaaaccagagagtaaagcttttgctcaaatgtttcagaagacttattcagggaaaatattggcatgtcacatgcagctgctgaatgcaattcgtggtggagactacttgccagatagggttatcaatcttgttctacagtatctgactaacagtgttacaaagaacagtatgtatcagatgatgcagcctcagattgatatacttctttttgagataatttttcctcttatgtgcttcaatgacaatgaccaaaagttatgggatgaagatcctcacgaatatgttcgcaagggctatgatattatcgaagatttgtacagtccccg

SEQ ID NO: 27614 - DNA, 401 bp, Zea mays
  Clone ID: LIB3180-018-P2-M1-F8
ctcctctctcgcatccgcagcctctcgagctctactccatcccctcgatctcgaagcgcagcagcagcagtcaggcggccatggacgccagcgcagcaggagccggcgggaaggcgaagaagggcgcggccgggcgcaaggccggcgggccgaggaagaagtcggtgacgaggtccgtcaaggccgggctgcagttccccgtcggccgcatcgggcggtatctgaagaagggccggtacgcgcagcgcgtcggcacgggcgcccccgtctacctggccgccgtcctcgagtacctggccgccgaggtgctggagctggccggcaacgctgccaaggacaacaagaagacccgcatcatcccgcgccacgtgctcctggccatccgcaacgacgaggagctc

SEQ ID NO: 27615 - DNA, 168 bp, Zea mays
  Clone ID: LIB3180-018-P2-M1-F9
ttcttcccccccggagaaaagtgcttccgagaataaatttttttccatcggaatgtctgaaactatgttgggtgtatcctagtggttggttgagcattaatggctcatattttgtcaggtctatgtgtcgccgtgaaacttttaatcaaatcagttcactcttttgcc

SEQ ID NO: 27616 - DNA, 396 bp, Zea mays
  Clone ID: LIB3180-018-P2-M1-G1
tgtgtaaacgaggtattggaaaatctcctgcaccgtggccttaaggagaaggtacatggctcaaaggacccatcagctccagaagttgatctccctggtgcaaaagttgggaaagtctgcgttcgttttgccccagagcctagtggttacctccatattgggcatgcaaaggctgcactattgaacaaatactttgctgaaagatatcaagggcgcttaatagttcgatttgatgacacaaacccttcaaaagaaagcaatgatgttgttgagaatcttttgaaagatattgagacgttggggatcaaatatgatgctggcacatacacatttgattattttctaaagcttatggaaatggctgagagtttgataaagcatgttaaagcctatatt

SEQ ID NO: 27617 - DNA, 265 bp, Zea mays
  Clone ID: LIB3180-018-P2-M1-G10
ttatatttgtagtggtaccatcataacaagggaacatggtgaagttcacgggtgcacaactccgacacctcatggacaaaatgaacaacattcgtgatctgtctgttattgctcatgcggaccatgtcatgtctacacttacagatttcgttgcggcagttgctaggaccattgggccggaagttgctgacgatgttcgcccgaccccttcttggccgggtgaagtccagcccgcgctcgcgccgaaaggtacgggcgtctccct

SEQ ID NO: 27618 - DNA, 177 bp, Zea mays
  Clone ID: LIB3180-018-P2-M1-G11
ttctttatctactccagagcgcagaagaacccgatcgacaccatgagggtggtgctcgttgccctcgctctcctggctctcgctgggagcgccaccttcacgcatacaagcggtggctgcggctggcagccaccgccgccggttcatttaccgccgacggtgcatttgccaccttcg

SEQ ID NO: 27619 - DNA, 125 bp, Zea mays
  Clone ID: LIB3180-018-P2-M1-G12
agcccacgcgcaactcttattcaaatgtcttgaaaaaacagcccctcccattatccttatggctgaaaattattatccacacggccaaaataaagaacgtgataaaagggtaccaccgatccgga

SEQ ID NO: 27620 - DNA, 411 bp, Zea mays
  Clone ID: LIB3180-018-P2-M1-G2
agtagttggtgttctcatcatcagctgcagtttatggatcacccaaaaactcaccctgcacagaaaattttccttttactccaaacaatccatatggcaaaacaaagctcgttgttgaggatatttgccgggatatctaccgttcagatcctgaatggaagatcattttacttaggtacttcaatccagttggtgctcatcctagtggatatcttggcgaggacccacgagggattcccaacaatcttatgccctatgttcagcaagttgcggttggtaggaggccagctctaacagttttaggaaatgactatgcaacaagagacgggactggagtccgaggatacatgcatgtggttgaccttgctgacggacatattgctgcattgcagaagctttttgagaactcta

SEQ ID NO: 27621 - DNA, 311 bp, Zea mays
  Clone ID: LIB3180-018-P2-M1-G3
tcgttcgtccgcgtaggcacagaaggcttctcctggaggtgtgggagctgagttgggaggaggactgctgctgcagccatgaaagccctcattctcgtcggaagcttcggcacccgcctgcgcccgctcacgctcagtgtccccaagccgctcgtggatttcggcaacaagcccatgatcctgcaccagatcgaggctctgaaggaagttggtgttacagaggttgtcctggccatcaattaccagcctgaggtcatgctcaactttcttaaggacttcgagagcaagcttggcatcaagatcacctgctc

SEQ ID NO: 27622 - DNA, 311 bp, Zea mays
  unsure at all n locations
  Clone ID: LIB3180-018-P2-M1-G4
cgtaaccaaggatcgatccaggagcttccggaaggcgaggcgcgcgcgcagcgtcnaggtgctggtgccggtgccgcccatggatcgggctcgcggatccgcgttcctgctcggcgtcctgctcgcaggatccttgttcgcgttttcagttgctaaagagggaacaagaagcttgggaccgggatcggtattgatcttggtaccacctacttctgtggtggtgtctacaagaacggtcatgtcgagatcatcggcaatgaccagggttaccgtatcacaccctcatgggttgccttcaccgatagcgagag

SEQ ID NO: 27623 - DNA, 364 bp, Zea mays
  Clone ID: LIB3180-018-P2-M1-G6
cgcaaatcttttccaaatggctcgtgaaaatgccccttccattatctttattgatgaaattgattctttatgcggccaacgtggagaaggtaatgaaagtgaagcatctaggaggattaagactgaacttcttgtgcaaatgcagggtgttggtcataatgatgataaagttcttgttcttgctgccacgaatacgccatatgctctggaccaggctgtgcggcgaagatttgacaagcgtatctacattccgctacctgacacgaaagcaaggcagcatatgtttaaggtccatctcggggatacaccacacagcttaactgaaagcgatttcgagagcttggcccgtcgaacagatggattt

SEQ ID NO: 27624 - DNA, 224 bp, Zea mays
  Clone ID: LIB3180-018-P2-M1-G7
ggcgaggcaaaagcattgcgaccacagacagggcgcgcttcaagggcttttttttttgagataacaaggaggagaggaggagatggcggtcaccatcacgtgggtgaaggcgaggcagatcttcgacagccgcgggaaccccaccgtcgaggtggacgtgggccttatcgacggcagctactcgaggggggccgtacccagcggcgcattcactggaatatatg

SEQ ID NO: 27625 - DNA, 407 bp, Zea mays
  Clone ID: LIB3180-018-P2-M1-G8
tactaaattttgcacacaaatgtagcattgtagacatgtataattctatgaacccgtgaacttaacaacaccaaggtcattaaatcaactggaccctatgagtaacaatttcgatatggcaaacaccaaattattgaacttattggctgaaaattatgaccaacgtaaagtttaaattattatacgataaatatatcaaagaattttttttgagggacgtaaaaattgcatggaatcggctgctgttgggggccttcgtcctccgaaggtcctcaaaaacatgatttgacaatgttttccgagtggattatgtgaacaggtattttcggatccagaattatgaatatggagcacggccaggacgaagcctgaaccagacgaaagtcgagtgtagccgaagctgtgcg

SEQ ID NO: 27626 - DNA, 222 bp, Zea mays
  Clone ID: LIB3180-018-P2-M1-G9
tcgtcagtccctgtacctccgtataaaccctagtacctcttatccgttcgtgactccccaagcgtcacaccgaatcaccacagtcgagctcgagcaggaacaagccgtgagcgcctgcccccggtgctcaatatctattccacaccttatggcgccggcgctgagcaggaccctggggccgtcgtcggtggccgcgctgcgcccgagcccgtcgtgccgggg

SEQ ID NO: 27627 - DNA, 75 bp, Zea mays
  unsure at all n locations
  Clone ID: LIB3180-018-P2-M1-H1
tctttcttttgttntatcttgacacttatcaagggtggtttctttagtatgcggggccgattgcccaccgctcca

SEQ ID NO: 27628 - DNA, 123 bp, Zea mays
  Clone ID: LIB3180-018-P2-M1-H10
cccggtgtcggacccacgtcttctcgtctccgtagatcctacctcttagtccgacgccgcgcggctcgttcggcagtcccggggccctctgtagcccccttccgcttctcctctccgggaatg

SEQ ID NO: 27629 - DNA, 127 bp, Zea mays
  Clone ID: LIB3180-018-P2-M1-H12
tcgtctagatcgcgggcgggcgctcgcgatctagaggtccccgccaggcgttggccaccgttcgtgcaagactcatgtgagccgcgagcccgcgagtgatgagcgccgccgccgccggtgccaagaa

SEQ ID NO: 27630 - DNA, 303 bp, Zea mays
  Clone ID: LIB3180-018-P2-M1-H2
agatgtgtcaggtttgctactgaggttgctggtgttcaagaccttggtatgttaggtcgtggcagtggtgaagaaattggaacatatgttgagaaacttatgacaagtgaactatctggaaatgttattgatatctgccctgttggggctcttacattcaagccatttgcatttaaagctaggaactgggaactgaaaggcaccgagaccaatggtgttactgatgcaaggccgtacaacataagatttgccagctttgtgacctttagttatgcgcattgtttcacgcctaaatgaagacat

SEQ ID NO: 27631 - DNA, 399 bp, Zea mays
  Clone ID: LIB3180-018-P2-M1-H3
tctagttctagatcgcgagcgggcccatttttttttttttttgggttcttagtggcgcgccgccaccccctacaggtaaggaagaggtgggcaggatgtcctaccgcaagttcgagcacccgagggacggcttcctcagcttcctttccaggaagcgctccttccgtcaccgcggcaaggggaagtcattccctagggatgaccccaagaagccttgccatctcactgccttacttggctacaagggtggcatgactcacattgtccgggaggatgagaagccaggatccaaactccataagaaggaaacttgtgaggctgttaccatcattgaaaccccttctcttgtcattgttgggctcgtggcatatgtgaagactcctcgtggcctccgcacac

SEQ ID NO: 27632 - DNA, 62 bp, Zea mays
  Clone ID: LIB3180-018-P2-M1-H4
tggactcgtgggtgcgtattgagggcattttcagtggaactttgagttatatatttaaaatt

SEQ ID NO: 27633 - DNA, 66 bp, Zea mays
  Clone ID: LIB3180-018-P2-M1-H6
gtgagcttcgttcgttcagttcatccgtgttcttgtttgccaggtcgagagagagaggatgtcgtg

SEQ ID NO: 27634 - DNA, 403 bp, Zea mays
  unsure at all n locations
  Clone ID: LIB3180-018-P2-M1-H7
cttacccaaaatctccaaggaataatgtgcatagcaggattagaggacagatgtggcgtgatcgaggccaagcacccagcgcgagagggtttactggaaccagatcagtccatgaaaatccactagcgaacactacagcacatgaaacagcagtgcaataccacaaccatgtgcagccgacaacagttcggcaaacagccatccgcaatcaagtaacaaatactgcagtgcatcagaccgcgccttaccagaaccatactgctcgacaggtgtatcctacttggtcccagacagctgaaccctaccagaatcataatcagcaggtttacgctactgggtttcaaacagggccataccaaagccataatcaagtccatgcttatagagcanggtgccacctgga

SEQ ID NO: 27635 - DNA, 396 bp, Zea mays
  Clone ID: LIB3180-018-P2-M1-H8
tcaaaaagagatgcttcagactgtatgggaaagaaggctacccactggtagatatcatgattcgcgaaagtgaaccatcgcctaaggcaggagaaagaatcctctgccgccatccattcattgaatcaaagagagcatatgttgtcccccagcatgttgaggagcttctacagtgctattggcctgggacatcagataaacctagagcagagctgccctccttggagaagatcagaagccgctgcatgcagcagcttgaaatgctgcgcccggatcacatccggcggctaaatccaacgccctacaaggtgagcgtgagcaccaagctgtacgatttcatccaccgcctatggctgaacgaggcgccagtaggtgaactgcagtagatgatgatca

SEQ ID NO: 27636 - DNA, 405 bp, Zea mays
  Clone ID: LIB3180-018-P2-M1-H9
tcaccgccaaaagccctgggtagggtgactgggtgtctgggtctctacgcctccctcgtcatgctgcgccgcctccgtctgcgctcgccggtgtgcgctgtcgccggcgcggccgctgcaatggcgtcgctcaccaacgtcgcctacgccgatggcctcttccgccgccagtccccgccgtcgaatccaggcgacgaggacaatttgggagcctccgcgttcggccgcgacccggagaccctggagcgcatggctcgagcgctgcgggagatcaacaactcaccgctcgccaagcaggtgtttggactgatgcggaagcaggaggaaacacgccttactgagctggaggccgagaaggtccaatacgccatctacgagaagctcagggacatggaaaggatggag

SEQ ID NO: 27637 - DNA, 320 bp, Zea mays
  Clone ID: LIB3180-019-P2-M1-A11
tctaccacacctcctcgcttccactccggtgggctgacatctcgtcccgtcggttcgtttcgaagcctcgcgagccccgacgatggccaccgccgcggtgtcggtcgacgagaagctcgacaagcttcgcgccgaggtcgccaagctcgaccagatcagcgagaacgagaagtccgggttcatcagccttgtgtcacgctacctcagtggggaagcggagcagatcgagtggtgcaagattcagacccctacggatgaagtggttgattcttttgagggggggggggggtcttttcctatatctttttgtttattattat

SEQ ID NO: 27638 - DNA, 375 bp, Zea mays
  Clone ID: LIB3180-019-P2-M1-A12
tcttttgtattctcaaggaaacctttatccggggctcgaggtatcatactacggctgcttgtcatccccctcgtcgtgagaattgaagggagtgtcatgggggagagatccaactcgttctcacaggactccaataattctagccctgctgaaaacaaactccaaccaggtgaaaagtccttcgcatcggaagcatatgcggctaactggaacgaaccaccagaccttcaaatgcaagactccttcgagcgacctgagctatatcggtagctattagaggggggggattaattcttcccattcgttgcattattcgttgatttttttgcatttttaccatcacttggatttagctatttttcatgtatatttttt

SEQ ID NO: 27639 - DNA, 330 bp, Zea mays
  Clone ID: LIB3180-019-P2-M1-A2
tgcaggtctccttccgccggcgcggaccagctggagggagtttatcctggagccgtcttcctcctcgcctccttttgcgagcgcaggcgcggaggccggagtcgcttggaggcccaactgcgtcagtggtgatttagccttgtatatgttctggagccataatgaatacgaccggagtagagatcattcgcaacgaccagggtaaccagaccacaccctcgttcgtggccattaccgactccgagcgcctcatcggagatgcggccaagaaccaagtcgtcatgaaccccatcaacaccgtctttgatgccaagcgtctcattggcagga

SEQ ID NO: 27640 - DNA, 403 bp, Zea mays
  Clone ID: LIB3180-019-P2-M1-A3
tgcgggttccactagtaattttggagagagggactgcctgtactggaaaatgaacaatcgctacacaacttgctcagaggctcaatttgcctaatgttttgcagacggacatggtgtatgagctgctgcggacatcaacagatgcgccacttacttcagttcctgtgtgggctcgcgattttaattcacctgaagagcttatcactgaattctgcagagaatgcagagttgtacgcaagggtttggctggcgatttgaagaaggccatgtatagatgggaaaccaattatttttgtgggaattcatttggatccaatcatttatcttatggattaggtaataagtgttggtattccctgaccgtaataatctttcatattttttaattctatctttttttttt

SEQ ID NO: 27641 - DNA, 211 bp, Zea mays
  Clone ID: LIB3180-019-P2-M1-A4
aattctacccactcatcctgtcatcacaacgatcccccatactcagagtaacttttcaacaatatatgaagaagccctcatcaccctcattatcattcccttcaaccttccatccctttctccttatcacctactttttcacatgaatactcttttattttttttctatatatcctcactttatctaattcttttacttccttttcttttt

SEQ ID NO: 27642 - DNA, 294 bp, Zea mays
  Clone ID: LIB3180-019-P2-M1-A7
attattattatttttttttatttttttttttttttttaattttattttttttttttttttttttttttttttttatttttttttttatttttttttttttttttttattttttttttttttttttttttttttggtgtttttttttttattttattatttgtttattttttatttttttttttaaatttttttaatttttttttatttttttatttttttttcttttaatttttttttttgttttttttaattttatttattgttgtatttttttttttttttgtaattttttt

SEQ ID NO: 27643 - DNA, 409 bp, Zea mays
  Clone ID: LIB3180-019-P2-M1-A8
tctttctccctccgccgccactcccctcccattcaccgccaccggcaattccataccgtgctccgccacctctgctgagagcgagaagagatggcaggcaagggtgatgggccggcaatcggcatcgatctcggcacgacgtactcttgcgtcggcgtctggcagcacgaccgtgtcgagatcatcgccaacgaccagggtaaccgcaccacaccctcgtacgtcgccttcaccgactccgagcgcctcatcggagatgcggccaagaaccaggtcgccatgaaccccatcaacaccgtctttgatgccaagcgtctcattggcaggaggtttagagactcctctgtccagagtgatattaagctgtggcccttcaaagtcattcctgggcccggtgagaagccaatga

SEQ ID NO: 27644 - DNA, 349 bp, Zea mays
  Clone ID: LIB3180-019-P2-M1-A9
aggggaaaaggctggtagcgcctagcagagtacccaggtccgagaatttcccggtgtcgatcccacagcgttttctgggctaattttattcatacacagaattataacgtagaaggtttggtataaaaggagttagggagatatatttcataaagcctttcccatattaggtataagaagtgcacttcatattagatttagtgaaaactccacgttattgtttagttttactagagagctagttcctgtttagcctaacacaaaatagagtggagcctcgttcactggtgagagtttcattctaagtaacatggcttgaattaggcttcttccaatctatgagaagact

SEQ ID NO: 27645 - DNA, 398 bp, Zea mays
  Clone ID: LIB3180-019-P2-M1-B1
tctatcagttaatcacagctcacagcaaagggggcgaatcgcgaagccggggggctcccaaacccgaccgagcaaagcgcaaagccccccaacctcagatcaatccgcagcatcgatggcgcccaaggcggagaaaaagccggcggcgaagaagcccgtggaggaggagcccgcgacggagaaggcggagaaggctccggcagggaagaagccgaaggcggagaagcgccttcccgcgggcaagtccggcgccggcgagggcaagaagggcaagaagaaagccaagaagagcgtggagacctacaagatctacatcttcaaggtgctcaagcaggtgcaccccgacatcggcatctcgtccaaggccatgtccatcatgaattccttcatcaacgaca

SEQ ID NO: 27646 - DNA, 239 bp, Zea mays
  Clone ID: LIB3180-019-P2-M1-B10
cggtcacggtgggcagagcggcacgacgggcgattccgcctcgctccagagtgctgtgctcgcccactcactcactcacccatggcgctcgccgcctcccaccaccgcctcctgcccgtagcccccgcccccgccgtcacccgtaccccgtcgcgggggcacctgcgcttccgcgccttgcgaccttagtcccgaccccgctcccggagaatttgttgtcaatctatcaactcaactaa

SEQ ID NO: 27647 - DNA, 262 bp, Zea mays
  Clone ID: LIB3180-019-P2-M1-B11
tcttcccgtgaaggtcaacctcggggtcggggcctaccggaccgaggaaggggagcccctattgctgaacgtggtcaggcgcgccgagcaaatgttgatcaataatccgtcacgtgtcaaggagtacctaccaatcaccggtctggctgaattcaataagctgagcgctaagcttatctttggcgcttacagccctgctatttaagagaatagggttgctaccgtgcagtgccttttcgtttctggttttttaaatattcat

SEQ ID NO: 27648 - DNA, 332 bp, Zea mays
  Clone ID: LIB3180-019-P2-M1-B12
tctccccttctcgccaaaggggaagccctggccgtacttccgttgcggcgctacgagcttcgacgggcctcgatctccacctctgaagtgactacttgtgatctagatctgaagctgtagtggtcagcagcttagtgtgaatcgaagatgagcgtggtggggttcgacctcggcaatgagagctgtatcgtggcggttgcgcggcagcgtggcatcgacgtggttctcaacgaggagtccaagcgcgagacacccgccatcgtttgcttcggggacaagcagcggttcatcggcaccgtcagcgccgagtcctccaccatgaaccccaaaaa

SEQ ID NO: 27649 - DNA, 266 bp, Zea mays
  Clone ID: LIB3180-019-P2-M1-B2
cgtagctcaagcatcagcggcaggagctcggggcagcgtgcgcacacgtgggttacctagctcgctctgctagcctaccatggctgaccaccaccggggcgcgacgggaggtggcgggggctacggcgacctccagcgcgggggcggcatgcacggcgaggcgcaacagcagcagaagcagggcgccatgatgacggcgctcaaggccgcgacggccgtgaccttcggcgggtcgatactggtgcttttcatgcttgatcttgtct

SEQ ID NO: 27650 - DNA, 398 bp, Zea mays
  Clone ID: LIB3180-019-P2-M1-B3
ttcaccgcttcctcccccgaccggagaggagcctcaccgccggcgcccatggcgacacgctacttgatcgtgtcgctgcccgtgcagtcgcccggcgccaccgccagctccctgtggtcgcgcctccaggactccatctcccgccactccttcgacaccccgctctaccgcttcaacgtcccggatctccgcgtcggcaccctcgactcgctcctcgcgctcagtgacgacctcgtcaagtccaatgtcttcgtggagggcgtgtcacacaagatccggaggcagatcgaggaccttgagcgcgccggaagggtcgagaccgggaccctcaccgtcgtcggggttcccgttgacacctaccttactaggttcgtgtgggatgagggccagttccccac

SEQ ID NO: 27651 - DNA, 255 bp, Zea mays
  Clone ID: LIB3180-019-P2-M1-B4
acattctgtcaccccttatttcaattccctttacaagctctattcccaaaaaaccaggggccctttcttctccttttgtcgcgcccttcatgatagaaccctcaataactccgatttctaagtggataactctcttaatctttttttccctatctctcaattaattatttttttttattctttttttattacttatcatttttctttttttttatttctttattttttcattttttatcttatttttattttttt

SEQ ID NO: 27652 - DNA, 100 bp, Zea mays
  unsure at all n locations
  Clone ID: LIB3180-019-P2-M1-B5
acccatatttataatatttccactacaggttgtgccctctctanctctccttcttcctctttcacacttttcattccttttatctttctctccctttttt

SEQ ID NO: 27653 - DNA, 304 bp, Zea mays
  Clone ID: LIB3180-019-P2-M1-B6
ttcacaagtcagtcagaggaatgattatcgggaaatcggactactaaccgaggctgagatcttcatgctacgcatatctgccctagtagaaaataggaaccatgaatatgagtactttagaacactgcatgctgataatgttccaaataacaatgcttttatggaaaatgagagcaacttgaaagaaacagagggtacatgcacagggaacatcattgtaaagacttggataaagctcctaaaagacgctacatcaggctagatttgttttgggatggagggaggctttcttttctccttttta

SEQ ID NO: 27654 - DNA, 359 bp, Zea mays
  Clone ID: LIB3180-019-P2-M1-B7
tcgctgagcgccgccactccctgacatcgagaccggctgcccgaccccggggcggcgatccctctgcacccctttctttgcgctgccagccccaatctctcgcatccctgtcaaccatggcggcgtcagcaggcggaggcgcggtgcgcgcgctgtcccagaaggagcaggacatacagatgatgctcgcggccgacgtccacctcggcaccaagaactgcgatttccagatggagcgggatgtctttaagcgttgctccgacggcttctacatgatgggggggggcaagacatgggattaagctccagctcgcgtagagggttatagttgtcattgacaacccatatgtcattttcgt

SEQ ID NO: 27655 - DNA, 414 bp, Zea mays
  Clone ID: LIB3180-019-P2-M1-B8
tttcttggcacatctaaacctacaaaccatcgcaacgcaacagcaacaacaggttctgccatcactgagccacctagccgtggtgaaccctgtcgcctacttgcaacagcagctacttgcatccaacccacttgctctggcgaacgtagctgcataccagcaacaacaacgtctgcaacagtttatgccagcgctcagtcaactagccatggtgaaccctgtcgcctacctacaacagcaacaattgctttcatctagcccgctcgctgtgggcaatgcacctacgtacctacaacaacagttgctgcaacagattgtaccagctctgactcagctagctgtggcaaaccctactgcctacttgcaacagttgcttccattcaaccaactggctgtgtcgaactctgctgtgta

SEQ ID NO: 27656 - DNA, 284 bp, Zea mays
  Clone ID: LIB3180-019-P2-M1-B9
tctcggacgcgtggggggtaacaaattttggtctattgctgggcatacaaaggatccatctgaaggcattacagtgaaggaatttgatccgcatacttgtacctggtcaattgtcaagacttatgggaaaccaccggtgtctcgtggaggtcaaacagtgactcttgttggaacgaccctagttttgtttggaggggttaatgctactctgggttccttgaatgccttctactatcctttgtttttgatattattttcttttctatttgtgttattttcttatg

SEQ ID NO: 27657 - DNA, 232 bp, Zea mays
  Clone ID: LIB3180-019-P2-M1-C1
ttggacggtggagacatggaggagccgctgaccgaagcccgccccctcggcagccgcggaggaggtggcggagcggttcaggtcgcttgccgaccccgatgatgtcagctccatcaggcagacgctgcacctcataatggggcgattgtaagatagcaatgcagttctcacacattttaatgagtatttcgaacgatgctttgtagaattgtttggggattttatttataaa

SEQ ID NO: 27658 - DNA, 402 bp, Zea mays
  Clone ID: LIB3180-019-P2-M1-C10
gcctccttttccttggagccgaagaagagggaaaggaagggaggacaggcgccgcctccgccatcaccaccgtcaggatgcattccacgaacctcctgctcgaggagcccatccggatggcctccatcctcgagccctccaagcccagctacttcccggcgatgaccaagatcgtcggcactctcggccccaagtcgcgctccgtcgacacgatctccgcctgcctcaaggccggcatgtccgtcgcccggttcgatttctcgtggggggacgccgcgtaccaccaggagacgctggagaacctcaagctctccatcaagtccaccaagaagctctgcgctgtcatgctcgacacacgtggcccagagctgcaggtggtgaacaagagcgagaccccgatct

SEQ ID NO: 27659 - DNA, 340 bp, Zea mays
  Clone ID: LIB3180-019-P2-M1-C11
tcgcttgtttaccattcctccccaaaacacagcctgcgatcctcgaagcctgggccgagcatcgatcatgtcggcctactgcggcaagtacgcggatgagctcatcaagaatgctgcctacatcggcacccctggcaagggtatccttgctgctgatgagtcaactggcaccattggcaagcgcctttccagcatcaatgtcgagaacgtggaggagaaccggcgggctctccgtgagctcctgttctgctgccctggtgcccttcagtacatcagcggagagatgctcttcgaggagaccctctaccagaagaccaaggatggcaagccttttgtcgat

SEQ ID NO: 27660 - DNA, 275 bp, Zea mays
  Clone ID: LIB3180-019-P2-M1-C3
tctacaaagtgggatgcgatttgcctgggggatacagagtagccctggactgtgatgctctggtcttcggtggacatggaagagttggccacgacgtggatcactttacgtcgcctgaaggggtgccaggggtgcccgaaacgaacttcaacaaccggccgaactcgttcaaagtcctttctccgccccgcacctgtgtggcttattaccgtgttgacgaagcaggggctggacgacgtctttacgcgaaagcagagacaggaaagacgttttca

SEQ ID NO: 27661 - DNA, 307 bp, Zea mays
  Clone ID: LIB3180-019-P2-M1-C5
tcttcgctcaccgtctccatttaattaatcggcctcctcccttcatatatgcggtgccaccaactccctctgccagtacactccacttgctagccatgacgaccctcgccgcgctgctccttctggttgccgcttccaatgtcgtcaaggccgaggagtaccacagctttgtagccaccccgctgtctccccacttgtacaccgctccgtccttggacgcggacgaggatgtcttcggcggcagccttgccgtcgcggaggaagccgcctgggcgtcggacggggccgtgcactttcacgtggtcca

SEQ ID NO: 27662 - DNA, 267 bp, Zea mays
  Clone ID: LIB3180-019-P2-M1-C9
gctgttgcagcagccgactccatgcccctacgctgctgccggcggagtcccagggtgaagaaactatgtgctgtagtatagccgctggctagctagctagttgagtcatttagcggcgatgattgagtaataatgtgttacgcatcaccatgggtggcagagtcagtgagagcaatgacctgtatgaacaattgaaatgaaaagaaaaaagtattgttccaactttaaaaataaattaattaatacattccttttatttaaagttcc

SEQ ID NO: 27663 - DNA, 416 bp, Zea mays
  Clone ID: LIB3180-019-P2-M1-D1
ttctcccacccctccatttttcaagccggcgcaaccactttttcctcccaaggtcttccacgcagcaaggtgcagaggcacctctccatggcgccctccttcctggcttcccttgcgtaggggcagaagcttccatgtatgcctccctccccaagctccagagcgcacaggacagcaacactttcattccccttggatccatggtgctgggaggattttccccattgctggaattcgatgcagccttcccatggcacaggttccacccatggccgacgcccctacccttgttaccttcctccctgtgttcggcacctctccccatagcagcagctcgctggcacccttccttggtccggcatggaggaagctccacattggcgttctttcctctccccatggagcccttcctctgt

SEQ ID NO: 27664 - DNA, 409 bp, Zea mays
  Clone ID: LIB3180-019-P2-M1-D10
cgttgtttgtcccccttacgttctcccctcaagtctatctttaacaacagaacaggcctcccttttcgttttttcttctttctcctctcacttttttcttctttttcatattaatttattcttgtactctctttatcttttttatttttcctcttaaattttaccatatcttgccttatatatatcctttctttttataatgtttactatctttttttatttccccttcacctctctttattacttttcctttttagctttttaatttttttatatttttggggggtgaattctttttattctttctctttaattatttctttttcttattttaattttttctttattaccacctttacatttctaatttctttttcttcatcttccttcttccccatttttatttttt

SEQ ID NO: 27665 - DNA, 268 bp, Zea mays
  Clone ID: LIB3180-019-P2-M1-D11
tcgtaaagccatgccctctcaaagaagaggggatcaaatcgggcatagtttgaactattacttcaagcacagatcggtactacttgggattaacagaaccatggtagtcacaatgaaagtaacctattttgcacccagggtgagagcaaaccagctgctttctgtaactattgtcgttcaagtgatcattccacccaccgtgttatccatataaggcgttcatcgtaccatgacgttgtgagggtgtccgagattgaagattttcttg

SEQ ID NO: 27666 - DNA, 251 bp, Zea mays
  Clone ID: LIB3180-019-P2-M1-D2
tctttctatatacctctgtatgtgagtgagggcaatgagagccctcgtaggcggaagtttcccttcggcgtgcttgctgctgctgttgcagctcgcaggagcgtcgcatgtcgtctacaactacaaggacctcgaagcctttgctgctgcggcgacggaccaggtgccggcgctcattgtcaaccttttgctcatgacgggggtccacttccagccccccaaaaactgtatcattgatcccaacgcgccca

SEQ ID NO: 27667 - DNA, 336 bp, Zea mays
  Clone ID: LIB3180-019-P2-M1-D3
tgctagttctagatcgcgagcggccgcccggttttttttttttgtaggactggatgcaacaagtagtactatatatgctatagatgaataagatgtaggacacccagacctcactgttttacactcgcaataccagaagtagctactggatgaagataaaagggtaaaagccaggtttgagaaacaaaatgaaggaagatcaaggaaggtggtagcttcaaatgcctagcgtgttcgatggaatagggttgcggcacctgttctgccaagctagactgactgaatgattaccgagtttggccacaccatcttcctagatggttttggccgtgtctt

SEQ ID NO: 27668 - DNA, 271 bp, Zea mays
  Clone ID: LIB3180-019-P2-M1-D5
tgtagaggcaatcttctgatttgagaaggggctcaatgaaagaacttagtgggcatattgcttctgttatgaacattctagagcgtcatgctagctatttgatgtctggcaaggagctttctaaactcgttgcttttgtcaaggggactcaatttgatcttgtggaatatctacaacgagaaaggctagggtctgctcgtctagagaattttgcttctgcactcgaactgattggacaaaagctccaaatggatacactgcaatgtctact

SEQ ID NO: 27669 - DNA, 240 bp, Zea mays
  unsure at all n locations
  Clone ID: LIB3180-019-P2-M1-D6
tgttctcaccacgggactgggagagagagagagagatatgaagaattaaaaagcatctngcaccattgcttttccaccgtaccggatgttgcttttcccataaaatgctatcttaaggtttttcaaatctactctttttttttgttttctatttctattataatataattttttttttcataatatttttattttttttttttttcttcatttattttttttttaatttttttatttttt

SEQ ID NO: 27670 - DNA, 189 bp, Zea mays
  Clone ID: LIB3180-019-P2-M1-D7
tcgctcggcttcaacgccttcggcggcttagccgtgttcctgcccttcctaggggccaaggtcggcggcgccccggcgctgcgcgagcggctgcgggacgaggtgcggcgcgccatggtgggcaaagacggcgacggcgactgcgagttcgggttcgccaccgaccgcgagggcatgccgcttgtgcgg

SEQ ID NO: 27671 - DNA, 304 bp, Zea mays
  Clone ID: LIB3180-019-P2-M1-D8
tctgtcccccctcaacctctgcatcgacgggctcgagagaagagtcggcgggtcgccgccctgctccggcaccagcaaaaccgccaggtgatccccgacaaccagctagagcagctagccgctgcagcagaagggaccttcttatcgccgtgattcgattgggcggtgcggactccatgccgcttaatcctacagaaattgtggagtgcgagcgttccgtcgatctccacgatcgtctggacaccatggttatagcctcagatttcatgcctgtgatggcagggggggatctctgaattttgaa

SEQ ID NO: 27672 - DNA, 112 bp, Zea mays
  unsure at all n locations
  Clone ID: LIB3180-019-P2-M1-D9
agcagctggctagatccgagcggccagccctttttagtttttttttaaaaaaagaagggaccccccccacctcctnctaccattaaattctttttattttttccaattcctc

SEQ ID NO: 27673 - DNA, 237 bp, Zea mays
  Clone ID: LIB3180-019-P2-M1-E10
tctagaatctgtacaaaagagtggctagctactacacgagagtccgttctgagagaagcaacacgaggtcagtcagtggatgagtttagagtgagacattcacacgctgagagggttgataatttgtgatattttcctctttttttttcttcttcctgattttgtatattgtaatatcctgctggattttccaatgaatgagtgaatgtaccatataaaaaaaaataaataaatatt

SEQ ID NO: 27674 - DNA, 215 bp, Zea mays
  Clone ID: LIB3180-019-P2-M1-E12
tctgagaaaatcagaccaacgctgagttgatgaaggaagaagattggcagggtctgttagagatggaggaagaatacataaagaacctgtgcggtcaaattctaaaattcaagcctgatttagtcataactgagaaagggctcagtgatctcgctatccattatttgtgcaaggctgtggttagtgctatccgtatacttaggtatactttcatc

SEQ ID NO: 27675 - DNA, 162 bp, Zea mays
  Clone ID: LIB3180-019-P2-M1-E2
gaactacccgaccgtgagcgccgagtacagcgaggctgtggacaaggccaggcgcaagctccgagccctcatcgccgagaagagctgcgccccgctcatgctccgcctcgcgtggcactccgcggggacgttcgacgtgtcgtcgaggaccggtggtccatt

SEQ ID NO: 27676 - DNA, 408 bp, Zea mays
  Clone ID: LIB3180-019-P2-M1-E3
tagaaaccctagttcgaacgcgccgccgggaccgtcgtcgctcgcgctctgcgcccggatcggagcgagagtaggggcgtgtcggcggtgaaagcgactgcgtcagccatggcggacgaggagcattcggagaggagagaggaggcctccgagcttgcccccttcgacccgaccaagaagaagaaaaagaagaaggttgtcatccaagaaccttctgatgaagtggacaagcttgcagagaagacagaaacactggcagtcgcagaacccgctgaacttaacttgactggaatgaagaagaaaaagaagaagccggtggatcttgattcaactcttgatgagcttggagatggggaggacactcaagatgatcaagctgtagaggaacaaggggaaggcattgtgctt

SEQ ID NO: 27677 - DNA, 136 bp, Zea mays
  Clone ID: LIB3180-019-P2-M1-E5
tgatatccagatcagcaaaccggcagtgcttgaagagtttcgtagaacagaagagcctccctatggtcatcgctctcgtcagtgtgcctggctctgtcagctgccaacacctctgcattgcagcattccctgcccc

SEQ ID NO: 27678 - DNA, 231 bp, Zea mays
  Clone ID: LIB3180-019-P2-M1-E6
tgcaatgagggggtgcgagcaaccattaatgattagatttgctgatcctaagaggcctacacctggagaatcaaggggtcgccctgcatttggaggtcctggtttcagtcctcgatcggatgcagcacttgttatcatgccaacagccaatcttgttgaatctaggggtcagcttatgcttcctgaatcttggcgtccatcaagtccaaggcctatggctcctaaccaata

SEQ ID NO: 27679 - DNA, 302 bp, Zea mays
  Clone ID: LIB3180-019-P2-M1-E8
ttaacatctggtctcgctgccccgattcagcgcgaagccgcactgtgagagagggacgcggcccgttgtccccggcttgtacgcaatccttccgtcgctgcgaagttgatccctcgtgttcgccatggcccccagcgttgtcgtggaaaacctcaaccccaaggtcttgaaatgtgagtatgcagtccgtggcgagattgtcatccatgctctgcgcttgctgcaacaacttctaactcatccagggtttcttccttttgttgagatccttgttctgggggggggggaattcctttatctcc

SEQ ID NO: 27680 - DNA, 278 bp, Zea mays
  Clone ID: LIB3180-019-P2-M1-E9
agcgttcttcaacttctagcttagctctggggggaaagagagagttagagagcgagagagagctctcctcccgaggctccttggttgtcctcaaaccttacttcttttcgaattcaatccccctttattcgaaatctttccctatattttttcttctatatccattatttaaactattttatttaaatttctaatttttatttttttcttatttttcttcttatttcttttatttcttttttttatataaatttataatattcctttctatttcttta

SEQ ID NO: 27681 - DNA, 407 bp, Zea mays
  Clone ID: LIB3180-019-P2-M1-F11
tctcgatcttggaagagcagaagtattagctgctgttacccctacaagtcggttcgtatttgatgcaaatttcgaaccgacaatacaaagtggacatgtaaacattcaaggtagtataccagtcacttatgtagacaacagctcgatagaggaaagtccagaagaggcagatgggaaacaaggtatcataagaatccctgtttgggcaagagacagaggatcatcgaatgagatcagtgaagcaagaatggtgagagacaagacagaggagggctgggaatttcaattagctgaaaaacttaaaggtttaagttataacatgctagaaccaggtgaagtgaggatagatgcagatataaaggatgggggtatgatgctgataactgcattgagtccttatgcaaact

SEQ ID NO: 27682 - DNA, 396 bp, Zea mays
  Clone ID: LIB3180-019-P2-M1-F12
tcggcgacgggccgccctttttttttttggtctggccacctaagaaagcagttcacaaaaaacccattttaggacccacatgccatgttttacaaggtgggaccactcttgacacttgaaagaagggagccacaaacccttttagagattggcgaatagaatcccttttcttatatacaccacctcactatccttttttgtctattatccaccggttagagctccacagcacggtgtgccactcaacgcctacttcggggggtaatctgggccatcgacctcgctgttcacaaaggcaactcaaattttgggccgcattccttctgcagaggtagcagactgctcagcgctagaagtagcaacagctaaagctggtttcttgaattgaaccacaat

SEQ ID NO: 27683 - DNA, 396 bp, Zea mays
  Clone ID: LIB3180-019-P2-M1-F2
tttcaattgaggaaggagaagttgtggatgacgactgttgatgctaaaaggactaccaagactccccctcatagtgttgatagaagctttgaagggattagatcgataaataaatatttaaccgagaaagcccttgctgaattagtattgccttgcatcgacagaagttctgctgatatccgtggtatactttctgttgatttgaccaaacagatgggggctattagtgaacatatcaaagcaatagcattgaatggtgctaaacaagcttggtcagtttcttcaggaaatgaagtgccatcgaacaaatcaagtggccgtagaggaattcgaggtggaagcccaaacattggtagaagagctccggttggtaatgacccaagtcctccttcggct

SEQ ID NO: 27684 - DNA, 409 bp, Zea mays
  Clone ID: LIB3180-019-P2-M1-F3
ttcaaaccctagccaatggacgccgccgccgttcacaagcgcaagcgacctgaagaggccgacccaagcgcgggggagctcgacctctccgccgccgacgccgtcgaggtactcgacctccgggccgccaaacgcctccttctggccttcgagcgccgcctccgtgacaacctcgaggcgcgcatgaaataccccgacgaccctgcccgctttgcagactccgagatcgcgctccacgccgagaccgaccgcctccgcctccttgccggcgcgcctgagctcttccccgacctcgtccccatcggcctcgcctcttccctcgccttccttctcacccacgacaatgtcgatctcgcagctgccgccgcatcactcctcggcgacctcaccgactccgaggaccccttcg

SEQ ID NO: 27685 - DNA, 372 bp, Zea mays
  Clone ID: LIB3180-019-P2-M1-F5
tgcgttcccgtagtccgcaagagagagatggttttctcggttgcaatgaagagttatccgagggcgggggcccaccctgttgccatcttgcacatactcctcttactagaccatttcattaaccacggcggcgctgccattgagagcaacaagggctgctcagtgtacccggctgctgtaatatacccgtatcactaaagccagaactactgctaacccaaagtattgctgtatcagcactttctcagcgacgacgaggcttaccacctgatctccctcgcgagagcggatctcaagatgtcagctgtcgccgataatatgtctggcaagagcacgctcagtgaggtccggaccagcttcggcacctttctc

SEQ ID NO: 27686 - DNA, 155 bp, Zea mays
  Clone ID: LIB3180-019-P2-M1-F6
tggattgcggacgacctacattgactttgagcacatggctaaaactccataagcaccggaaccacttgttgcaactgctgcatttttgaccattgcaccatacgagatttattttgaaggcctcaccggtacacactttattgatgctttaacac

SEQ ID NO: 27687 - DNA, 418 bp, Zea mays
  Clone ID: LIB3180-019-P2-M1-F8
tttgttgctggaagtgaggaaggaactggatggtgcctaccacaccatagcaaatcaggaagaacaggcttctgtgagggagataaagtgggacgcttttaggaagtacacggaggatcgtctggaagctgagcagcagcgtgctgaggagctggaactacaagtagcagctcttaaacaacagctccaagaagctgagatccattataagcaaaaggaagaacaagtttctctaagggaggttcaatgggaagcggatcaaaaccattcgctggatgagcttaacgctcagcgtcagtatgccacagacttggagaaacaaatcgaagatctgacacagaagttaacatcagctgatgcacactacaagcagaaggtgacagaagagagggacaaacttgttgaggtcaccaaagag

SEQ ID NO: 27688 - DNA, 223 bp, Zea mays
  unsure at all n locations
  Clone ID: LIB3180-019-P2-M1-G11
attctgttctagatcgcgagcagccgcccttagttttttttttatataaggaggggggnnnnaacncaancaaacaatcaccctctgctcttctatttaaccaatctttaaacagaaataccaagacagcccctcatttacctcaaaaaaggcccacataataccaaatctaaatcttggattccctaaaccatcaaaacaccccccctccataccccaaatt

SEQ ID NO: 27689 - DNA, 378 bp, Zea mays
  Clone ID: LIB3180-019-P2-M1-G12
tcgggggtttcctcagtccatcattcacggggctagtcaagttaagcctagggtgccagcccctcctgtgaagcacaacgcagtacctgttaccgcagtgacaccgagaaaatcatcatctgggtcaccatcatcctggtcacgtgttcagctaccaatcccattgaatcctctgccaataaagaaacatgagtgcaatcggttgcctatccacagttgctctgaagaagacttcttgaaagatgtcatgcagtttctacttcagaggggccacatccgagttgtaccttatggaggactggcagaattttctgacgcagtgttaaattcaaagcagcttgatttatataacctatacaaagaggttggtttcctagg

SEQ ID NO: 27690 - DNA, 195 bp, Zea mays
  Clone ID: LIB3180-019-P2-M1-G3
tcttatgagtgactaaaagggactaaaccatgttaattctaccttttggctctgctttattttagttacactaatgaaaataaattacactaatggcatgagaatgctaaggggtattttggggtgtatgttcaaacttttttttcataatttaacttttaatatattttccgtcattgtacattttgttgtatt

SEQ ID NO: 27691 - DNA, 262 bp, Zea mays
  unsure at all n locations
  Clone ID: LIB3180-019-P2-M1-G4
tggataacccacgccagaaaanncataaagacacctttcaaaaaacacaagagccccccctcccctttntccctcctctattctttttaccactactccctaccacattgatctttaaagccacattattacacacttttttcatgcttaatcacataatatagtatctccctatcaatcataattccaaaaccacttatcccgtctcattcttaccatgccaacttcatatcctttttctctatataccctaatattttta

SEQ ID NO: 27692 - DNA, 416 bp, Zea mays
  Clone ID: LIB3180-019-P2-M1-G5
tcttatgaagctgtggctacccaaaagactgggaatacaacatctccttctagaggattacccaactccttctccatatcctgattggtcaaccatgcacgcatattatggccctggtgtcttgccaccaacatattttactcctgcaatagctccaggtcatccaccgccatatatgtggggtcctcagcctataatgccaccccctttcgggacaccatatgctgcagtatacccacatggtggagcttacccacacccccttgtgcccattatgtcaactgcaatgagcgtggatccagccaaatctacaaatagcaaggagaaaaaatccaataagaaacttaaggaaatatatcggacttgcagtgtctgctggctgtggttacaagtaaaagaacagtgtcatccattga

SEQ ID NO: 27693 - DNA, 352 bp, Zea mays
  Clone ID: LIB3180-019-P2-M1-G6
ttcgcccgtctcgatcccacaggatccgaagtacctcacaagccggcacgcgagttccccatcccatcgcggcgcctaccccacccgccctgctcccgcccggtagtagtagcagagcctcgccgccgctgccgagaatagatggggttcgtgtccttcgtcgggcgggtgctcttcatcgccgattttcttctctccgtctaccatgagtttaatgaatttggctctgatggtgggccagcagtttaggcccttcatcccaaattcaattggttaggggagggagtctctcacaatctcgatttttttttacttcaccttctttttttacacttgtttctttcttctttcc

SEQ ID NO: 27694 - DNA, 304 bp, Zea mays
  Clone ID: LIB3180-019-P2-M1-G7
tttacataacccgcgcgcttacctcctgagggcatcaggacatggcggacacccctacccccaagatggtgctggtccctatcgtgaatgggactgagcccatggacgcggccattaccatcgacgtgctccggtgcgcggcagccgatgtcgccgatgtttccgtcgagccggatgcgacatccgcagctgacttatgaggcatgaagcttaccgcagacgcggtcctcgtggacctggcggaccatgagtcagatctcatccatgtaccgggaatggctgatttttcgacttttggagagag

SEQ ID NO: 27695 - DNA, 371 bp, Zea mays
  Clone ID: LIB3180-019-P2-M1-G8
tgtccaccccctacaggtaaggaagaggagggcaggatgtcgcaccgtaagggcgagcacccgaggcacggctccctcggcttccttcccaggaagcgctcctcccgtcaccgcggcaaggtgaagtcattccctagggatgaccccaagaagccttgccatctcactgccttccttggctacaaggctggcatgactcacattgtccgtgaggttgagaagccaggatccaaactccatatgaaggaaacttgcgaggctgttaccatcattgaaaccgggggtagtgtcattcttgccctcgtttcacaatctaagactttctagaggcctccatacactcaactttggtttgggcccaacatcttaat

SEQ ID NO: 27696 - DNA, 173 bp, Zea mays
  Clone ID: LIB3180-019-P2-M1-G9
ttttcttccttaattcctcatttcctccacggacgcgtgcatactctgcgaggccaggagatttttttccccttcttcacgatactctcgacgagagtgtctccatggccggaaaaggagacgggccggcgatcggtatttacctcggtacgacctactcgtgcgtcggtgtg

SEQ ID NO: 27697 - DNA, 155 bp, Zea mays
  Clone ID: LIB3180-019-P2-M1-H1
tcttgaccattagctttatctactccagagcgcagaagaacccgatcgacacgatgagggtgttgctcgttgccctcgctctcctggctctcgctgcgagcgccacctccacgcattcatgcgggggttgctgctgtcatccttcgtcgtcggtt

SEQ ID NO: 27698 - DNA, 402 bp, Zea mays
  Clone ID: LIB3180-019-P2-M1-H10
tcgccagacccacctcgtccgcttcgtcctgtcgtctactcgcactcgctaggtgacgctgcgtgcgccaaaagcagcactgcagcagcaggtccagccgtcgccgttcccacttcccaccactgccacgcgcgccccggatcgagggagggcacgcagacgcggaggagggaggatgagtctcttcgggcttggacggaaccagaagacattccgccccaagaagagcgctccatcaggcagcaagggagcacagctccgtaagcacatagatgccactctcggcagtggaaaccttagggaagctgtgaggttgcctcctggagaggatatcaatgaatggcttgctgtcaataccggggatttctttaaccaagttaatatgctgtatggcacgctcac

SEQ ID NO: 27699 - DNA, 294 bp, Zea mays
  Clone ID: LIB3180-019-P2-M1-H11
tgctcccaagtcgtcgggagtgaggaagaagctaggcaaaagatatactctggatcgactcgtcattactttggctttggtgctcttgtatctgaggaactttcttacaaactgaaagaaattcccaaggtccgctgtgttcttcctgattcatacttggatgtcaaaaacaaggactatggaggcgaacccttcattaattggcaagctgttccttatgatcctaaatatcattgaacagtgttttagtaactttgtcctttgcattttccataaggggggggggggttaatt

SEQ ID NO: 27700 - DNA, 192 bp, Zea mays
  Clone ID: LIB3180-019-P2-M1-H2
tcttacgcgtgggcgcgccgctcttttgaagacatccctcctgcttgcggcgagcgctgtcacatgtcgtgtggtgtgttggctctctgatccggatggttcatcgcctttgtcttctcccacggtcattattattcttttttctttcattattaatttgcaatattattttatcgtggtctcttttctgtt

SEQ ID NO: 27701 - DNA, 358 bp, Zea mays
  unsure at all n locations
  Clone ID: LIB3180-019-P2-M1-H3
tataagagcaaggagaccgcaggcgccgacgccaccaccaccacccaggcgggaccggcatccgagaaggcagccgccgccgagcccgtcaaggacgagctgtgagcatccaaggtgtggacggctgtggctgcgtaagcatgggaggaaaacctggcgctaacgtgcctccaacgcctagtttttgcgggaccagagggagagagagagagggacggagttagagagagaggggatctgcgacgtgttttgctctgcggctgcatgtctttgtatccgagggaggagatgtacacatttacactctngttcggttggttttcttttttatttattttttcatttagttgtcatttta

SEQ ID NO: 27702 - DNA, 395 bp, Zea mays
  Clone ID: LIB3180-019-P2-M1-H5
ttaactagcaacatagaaagcacaataggggaccaacaatggcagccaaggtattttgcctccttatgctccttggtatttctgcaagtgctgctacggcgaccattttcccgcaatgctcacaagctcctatagcttcccttcttcccccgtacctctcaccagcggtgtcttcggtatgtgaaaacccaattcttcaaccctacaggatccaacaggcaatcgcagctggcatcttacctttatcacccttgttcctccaacaatcatcatccctattacagcagttacctttggtgcatttattggcacaaaacatcatggcacaacaactacaacaacttgtgctagcaaaccttgcttcctactctcaacaacaacaatttcttccattc

SEQ ID NO: 27703 - DNA, 306 bp, Zea mays
  Clone ID: LIB3180-019-P2-M1-H6
tcgagttgcctgtgcagtggcaatagaagcgttgaaactttaccgcgaaagggatattcctggtcatgtcaagcaaatcgctccaaagttccaggacggaattagggcgttggcagacagcccaatcatcggggagatacgtggcttatggatgattatgggaaccgaattcaccaacaacaaatcaccgactgatctattccctgccgaatggggggttggttccatttttattatttatttccttaacttctttttttctatatatttttctttagggagggggggtttttttatctcttttcc

SEQ ID NO: 27704 - DNA, 216 bp, Zea mays
  Clone ID: LIB3180-019-P2-M1-H7
tcttaaaactgcaaagaaggattttaccgggactgaggacgacttaaagggtctgcagagtgtggggcaaataattggagaagtactccgacctcttgataatgaacgctttatcgtgaaggccagcagtggtccccgatacgtggtcggttgccgaagtaaagtggtcaaggagaagttgacatctggtactcgtgttgaacttgacatgacgac

SEQ ID NO: 27705 - DNA, 161 bp, Zea mays
  Clone ID: LIB3180-019-P2-M1-H8
tttctttagaagaaggctaccgcagcccttacgatgttctcagaaaagagtggacgagctcacctctctaccctttccccctcgaacccgtcaacaacactctgtgaacataccatgtgttgacggccgtggccgcttctttctttcaacaatacatttct

SEQ ID NO: 27706 - DNA, 267 bp, Zea mays
  Clone ID: LIB3180-020-P2-M1-A10
tcgtactaatccagcccatttcgaactgggtgtagacgcttcctcgggcggtctgttcaccgctgccccgtaccgtactcctcttcgcgccgtagaaatggcgctgccgaatcagcagggcgtggattaccccagcttcaagctcgtcatcgttggcgacggtggaactggtaaaaccacatttgtgaaaaggcatcttactggcgagtttgagaagaaatatgagcccaccattggtgttgaaggtcaccctctggattttagcac

SEQ ID NO: 27707 - DNA, 134 bp, Zea mays
  Clone ID: LIB3180-020-P2-M1-A11
tgtctcttccttaccatggatcggaatggggggtgccgaggttcacaaactgtggggagatctgtattatcagacaaacaagatctttgcttctcttttttgtcattgctttagtacatgttcatagctttttc

SEQ ID NO: 27708 - DNA, 262 bp, Zea mays
  Clone ID: LIB3180-020-P2-M1-A12
ttttcgccaagatacaatcctatggcctacgggcatgcttatgttcatttttgggacgaacatacatatgtgactttgcttactacacgatcagatgctttttatgatctcaaagattccagggcccacattcaaaatgctcttttaaagtcaaatgtcctcatcgaagtccaaagatctttacatgagaatgcattgcgtgttgaggatcttctaaccaacccgtcttttcaatttgcatcacaccctccaaagtgctctc

SEQ ID NO: 27709 - DNA, 271 bp, Zea mays
  Clone ID: LIB3180-020-P2-M1-A2
tgcattcattcgaggaagatgaaatggatgttgggtctgaagatgaagacgaggagcttaatgttccagtagtcaaggaaaatggcaaagctgatgagaagaaacagaaaagtcaagaaaaggcagttgctgcaccttcaaaatcaagttcggattccaagaagagcaaggatgacgactattctgatgaggacgagactgatgattctgatgaggatgagacggacgattctgatgagggtttgtatatctaataaaagcttatgatgat

SEQ ID NO: 27710 - DNA, 289 bp, Zea mays
  unsure at all n locations
  Clone ID: LIB3180-020-P2-M1-A3
tcttaatcatctaaaccctaacnncnnaaccgtggcggtcgctctgtcctccgggccggacattgctaaaaccaatcccatgtcggcggcgggcgagaagaagaatagcaaaggaaagaagaaaggcaagaatggcccggccaaggtggccatgaaggctcgtggcgcggcggctgatgagcggaacaacccgttcgaggccatctggtcgcgccgcaagttcgacgtgctctgcaagaagcgcaagggccaggagcggcgcgtatcgcgctcacgttccgaggccatt

SEQ ID NO: 27711 - DNA, 189 bp, Zea mays
  unsure at all n locations
  Clone ID: LIB3180-020-P2-M1-A4
tctttttcttctctaccttaccctcnactccgggctggttcgtattgccaatagggccgacctttcccaccttccagaccaccttcttatagatctcttcctaaaaacccttaatgctgataagcttacaaataaagttctcaagttttttctagcaacccgttgcgaggatattatattgcctaacta

SEQ ID NO: 27712 - DNA, 145 bp, Zea mays
  Clone ID: LIB3180-020-P2-M1-A5
tcgcgacgatgatgttgaatgacagaatccagagccttcgtggtcttcaatcagccctgagaaaggcagaggagtatctactgagtgttcctcaagacactccctactcggagttcaaccataggttccaagagcttggcttgta

SEQ ID NO: 27713 - DNA, 398 bp, Zea mays
  Clone ID: LIB3180-020-P2-M1-A6
tggccgaggtgatgacatggctagctactcccctcaaaaggactgtcaagtttgccgatgtcaggcctcccgaaacaaacaggccctttgtcacctttaaggctgaggggaacttctactttgtcgatgctgaccacttctcgaacaaggcattgttggctaggctaacgccgcagaagcttcctcatgagtctgcgttcaagaacttgtgattgaaagctgttccgcttgcccatgcctgctccctttgtaggccgctttgagaacatttctgtgataactcttcctgctaatactttcctgaagatgtgttactatatatttgtactgttgcttaacattctctatgtggagaactgctagctgcttgtgtcgagcagctttagtttatgaaacac

SEQ ID NO: 27714 - DNA, 327 bp, Zea mays
  Clone ID: LIB3180-020-P2-M1-A7
gtcacaggtgattacttgcttcgtggcggtgctcaaaaggtctggaaagccaggaagagtctggcctccccctacaaacacgcgttgcagctattgcaatggacaagctaactggcaccttgtcgtacctgaccacttctatgacaagggacggctggttagactaacggcacagaaggtagacgatgagtcatcctaaaagaacccgtaagcaaaagcagttgcccttgaccatggctgcctatcttgtactgcagttcaagaacaagtttgggagaactcttactgctaatactttcctgaagatgtgttactatatatttgtac

SEQ ID NO: 27715 - DNA, 206 bp, Zea mays
  Clone ID: LIB3180-020-P2-M1-A9
cgacgccttccacggcgacagggacgactgctgcgtgcacgacggggccgtcctcgtgctctgggagtggtgcaagggcgagaaccagagctggaagatcctgccgtggggtcccgaggccaactccgacgtgttctacgcgggaggcccgcacgccgtgctcgttttctgtaaggtctgtggtgaggactacagtcttactgtgt

SEQ ID NO: 27716 - DNA, 341 bp, Zea mays
  Clone ID: LIB3180-020-P2-M1-B1
tctgcttagtccctcacacactcactatacactggtgtgctgcagcaagaaggagagaagctagcgcctccctagctctcgttgtcagcaatggccaccaccgctgcgtccagcctcctcaagtcctccttcgcgggctcccggcttccttcgggcacgcgcaccaccaccccgtcgttcgtggccgtggccaccccgcgcgccggcggtggtcccatacgcgcgttcatcttcttccccaacccgccctacgacctgacgttctttcggttcagccccatcaaggagtccatcgtgtcccccgagatgacccggcgctacatgacggacatgatcaccca

SEQ ID NO: 27717 - DNA, 189 bp, Zea mays
  Clone ID: LIB3180-020-P2-M1-B10
tctggaaaggcagatttgcaaaagatgggctgattcaatataggattgggtgtgagcaaataaacgtgtcatccttggaggatgtcataaagcactttatgcagctttccaatgagaaagctgaacaagctaagagtcatgttgaagccctggaagatgctctggatgttgaagatctggaagcagaca

SEQ ID NO: 27718 - DNA, 270 bp, Zea mays
  Clone ID: LIB3180-020-P2-M1-B11
tctaaattatccttcctcccgtgcctacaggggtacacctcgacgatgccaaagccctagcgcagcagcgcgaactacacctctccccgtcctgttcctcgtggcgcggtagccatggcggagccggccatcctcgacccctcccccttcgatctccgccactatccggcgcacctcttcgacccggacatccccctcgccgtcgccgacttcccactcggtgaattcgccggagacgacggctgtgatggcctagacttcgacgtgccc

SEQ ID NO: 27719 - DNA, 171 bp, Zea mays
  Clone ID: LIB3180-020-P2-M1-B12
ttgtctgctcccttcctggccccccatcacctaccgatttccactgaacgagccacggccttttactactccttgtaccacaattatctactcccactattacaaccttacatatatttatcaatggccctttcattctattttttctttactttctatctctcccacttt

SEQ ID NO: 27720 - DNA, 141 bp, Zea mays
  Clone ID: LIB3180-020-P2-M1-B2
tttccattacttttaaccctcccctcctccgggtggggaactcacaagagaacgaaggagacaagggagaaggagatggctaaaaagaaggagaaggcggtgaacgtgtcgggcaagccggggcactcgaacgacgtcaac

SEQ ID NO: 27721 - DNA, 207 bp, Zea mays
  unsure at all n locations
  Clone ID: LIB3180-020-P2-M1-B3
tagtctataccctaaccctcgcccttctgcggtggcggtcgacaccaccggggcagccccttcagtagccactccgatggcgcccccttcgtcctccccggccttcttcacggactcttnctccatctccgcgtccgccgaggaggaggaggacctctatggccgcctcaaatcgctccaacgccacatggagttcgtcgaaatcca

SEQ ID NO: 27722 - DNA, 111 bp, Zea mays
  Clone ID: LIB3180-020-P2-M1-B4
tttccttaaagagcttcgccccgctcatggtctgcatcacgtcctattagggcgtgactttctccaacctcataaaccccgacagctttttcgtcacattccatttcatcg

SEQ ID NO: 27723 - DNA, 244 bp, Zea mays
  Clone ID: LIB3180-020-P2-M1-B5
taaacaggaactgcatgatcggttagtcccagtacaggaacacgttcgcgatctgggcttctgggagagtaccggtgccgagtcctgggggctgctggcaagcggtagtgacccggcctggccccgtcaacttgactgaaaggcgctttgttgtcttggcgttctatctcggcaacgccgagggctgttttgccggccgcctagctgtctcatgaataaatcagcttttttgtgagtagctatg

SEQ ID NO: 27724 - DNA, 225 bp, Zea mays
  Clone ID: LIB3180-020-P2-M1-B7
tcgggagagtgctcctactcctatgaagaggggctacaaactggctaagcttggatgctgggaggaggaagccgatgccatggaggagaaggccggagggcttgatgagtaagacgggcttccggggtcgattcgcttcttggtgccaaagaaaagactaacctagccgccgccgtcgctcgtctgcctgagaggcgccacgcaccgaggatttgggcgagttct

SEQ ID NO: 27725 - DNA, 140 bp, Zea mays
  Clone ID: LIB3180-020-P2-M1-B9
ttttctgtttctagatcgcgagcggccgccctgtttttttttttttgggggggatgcgactaaaccataacaaacattttttgcttacaacaatctgctcatttttttactagcaaatatactcggcgggtcaaaaactt

SEQ ID NO: 27726 - DNA, 235 bp, Zea mays
  Clone ID: LIB3180-020-P2-M1-C1
cccttctttgtccccttgggggggacccaccatgggggcatcctttcgcctgttggggcaaagcaagattcttccccttgaaccccttcttgtaaatagcctaattggaaaggccgatggttttgccgaagttttccttgaccccaagtccaaaaccgtaagaggactgcaggaaaaaaaccatttcgttggattaactgagaatggggccaacaatcccccggtttttaaaaag

SEQ ID NO: 27727 - DNA, 268 bp, Zea mays
  Clone ID: LIB3180-020-P2-M1-C10
tctcttaccaggtccagacatagcaagggagtgacatcgccatggcaggcaagatgtttgcattgtttgcgctcctagctctttgtgcaaccgccactagtgctacccatatcccagggcacttgtcaccactactgatgccattggctaccatgaacccatggatgcagtactgcatgaagcaacagggggttgccaacttgctagcgtggccgaccctgatgctgcagcaactgttggccttaccgcttcagccgtgccagatgcc

SEQ ID NO: 27728 - DNA, 344 bp, Zea mays
  Clone ID: LIB3180-020-P2-M1-C11
cttgatccttgagaagagagaggaagacgagagctagaagcgaaggagaaaagcagttcttcagctaggcaggagggcacaggaaggaggagatggcgtcaaagaggattcagaaggagctcaaggatctgcagaaggaccctcccacctcgtgcagtgcaggtcctgttggtgaagacatgttccactggcaggcaacaataatgggtccatctgatagcccatattctggtggagtttttctagttacaatccattttcctcctgattgtgcggtggagagcaccaaaggtggcatttcgcactatggggtttcattcaaacattaacagcaacgggagcat

SEQ ID NO: 27729 - DNA, 217 bp, Zea mays
  Clone ID: LIB3180-020-P2-M1-C12
tctctggagagcagtactgcccgctggagcgggttgttatgaaccaaggtgcggagctttttactgtgagcaacagttccctgtcagaatttgctgttttgggctttgaattgggttactccatggagaacccaaactcattggtcttatgggaagctcagtttggcgatttttcaaatggagctcaagtgatatttgatcagtttctgagcatgtg

SEQ ID NO: 27730 - DNA, 314 bp, Zea mays
  Clone ID: LIB3180-020-P2-M1-C2
ttgtgtgtctcgcgacttgcttttaatgagtcgtttgcaagatggtattcagctcatggacatatcatcgcagattttattcaacagagtcatggcccagttagggctgtgtgctttcagggctggtttgataaatgaagcccatggttgcttgactgagctctattctactgggagggtgaaagaattgcttgcacaaggtgtgcaacaaagccgataccatgaaaaaacttccgaaccaggaaagacttgagaggagaaggcaaatgccttaccatatgcgtataaacctggagctcttggaagccacacac

SEQ ID NO: 27731 - DNA, 102 bp, Zea mays
  Clone ID: LIB3180-020-P2-M1-C3
tctccatcatgtcgctctccacactcaaccagccgggcgtctccggcggcgggagcggaaaatcccttttcccggctggcccggcggcgcagaccgtacatt

SEQ ID NO: 27732 - DNA, 86 bp, Zea mays
  Clone ID: LIB3180-020-P2-M1-C4
ttggtttggggtcctaattttcgccttttttggttggcaaacttcctcttccagggggggaaaacgccttccgatcatgaccccca

SEQ ID NO: 27733 - DNA, 348 bp, Zea mays
  Clone ID: LIB3180-020-P2-M1-C5
tcgagagtttcccgaatgggcctccgccaccgaccgggcgcgtcgtcccgccggggcccgacaaaggaacggaggatggaagccccgggctcgccctacgccttcttgccggaattcgtccccaagcgtgcccctcgctccccaccgcagcagcagcctccctccgaggaaggagatgacaaggagaaaccaatacatttgaggtttctggtgtctaatgcgtcagcaggatgtatcattggcaagggtggatcaactattaatgactttcactcccaatctggggcttcgattcagttatcacgtaaccatgagtttttttcctggtactaatgacagaatcatcat

SEQ ID NO: 27734 - DNA, 312 bp, Zea mays
  Clone ID: LIB3180-020-P2-M1-C7
tctatccttgtgatgtgatgtctcatggtgcatgtcattttggttgcagattgtgtcattttgggtggtagcagtgctttaattctttattatgagttcattaccagtttggcatgtgaacagatagatcggtcacacgtcattttctgctttacaggtatcactttcttggataattggattggattggcacattgtgttgtgcctttgctgacttgtcctgcactattttcctgttggaattctgttcacggtccccttagtatatagtaccttaaatgggcattcacctggatgccttaagatatgctc

SEQ ID NO: 27735 - DNA, 381 bp, Zea mays
  unsure at all n locations
  Clone ID: LIB3180-020-P2-M1-C8
tctgaacggtattgcacgggaccaacgatgggggatgatgtcttgctgggattggtgttgatatggcaatggtgcagctgatgtgacgatgcagatgccgatgctgctgacagtgaccatcttgtttgcacaatgatcccttacaagttatgttggttcttatccccccttctcgcagatgcttttgcatcagtgctagttggaacatggtgttgaggggttaattatgacgggcatgggtcctgtttatcatgtggtggtgttttgtgggggggtgtgggtgtgtggtccttgttatatttatttttttaagcaaccattattagaattcatgaactcnattttttttttttatatttttttttatttctttattttttt

SEQ ID NO: 27736 - DNA, 223 bp, Zea mays
  Clone ID: LIB3180-020-P2-M1-C9
tctggaaagggaaggaagcatgttcgggcagcaccacatccacggcgggcaccaccaggccccgtcgtcgaacgagcagacgcttttaagatctttttccccgcccaccaaggcttcttgcttaaccttccttaacatctctcttgtcttgggcccaacaaacccccggacgagtaccaacacttgttccaggacattatgcacaacaccaatgttaaagacc

SEQ ID NO: 27737 - DNA, 89 bp, Zea mays
  Clone ID: LIB3180-020-P2-M1-D1
aagcctcttccttacaacaacggccccggccccccgggggggtctttattgcctgggggcgggtacctccacctggagcagttccagct

SEQ ID NO: 27738 - DNA, 163 bp, Zea mays
  Clone ID: LIB3180-020-P2-M1-D10
tttctgtaaattcgtcctgctcccccgcggatcgcaccatccgggcgcatgtgcggccaattcgacccggttacttggcttctttgattggggaggggagatgtgatttattttttctttttggggtaatactgatttttttttttaatttattctatgataa

SEQ ID NO: 27739 - DNA, 437 bp, Zea mays
  Clone ID: LIB3180-020-P2-M1-D11
tcgccaatctcctcgccccccacggacctgggcgcgagaacctttaccggcggcggctctcgcctagccgccggagaagcgccgctcgctcaggaggacagccatggcgccggagccggaggatgatattatgaacgagaagaatccccgcccgctcgacgaggatgacatcgcgctcctcaaaacctatggactggggccgtattcgaccagcattaagaaggtcgagaaggagatcaaggaaatggccaagaaaatcaacgacctctgtgggataaaggagtctgatacaaggctggctccacctagccagggggatttggtttcagataagcagatgatgcaagaagaacaacccgttcaagtagcaagaagtaccaagattattagcctctatactgatgatgcccaatattgttataatgtaaaacaaattg

SEQ ID NO: 27740 - DNA, 368 bp, Zea mays
  Clone ID: LIB3180-020-P2-M1-D12
cttgctgtgaactcgccttccttcccacgtaactggcaggttggagagtgtgttgctgtgtggtggcgaccgaattttgagactgtgatgtatccttactgccctccacatatcaccaagcccaaggagtgcaagaaacttttcatcgttcacctatccgaaagagagtattttgctgttccaaggaatttgaagctgcttgctgttccgctctttgaactctacgataatattcagcgatatgggcctgtcatcttcaccattccgcagcaggttgcgaggttccagttcaacatggtgagctcttagaaggtgtccagcagtttacttatatagtcatccaaaacattgtttttgtactatagact

SEQ ID NO: 27741 - DNA, 312 bp, Zea mays
  Clone ID: LIB3180-020-P2-M1-D2
ttatttctgacaacagctagtgaggaacctggcagagtgaaacagacaaggatggaggggctgatttttttgaagctagtgtgggtgtggaaaacgtttattattttattggcataagatgctcaggttgcagcatttccgatatttaagagctctatcattgattcattgttgagtcacttcactctattgttttcttgctttcatgggaaactgtttgttccttatagttatgttttataaaccaataaattatttactaaccatttagatgcacgagatctgtggggtttgcatggatatttattaaat

SEQ ID NO: 27742 - DNA, 268 bp, Zea mays
  unsure at all n locations
  Clone ID: LIB3180-020-P2-M1-D3
agaaggccaagaagcctgcgccccccggggcgggtgcctcttctgacgacgagcgatggcnacnccgactacgaggaaggtggcgagctagcggagccgcagggcggcgccgtcaggaggtgcacgcattgccagatcgagaagacgccgcagtggcgcgcggggccgctggggcccaagacgctctgcaacgcctgcggcgtgcgctacaagtccggccgtctgttcccggagtaccgacccgcggcgagccccaacctttttgccg

SEQ ID NO: 27743 - DNA, 255 bp, Zea mays
  Clone ID: LIB3180-020-P2-M1-D5
tctgtgtcactaaggagtaaaaggacttgaggactggtgagcagttggatgatctggttttcagtcttttaggacatgtttggatgcagccctggcctggaccgcctgctggcttaggcagctttcccgtgccgccattcaaacatgcccgcccttattttgtcgacgtaccaatatttcgatgtgattctgtatccgcatctgccagagtgctgttgcaacgttgcattctatcctggaagcttgaatgtttat

SEQ ID NO: 27744 - DNA, 263 bp, Zea mays
  Clone ID: LIB3180-020-P2-M1-D6
tctttataaaaagaaatcaagatatatccaagccccgtgaaaccgacctggcactttggttggtgacacaagggtgcagtttcacaatgaccaaacacatcttttggtcgtccatgagagccagttgggaatctatgatgggaatcttgactgtttgcgcttgtggtctccaagagatgcactcccagctccgatatcgagtgcgatatactcgtgcgacggtcttttggtttacgctgagttctgcgatggtgctattggag

SEQ ID NO: 27745 - DNA, 221 bp, Zea mays
  Clone ID: LIB3180-020-P2-M1-D7
tctccctgtcgtaccagtaaaccgtgcgggggtcccccgctaccggtcgctagccgccgcgctgctgcggctcgcctccctcccccccacgccccgccgccgcctcctctcgctccctccttttaccccgagcttaagctcgcgcgtacctgcctaccaatccgtaggagaggaagaggggacaaggcccggtcggtcggtcggtctgtcgttcggggggc

SEQ ID NO: 27746 - DNA, 206 bp, Zea mays
  Clone ID: LIB3180-020-P2-M1-D8
tctacaagggacaatgcttgtcctagtgaagggacacaacttatctcggggtgacacacacactaagagcgaggcttgattaaccatgagcggcctcattattgaccaggccttcacacaagccccctagcacctgccctagcccatcttcacccaggacaccgtcattcttgttatagacctgtctcctatgttcggcagttgcg

SEQ ID NO: 27747 - DNA, 146 bp, Zea mays
  unsure at all n locations
  Clone ID: LIB3180-020-P2-M1-D9
ttttccgcccttttttttttttttgntagaatactaacacaaaagtcagcgggcccaaattccatttatcnnctcctaatttataaatccattcctcatcaccattactcatattaaagacttcatacaacaattttttttttatt

SEQ ID NO: 27748 - DNA, 162 bp, Zea mays
  Clone ID: LIB3180-020-P2-M1-E10
tgcgtacacggtctccctcttcctgtcaggggtatagtgagagtgaggcagcgagtgggagacaaggggaaatggggaagggagcgcaagggagcgatgcggcggcggcgggcggcgaggtggaggagaacatttctttttgtctggttgccaagaacaccc

SEQ ID NO: 27749 - DNA, 334 bp, Zea mays
  Clone ID: LIB3180-020-P2-M1-E11
ccgcctctcgagtctcgtccacccggcgggctcctagctcctctactcgccagtcgccatgggcaagattaagatcggaatcaacggcttcggaaggatcggcaggctcgtggccagggtcgccctccagagcgaggatgtcgagctcgtcgccgtcaacgaccccttcatcaccacggactacatgacctacatgttcaagtacgacaccgtccacggccactggaagcacagcgacatcacactcaaggactccaagacccttctcttgggtgacaggccgggcaccgtctttggcatcaggaaccctgaggaaatccctgtgggtgaggct

SEQ ID NO: 27750 - DNA, 274 bp, Zea mays
  Clone ID: LIB3180-020-P2-M1-E12
tctcaaccagaagagcggcggctcgggcggacaaggagcaggcggaggaggagttgttccaagccacaatgggtatctcgcgtgactcgatgcacaagcgccgagccaccggtggaaagcagaaggcctggaggaagaagcgaaagtatgagcttggtcgccagccagccaacaccaagttgtcaagcaataagacagtgaggagggtccgtgttcgtggaggtaatgtgaaatggagggttcttttgcttgatactgttaactacttatgggg

SEQ ID NO: 27751 - DNA, 245 bp, Zea mays
  Clone ID: LIB3180-020-P2-M1-E3
gttcgaactgctgcttggcttcatagggggcaaactatattgagttcctgcactgacatgggtggagtaaggctgtgggatgtgagaactggaaaaattgtccaaactcttgaaaccaaggcttttgtcactagtgcagaagtaagccaggatggcagggtcatcactactgctgatggctcaagtgtaaaattctgggacgcgaatcactttggccttggtaaaagctatgatatgccatgcaa

SEQ ID NO: 27752 - DNA, 382 bp, Zea mays
  Clone ID: LIB3180-020-P2-M1-E4
tcttattttaaccccacccccccacataacagcagggcacattcgatgccaactgcacgcttaggtttgagcgatccgagcaaaaaaaatcaaccgaggcgcagcaacgcaagttcgttctctgaactctctgtgtcttttaacagcaaggacgcgcagcacaagaaaggttcggttcaagaggctctttttttgggtttattagaatcctcaaaagaagcgtgttctttggttaggattttttttttctcacctcaatacacctctcctaggtggagcagagaggcagatgaccctttttctctttggattttaccgatttttttttttctcttacaaacaccccttttttctactttatgtagactggtttttcaatttt

SEQ ID NO: 27753 - DNA, 346 bp, Zea mays
  Clone ID: LIB3180-020-P2-M1-E5
tcttcgtgcgcgccgttaacactgggtcgctcggctgggcgctcgcctcggcgttcggttacttctatatggtgtcggcatggggaggctacctgttcatcatcaatctcgtcccgctttatgtgcttgtgttgcttgtcactgggaggtactcgcagaggctctacgtggcctacaattgcatgtatgtgcttgggatgttgcttgcaatgcagattcgttttgttggattccagcatgtgcagtccggagagcacatggctgctatgggaggctggggctggtgcaagttttcttctttttggactgggtgaaatatcttgtaaatgatgccagactattcaag

SEQ ID NO: 27754 - DNA, 385 bp, Zea mays
  Clone ID: LIB3180-020-P2-M1-E6
gaccaactagcaacatagaaagcacaatagtgtaccaacaatggcaaccaaaatattttgcttccttatgctccttggtctttctgcaagtgctgctaccgcgaccattttcccgcaatgctcacaagctcctatagctttccttctttccccatacctttcaccagcggtgtcttcagtatgtgaaaacccaattcttcaaccctacaggatccaacaggcaatcgcagcaggcatcttacctttattacccttggtccttcaacaaccgtgaggcctattacagcagttacctttggtgcatttgttggcacaaaacattaaggcacaacaactacaacaacttgtgctagcaaaccttgctggctactctcagcaacagcag

SEQ ID NO: 27755 - DNA, 116 bp, Zea mays
  Clone ID: LIB3180-020-P2-M1-E7
ttcacaaccgcataagaagcctcggttgatggaaagttttaattcgccgaggaaggaccaggaggttgaggaggttgttctttctgtaaacgctgttacctcgaccattttccctt

SEQ ID NO: 27756 - DNA, 265 bp, Zea mays
  unsure at all n locations
  Clone ID: LIB3180-020-P2-M1-E9
tcgcatctgcgtacacggtctccctcttcctgtcagtagtagagtgagagtgaggcaacnagtgggagacaaggggaaatggggaagggagcgcaagggagcgatgcggcggcggcgggcggcgaggtggaggagaacatggcggcgtggctggttgccaagaacaccctcaagatcatgcccttcaagctcccgcccgtcggcccttatgatgtccgcgtgcgcatgaaggcagtggtgatttgctgcagcgatgtgcactacc

SEQ ID NO: 27757 - DNA, 194 bp, Zea mays
  unsure at all n locations
  Clone ID: LIB3180-020-P2-M1-F10
tgncttaggaacctgagcgcggacaccaaggcggggcttcttctgtttcacgccgtgccctttcactactcgctggtgagccttaagtccaacatctttcccataaacactcttgctaccgacggcttcgccaggaacttttattcactgtgcattactcctcttattttttttttttttattatatctttttt

SEQ ID NO: 27758 - DNA, 218 bp, Zea mays
  Clone ID: LIB3180-020-P2-M1-F11
tcggtccgcccccctctccctcagtaaaccggtctcttcttcccgcgggctgctcgttcgatctgtgcagcagatctgaggtctcgagcgaccgggaagcagcttcaatcgtcggcatggccctcgtattgcataggggggctggaaacaagaatgccttcaaagcacttattgctgcagaatacagggggatcaaggttgagttgaccaaggatttt

SEQ ID NO: 27759 - DNA, 342 bp, Zea mays
  Clone ID: LIB3180-020-P2-M1-F12
gctggctcgccaccaccgccgcaggaggcgtgggaatctgggcagcgccccgcggagaaaaggaggcagcgcgctctccgtccgccatggcgggctcttccgaccccgacaagctcatgagcaaagccgacaaactaacaaaattgagttttacaagatggaatgctgattggaaaagcgctacctccttgtatgagcaagctgcaattgcgtataggttcagaaaggacaatgagaaagcaaaagatgcttttgagaaggcctcaaaaggacaggaaatgatctcctcaccatgggacgctgctaagcatattgaatctgctgctgctttagcaaaggagc

SEQ ID NO: 27760 - DNA, 222 bp, Zea mays
  Clone ID: LIB3180-020-P2-M1-F4
tctctcaacccaaggcgtgcctccgctccggggaccggtcactacacgcaaccatgtcgaggaggaagaccagggagcccaaggaggagaacgtcacccttggacccactgtccgtgaaggagagtatgtctttggtgtcgctcacaactttgcatgcttcaatgacaccttcattcatatcactgatttgtctgggagggaaactctggttcggatcaccg

SEQ ID NO: 27761 - DNA, 331 bp, Zea mays
  Clone ID: LIB3180-020-P2-M1-F5
tctgtcagctccccaccatgcagaattagttgaacgcaaatggggtggaagcacacactttactgtagaagaagcaaaaagtaagattaagaatattctaagagaatatattgagaatgaagacatagatgaagcctttaggtgtataagagagctcagccttccatttttccatcatgaggttgtgaagcgtgctctcacctttggtatagagaacatatcctcgcaaccatcaatccttaagttattgaaggaggcagctgcaagttgcttgatcagtcctaatcaaatctcaaagggtttttctagactagctgagggtgttgatgac

SEQ ID NO: 27762 - DNA, 140 bp, Zea mays
  Clone ID: LIB3180-020-P2-M1-F6
tctttctttttaagcagatccagccataactactagcggtatttctaatagcactggttacagtaacaatggaactgtacccctttttttgtgcctactaaatttatcattgtcgccttatggaacttatattgctcctt

SEQ ID NO: 27763 - DNA, 241 bp, Zea mays
  unsure at all n locations
  Clone ID: LIB3180-020-P2-M1-F7
ttcgagcccttgtancccccacccgccgccggtgctgctagggagacttccataccgcgccgcgcctacaacgaggagctagcagcagtagcggcccgttatcttgtcgcttccggctccgttcgtgtacccaagtncccagccctagatgtccgcagatggggaggggtccactgatcacgatnncgccgccggcttgttcgctatagganngccggcttccgagcnnggcccgtgggct

SEQ ID NO: 27764 - DNA, 210 bp, Zea mays
  Clone ID: LIB3180-020-P2-M1-F8
tttctatggaacatcagttgtcaactaccgtagctcatgaggtaatcatggtgttttaaggaatccacgtggccaaccatcaaatcaatatggtggtggtcttcttgcatgacctgtgcattctcgagggccttaatttccttccaacggctctgattcttatagatggctctacaagggtcttatgcctttctctgctactcccatgca

SEQ ID NO: 27765 - DNA, 249 bp, Zea mays
  Clone ID: LIB3180-020-P2-M1-F9
ttttctggtgatcacgaggacaccaccaaggcggcgcaggttcactggttcagcgaccgctttccgcgatgtgccgcgccacggcgatagagggcggcttccttctcccgtccccgtcccggcgcctagacatccgcgctttctaccttcggctttactcctgctccgccacgacgcccgctgagcttacgctggcctaccacccggtcatcggttgcttcttttctttttttttttttttcttcttct

SEQ ID NO: 27766 - DNA, 233 bp, Zea mays
  Clone ID: LIB3180-020-P2-M1-G1
taagactaatgctgatgggaacacaacatgtgccaaggaaatgacaaagctctctggcatctctgaaatcatccccgagatggagatctgcgattttgactttgaaccctgtggctactccatgaatgcgatccatggctctgcattctccacaatccatgtgacgcccgaggacggtttcagctatgccagttatgaggttatgggcttggatgccactgctctgtcttatg

SEQ ID NO: 27767 - DNA, 195 bp, Zea mays
  Clone ID: LIB3180-020-P2-M1-G10
tcgttatgattacacttttattatctggttagtattactggtcatgataagattattatgttaattggaacatggagcgaccacccgggaaaacagtgctaccacaagggtttatggacgcccttggctgattaattaggaaagctagtggaggactaccttacccgaaaggggcaagggcagtatgggagtggt

SEQ ID NO: 27768 - DNA, 446 bp, Zea mays
  Clone ID: LIB3180-020-P2-M1-G11
gcgcggcgagagctgacctgcgctgtcttttctttggacgtatcgtgatccttttttttttctttatttttcattttcttataatttctattatcatttccttttttttctatggtttttcttttttttttttcttgtctatatgataactgttttttcttttcttttctctgtttgtatttcttttctttttttttattcttatcttttttttattattatctgttgtttctttttgttttttttttatattttcttgtttttttttttgttgtggttgttttttttttttgtcttttttattttattattttttgatattctttttttttatttttttttatttttctttgtttttttatctttattctttctgtgtttcttaattttttttttttttttgccttttgtctcttttttttttttttattatttttgtttgtttt

SEQ ID NO: 27769 - DNA, 264 bp, Zea mays
  Clone ID: LIB3180-020-P2-M1-G12
tctgactgtctcacgcaaccacctgaggccgggtcacctctaacaccgggcacccactgtcttcacccccgccctagatcaccaccgtactctcaggcgcaagaacgagctcaccaggcaaagtcacggcggcgacctccgtctttcaggtctcgcccttgctggcgcgcgcctctgttcaccacccagcgccgcgtttttctttttcagtccggtcgctggccgaccgccagcggcggttcgggccctgcttttcgcacgccc

SEQ ID NO: 27770 - DNA, 222 bp, Zea mays
  Clone ID: LIB3180-020-P2-M1-G4
tctttcgcgtgctctccgcctgcggcatctgggtcggacaacgaaaaactaccaaaaaaattagaaatccccaaatccgcgagatctatcagtatcgagcgatttaccgatccgattgctagggtttagtttcgaaaaagaaactttgaaaaaaaattttgttcgaggggaggagacaatggctccccaggggcagccgttggttttcccaattaaaaccct

SEQ ID NO: 27771 - DNA, 162 bp, Zea mays
  Clone ID: LIB3180-020-P2-M1-G7
tcgctcgcaccgccgcgggacacgaacgcgcgagccacccaaccggcccgaacccgatcgcaccgacgaggtggatcccaggggaaggctcctctttaccgccgccgatggacgtgggcctcggcggcgcgggtagttccggcagaggagggggaggggtcc

SEQ ID NO: 27772 - DNA, 324 bp, Zea mays
  Clone ID: LIB3180-020-P2-M1-G9
cccattcgcatccgcctccttttgcttggagccgaagaagagggaaaggaagggaggacagccgccgccgccgccatcaccaccgtcaggatgcattccacgaacctcctgctcgaggagcccatccggatggcctccatcctcgagccctccaagcccagctacttcccggcgatgaccaagatcgtcggcactctcggccccaagtcgcgctccgtcgacacgatctccgcctgcctcaaggccggcatgtccgtcgcccggttcgatttctcgtggggggacgccgcgtaccaccaggagacgctggaaaaccttaagctc

SEQ ID NO: 27773 - DNA, 374 bp, Zea mays
  unsure at all n locations
  Clone ID: LIB3180-020-P2-M1-H1
tcgcgctttctgctcgctcgcctccgctccgggagcgagctctatctcccgcgaggagcancaactgccaccgacgcacgcagaccggggaataaatattggtattggtagtgtgatatctataagaagtcaagatggtgaagttcacagctgaagagctccgtgccatcatggacaaaaagaacaacattcgtaacatgtctgtcattgctcatgtggaccatggcaagtctacgcttacagattcccttgtggcagctgctgggattatttgccaggaagttgctggtgaatgtcgcatgactgatactcgtgcaaatgaagcaaaacgtggcattacaatcaaatctaatggtatatctctttactatgag

SEQ ID NO: 27774 - DNA, 263 bp, Zea mays
  Clone ID: LIB3180-020-P2-M1-H10
tcttttttatctgtttagccaagctgtggcggaccgctgctaggaatggagatggagtccactcctctcttgacaccatacaagatgggcgatttcaacctgtcacacaagagtgtgctaccgccaatatcattacaatcatacctcttaaagctactcgccacacccacctcatccttaattcttccaaggatgctatgttgattcaaaaacttgattaaaccatatttcctatccaggaagatttcatttttgtccatttt

SEQ ID NO: 27775 - DNA, 181 bp, Zea mays
  Clone ID: LIB3180-020-P2-M1-H11
tctttgcttcttatttgcaacaacaacaacgggcattcagccagctacctgctgcctacccccagcaatttcttccattcaaccaactagcagcattgaactctcctgcttatttacagcagcaacaactactaccattcagccagctagctggtgtgagcccttgctaccttcttgacac

SEQ ID NO: 27776 - DNA, 170 bp, Zea mays
  Clone ID: LIB3180-020-P2-M1-H3
cataaccctagctcgccctccccaattggggaggtcgctcacaccctgcttgcctccacggctccacccctgcttcaggttacctgtgccagcgacgccggtagaagccatggacagctctctcgcgagcgcggcggcgatagccgatcagcgccagaagatcgagcagt

SEQ ID NO: 27777 - DNA, 327 bp, Zea mays
  Clone ID: LIB3180-020-P2-M1-H4
gtgactgcttctcgcttgccatactttgatggagattattggccaggagctgcagaagatatgatcaatcaactccgacaagaagaagatgaccgtaaacttcagaaaaagagtaagacaaagaagattattacaaaaagagctcttaaagctgctggccacaccgatctcagcgggaatgcttccaaggatgctatgttgatgcaaaagcttggtgaaaccatatatcctatgaaggaagatttcattatggtccatttgcagtattcatgtagtcactgctgtacccttatggtgtctggaaaacattgggtttgtcatcaatgc

SEQ ID NO: 27778 - DNA, 234 bp, Zea mays
  unsure at all n locations
  Clone ID: LIB3180-020-P2-M1-H5
ttttcttttccagagcattccgtnccncccccggctggatcttgtcgcgaccacgacctgctcttcttcccgccggctccttcttctcgcatggcgacagcctctcgttcctagccccccccagatccagcggcacgcacctacacacgcgcaaggaaccgtagacgcgcccccgcgccttccctctcttccgttcttcgccacccatggacgcggggaatggctgcagcgcgc

SEQ ID NO: 27779 - DNA, 216 bp, Zea mays
  Clone ID: LIB3180-020-P2-M1-H8
tccgaatctttcgccgccccatcagggcaggaattcttcgctggtcgggggcgttaattccatcggttgatcgaccggcctggagcagagagacagagagagatgggcaagtcctgggcgctcatcagccaccttcataccgtcgccgggccgagcatcaccctgctgtaccctttgtacgcgtcggtgtgcgcgatggagagcccgtccaatgct

SEQ ID NO: 27780 - DNA, 413 bp, Zea mays
  unsure at all n locations
  Clone ID: LIB3180-020-P2-M1-H9
tctaagcaacatagaaagtggaatccaggagggacaatagagcaacaatggagaccaagatattttccctccttatgctccttgctctttctacatgtgttgctaacgcgacaattttccctcaatgctcacaagctcctatagcttccctttttcccccataccttccatcaattatagcttcagtatgtgaaaacccagctcttcaaccatataggcttcaacaagcaatcgcagcaagcaacatacctttatcgcccttgttgtgtcaacaatcgccagccctatctttggtgcaatcattggtacaaaccatcatggcacaacaactgcagcaactcgngctaactgtgatcaaccaagtagctttggcaaaactttcttcctacttttcggaacaacaatttttttca

SEQ ID NO: 27781 - DNA, 264 bp, Zea mays
  Clone ID: LIB3180-021-P2-M1-A1
tcacttctgcatgatctatctcccttactggcgggcgtctacgcctgggcggccggcgcatccgtcctacgccaggtgcccaggttctcgtccggctcttagccggcgatgagcacccaccaggccaatacgctgcggttgtacctaacctgcatccggaacactctggaggcggcgatgtgcctccagaattttccttgccaagaagactataggcacaacaaaccggaggtggaactcaagacacgcccttaacttatgctc

SEQ ID NO: 27782 - DNA, 233 bp, Zea mays
  unsure at all n locations
  Clone ID: LIB3180-021-P2-M1-A10
tctnctgctctccggagtgccattaagttaagaagaagactttttaaatggaagtgggttcctcctatacatcttatcacatttatcacgaaattttccatacgtttatttttctttcccatctttcacgactccatgttaattcttcttcaaccttttcgttaacaatacccccctcgaccttactcttacccaacctcccttctactaaaacttcttttttctctccacct

SEQ ID NO: 27783 - DNA, 311 bp, Zea mays
  Clone ID: LIB3180-021-P2-M1-A12
tctggggatgctgagcaccatcgccacggggctcgccatcgacgcctgcgggcccatcagcgacaacgccggcggcatcgcggagatggccggcatgccgcaccgggtccgggagcggacggacgcgctcgacgccgcgggcaacaccacggccgccatcggcaaaggcttcgccatcggctccgcggcgctggtgtcgctggcgctgttcggcgcgtacgtcagccgcgccgggatcacggcggtggacgtgcttagcccgagtgttcttgggggaggggggctcttatccatgctcccctactggttct

SEQ ID NO: 27784 - DNA, 331 bp, Zea mays
  unsure at all n locations
  Clone ID: LIB3180-021-P2-M1-A2
natgnaccaaacacttccatatactaattggggttcttttaaatgcacttgggtgaattatactnccatatttcattggacctgtgatccctcatccatccctaaagttgtatagaattcatcgcttggatcaataagtgttttctaacangcagaaatggctgcttaggatcttaccactgtttagttaaaatttagatatataaagagcactgaagattgttagttaattaggaccgacccttttaatcattataccaaggaatattaatgcgcggattcaaatgttctacaccttttaattaaccttcatatttattaatatgcttca

SEQ ID NO: 27785 - DNA, 165 bp, Zea mays
  unsure at all n locations
  Clone ID: LIB3180-021-P2-M1-A3
acccctaatttccctgttctacccacccctccgttaaaatctctagcggccccccttttttttgtttttttttaaaaaaacaacagacccccacatttttctcctnaaaaataactccntttttcaaaaacttaatacctatacattttaaatactaatcaacac

SEQ ID NO: 27786 - DNA, 134 bp, Zea mays
  Clone ID: LIB3180-021-P2-M1-A4
ttcctgagttcgctaggttcgtcgacaacagtgtccttaagctcgacgccgggggccaccttaggctttctgtgaaagagctccagccggccgtcgctgacatctgtgccgtcatctttctgccggccagaggg

SEQ ID NO: 27787 - DNA, 97 bp, Zea mays
  Clone ID: LIB3180-021-P2-M1-A5
acccgtcttctttgctccgggctagctagcaccaatggggggtcatctggccgtcgggtgggtcgccttgttgtcctcctctgcctttttggccgtg

SEQ ID NO: 27788 - DNA, 443 bp, Zea mays
  Clone ID: LIB3180-021-P2-M1-A6
acccttctttttaccttagaaggaccattattgtcccaggcggtgccatcacaaaatattttgggctccttatgctcccttggtcttttctgcaagtggctgcttaccggcgacacattttcccgaaatgctcgcaagctcctatagcttccctttttcccccgtacctttaaccagcggtgtcttcggtatgtgaaaacccaattcttcaaccttacaggatccaacaggcaatcacagctgccatcttacctttatcaccctggttcctccaacaatcatcagccctattacatcagttacctttggtgcatttattggcacaaaacatcagggcacaacaactacaacaacttgtgctagcaaaccttgctgcctactctcagcaacagcagtttcttccattcaaccaactagctgcattgaactctgcttcttatttg

SEQ ID NO: 27789 - DNA, 140 bp, Zea mays
  Clone ID: LIB3180-021-P2-M1-A7
ttctcttacgacacggtgcaccaggtggacgatgaccttccgggcgcgcttaagtcggcttcttcgcatgtctacgcggtggttcggggcgtgccggaggtggcgcgcgagctggcggtcgaggcgcaacggtcggtctt

SEQ ID NO: 27790 - DNA, 295 bp, Zea mays
  unsure at all n locations
  Clone ID: LIB3180-021-P2-M1-A8
tctnctgcccttcccgtcccgtcccctcccctacgcgcccttccaatacccgtgggggagcctcactctaaactccnaatctaaaccctcttaattcaattttanaatttctacacctctttccccaaaattttcttaatctatttctttcaacctttctctatttacatctaaaattttccttcaatttttcatcctctattatttctataccttcattttccctttcttttctatttcatctattaactcatcttccttttcctattttttctacaactgcaggcgatttctt

SEQ ID NO: 27791 - DNA, 415 bp, Zea mays
  Clone ID: LIB3180-021-P2-M1-A9
tcttcaaacagttggctcgtcaatctcgagggcggatgctggtgcaatgatcgcagcatctgtgtgttccgcaagggcagtcgtcgtggatcatcaaatcacatggagaggcaactccagtttacagggatattgagtaacaaacctgaagagaatcccgatttctacaactggaatagagtgaaggtccggtactgtgatggtggatctttcactggtgatggctctgatgcggctgcaggcctttatttccgaggtcagcgcatttggcaggccgctatggatgacctaatggcccaaggaatgcgttatgctaatcaagcccttctttctggatgctctgccggtgtgtttctaccatacttcactgtgatgaattccgtggactgttcccatcaaataccagagtcaaatg

SEQ ID NO: 27792 - DNA, 182 bp, Zea mays
  Clone ID: LIB3180-021-P2-M1-B1
cctccagttcccgccccgaatttcccggttcgacccacccctccgcctaaatcgcaagcggccccccttttttttgtttcttttttaccactgcgggcgccccccaccactctacttctttctctttctttcctcaacctctgcggcatctccacctgccccgccggagcgccattagctct

SEQ ID NO: 27793 - DNA, 343 bp, Zea mays
  Clone ID: LIB3180-021-P2-M1-B10
tctctccccgtgcctccctcgggcctcgctggtggcgctcttcctgtgggggcggcaggctccaacaacccgggagggcgccgtccgcccccgcctccgggagcgatgatgatcgcgcgacgcctgctccgacccaatgcccccgcccaggcaagcagcttattgaagcatgtaactggcaccgcaagtttgcaaggctatgcggatagcttgttggatggtacagtcagacattttggttcaccaccgtctgcccagcctgaaaaaaatgtgttcaagggggcgcgggtgctttctcctcttacagatggctggctaagccatgatttgccccctctgatca

SEQ ID NO: 27794 - DNA, 183 bp, Zea mays
  Clone ID: LIB3180-021-P2-M1-B11
tctgtccattagctttatctactccagagcggagaagatcccgatcgacagcatgagggttttaatcgctgccctggctctcctggctctcgctgtgagcgccacctccacgcatacaagcggcggctgcggctgacagccaccgccgacggttgatttaccgtcaaccatgcatctgccacc

SEQ ID NO: 27795 - DNA, 406 bp, Zea mays
  Clone ID: LIB3180-021-P2-M1-B12
tctttttcagatcaacaggatttctgttggggggttccaaacataagggggggggacacaaatatcacacctcaaaccacatcagcttgcacctgcttgcccaaatttgacgtgacaccggaaaaaaatagaggtgcaatggcaacagaggaaatggaacacaatgacagtgggccagtttttgaccataccccaactcctcatgatgatacactcaaaggtactacaaactctggatctgatccaccacttacagagcaagagtgtatccgttctctgtgggatttaatttgttccaaggacatttaccaaagcagggttgttattgattaccgtgattacagttcaaactgtatggatttttatgaatctttctcggagggtaaatgtctttagttttcttcat

SEQ ID NO: 27796 - DNA, 423 bp, Zea mays
  Clone ID: LIB3180-021-P2-M1-B2
tcccatctcctcgggccaaggaatcgttcggatccggcgacctacctgcgggacgtctcgggtcttgttctgtatcacaagcaaagcaaaggatcggaggctactccattcggcagcaagctgactctgaagtctgaacgttggagtagaacaaggtgcttgttcaaaattgttagttgcatggagatgggaatgactcctgaagtaatgtatggacaaaatgttttcgttcctgctactgcaaatccctaccaatatggctatacagaagttggatcaccaatggaatggtatagtcacccgaactcttcaggatatgctagccaagatattttctattcggctgaaggcatgcaatgcgtatactatgcagccccagacaatggatctatgcatcctacctacattccttatccttcagat

SEQ ID NO: 27797 - DNA, 336 bp, Zea mays
  unsure at all n locations
  Clone ID: LIB3180-021-P2-M1-B3
tatatttgttcggtgaggacatcatgtggaggtgtgcatcaaatgccataggggggagcttaaanaaaaaggcacaaccctcaaaatgcagcatatccaatgcagattgttctgatgatgaagtttcttcatgtacaagcattataggaaggccttgattgtccaatatgctgggaatccttcaacctcgtggagaatgttccctatgtcttgtggtgtggccacacaatgtgcaaaaactgcattcttgttcttcactagtcaattttcaaatttcgggggcgggggtatccatctctcctttttttattatattcccttttttctaaccttctt

SEQ ID NO: 27798 - DNA, 164 bp, Zea mays
  Clone ID: LIB3180-021-P2-M1-B4
tcttctcccagatttgcagctcgcaccccgttgatccccataattacatcggcggcgccctctcttcccgcggcacccggagcggagcgcaccctccccctcttcaccgcaattcccgaggcggggacgcttcctgccttggcgctcgctccctccctcgtgat

SEQ ID NO: 27799 - DNA, 395 bp, Zea mays
  Clone ID: LIB3180-021-P2-M1-B6
ttattcctcgcgcggcgaccacccaattcgaagcgttctgagagaccgaagaagcggtagaaatggctcgtaccaagcagactgctcgcaagtccacgggagggaaggctcccaggaagcagcttgccaccaaggctgtccgtaagtctgcccccaccactggtggagtgaagaagcctcaccgctaccgtcctggaactgttgccctccgtgagatccgcaagtatcagaagagcactgagctgctgatcaggaagctgtccttccaaaggctcggcagggaaattgcacaggactttaaaactgattttgcgtttccagagccattcggtgcttgcccttcaggaggcttctgaagcataccttgttgtcctgtttgaggacaccaacctttg

SEQ ID NO: 27800 - DNA, 394 bp, Zea mays
  Clone ID: LIB3180-021-P2-M1-B7
tcacagatcctgcctccgcctaggtgtggtgccgttctcaccactgcgggcgcgcgccaccactctacgccttccccttcctcttcctcagccgcggcggcatctccacctgccccgccggagcgccatgagctctgccgcgtccaggctgtcgcacatcgcggctgccaccggcggcgggggcggcgcggtctgggagtcgaatgagtcgtcgcctgccgcattcgccgtgacccaagaagacgatggtctttcatctggggatattggctaccgccgggggccaaaataaattcttgacattgtttgagcaccaccactttctgtcttggcaattttctccaaacaataattaaattctttttctgtatcaattatctcttcccaccctttt

SEQ ID NO: 27801 - DNA, 285 bp, Zea mays
  unsure at all n locations
  Clone ID: LIB3180-021-P2-M1-B9
agaaagcccgcgcgcaggcaccaacccttaattcctttccccgtttcacccaaactcttggtttccaaccacaatccttcacctcgggcggtctttaataaatcagggccggtcctgctactnactcaccctctttaattcgatctccatcatctataactatcatttcccttctaagaccaaatatctcttttattacaccattactaaagataactaattcccgcctcttctaatataaaacactatacattctatatctccattacaatataactacctctt

SEQ ID NO: 27802 - DNA, 66 bp, Zea mays
  Clone ID: LIB3180-021-P2-M1-C1
gttttggaaattcacaattactggtgcacggagtgcacatattaaatcatggggatctatcaattt

SEQ ID NO: 27803 - DNA, 402 bp, Zea mays
  Clone ID: LIB3180-021-P2-M1-C10
tctttgtgcggaaacgagaagctactggggaggtaccactacatgggattgaagttggttgcaagagtagagtgcgccggttataacttataaagcagagcatgctgtgttgatactgtttttttttccctttttggcttgacctatatgaagaaaaggatcggcgttaaaatggtattgtgaagggagaggattctttgctaaatcttcttcccgcataattttcattttatttatttctacccttattatttattatattttaaaatcatattggggggggggggggggggaggtttttatttaacatttctccattaattaattatttataattcctttctctttattttatacatttttttctattttcttaaatacaactctttcttatttactata

SEQ ID NO: 27804 - DNA, 423 bp, Zea mays
  Clone ID: LIB3180-021-P2-M1-C12
tcttcagaaaccgtgtgctccccgaagcaggggagatatcttcctcccagcgcgggcctgccaaatcgcggtcactgctccgaagtccgaaccttcatacacatcgtctcgtttccgatttccccaaattcaggccacaggcgctacaggacccaggcaccactcggtcggcggccaccgcgtcgccccgcctgctcgattggggtcgcgtgtgcgataggaagtattgtgttgtgtttgcaacgtgatagcttgtactgggaacaaaggtcaagatgggcgccttggacctacaccttgactttgcttctgctcaacatggacaagccaagttaaaggaatatgccaagagctctttgttgtctgatggaaactacaatacagacaagatcaatggttcaaaccctgatgactatgagaaat

SEQ ID NO: 27805 - DNA, 250 bp, Zea mays
  unsure at all n locations
  Clone ID: LIB3180-021-P2-M1-C2
ttctcaagtgtaaagagtgcgaagaagcaggggcaaaaggattccattctcgtggtcttggagtggtccatcgatcgagctccgtgaaagagagagagagagagcaagcaatggcgacagcagggaaggtgatcaagtgcatagccgccgtggcgtgggaggccggcaaaccgctgtccatcgaggaggtggaggtagcgcctgctccngccattgatgatcgttttaagatcctttacaccaggctctt

SEQ ID NO: 27806 - DNA, 247 bp, Zea mays
  Clone ID: LIB3180-021-P2-M1-C3
gccattccctcttcaagaggggatcatcaggaggggcttattattggtgaggacgccaggcaaggatcggagttgctctgaattgactgaaccatggcggcgacaatggcagtgacgacgatggtgacgaggagcaaggagagctggtcgtcattgcaagtcccggcggaggcattcccttggaagccacgaggtggcaagaccggcctcctctaattccctatccggcctattccctacagcactt

SEQ ID NO: 27807 - DNA, 92 bp, Zea mays
  unsure at all n locations
  Clone ID: LIB3180-021-P2-M1-C4
ttcttttcattcaatgctaaaaagatcaaaggcggcactttgtcataaagcanagggaaataacttttacagaagtatctttttctattcta

SEQ ID NO: 27808 - DNA, 53 bp, Zea mays
  Clone ID: LIB3180-021-P2-M1-C6
gtctctgccatcaggcccgtcgcgctaccgggagctcttctccgggggggggg

SEQ ID NO: 27809 - DNA, 418 bp, Zea mays
  Clone ID: LIB3180-021-P2-M1-C7
tggcttccgatttgatggagttacatcaatgctgtatcatcaccatggtatcaatgtggggtttactggaaactaccaggaatatttcagtttggacacagctgtggatgcagttgtttacatgatgcttgcaaaccatttaatgcacaaactcttgccagaagcaactgttgttgctgaagatgtttcaggcatgccggtcctttgccggccagttgatgaaggtggggttgggtttgactatcgcctggcaatggctatccctgatagatggattgactacctgaagaataaagatgactctgagtggtcgatgggtgaaatagcgcatactttgactaacaggagatatactgaaaaatgcatcgcatatgctgagagccatgatcagtctattgttggcgacaaaactattgca

SEQ ID NO: 27810 - DNA, 379 bp, Zea mays
  Clone ID: LIB3180-021-P2-M1-C8
ttcaccacaagcgatcgaggtacccggtgcggaataagagagagggggcgtgtctctcctctcggcttccccgttccccaacctctcgtctgctgcctgcctgcctgccttcctgcaaaaaggagtttgtcatggcttttaatcgcatcctcaaggagctgaaggacctgcttaaagacccccccacatcatgcattgcatttccttctttttaggtcatttttcattgtctcgctacaattattggaccaccctacatcccctattcttgtggtgggggggtggggtaccctcattttctttccttcattactcccttctttcctccttattttttcttttcatttcctctatctctttcattcttcattcttcctat

SEQ ID NO: 27811 - DNA, 276 bp, Zea mays
  unsure at all n locations
  Clone ID: LIB3180-021-P2-M1-D1
tatagggaaagccggacgcctggggtacacgtcccgaatttcccggttcgccccacccttccgctgggttttcaaaccattagctttatctactggggacctcaaaagaacccgtgcgccaccattagggttttgctcnttgccctcnctctcctggctctcgctgcgagcgccacctccacgcatacaagcggcggctgctttttccatccaccgccgccgattcatctaccgccgccgttgcatttgccacctccggttcacctgccacctccg

SEQ ID NO: 27812 - DNA, 224 bp, Zea mays
  Clone ID: LIB3180-021-P2-M1-D11
tctttctctcgtttctcccgacccgcctgcgggggcgttccaaccccgggtgggtagcctccttccactcccaataccagcccccgcccctccagcaccaccagcagctcgccttctgaccatgagacggttcggaggagacctgcatggcgacggcacgacgcctcggtccgcggcctctggtcaggccatgatggaacttaaggccaaccggtcgcccgcca

SEQ ID NO: 27813 - DNA, 221 bp, Zea mays
  unsure at all n locations
  Clone ID: LIB3180-021-P2-M1-D2
tataggggangctggtacccccgcaagtacccgtcccgaatttcccggtccaccccacccttccgctggttttcgttagaaaaggaaatcnattccggcaccttttaaactcttcgtgcctagaaaaatatangccgccnncccctcctcctcattcggtgaaaggtgcgcagttagtgttggtagatctcttgcctcactacactatcaccataatttgt

SEQ ID NO: 27814 - DNA, 398 bp, Zea mays
  Clone ID: LIB3180-021-P2-M1-D3
ggaaagaccggacgcccgcaagtacccatcccgaatttccctgtccacccaacccttcctttttaacccttcctaaccctccaccccctcgggtttctccttcaatccatgcctgcctccctccttccctccctcgctcgcctctggagaaccctcgccatcctgcccaatcgcaccaccaaacccccaccaaccgccctttttttcgcccctctgcgcgtcaacaccgtcacctgctgcgatggcggtgcaggagcgtaggacaatcgatcttgaggaggaatgggcgttcatgcaaaatggcatcaccaagctgaaaaacatcctctaggtcaagcccgagccgaaatcatttcctaggactacattattctctacacgacaatatacaacatttt

SEQ ID NO: 27815 - DNA, 203 bp, Zea mays
  Clone ID: LIB3180-021-P2-M1-D4
tcttcttaacgtgtatgggagcattgaatttagaagtgttgaattttgctggggtaccccccctgagatgatggttctgagtaattttagcctcagagtgagtggaggacagactgttgctgtagtaggtgtatcaggatccttgaagaagccaataatttctttgatcgagaggttctacgatccaactgctgggcaagttt

SEQ ID NO: 27816 - DNA, 316 bp, Zea mays
  unsure at all n locations
  Clone ID: LIB3180-021-P2-M1-D7
tnctgggtacctataatgtactgcagccgcactattttttatgatgctactggcttgactggttaaagatttcttctgggatggtgattttcgtctaaagtgggatcccatgcttgcatattgcaaatctttggatgagtttttttataatggagcaacaaaaaaacactgtataaaaaagttcccgttcttttgcaattaccattgaattcatttttggaggactcatatcggaatctgtgaagacttacttctctctttcctatagttccatatcgtgggggggggggggggcttttctcttttctctattatt

SEQ ID NO: 27817 - DNA, 410 bp, Zea mays
  Clone ID: LIB3180-021-P2-M1-E10
tcttagaaagcacaatagtgtaccaacaatggcagccaaaatattttggttgcttatgctccttggtctttctgcaagtgctgctaccgcaaccattttcccacaatgctcacaagctcctatagcttcctttcttcccccatacctctcaccagcggtgtcttcagtatgtgaaaacccaattcttcaaccctacaggatccaacaggcaatcgcagcaggcatcttacctttatcacccttgttccttcaacaaccgtcagccctattacagcagttacctttggtgcatttgttggcacaaaacatcaaggcacaacatctacaacaacttgtgcttggaaaccttgctgcctactcttagcaacagcattttgttccattcaaccaactggctgcattgaactctg

SEQ ID NO: 27818 - DNA, 189 bp, Zea mays
  Clone ID: LIB3180-021-P2-M1-E12
tctttacaagggtccaaccctgcttgaggctgttgaccagatcaccgagcccaagaggccttcagacaagcccctgcgtctgcccctccaggatgtgtacaagattggtggtattggaactgttccggttggtcgtgtggtgaccggtttcatcaagcctggaatggttgttaaaaattaatttaactt

SEQ ID NO: 27819 - DNA, 62 bp, Zea mays
  Clone ID: LIB3180-021-P2-M1-E3
aaaaccataagcttaatctactggggggcccataaaaaccgggtggggaccatgagggtgtt

SEQ ID NO: 27820 - DNA, 212 bp, Zea mays
  Clone ID: LIB3180-021-P2-M1-E7
tttctttcccccacggaccctcgccaccgggaagacgcctctcgctcaggaggacgagcattccaccggagccggatgatgatattatgaacgagaagaatccccgtccgctcgactaggacgacattgtgctcctcaagacttattgccttgagccgaacaaaacaagcattaaaaaggtcgttaaagatatcaaagatattttcaattaa

SEQ ID NO: 27821 - DNA, 428 bp, Zea mays
  Clone ID: LIB3180-021-P2-M1-E8
ttttctttacagctgcagcaactcgtgctaccagggatcatccaagtaggtgggggagacctttctccctactctcagcaacaacaatttcttccattcaaccaactgtctacactgaaccctgctgcttatttgcagcaacaacaactactaccattcagccagctagctactgcctactctcagcagcaacaatttcttccatttaaccaattcgccgcactgaacccctctgcttatttccagcagcaaatactactaccatttggccagctagctacaacaagccccgcttccttcttgacacaacaacaattgcttccgttctaccagcagtttgtggctaaccccgcaacccttttacaactgcaacagttgctgtcctttgtccaacttgctttgacaaacccagcagtctttaccaacaa

SEQ ID NO: 27822 - DNA, 152 bp, Zea mays
  unsure at all n locations
  Clone ID: LIB3180-021-P2-M1-E9
tnctggaagcttttgtcctgatatttttgccaagcgctttctaaccattaaggggcgtaacgcaaagaaagcacattcccggtacgaaatgccatcatggagtcatagtgataatcctaggtgagggacacttggagagtattttattcatt

SEQ ID NO: 27823 - DNA, 183 bp, Zea mays
  Clone ID: LIB3180-021-P2-M1-F1
tgtccgtggcgtcccgactggcggccgtgcttgcggatccggtcggggtgcgggtgcccgtcttaaactccctcctttttgcgcttgccgcctccgtggacccttccaacggccacctcccgttctaccttttccgccgccgcctactccggttcggccgccccaatgccttaattttttccg

SEQ ID NO: 27824 - DNA, 215 bp, Zea mays
  unsure at all n locations
  Clone ID: LIB3180-021-P2-M1-F10
tcgcccacgcgtccgagccaccctcactgggggctatccctctgctcctggggaatggcggcngccacttcctcttccacctacctcgccatcggccgcaaaaccctaaaccccgccccctccgtagccacagccgccacctccgtctccttccccgccacgcagcatccatgcctcgtcgccgcctccgcggaccgccgtcgcgccgtggcttc

SEQ ID NO: 27825 - DNA, 176 bp, Zea mays
  Clone ID: LIB3180-021-P2-M1-F11
tttctctcgccgcccccaccccccgctgccgggggctttttcccgggtgcgacgccacacacctcccctttccactcgccgccggcgatcccgaaccgggagcagcgcacatggcaggccgggacgagaggtggggggccccgttcttccccttacacaccaaccactatacatgc

SEQ ID NO: 27826 - DNA, 360 bp, Zea mays
  Clone ID: LIB3180-021-P2-M1-F12
tttccagttctcaacccggctgtgctggggcgtctccttcctgccctgggggcggctgctgccgccgccagccgctgcaggcacgcttgccctctgctccctgtccatccactcatcattccccgtcatccaccaattcacaacccaaaaccctaaacccatttacctcaacgccaccgccgccgccgcgatgcagtccatggcgcccacctctcccttactcccggtggcaggccccgttccccgccgccgcctccagcgcgtccgcgccgacgcggtctccgactagcccaaactcaacaagtacagcgcgcgcattacggagcccaagtctcatggctcctcgcatgccgtgctcta

SEQ ID NO: 27827 - DNA, 251 bp, Zea mays
  Clone ID: LIB3180-021-P2-M1-F2
tttatagcagacaagaaaaagacgacgacgacgcgttacctttaccaccggcaagtgccccggccggccggcgggccggccatttagatggcgcgtctaggtatcgccgtacgtcgtgccgcatgcatgcatgcccggcggcgcaagatggctatgcagcaagcgtagtatatatcattcatgagcagcgccggccgttgtagataggtgcaaggtttccagtgtgctagatgcatgtgcgcgtcaaggag

SEQ ID NO: 27828 - DNA, 149 bp, Zea mays
  unsure at all n locations
  Clone ID: LIB3180-021-P2-M1-F3
tcnaatcccagcccggcccgcgatggagaggacaaatctgccgctggcggtggcgctacccctggtgcacggcgagcgtctgtgggcccggccgtggcggtggcttaaagacggccctttcttaatggggggcgaatgcttgttttttt

SEQ ID NO: 27829 - DNA, 395 bp, Zea mays
  unsure at all n locations
  Clone ID: LIB3180-021-P2-M1-F4
tgttgagcattcagaaacacaccaagcgaggggcactatcaacaacctaacagcaatggctaccaagatattatccctccttgcgcttcttgcgctttttgcgagcgcaacaaatgcgtncattattccacaatgctcacttgctcctagttccattattccacagttcctcccaccagttacttcaatggccttcgaacacccagctgtgcaagcctataggctacaacaagcgattgcggcgagcgtcttacaacaaccaattgcccaattgcaacaacaatccttggcacatctaacaatacaaaccatcgcaacgcaacagcaacaacagttcctaccagcactgagccacctagccatggtgaaccctgtcgcctacttgcaacagcagc

SEQ ID NO: 27830 - DNA, 232 bp, Zea mays
  Clone ID: LIB3180-021-P2-M1-F5
tgtctatttcccatatcctttcccctacctgggcagcttttcccgtctccgggggctcgtctcccctcctaacctcgccagccatgggcaagaccaagaacggaatcaacggtttcggaaggatccgcagcctcgtggactgggtcgccctgcaaagcgaggatgacaagctcgtccccgtaaacgacccctcattaccacggatacatgacccacatgttcaagaaccaca

SEQ ID NO: 27831 - DNA, 427 bp, Zea mays
  Clone ID: LIB3180-021-P2-M1-F6
tttagtttctgaggcatcagtgcagcccgacggggactccctactgctcgggtgagtgccagtcgttgcggcagcagtgttgccagcagctcaggcaggtggagccgcagcaccggtaccaggcgatcttcggcttggtcctccagtccatcctgcagcagcagccgcaaagcggccaggtcgcggggctgttggcggcgcagatagcgcagcaactgacggcgatgtgcggcctgcagcagccgactccatgcccctacgctgctgccggcggtgtcccccactgaagaaactatgtgctgtagtatagccgctggctagctagctagttgagtcatttagcggcgatgattgagtaataatgtgtcacgcatcaccatgggtggcagtgtcagtgtgagcaatgacctgaatgaacaattgaaat

SEQ ID NO: 27832 - DNA, 142 bp, Zea mays
  unsure at all n locations
  Clone ID: LIB3180-021-P2-M1-F7
tnctggttctgatagactgattattccaacgcgtggccccattaataatgagagaggcacttcctaactttcatttcatatcattgattaaacctaaaaaagttaccttccttcacacctttaccaactatatctttctttt

SEQ ID NO: 27833 - DNA, 206 bp, Zea mays
  unsure at all n locations
  Clone ID: LIB3180-021-P2-M1-F8
tnctgatccgcgttaccccctctcccttggtgtgcggtcccaccaccaacgcgcgtgccggttatctccgccgccgcccgctttgggaaggcgcgacgaaggcaggcgagaggctccagccggacgaggaggaaagaggagcatcatggccggaggagagatgatcctgtggtactggttctactggttgctgtccttcctatacc

SEQ ID NO: 27834 - DNA, 345 bp, Zea mays
  Clone ID: LIB3180-021-P2-M1-F9
tctctagatttttcctgactcgttgtctgctggcacttcctctgctcttcgcaaggtcaatgtaacctccaaccattagcatttagactaccaggactatcacaatggctattgtccagttcgactgtggcaaggcatcaccactctacaccgtacctacaagcttgtaactgtagccacacaaggtgcaacatcaccctttgaactgacgactgtgccaccaacaccatggctaatagctgctaatgagcgaatgtcaagctcaagacttatcgttagagaggtacaaccatttatatcactctgtgtaattcatacatccccaaatagctacagaattgtaat

SEQ ID NO: 27835 - DNA, 422 bp, Zea mays
  Clone ID: LIB3180-021-P2-M1-G12
tttctaaacatccacaaaaacaaaagaagggaaggaccacaagctagccatgggtggcagcaagattagtattgtcggagccatcacatctccaattgtggttgtggtggcactgacactattgatcacacttttggcatcgacagtagatgcacaaccatactcaacaatgccacctagcatgattggagatttattgccacggacgagagtacctccgtccgggcctagccatcctccacccatggcggcgatgccaccatcatggagaatgccagccgctggacctacgaagcctccttccatggcggcaatgtcacctgatgttgttggggatttgctaccacgaggaagagtaccaccctccgggcctagccatccaccacccttggtggcgatgtcacctgatgttgttggcgatt

SEQ ID NO: 27836 - DNA, 281 bp, Zea mays
  Clone ID: LIB3180-021-P2-M1-G4
tttccctcttcaagaggggatcatcagagggggcttattattccttattagctgaggcaaggatcggagttgctctgaattgactgaaccatggcggcgacaatggcagtgacgacgatggtgacgaggagcaaggagagctggtcgtcattgcaggtcccggcggtggcattcccttggaagccaccaggcggcatgaccggctgccttaattttcttcttcggtctattttcaactaaaatctgactttcatatttactcctttttttttaatgggggg

SEQ ID NO: 27837 - DNA, 305 bp, Zea mays
  Clone ID: LIB3180-021-P2-M1-G6
tattaatgattgcctccagataataagttggggtgcttcaaattcaggtctgccggcctctacaatagggtttgtccgctggtttgctaaggcaagcaacgtacatagactgcacgtcttggatccttcatgtttatatagtgcgttgctttatgatcaattgaccattcattaccttcgcctgatggcccttattaacaacagtaagagctaactaagaatgtgcgctaagatttttcttgctatctgaagtggtaaatttgttaatcctaatcctttgctgaatgggtatcggggctttgtca

SEQ ID NO: 27838 - DNA, 124 bp, Zea mays
  unsure at all n locations
  Clone ID: LIB3180-021-P2-M1-G7
tttctgttacacaagacatgcctcgtctattgcaccaacctttctatcgggggcagaattttcagctgnctcacccttatttctaaatatccgtacaacttcccttatcatgtcccttcgtttc

SEQ ID NO: 27839 - DNA, 407 bp, Zea mays
  unsure at all n locations
  Clone ID: LIB3180-021-P2-M1-G8
ttttcttcctcacttccgctcctccacccccttggggtaatgaagaggaggggggggggatgtcncaccctaagttcgagcaccctaggcacggctccctcggcttccttcccaggaagcgctcctcccgccaccgcggcaattttaagtcattccccaaggatgaccccaagaagccttgccatctcactgccttccttggctacaaggctggcatgactcacattgtccgtgaggttgagaatccaggatccaaactccataataaggaaacttgtgaggctgtggccgatattttaacccctcctcttgtcattgttgtgctcgtggcatattttaatacttctctatgtctccgcacactcaactttgttttgtcccaacatcttatctaataaattagttca

SEQ ID NO: 27840 - DNA, 166 bp, Zea mays
  Clone ID: LIB3180-021-P2-M1-G9
ttctaaactgctacccaatcactcaaagatggggctttctttcaggaaggggacgtgcgtcctactcccagatcctcaccagttccttagtcgacaactagcacccaccaaaaatttcagtatcagactctacatgtcaattaagtattgccccaaaaagcaacac

SEQ ID NO: 27841 - DNA, 110 bp, Zea mays
  Clone ID: LIB3180-021-P2-M1-H1
acccttcctttttcagaccgtactaacctcccccgtacggagtttcatatgctgctgataaggatgtcgccccctctccaactgaactccataaacctcttgccaagaaa

SEQ ID NO: 27842 - DNA, 272 bp, Zea mays
  Clone ID: LIB3180-021-P2-M1-H10
tcgctcacacacacatcgttgtccaaacaatgacttctcttctcacggcgggcgagctcaccaacctaaccaggccagatatttcttaacctagctagctaacagctgactagatagatcgatccatcagcttgcagccattaatattatcagggcagtacagtgccggttcaccgttttccaccttactacatccaatgtcccctccactcttcgccacttcttactacaatctcctcctcacctccatcttctttttttctaatattttt

SEQ ID NO: 27843 - DNA, 208 bp, Zea mays
  Clone ID: LIB3180-021-P2-M1-H11
tcgctctaatcccattccatttcccctgtctgcctctttctcacacccagacgacctccaactacttaacccttcccagctattcctcttctaacttattcttacctgactatacaatgccccccacacaaaaatcctcatacccatattcatatcctaaccccaacaatctactaccttttctcctaaccaattttttaaaattctt

SEQ ID NO: 27844 - DNA, 413 bp, Zea mays
  Clone ID: LIB3180-021-P2-M1-H12
tctttccaagcaaagagaaaccgcggcgcgagaagaggtaggaagggcagacgggcgagcatgatgagagagatcatcagcatccacatcggccaggccgggatccaggtcggcaacgcctgctgggagctctactgcctcgagcacggcatcgagcccgatggcaccatgcccagtgataccacggttggcgtcgcacatgatgccttcaacacgttcttcagcgagaccggttctggcaagcatgtgccgagggccatcttcgtcgaccttgagcccactgtcattgatgaggttcgcacttgctcgtaccgccaactctttcacccagagcagttcatctttggcaaggaagacgcagcttacaactttgcccgtggccactacactgttgtgaaggagattgttgatct

SEQ ID NO: 27845 - DNA, 230 bp, Zea mays
  Clone ID: LIB3180-021-P2-M1-H2
tcctttccagcgccccacccccagccagctagggggggtctctcagcagcgcgcgcgaacgtgtgctccctgctaagctctgcgcctcggtaggcaaggaaaatcaaacagatcgtaaatggccggtagcagcgcggagcagctcctctccaggatcgccgccggcgatggccacggcgagaactcgttctacttcgacgggtggaaggcctacgacacgaaccctttcg

SEQ ID NO: 27846 - DNA, 408 bp, Zea mays
  Clone ID: LIB3180-021-P2-M1-H3
tacaaggctaggcacaagcgaaccaaaccgatggcgtccgacggcagcggcgtggtgacagtgtacggcagcaacggcgcggagctgctggagccgtccaagcagcccaagtcggcgactttctccgtcaaggtggggctgtcgcagatgctccggggcggggtcatcatggacgtgttgacccctgagcatgagcgggttgttgtgtttgatgcttccagaatgctctgtcatgtattacgtagctctgttgcatttagtaaacttaataaggtgggtggggggcggcggatatttccacacttaacatatgcgtgcttttttgatgatataggattttctatcttttatttttatggatcttgtttctaccattttattgcctttgtatctagctctctataaatt

SEQ ID NO: 27847 - DNA, 188 bp, Zea mays
  unsure at all n locations
  Clone ID: LIB3180-021-P2-M1-H4
tcgtggttcttcagaccattagctttatctgctggagagcgcagaagaacccgatcgacaccatgagggtgttgctcgttgccctcgctctcctggctctcgctgcgagcgccaccttcacgcatacaagcggcggntgtttctttcatccaccgtcgccggttcattttccgtcgtcggtgcatttg

SEQ ID NO: 27848 - DNA, 428 bp, Zea mays
  unsure at all n locations
  Clone ID: LIB3180-021-P2-M1-H5
tcaacactaatgtagtcctccttagcatggcgagaccaaatatctcaggttaatgcaacccaanaagtatcaggcaacacagaattgataagcacattacgtcgttcagtgaaaagcttcagaaggtctctagtggtggtctgtctagaaactttggnnaacctaanggttttgagcactggcaatataatcctcccagacttgtgactcaccaatacctaatggaaggtcaagcctagcaatcatactacacaactcatttctagcaaaaatagggggcgatttccaatttgttatagaaccattattatttaaaaagcagtcctatacttttaccctaatcatttttatcaatccattttatctacaagtttttctttatattttaatataatttctcaataccaaattataatattctttctata

SEQ ID NO: 27849 - DNA, 177 bp, Zea mays
  unsure at all n locations
  Clone ID: LIB3180-021-P2-M1-H8
tantggaactgttcctgtttggcgtgtttgaactgttatcatcaagccgtggatggttgatacctttggtcctaattgccttactacttaagtgaaattcttttaaaatcaccatttttcctttcaagtagccctttttttttaccattttttcttcaatatttaaaaatttttctt

SEQ ID NO: 27850 - DNA, 363 bp, Zea mays
  Clone ID: LIB3180-022-P2-M1-A1
gggaaaagttgaagaaacacccagacctgtgaaggatgtcatacttctttcatacgagatcatccacaaaaaggatcctgctgcagttcaacgaataaaacagaaggaagtatatgaacaacagaaggaacttattttacttggggaacgtgttgtgcttgtaacacttggttttgattttaatgtgaaccatccttacaagcccttggttgaagcaataaaaaaatttgaggttgctcaaaatgcacttgctcaagttgcctggaattttgtcaatgatgggctccgcactttactttgcctgcaatttaaaccgtaccatattgggggcggtgcaatctttcttggttgcaagtttcttaa

SEQ ID NO: 27851 - DNA, 169 bp, Zea mays
  unsure at all n locations
  Clone ID: LIB3180-022-P2-M1-A10
tanatcttccccggcaaccgcgtccgggcggccgctttcctttccttgggtagaccaccccacccgcccgcccgnccgccggcaagcgaaagcgaagcgagcaaacccagccatggagaaggcgatcgatcggcaactgttcctcctggcgcaccttctcccctccccc

SEQ ID NO: 27852 - DNA, 164 bp, Zea mays
  Clone ID: LIB3180-022-P2-M1-A11
tctatcgcgatggcgtcagaaaagaagcaggcgaaccctatgcgggagatgaaggtgcaaaagctcgtgctcaatatctccgttggagagagtggagatcgacttacccgctccgccaaggggttggagcatgttagtggttatttttctgttatttctaacgc

SEQ ID NO: 27853 - DNA, 223 bp, Zea mays
  Clone ID: LIB3180-022-P2-M1-A12
tcgcggcaacgccctttaccacatctggagtctgacccacccacccccgcgggcgccacctcatggcgccggcgatggggctgaagcggcctgcggcgggagcaggggcggcagcagcgcagaccgtcacgctgtccgtgcctgccgtgcgggacgcggtgcgcaccgccgtaagggaggccgaggccacggcgaaggttaccgccctggccgctagggtccc

SEQ ID NO: 27854 - DNA, 434 bp, Zea mays
  Clone ID: LIB3180-022-P2-M1-A2
tctgtagtatttatgtcgccgccgccgccgcccagccggaggaaacaggaggaagatgccggcttttcaccgacttcggtcacggacccgcgacctgttcgtgcggacgattcttaagaagggttacattccgatcactacgtactttttctcctactagaactgctacttctttgatctttaatgttatctgttccttactttctggttttgttttattttctttactttcatttattttttttctctttattaatttttcttctaatttcctctatttttcttttttgacgggggggtggtggctttttatttttctctaattattttttttttatatatatctttttattattttcttttatattttttttcttttttttttattatcttctttccattttttcttcttattctattataatattcatttt

SEQ ID NO: 27855 - DNA, 196 bp, Zea mays
  Clone ID: LIB3180-022-P2-M1-A3
tgtttctgatcactcgcaatctatcattggggggaggtcttgaatttctggactcggagaacattacatattgcggctcactaaatcttattgacaatgaaaacagtgatgtttaagaatgaatttatcgacatactagaggatacttagggcttgggttacctgtatcaattgtaaaacgtggaagacccattgt

SEQ ID NO: 27856 - DNA, 407 bp, Zea mays
  Clone ID: LIB3180-022-P2-M1-A4
gtgttgtcttccggttcccaaagaataaggggctattttccgctgctcttggcacaggaactcaattatttgcactcacaacctttatatttcttcttgcacttgttggagtattctacccttacaaccgtggtgcactatttactgcattggttgtcatctatgcactcacttcaggaattgctggatacgttgctacctctttttattctcagctggaggggacaaactgggtgaggaacttgctattgacaggatgcctgttctgtggacctctcttactgacattttgcttcttgaacactgttgctattgcttatagtgcaacagcagcactgccctttggcactatctgtgtcattgtgctcatctggaccttggtcaccgttcctttgcttgttttgggt

SEQ ID NO: 27857 - DNA, 208 bp, Zea mays
  Clone ID: LIB3180-022-P2-M1-A5
tttctatacgtgtgtgaggtggctagcccgaggaggagcgggaggccacaggtcctatccccccgtatctaatccgctcgagcgcagcggctcgttcctcgcggtggcgcacggttggcatttcgagtgctgagacatccgcttcattgaattctaaagcacggttgagccttggttggttttcttgacttcctattctttttccctt

SEQ ID NO: 27858 - DNA, 339 bp, Zea mays
  Clone ID: LIB3180-022-P2-M1-A6
ttaatttattgtagaaattccgggatccgcgattggacatggaaaatagaaaaactttttcttggttaaaggaacagatgattcgatcgatttctgtatcgatcatgatatacgtaataactcgcacatctatttcaaacgcatatcccatttttgcgcagcagggttatgaaaacccgcgggaagcaactggacgaattgtatgtgccaattgccatttagctaataagcctgtggatattgaagttccccaagcagtgctttctgatactggatttgaagcaggtcttcgaatttcttatgatatgcagctgaaacaaggtcttggttatggtgaaa

SEQ ID NO: 27859 - DNA, 254 bp, Zea mays
  Clone ID: LIB3180-022-P2-M1-A7
ttttttttattaaaaaaaaaaaaaaaaaaaaaagaaggggaaaaaaaaaaaaaataatatgttaatattaataaaaaaaaataaaaaaaataaaaaaaaaaaaaaaataaaaaaaaaaaataaattaaattataaagtggggggtcttttttaataatcaaaatttttttacctttttttttaaattatttattttttttttggttcactaaatttaaatttattggccttttatttaaaaatattttaatttg

SEQ ID NO: 27860 - DNA, 198 bp, Zea mays
  Clone ID: LIB3180-022-P2-M1-A8
tctttcttagatttagtcacgaatattttcggtagggacttatctatggtgagacttgtatttaaactttaccctacgaataatacagcctacaatgcacaccgtttttctgcaacagacagcgcatccatgccgtccatcggatcagatcgattttttccgcgctagggtttagcatttgatcctaatggcgttcta

SEQ ID NO: 27861 - DNA, 206 bp, Zea mays
  Clone ID: LIB3180-022-P2-M1-A9
ttcgtcgccgtcgccgccgtctgactgcccccctcgcctcccgcggggtcgggtctctggtgctgctgctgctgctgctgctgcgtgcagggcagtgatggcgacgaagaggagcgtgggcaccctcggcgaggcggatctgaaggggaagaaggtgttcgtgcgcaccgaccttaactttccgcttgacgatgcccagaagatca

SEQ ID NO: 27862 - DNA, 316 bp, Zea mays
  Clone ID: LIB3180-022-P2-M1-B1
atatcgcgaacggccgcccttttttggtttggtttttttggcaggaggggtgggaaaattataaaatataaaaaaatttttaaaaattaaaaataaaataaatataaatataaataaaaaaaaaatataataaaataaatatattaaataaaataataaaacatttatatattataaaaaatatattatataataatactatatatataaaataaatatatataataataaaattataatataaaattaaaaaattatcttataaaataaatatatatatataaaaaaatatatatataaataaattttaaatata

SEQ ID NO: 27863 - DNA, 152 bp, Zea mays
  Clone ID: LIB3180-022-P2-M1-B10
tcggcgcgccggcctcatctgacccgtgcgggtccgtgttcgagtgcggcggcgcaaggcccagctcctcactccacagcgccgcgcaatggcggccaagcagcggcagcggcaccagcagctgccactcctgccccttctcgccgtggtcg

SEQ ID NO: 27864 - DNA, 218 bp, Zea mays
  Clone ID: LIB3180-022-P2-M1-B12
ttttcgtccacgcgttcggccacgcgttcggttgggttttccagaaccgctttgggagggacaaccatttccgaaacataggtctatcttattttatgcacaactggtttaaagagacgggagagggatttctatctagcaccggggtggaatttacctgtcgactttgggggggttggggttaagcggaaggcaatttttaattttgggttaaaagg

SEQ ID NO: 27865 - DNA, 286 bp, Zea mays
  unsure at all n locations
  Clone ID: LIB3180-022-P2-M1-B2
tctgctttttccgtgggggccgcggcngcgggcgtgggttttaaattaaaagaggcgggataatacaacatttattattttttttttattttataataatttttaaattttttttattatattatattataactaattaatttattttttttatttttaaaatttaattatatttatatattatttaaaaatttaattatttttataattttttatattatttatattataaatattttttttattattttatattatattatttatttttatcatttattttaaa

SEQ ID NO: 27866 - DNA, 198 bp, Zea mays
  Clone ID: LIB3180-022-P2-M1-B3
tcttaattttatactccaactcggacatctacgtggggaaatttctcagccagggccggttctcttgccagttcacagcttaccttattgccatgaaccacaccgatttcattatcaccagcacatttcaagaaatttctttaagcaaggacaccgtggggcagtacgagtcccacatcgcgttcactttttctgggc

SEQ ID NO: 27867 - DNA, 269 bp, Zea mays
  Clone ID: LIB3180-022-P2-M1-B4
tcagaccattagctttatctactccagagcgcagaagaacccgatcgacaccatgagggtgttgctcgttgccctcgctctcctggctctcgctgcgagcgccaccttcacgcatacaagcggcggctgcggctgccagccaccgtcgtcggttcatttaccgccgccggtgcattttccaccttcggttacttgtcaccttctttgcaattaccaccgtcggttcatcttgtctctgttgtccttttttatctcctttccatttttcc

SEQ ID NO: 27868 - DNA, 348 bp, Zea mays
  Clone ID: LIB3180-022-P2-M1-B5
tttcaatctcaacattgttgtgttgtggggggaggcacatgaaggagcaatggcacatggctaatccatgcatagatctgtctctacaccattgtggtatgccaccatcctcgatctccaccttgttgtgctacgcattgaggcagatgaaagagcatgtgagcattgtggatcatatatagagatgagcctccatgccttcttgttatgttctccattctcaatctccaccttgtttgtatgtcgaggtatattattgtgcattctttctttcgtgggtgtgtggggagatccactcttataccttctatgtttttcactattctttatattctatcttttttcttt

SEQ ID NO: 27869 - DNA, 346 bp, Zea mays
  Clone ID: LIB3180-022-P2-M1-B6
tttaggatagagaaaacagagtgcgattccgacgaagagagagacagagagcaaaacccaaaccctaacaatcatttgcagcccccggcgtctccagaacctccaaggaaccatccacaggagaaggcgcgagcgcgggtgtttggatcgggggaggcaacgctggcgtctcgcggcggcagcaggtgatggcggatccgcctagcggtgggggatctagggcttgtgtctgcagggagagacaggtcgaggaggcagaggcgggtctggggctcgggagaagagaacaggggaggaaggagggaggtttcttttttttctattttcttcatcctttcttttttta

SEQ ID NO: 27870 - DNA, 439 bp, Zea mays
  Clone ID: LIB3180-022-P2-M1-B7
acgtgtttcttactggtcctcggcgtgcccgccctgcgtgccgcggtgtcccgtgcagggcgggacgagacgacaactgactagcaaagcataagccaactgagcacgagcgagacgaccagaccgcgattgctagctagctagttcgggcagctagtggtgtgagaccgctatagcttgcttatccttcattttgcaccattttaatgtacttattacttaaactcattatttatctttctttaaaccaatacactcattcaatattatattcttttttactttattttcatatattgggggggggggggggatatttaaaaattcttttctaatataaatcttatttctattacttataaattttatctttattatattatctataatcctaactattttactaattttttaataatttaaatatttatttattttt

SEQ ID NO: 27871 - DNA, 144 bp, Zea mays
  Clone ID: LIB3180-022-P2-M1-B8
ttctcgtcgtcgagctccctgaggggtggtggcgtgctgctgcaggggggggactgcagtgccaaggacgatggtgtggtgggatgacagcgacgatcaagctcatgcatgttctggtatggatttaatccctaattaattcac

SEQ ID NO: 27872 - DNA, 395 bp, Zea mays
  Clone ID: LIB3180-022-P2-M1-B9
gtcgaaatcgtccccaacatccgcatggacgccctcaacatgatctgcggggatttcgggcccttcttcccccagattcccaccaaggtgcctctctggctcgctgtcgcgctcaagaagcgtagcaagtgcaccatccgcaccccggactggatgactgttgaccgcttgacacaggtattggaagcggaaagagagtcgccacgagaattccagccattaccattccactatattgaaatttctaagcttctgtttgatcatgctcgtgatgacatctcagatgcatacctggtaagatctctaattgaggacatcagagatgtcagatttcacaaggttgagactggattagagacgatatctggacgcacccatgccgtaaagctcaaaaa

SEQ ID NO: 27873 - DNA, 120 bp, Zea mays
  Clone ID: LIB3180-022-P2-M1-C1
tacgagtcacggcgggcgggcggcggcggcggccgggggttctggctgtacacggggcgccaccatgcctgaccccaccaccaaacttcccttttcactccccctacttgtcctcaagct

SEQ ID NO: 27874 - DNA, 338 bp, Zea mays
  Clone ID: LIB3180-022-P2-M1-C10
ttatcaaagcttcgatttgctgctgctgagggagatcatgtaacattcctgaatatctacaaaggatttcaccagtctggaaaatctagccaatggtgttacaagaacttcttgaattaccaagcactgaagaaagttgtcgacattaggggacaacttctcaggatagtgaagagttttggtatacaactgaaatcatgttacagagatattcatgcagtttgaaaggccattattgccggttcatttactaatgcatgtcatctggaggaatacaggcgggacggcatgtataaaacaattttttcattactagtagtttttatttctttcatttt

SEQ ID NO: 27875 - DNA, 421 bp, Zea mays
  Clone ID: LIB3180-022-P2-M1-C11
tcgggcgaggcaaaagcattgcgaccacagacagcgcgcgcttcaaggccttttttttttgagataacaaggaggagaggaggagatggcggtcacgatcacgtgggtgaaggcgaggcagatctttgacagccgtggtaaccccaccgtcgaggtggacgtgggtcttatcgacggcagctacacaaggggggccgtacctagttgtgcatacattggtatatatgtggccttgttgatgatgttcggatgattatatatttcttcgctaagtggggggggggggggggtgttttatatatacataatatttttttaattttcattacttatttattaccatttatttgttatttttttataaatttcttaaattttttatcactttcttctataaacttttttatcttttttttttctt

SEQ ID NO: 27876 - DNA, 78 bp, Zea mays
  Clone ID: LIB3180-022-P2-M1-C12
tggcagagattagagggagcgccctgcccgagcaaatataaacttttgcgcgagaagaggtaggaagggcataccgtc

SEQ ID NO: 27877 - DNA, 149 bp, Zea mays
  Clone ID: LIB3180-022-P2-M1-C2
tctttctgtttgttcctgagaggccctcggtggtttgcgtttttcttatcagcggccggcttcttcttaacctttccccttcttggatccatgtagctttcttcgaataatttcgcttttttcaccatatagtggctttttaatttttt

SEQ ID NO: 27878 - DNA, 211 bp, Zea mays
  unsure at all n locations
  Clone ID: LIB3180-022-P2-M1-C4
ttccaacaccacctcgcctgcgatctccggaggctgcgtcgcgtcgagcatggagcatgtctncctactgcggaaaggacaaggatgagctcatcaagaatgctgcctacattggcacccctggcaagggtatccttgctgctgatgagtccactggcaccattggcaagcgcctttccagtatcaattgtcgagaacgtttgaggagaac

SEQ ID NO: 27879 - DNA, 220 bp, Zea mays
  Clone ID: LIB3180-022-P2-M1-C5
tcttttctctcctcacgttgccaatgtttaaacccctggaaagaaaagaaaaaaagagggtcccctctaaaacccttcttccctagacctggctggcacccaacaatggcgaggccgccgcctgcggcgcccgccccggtgaggctccttctgatcttcgaaaacagccgtctccttcgacgtgttcagagggatgaaggtctttcatttttctggtttt

SEQ ID NO: 27880 - DNA, 401 bp, Zea mays
  Clone ID: LIB3180-022-P2-M1-C6
tttcgactcgacctgaacaaccccgcccggcgtcctgcccttgtgctctagggctcccgcgaccgttccaaattcttcctcgcgttcgtattccacgcggcgacgtcgccatcgccatcgcggccgccgctccgcccctcttccttcgcatatacgtaggtaggcgcctccccaaaccctaagcctttatctcccacgcgcgcggctcgctctgctgcgccgcggctcgctcgaccccgcagatcgccggcgatgggatccaaggaccaggacggaggggctgcatcctcgggaggcggcttcttctcgtcgttcgccgccggcatgcgcagctggggcaccgccgtgcataaatccgtcaacgggctgcttggttatgaaggccctgaagttattaaccc

SEQ ID NO: 27881 - DNA, 216 bp, Zea mays
  Clone ID: LIB3180-022-P2-M1-C7
tctttcgatttcgatctcgcaaccacctttggggtgttctgttgtggaggtaggggttcgaggagatatgcactttgcacttgcattggacacgaactcaagatcttatcatataagattttgagagtgtgatgtgttttataattctgcttggattataatattatttttaatatatcatatatcttttgtaatcatataaatttatttcttaaa

SEQ ID NO: 27882 - DNA, 247 bp, Zea mays
  Clone ID: LIB3180-022-P2-M1-C8
tctctgaacgttgatgtgaacgagttccagaggaacctggtgccctaccctaggatccacttcatgctttcgtcctacgctccagtcatttctgctgagaaggcctaccacgagcagctgttcgtggccgaaatcaccaacagcgccttcgagccattctccatgatggccaagtgcgacccccgccatggcaaggacatggtatgctgtctcatgtaccgtggggatgtgggtttcaaggactttt

SEQ ID NO: 27883 - DNA, 285 bp, Zea mays
  Clone ID: LIB3180-022-P2-M1-C9
tctttctttgtaagatcagctgcatgtcgagctatgggcattgttgcatgttggccggagatattgtcaagctctagcctaccaggcaagttcatagatgccattgagttcaatacacataactcatcaactccagttcgtgtcaccgctgcatgggctttggcaaatctctgttcttgtattcgttttagagcactggaagtgcatacagatccctatgcaggtgtaggtgtattgagcaaatcaagcatatcttttttggttgaagcaactttttcggggggg

SEQ ID NO: 27884 - DNA, 370 bp, Zea mays
  Clone ID: LIB3180-022-P2-M1-D4
tctgttttttattagaggtagcgcccttcccaagcggatattaacctcattgcgagagtaggtattaaattctttacttttcttcattattatatatatcttcattattctcatttttcatattttgatccatttcattaatttttttttttttctttactttctaaattacttaatttattccttttttaccatttccattaattctacaattttttttttatattattttctttaattattttttatattttttaccctatttttctcatcttctatatactctatttcatattttttattatttttttttatttctttttatttttttatcattattcttctttaattttttctattaatttttttt

SEQ ID NO: 27885 - DNA, 367 bp, Zea mays
  Clone ID: LIB3180-022-P2-M1-D6
tttttacctttatccatggctcgaggtatcatacgactcctgcttgtcatcccggtcgtcgtgagaattgaagggagtgtcatgggggagagatccaactcgttctcacaggactccaataattctagccctgctgaaaacaaactccaaccaggtgaaaagtccttctcatcggaagcatatgctgtgaactggaacgaaccaccatacctgcaaatgcaagacttcttctagcgacctgagctatatcggaagcaatcaatgctaggtgaaaagtccttcgtatcggaggcatattcccgctaaatagagcatattaccatcacttggtcagcaatcacatgagattttttagccattagcttat

SEQ ID NO: 27886 - DNA, 166 bp, Zea mays
  Clone ID: LIB3180-022-P2-M1-E11
gaccattagctttatctactccagagcgcagaagaacccgatcgacaccatgagggtgttgctctttgccctcgctcttctggctctcgctgcgagcgccacctttacgcatacatgcggtggttttggcttttttcttcttttcttcttttctttatattatttt

SEQ ID NO: 27887 - DNA, 347 bp, Zea mays
  Clone ID: LIB3180-022-P2-M1-E2
tcgttcgtacccacatacaatgtacaattcagggcgaattctgcgtggccaagggagctgccactttatcatcgttggtctgtgtaccacccgctgctaaggcgactattttctccaaaccgtattagggtccgatccgttccgttctttccccctacgtgagatcagagaggctttcagtctttggaaggccgtatttcaaaccacccgggcgccaacgtggaagcaaagatgggatttaacctttatcacccttgcttcttctacaaatattagccctattaggggagtttcctttattgcatatattggtacaaaacatttaggtacaacaactacaacaattt

SEQ ID NO: 27888 - DNA, 191 bp, Zea mays
  Clone ID: LIB3180-022-P2-M1-E3
tacaaataggatcaaggatgaaattgagcttggcaatggcctgccagatatcagaagcactcggcaatgtctccaggcagtaaaagacgccgggtttgaggttgtttgggataaggatcttgctgaagattctcccttgccttggtacttgcccttggatccaagccgaatcttcctgtgtagcttccgtt

SEQ ID NO: 27889 - DNA, 107 bp, Zea mays
  Clone ID: LIB3180-022-P2-M1-E4
tcgatcataccagagcaatttccgtgacccagtgtagcaatactgatctggaaggtgaggaaaaaatgtctctcctggaatggtttgtcaattaatacaagaagttt

SEQ ID NO: 27890 - DNA, 232 bp, Zea mays
  Clone ID: LIB3180-022-P2-M1-E5
tctgtctgttcaggtctgaccttccacccctgaggggctaggctcgcccttgtgggcaggactccacccagccagtgccccagcatgagcctgcagctgatgctaatgaattaaacaaggtggctcccaatggcttagaattaggtgccccggagaattcctctgaggaactcagcaagactgtcaccgtattcgagtgtaacaaatgctctgagattgctagtgtgcctct

SEQ ID NO: 27891 - DNA, 235 bp, Zea mays
  Clone ID: LIB3180-022-P2-M1-E6
tgacagacagtgttaatggcgaaagatgtggtactaataactgtaggaatggccattctctagagaaactacggtcttgcatatctgaaggggctctcatagaggacagattactaatgggtgcggactactattagacacaaactgctaaaaaactaaatgcccaaaaaggtggcattcttattggtttagtgaaaaattcaagcataactagagcaactattcacaagaatgc

SEQ ID NO: 27892 - DNA, 338 bp, Zea mays
  Clone ID: LIB3180-022-P2-M1-E7
tcttttagcgcacacacacacaaacagatttgggcctaattcacccggcggggggtcccttttaagacacagatctttctgtaaaccctgacccgcaagactatcaccctggaggtggagtcttctgacattattgacaatgttaaggataaaatcctggacaaggtgggcattccgccataccatcagcgggtcaacttttatgtcaaacagcttgtggacggtcgcactcttgctgactacaacatccatatatgagagcacccttcatcttgtgcttcggcttaggggtgtgttgcatatcttacttaaaaccctttcctgcatgattatcactc

SEQ ID NO: 27893 - DNA, 155 bp, Zea mays
  Clone ID: LIB3180-022-P2-M1-E9
tttgaacgttgaggagaaccgccgggcccgtgcgtgagctcctattctgctggcctggtgctctccagtacatcagcggtgtgatcctcttcgaggagaccctgtaccagaagaccaaggatggcaagccttttgttgatgttcttaaggaggga

SEQ ID NO: 27894 - DNA, 230 bp, Zea mays
  Clone ID: LIB3180-022-P2-M1-F1
ggaacaacaaaggaatcctgctactttgcagtcgttgattgaaaaaaacggcgtttaattctggacccagaccaactttacagaggaccaaaatgggactatagtggaaagtgggaggtttatattgtcaccaattatggactatcagatgaaggggaaaactatgtcaggggagcatgcttgtttactggatatttatctgatcccatgacaaggaactgtcctatagg

SEQ ID NO: 27895 - DNA, 251 bp, Zea mays
  Clone ID: LIB3180-022-P2-M1-F11
tttcttggatattcactcgcaagatcgggtggtggatgggaagctatcacaggacatgctacctcatggcattggactcctgctacaatgtattttgcaaaaagtatgaaaaacatgaggggaagcagttttcaattcttttttcatcattatgatgtgtttcattctatatacaacttgtttgtatcattctaaaatttcattttcttttacttttttacaatttaattatctttttttgtatattttta

SEQ ID NO: 27896 - DNA, 144 bp, Zea mays
  Clone ID: LIB3180-022-P2-M1-F12
taaagaagcaagctctcgatcacaatggccgccattccttctctgctgcgggggccactccccattgtcggcgccaccaccccccatgctcgtcctgtttccctccccgtccgtcgccggcgaccccaacctgttccaggacat

SEQ ID NO: 27897 - DNA, 191 bp, Zea mays
  Clone ID: LIB3180-022-P2-M1-F2
tctttgatataggagatctctgatgatgaagatgagggggtttttaaggatgtgggggggattttcatttctcaaattattttatattgttccaatatatttttcttttttcttatatttttcctatttttatattatttaattctttttttttttttctacttattaatttttttaatttttcctatttt

SEQ ID NO: 27898 - DNA, 171 bp, Zea mays
  Clone ID: LIB3180-022-P2-M1-F3
tctcttcagtcctatcctcctgtccgatggctgcaagttcctccccttccagccggagccttctcgccacccggccccttttcttgccgttgaggacgaggaggtcgctttcacccacgttcatcccgacttgtctcatctgtcttcgatctccttctgcgtcctcctccc

SEQ ID NO: 27899 - DNA, 259 bp, Zea mays
  Clone ID: LIB3180-022-P2-M1-F5
tctctgaaagtacaaggatgagctcatcaagaatgctgcctacattggcaccggtggcaagggtatccttgctgctgatgagtccactggcaccattggcaagcgcctttccagcatcaatgtcgagaacgttgaggagaaccgccgtgccctccgtgagctcctattctgctgccctggtgctctccagtacatcagcggtgtgatcctcttctaggagaccctgttccagaagaccaaggatggcaagccttttgtt

SEQ ID NO: 27900 - DNA, 404 bp, Zea mays
  Clone ID: LIB3180-022-P2-M1-F6
taccatagaggatcccagaacattgaacaagacgttgtatctgagacctccaggaaatgtcttctcaatgaatgaattggctgacctctgggagtcaaaactcaagaaatccctgaaaaggttatatgcaacagaagagcaacttcttaaagaaatccatggtaaattgaaactgctaaaggttaagtggtagttatatttgggttgcttttgttatagctctggtgtccattgtattttcttgaagttcaatcagttccttttcaatttaagctttaagctactggcgtcagatacaatgtagttcaagattgatgaagttaccgatgcaggtttatgatttgcgatttactgatactttattattttgtcaatccattttagttgttcatacgttcacctaa

SEQ ID NO: 27901 - DNA, 256 bp, Zea mays
  Clone ID: LIB3180-022-P2-M1-F7
tcttagcacagtatcacccggctagtgagcctggtcgttgtcccgcaggacacacacacatttcctccgctgcctgagctatggcagagccgagctggatccggctccggcagtcgcgtgcaacccttctcatcctgctgcttattggccttaacatgttcctttcctccggcggcaacttcgagggctttgactctgacgaccttcccttcgtgggcggtggtctcgatgctgacaatgacgaggaaggtcttga

SEQ ID NO: 27902 - DNA, 219 bp, Zea mays
  Clone ID: LIB3180-022-P2-M1-F8
tcttatcgtcaaacgaccgcaccaaccaatccggtttgccggcgatccggctcgtctcgtcgcgtctccggcgccggcagacacgggttacgcggtttcgtgatcggtgggcaggatgatgatgctgttcgattgttcgtgtttccgtaccctgttgttttttatttttttgtgtgttttgctctttttttttatatctttttattttttcttattttt

SEQ ID NO: 27903 - DNA, 261 bp, Zea mays
  Clone ID: LIB3180-022-P2-M1-F9
tttactatggacatgtgttgcgctggtcaacgcactacaaataagtaatcgatatattccctacccaaaaaaaaaaaaaaaaaaaaaaaaaaaaaaaaaaaaaaaaaaaaaaatataaaaaaataaaaaaacataaaaaatttttaattcatattataaaatttattattttttaaatctatttacatttaatttgaacttactctatactttattaaaattttttattatttataacaattttaaattataaataatttt

SEQ ID NO: 27904 - DNA, 186 bp, Zea mays
  Clone ID: LIB3180-022-P2-M1-G1
gaaagaaaaggaaaagaagcgcctttgccgaccgcgcgatcaatcaatccggggtccggcggcctgccatggtgaagctggcgacggccagggaggcgcggctgtacgggccggcgctggcggcaaggcggtgggagtacattaacgcgggaacattcgttgttcgcggtgctgtttctggtcctg

SEQ ID NO: 27905 - DNA, 224 bp, Zea mays
  Clone ID: LIB3180-022-P2-M1-G10
tttctttgacgcgtgggtcttgaagttcgggtgggatttgatacagtttggaagcggtctttttcttaacttattggaggacaaccatcccttcttgctcttagtcttattctggctctgtttctttttaaacctgcaccactttacatattttaccaggttgatgctgctcttgatcttttaccacatttaaaatattttttgaatttacatcgctttatttt

SEQ ID NO: 27906 - DNA, 234 bp, Zea mays
  Clone ID: LIB3180-022-P2-M1-G11
tctcatctctctcctctctcccccgccccggtcgtctccggcgagctaggggttgcccccccgccttgccaccccacggctcccgccatccttggatctccagccatgtacggcggagacgaggtttcggcaatcgtcatagatgtgggctcttacagctgcaaggcgggctacgcaggcgaccacacccccaaggccgccttcccatcggatgttgggtcaaatgtacaaact

SEQ ID NO: 27907 - DNA, 405 bp, Zea mays
  Clone ID: LIB3180-022-P2-M1-G12
cgcggcaggaggcgccggccagcagcgccagaacaaagcttcggcggggaaaaaggtaaagaagggcggcggcagcggcgggagatggccggcggtcaagcccaagaaggatctccagatcaatcgcctcaagggcacccacctcctcaccattccagacttcttcacttctgcggaggcgaaggctttcattgatatcgctgagtcgatgggcttcacgcaccagggcagtttggggccactaaagggggaggcttacagagacaacgatcggatatctgtgacggatccattgcttgctcaagccatttgggaatcaggaataaacaggatttttacagacatcagcgtctttggcaaagtagcaacaggattgaatccaaatatcaggttctacaggtacac

SEQ ID NO: 27908 - DNA, 212 bp, Zea mays
  Clone ID: LIB3180-022-P2-M1-G2
ttggctgtgtactgcaagcaggcctagtacgccggctgcgcgttcctcctattacacatataggcccctccctgcgtgtatgcttgttaccgtcgtgtcgaaccttgtactacgaggcttcatcgaacattgatggcttgcttctttattagaacatgtttgaataaacgctttttggtaaaaataaaaaatttattatattttacattaat

SEQ ID NO: 27909 - DNA, 190 bp, Zea mays
  Clone ID: LIB3180-022-P2-M1-G3
ctcatctgcgtacacggtctccctcttcctgtcagtagtagagtgagagtgaggcagcgagtgggagacaaggggaaatggggaagggagcgcaagggagcgatgcggcggcggcgggcggctaggtggaggagaacatgtctgtgctgtatggtatatcatgaacacttttaatgatctatgctctttt

SEQ ID NO: 27910 - DNA, 206 bp, Zea mays
  Clone ID: LIB3180-022-P2-M1-G4
ctcttctgctgctcgccctcggtttctgggcgcgaccatgggaccccgcggcgtcgccctagcgctccttgccgcggcgctgctccaggccctcgcccccgcgtcggcggcggcggttgcggggggcctgttgcggtttccgcttaataagcagcctttctacctcttctatttctccgtctctctcctattttttagagtttttt

SEQ ID NO: 27911 - DNA, 176 bp, Zea mays
  Clone ID: LIB3180-022-P2-M1-G5
tctttactgtacttatgtttgtatccacttactgctgcgctttctcaccgcggggggagtacatccttatcctgatttggcttcacggtaaatgggcatggtcagggctaactttcagaatcagctccaccaggggctctttttaatatgcttgctcaaattttcagagcgcaaaa

SEQ ID NO: 27912 - DNA, 243 bp, Zea mays
  Clone ID: LIB3180-022-P2-M1-G6
tcgtcattaccgcctcgtgtgcagcgtgctcgctgagctcctctgtcgacgcaccaccccgaagaccccccgccgcgctcgcagggtgttcgacccttcgcccgcgcgccctcacgacatggccgcctccgtctccgccgccgtcaaggccgccgcggcgttcgcgcacaaggtccagaaggagctggccgcgccggcgcagcgccgcgcgggcttgtcccgtcggaccaagccgtgcatcgt

SEQ ID NO: 27913 - DNA, 389 bp, Zea mays
  Clone ID: LIB3180-022-P2-M1-G7
aaaaactctttggtcagatcgtatctctggaaaggttactgtcttggctggcaatgcaaatttctgggctgttggttgcgaagatggtttcctgcaggtttacacaagatgtggagtgcgagcaatgccagcaatgatgatgggatctgcagctgtttttattgattgtgacgactcctggaaattgcttcttgtcacaaggagaggtctaatgtacatatggaacctttatgacagggcctgtattttgcatgactccttagcttctttggttgcatctccagatgagtcatttgcaatagatgctgtttcagtaaaggttatatctgccacattcttaagatgtggatcaccccttgttgtccttgccagccgtcatgctttttttt

SEQ ID NO: 27914 - DNA, 419 bp, Zea mays
  Clone ID: LIB3180-022-P2-M1-G8
tttcttaaccaaacaccatccatgtgcatgtaccgggaacctgacggtaaagattgaatttgtttgataaaaataataataaataataataatttataaattaatttatttatatttattataaaaaatataatattttttgtttttttatatgatttaattttatatacttttgttttttatgtatttgttttattatttttgtatttaaattaaattaatttttagtaatatttaaaaattttttttttgttaatattttttttatttaaatttttaattatattgtttgatttttattttttttatatttatttttttattataatatattttattattattttaattttttaattatttgttatatttattaataattttatataaataatatttattttatatttttttatatt

SEQ ID NO: 27915 - DNA, 366 bp, Zea mays
  Clone ID: LIB3180-022-P2-M1-G9
tctttacagaggcaaaacttgtacacaattcatgattcgctttccatgccccatcggtggatgctttagcagttagtgcttcatcatctgtttcttcaccgcttcctccaggcactcagcgcttgttgccgttcatagaatcattctttgtcctatgtgagaagcttcaaacaaatcaaccagttgcacaatcagattacactgttattgcccctgaagtaaaagaatctgctggaagttcatcttcaccttcactgaagactggtggaacttgcaatgtgggttttataaggattgtttgaaagcatctacttttgctcaacgttttcattagtcatatatcctttacatacttgtgaagtttct

SEQ ID NO: 27916 - DNA, 127 bp, Zea mays
  Clone ID: LIB3180-022-P2-M1-H10
tctttttattcaaaccggcggtcatcaagtgttcagtccacttcacacgggtggttgttgtcccccccatcttaagtattactacatattctcttacaattacaacattagcttcccgatctctaaa

SEQ ID NO: 27917 - DNA, 228 bp, Zea mays
  Clone ID: LIB3180-022-P2-M1-H11
tctatataagaaatacacacggcaagggtctggggtcttggctcttgcatacgaattgcttcctgagatgcctgttagtgaagctagaagtttggaaagggatcaagtagagagcgacctaacatttgctggctttgcgggcttcaactgccctataaggggtgactctggtgctttcttacaagaactctgacaattttttccatgatctttttcttgattactcat

SEQ ID NO: 27918 - DNA, 221 bp, Zea mays
  Clone ID: LIB3180-022-P2-M1-H12
tcgtcccactttctcctcctcaccgagtcacaaagccaaaccctaattcacggccgccggagatgggacaaggttctcccggcgggatgggcaagcagcccggccttccgggcgaccgcaagcagggagacggcaagaaagagaagaaatatgaaccacccgctgccccttcccgtgttggccggaagcagaagcggcagaagggctccgaggcggtggtg

SEQ ID NO: 27919 - DNA, 376 bp, Zea mays
  Clone ID: LIB3180-022-P2-M1-H2
tctttcttattcctcgtcgccagcttctctttgcccgggcacaacccccaccggcacgggttccggtgtccctttcactcttcaccctctccttcccttcggcgccaagtccatccgcccctccgaatctccgattgccgccgtccaggtgccggccgacagttgagaatgggactgaggcgcctgatgagatgctgctgctgcattgcaaagcacgcggacgacggcgacaagatcgatttccgaggtggcaatgttcatgttgtcacaagcaaagaggactgggaccaaagaattgcccaggcatacaaggatgggaaaaccgtggttgctatcttcagctctttctggtgtgggccgtgccgcgtcatttcat

SEQ ID NO: 27920 - DNA, 196 bp, Zea mays
  Clone ID: LIB3180-022-P2-M1-H5
tctgccttctgcgcctccatttcggcctctgtcccgtggcaagttcaatctcacctccaaccatgggtaaagagaagtcccacatcaacattgtggttattggccacgttgactctggcaagtcgaccaccacaggacacctgatctacaagcttggaggcattgacaagcgtgtgatctagaggtttgtgaaggt

SEQ ID NO: 27921 - DNA, 297 bp, Zea mays
  Clone ID: LIB3180-022-P2-M1-H6
tatattgttaagttctttagaaagacagggaaagatggatggattgctttaggagggatccttctttctatgacaggcagtgaggcaatgtttgctgaccttggtcactttacgagtgcatttgtcagggtggcttttattaccgacatatacccatgccttatgctacaatatatgggtcatgctgcattactgtcgaagaacacattttacatgccgacaggtttttattatactttcccagaaccagtgttttgtcctgactttttagtggtctctcttgtttgttgttttttt

SEQ ID NO: 27922 - DNA, 272 bp, Zea mays
  Clone ID: LIB3180-022-P2-M1-H7
ttgtgtagcactctccatcctcattgctagcggctcgattctcctccatagccttgtgcacgcacagccgacactgcagtgaggaacttgaacagaggaagaagcccggctgagcgctctctcgtctagctagctgcgctgcggcgatgaagatgcatcgcttcgctctgcgtggcctggggtttttcgtcctgtggatgctgcattgcggaagcgagctcgccgcggcggtgccttcagatggctggtacgattactccgcctacaccgac

SEQ ID NO: 27923 - DNA, 278 bp, Zea mays
  Clone ID: LIB3180-022-P2-M1-H8
ttttcgttgctggcataaacaccctgttcgagacgttattcgggacgcgccgtccggtcgtgatgggcggctcgtacgtcttcgtcgggccgaccatctcgatcgtcttggctggacggtacagcaatgaagcagaccctcacgagaaattcctgcggacgatgagggggacgcaaggcgctctcctcgttgcgtcgacgattcagatcatacttgggttcagtggcctctggtgcaacgttgtcaaattactgattcctttttcatattgttggggg

SEQ ID NO: 27924 - DNA, 359 bp, Zea mays
  Clone ID: LIB3180-022-P2-M1-H9
tcttggacgcgtgggtattgtcatgaatatgcaccttgaggatgataaacgaaaggtgcccccaacaaagcgctcttgtggatgcacggcaatctaaatctaaatctatcaaggatgcttggaagatcttgccatcagctccaccatccctcactttccttccactgctgtcatgtagtctttagcaatcatgccctatgagtgatcctgctaatcatccagtaaaaaaagttaaaatgccattcccttggactcaacttgcctggatcctgcccatgtgtgtgttttgtaccaactgtcatgtacaaggactatcattttaactcttggtgtagttataattactttgattggtttgt

SEQ ID NO: 27925 - DNA, 284 bp, Zea mays
  Clone ID: LIB3180-023-P2-M1-A1
tcggcaggaactaacgaaattgtgggaaaagatgagatgtgacgatgtgagcaaagaggagaggtccaaggcagtaagtcaggctatccataaaatggatgggaaatatttggacattgccacatcacatgttactgcacgtgttctttaaacatgtgtaaagtggtgctcggagtcagagagggatgctatctttgatgttttacaaccacatttgctttactcttttttgcaagaaatatgccgtttttcttgttaagaatcttatataaccttcctttaaa

SEQ ID NO: 27926 - DNA, 168 bp, Zea mays
  Clone ID: LIB3180-023-P2-M1-A10
tctttctttccggatcaacaattattactaggcgcggctatacttaaaatcgggccagactaaacagtttaccaacactaaaacacagcgcctgtaatatccaactactactttcctaccaagctttccgaccaggcattttaattctaagcctattccacaatcaaa

SEQ ID NO: 27927 - DNA, 79 bp, Zea mays
  Clone ID: LIB3180-023-P2-M1-A11
cttacagattgtaagtgcatctgggggtgcgtgcattcaaaaagtggggggggggaaaacaaaacacccctaatgacta

SEQ ID NO: 27928 - DNA, 352 bp, Zea mays
  Clone ID: LIB3180-023-P2-M1-A12
tcggctcaaggtcctggctaacgccgggacggctgatgatgcattgacggcgcgaaacaatggggcacaaggaattggattatgccggacagagcacatgttctttgcttcagacgagaggattaaggctgtcaggcagatgattatggctcccacgcttgagctgaggcagcaggcgctcgaccgtcttttgccgtatcagaggtctgacttcgaaggcattttccgtgctatggatggactcccggtgaccattcgacttctggagggtgggggcgcgagttgctttcaaaaaggaacatctaggacattgtaagggaattatgtgctgagacgggagccaaccaagtgg

SEQ ID NO: 27929 - DNA, 241 bp, Zea mays
  unsure at all n locations
  Clone ID: LIB3180-023-P2-M1-A3
gtaccgaatccccatttccacccacacctactcagaccaacaagcaacatanaaaggggggtccagtgtcaacaatagagcggcaatggaaaccaanatattttccctccttatgctccttgctctttctacatgtgttgctaacgccaacaatttttcctcaatgctcacaagttcctatagccttcctttttacccccatccttttcttaaatattagtttaattattttaaaaccccc

SEQ ID NO: 27930 - DNA, 103 bp, Zea mays
  unsure at all n locations
  Clone ID: LIB3180-023-P2-M1-A6
tcttttctatcccaaaatcctaggcttttgggcgtcggggcccgatggagccgggctggccaacctcnatcgcgccgcaaactttgtagcttgagaacaacat

SEQ ID NO: 27931 - DNA, 136 bp, Zea mays
  unsure at all n locations
  Clone ID: LIB3180-023-P2-M1-A9
aattcccgnnacgacccactctttttttgacttttggaaataggcttgccacccgtttttgctagatgagtcgcgggacaaccttnnnacttcctccctgctgtccgttgaatttgatctggtattttttatatat

SEQ ID NO: 27932 - DNA, 174 bp, Zea mays
  Clone ID: LIB3180-023-P2-M1-B1
atagggaaagcggaaacgcctgacgccaccaggtaccgagattccgcaattccgcacgccacgacccacgcgaacttatcacatgttctaacaagacgagcgcacagtaggggcctacgagtgccctggccccccttgctatcgcgcgccagatccctatctcgccgcgatcca

SEQ ID NO: 27933 - DNA, 219 bp, Zea mays
  unsure at all n locations
  Clone ID: LIB3180-023-P2-M1-B12
tcttctgttttcgcccccttnncccttccggacgcgccttcctaaaccctgagcgtccaccaatctatatntntncagcccaggctatcggaggagatcttttttcttttttatttttttttttcctccaccttattttttttttatttttattttataaaacattttctttttttttttttttttttatnnttcctcatctccattttttttcttttt

SEQ ID NO: 27934 - DNA, 285 bp, Zea mays
  unsure at all n locations
  Clone ID: LIB3180-023-P2-M1-B3
tctctgaattttctccaaaaataccaatccggcttccaggttctcgtcgatggctccgtgtgaccnctcaaaacttccttcagtttcgatctaaacccgccgaaaccctaatccccatggctgccgccatgggcaaccccattcttacccttcccgcgccctttcgcgtggggccgccgcccaaggtgcttgtgccacccaaaggcttagctgtacaccgtgcggctgcccgagggtatcacaagggaggagctggacattattaaacttaccccccaatttgtg

SEQ ID NO: 27935 - DNA, 255 bp, Zea mays
  Clone ID: LIB3180-023-P2-M1-B4
acccgtttaaaaacatctgggaagtacttggtaaagaggtgggtccgaacctttgcttgcagggagacaattaaatttggccatgtcacatttttctggaacggtaaccgttcgggatactttgatgcaactaaggaggagtatgtttaattacctagtgacagtggtattacattcaatgttgcacccaatatgaaagcgctttgaaattcttaaaaaatccatggattcttttcctaaagttgaaagatttga

SEQ ID NO: 27936 - DNA, 157 bp, Zea mays
  unsure at all n locations
  Clone ID: LIB3180-023-P2-M1-B8
tgaaatcttcttgnaccccanttgattccgccacacttacacacgcagtaaggctttttacataactacatatatnntttcattttcttatttaacaaccctctataatttcctaatatttttttcattgttcctcacttctttttttattcttttt

SEQ ID NO: 27937 - DNA, 302 bp, Zea mays
  Clone ID: LIB3180-023-P2-M1-C1
cccttttcttaatttgagggggcaccctttaagtttggtttgggttttataaaaaaggagcttggaaaaacaaatacattttttttaatttaaaataaaaacaaaatcttcattccttttttcacaaaaaagactttgcaaaaataaaacttaaacttttattcctttttaatttaactttatccttattaaaaaattaaaaaaggcttacaattttattttaattcaacacaaagacttttccaaagatgaactaacaatcttttttcttctttaaaaaaattttttaaaaagcttttttt

SEQ ID NO: 27938 - DNA, 312 bp, Zea mays
  Clone ID: LIB3180-023-P2-M1-C11
tctcttgataatgctggatgctattgtcagggagacctatatggtgatcttggcatttattgtcgtgtttctatgttatggaaattttaagagcgctgatgttacctgtagtgctctttaaatttggaacatggaacatggagcatgtgctgattagtagaagggttccaactgatcctgctctctaaatttggaacatggagcatgtgctgagtagtagaaggtttccaactgatcccaatgagtataagttatattaggaaattggagatggtgttggtgccacagtataccgagctctttgtgtcccac

SEQ ID NO: 27939 - DNA, 128 bp, Zea mays
  Clone ID: LIB3180-023-P2-M1-C12
tctatttagcctacctgacacccaccacctggctaccaaaatcaccaacgcaggcattgtcaccaactttgacttccctacctacttccccgagcgcaggccctttcacgaagaccctttacttcatt

SEQ ID NO: 27940 - DNA, 415 bp, Zea mays
  unsure at all n locations
  Clone ID: LIB3180-023-P2-M1-C2
gaaagcggacgccgcaggaccgnccaaattcccgtcacccaccctctagatttgagcgccacccttttttgggttgtgttaattaatatggtctgaaaaatcaactacatttttttaattaaaattatacaaattctccattcttattcccaacactactaccaatttttttttcacttcttacctaatattacctttatctcataacatcttcttaatcctcacattttatttactcaccacattactttccaaatataacctaacactttttccttttaaactaatttcttagattctcctttttttataacccaaccaaactttcaaattttcttatattattttccctttaatattttcttttcaaatttttttcaacttacaactatacttaattttaatttcctcattt

SEQ ID NO: 27941 - DNA, 170 bp, Zea mays
  Clone ID: LIB3180-023-P2-M1-C4
acccgtcctagttggcccatctaatggtggcaatttgacatggattcctcccaataaggggggtaactcaaataaacttaatccttcgagaaaccaaaggccaactaggtttttccagtccaattctaagtctttccataatgagagctctggaagttttgaaccctgaa

SEQ ID NO: 27942 - DNA, 425 bp, Zea mays
  unsure at all n locations
  Clone ID: LIB3180-023-P2-M1-C5
tttaccttcagaacagatttgctactatgggccgtgattatttccatagtggggtgggtgataaacaaactttatcaattnctatatctaacctcaaaatatttttttacagtctcaatactaagatgttttcataatttattctttttttatcatcactttgctatnaaagacattgccactatttttttttttttattttcaatgggacacccaaactttttgtcaacacttcattataacaaattgtaattggttctttcaatttattatttctgaggggtggggggtggggggagtttaatttaacttttcttaattatatgccaaaatgttatttttttttttattattttccttactttcttttaatcttttttatttttttaatctaatcttttatttttaacattctttttttattt

SEQ ID NO: 27943 - DNA, 318 bp, Zea mays
  Clone ID: LIB3180-023-P2-M1-C7
ttcgtttttctgcaacaagatggatgcaacgactcgggaatacttcaaggcgcgttatgattaaattgtgaaggaagtctcattctacctcaagaaagttgggtacaaccctgataagattgccttcgttcccatttctggttttgagggcgacaacatgattgagaggtccaccaaccttgactggtacaaaggcccaaccctgcttgaggctcttgaccagatcaccgagcccaagaggccttcggacaagcccctgtcttttgcccttcaagatgtgtacagggagtggtggtattggaactgtacccgtttggt

SEQ ID NO: 27944 - DNA, 157 bp, Zea mays
  unsure at all n locations
  Clone ID: LIB3180-023-P2-M1-C8
ttgnactcaccaactccatttcaatgccattgtaaaacaaccaagccgcgtttgctcaaactaacaaccaatcacccttattccctaaatcaagatcgttctcaatttatattattgtcttcggtaccattccttttttttttttccacaacaacaa

SEQ ID NO: 27945 - DNA, 331 bp, Zea mays
  unsure at all n locations
  Clone ID: LIB3180-023-P2-M1-C9
tacggccagncagagtcaccaccggctgccctgtacaactatgtacggggtggagcaccaccattcatcgaagaggatggttttcttttttcatttttttttctatcctttattatattttctttcttgtgtctatttctttttttttttttttttatatacttttaattttaaaaatatttattcttttctttttcctttgntttatatttattcaatttcttcttttattttttttttttatttttattttcattctttatatttctctttatatcttttatttttttttaaattatattttcttctttttttttatctcttttttttt

SEQ ID NO: 27946 - DNA, 425 bp, Zea mays
  Clone ID: LIB3180-023-P2-M1-D10
tctgttgctaatagtgtaccaacaatggcagctaagatattttgcctacttatgctgggtggtctttctgcaagtgctgctacggcgaccattttcccacaatgctcacaagctcctatagcttcccttcttcccccgtacctttcaccaacggtgtcttcggtatgtgaaaacccaattcttcaaccctacaggatccaacaggcaatcgcagctggcatcttacctttatcacccttgttcctccaacaatcatcagccctattacagcagttacctgtggtgcgtggatggcacaaaacatcatgtcacaacaactacaacaacttgtgctagcaaaccttgctggctactctcagcaacagcagtttcttccattcaaccaacttgctgcattgaaccttgctttttatttgcaacaacac

SEQ ID NO: 27947 - DNA, 332 bp, Zea mays
  Clone ID: LIB3180-023-P2-M1-D12
taactccaatcccttcggcccgcccggtcgacgggatcccaccggcaggcatgggtccatacaagcaccgcccgtctagtgggagcaactccagcttctggaccaccaactccggcgcccccgtctggaacaacaactctgtcctcaccgtcggacagcgaggtccaatcctccttgaggattatcatctaatccaaaagcttgctcagttcgacagagaacgtattcctgaacgtgatgtgcatgcacggggtgccagttccaacggttaattggaggtggctgatgatgtctcttaccttacatgtgctgaatatcttcgagcttctggg

SEQ ID NO: 27948 - DNA, 221 bp, Zea mays
  unsure at all n locations
  Clone ID: LIB3180-023-P2-M1-D6
tcaacttttcaatgagcttcaaaaatactacctgcgaagacctcgaactggggcacgggcacncaaacaggaaaaaagagatttatttccaatgaatagagaaggctatcatgcaggttttcaggatttccagtatttgctaacaacgttcactcaatacaggcgactacttgtaattgcggaactaaaacatggagacttgtttaactttgccaatattt

SEQ ID NO: 27949 - DNA, 211 bp, Zea mays
  Clone ID: LIB3180-023-P2-M1-D7
tgcagaacgtggcgtacccgaagaacgtgtgcgaccctctgctccgggagtgggtcaaaccctcacacaaccccatcatcgttcccgagggcggcatcaacgcgactcaattccgcgacccgaccactgcctggcgcgttcccggccccgagcagtggcagctgtttttctgtaattacttaatcttattcatttttatttgttacatccc

SEQ ID NO: 27950 - DNA, 219 bp, Zea mays
  unsure at all n locations
  Clone ID: LIB3180-023-P2-M1-D8
ttggtggtgacgactggcctagtgctgatcggggttcgccaggtcttgggcggggaccagcacctaccaggtgaccctattccttttcttcactcggtgtataatccccctttgctgcaatcaagcttctcaaacataataagcaaatagtctcttcacgtgattgccaaaattagtcaagacgggtgctctttgctgcgtggccgntaggccacatgg

SEQ ID NO: 27951 - DNA, 216 bp, Zea mays
  Clone ID: LIB3180-023-P2-M1-E1
ggaccaattttccaccaaggttacggggttctataggtttccttttttcccccgaccttttaacaaccggggttttgggatggggaaaccccattttttaacccttccggatcccacagggaatcggaggttggattttacctttattaaccttggttcttccacaattattaggcctattacaggaggtacctttggggcaattattggcaccaa

SEQ ID NO: 27952 - DNA, 409 bp, Zea mays
  Clone ID: LIB3180-023-P2-M1-E10
tcgtgaggctttcataagagaattctttgaccagaatccattgagccatgttggcctagtgacaattaaagatggtattgcccatcgacttacagaaatcggagggagcccagagtcacagattaaggctttgatggggaagcttgagtgttctggtgattcatccctgcagaatgctctagacctcgtacatggttatttagatcaagtaccatcatatggtcacaaggaagttctgattttatactctgccctgaatacatttgatcctggtgatatcacggagacaatagcaaagtgtaagaagtcaaaaattagatgctctgttattggtcttgctgcagagatcttcatttgcaaacatctatgtgaagagacttggggatcttacacagatgcactggatgag

SEQ ID NO: 27953 - DNA, 298 bp, Zea mays
  Clone ID: LIB3180-023-P2-M1-E11
tggccttgaggacttcccgacttcagaacgggtgaaatggcacggtcatcagcccgggaagcctgactggtcagaggcaagccgattcgttgccttcaccatgaaggacgaaaccaaaggcgagatctacgtggccttcaacaccagtcaccttccggtggttgttgggcttccagagcgctctgggttccgatgggagccggtggtggacaccggcaaggaggcaccatatgacttcctcaccgatggcctgccagatcgtgctgtcaccgtctaccagttctctcattttctcaac

SEQ ID NO: 27954 - DNA, 105 bp, Zea mays
  Clone ID: LIB3180-023-P2-M1-E12
tctgaccagccaggcccgggcgcgccggcaaggcggctctacagcaactttcaccgcgtactccctcccttcctcgtctcgtcttcgtctccagggttcgcgggg

SEQ ID NO: 27955 - DNA, 161 bp, Zea mays
  Clone ID: LIB3180-023-P2-M1-E2
atccgtcttaaaattaaagggggccgcccgcttaagggtttttgaacggttcttggccttttcggcaaggacccacaaggaggccttcttggccaggttattggcacaagttggaacctaaccgaggaggagaagaaagggcacaaaaaggttaaatggga

SEQ ID NO: 27956 - DNA, 171 bp, Zea mays
  Clone ID: LIB3180-023-P2-M1-E4
agcgttctttataaaatggttcgcttttaagaacctgcccaccgagaaggatggcgattggggccgcgcccgccgaccaaacaattgcgttcgcgaggggccagcctttttattggattttcgcgcttattgggggccacttgccggcggttcacggggttggtgttccct

SEQ ID NO: 27957 - DNA, 85 bp, Zea mays
  unsure at all n locations
  Clone ID: LIB3180-023-P2-M1-E5
tttccattagagggagcgagccaacanaggcagggggcaattggcggcggaaatggtcttttccggccaggtccggccgtttcct

SEQ ID NO: 27958 - DNA, 375 bp, Zea mays
  Clone ID: LIB3180-023-P2-M1-E6
tcgcacgtcaaagcagaaaacctcagaaaaccccaatatatcctcgtccaccactgcccccgctctgctgcaactccactcggcccggccgccctttccacccaccttgatcctccgatccgttggtgcttgaccgatccatggacacccacatcggatccgtgaacggggcggcgtcgaaccagacggttggctgcccggcgtcggcgccggggtgcccgatggcgtccacgccggcgcagcccgcggcgaccctgtcgggggggggaggtcgctggggcgccacctcgcgcgtggactcgtgcaggtcggcgtcaacgacgtctttcgggttccgggggacttcaacctcacgctgctcgaccacctgatcgc

SEQ ID NO: 27959 - DNA, 282 bp, Zea mays
  Clone ID: LIB3180-023-P2-M1-E8
tctctcatggccatggagaacactgggccatgcggtgacttcgggaagatcgtggccgatcttgagtctgagaacttggtggctaacgtgtctgacgtgaatcaagcctaggcgttgattgctggaggtaaaatccctgaaccccagcttctgtgccgcctgatcgctggtcttgcttacaatctggagaagcctgaccatgactctgccatcaagaggtgtgttttctttactctaaaggcaatcagggtggccgtcatcaagaaccgcatgaacatggat

SEQ ID NO: 27960 - DNA, 337 bp, Zea mays
  Clone ID: LIB3180-023-P2-M1-E9
tctatctacgctccttgcccttcttagattagggtggatcccaggcggcgctggtgcagacacgcatggcattaaccgatacctataacccagtgagcgcccaagctgcgctgatccaaaagccaaggaaccttggagccataagctatgctggcttaaagatgccggcatctgttagctctggctcagagtcgacattcctgggctggaatgcatcccttggggcagctgttactccaaggattgtgcccaaggcaaagtctggatctcagatatcttcacaggcatcttacaaggtggcagtgctgggtgctgccggtggcatcggtcaaccctt

SEQ ID NO: 27961 - DNA, 109 bp, Zea mays
  unsure at all n locations
  Clone ID: LIB3180-023-P2-M1-F11
tccnctgcaaagatgggataaaatcttctacacacgtaatttaactaaaggacgtagagttatatcaacaaccccaaaacattttaccccctctactttttatcttttt

SEQ ID NO: 27962 - DNA, 340 bp, Zea mays
  Clone ID: LIB3180-023-P2-M1-F12
tcggaaattctgaagaacaatggatttgccggtgaaaagaaaattaggacctctactgttgaaataaacgacgaatcaagagggcgtccattccaaaaggccaagattgagataatcttgggaaagagcgacaaatttgatgagctgatggccgctgctgcagaagagaggggcgaagtggaagatggtgaagagcaggcttgaaaacagtaccgatgacaagctgctgctgttgtgctctgttagtgttgtttaatttagtttaataccgtgtgggtgggatatggcactcgttcttgcttaactacattaccattgcaatgtctgcaaatccatggat

SEQ ID NO: 27963 - DNA, 418 bp, Zea mays
  Clone ID: LIB3180-023-P2-M1-F2
gaaggggaagcgggtgcaggaccaggtaccgaattcccggtcggcccactccttcctctccatgagagaaacaaaaattggaagagagaaaggaagaaccccaagccttgggccaccatcaacaaaatacaggggagaacaaagaaacaatccaaccagacaagagccaccacccacaaaatacaaaaattggaggggagaaagagggtttaccccgtgcaagaaaaaagcaagcaggggtcaattttttttttttgcgcgcggtcctttttttttctgggcgcggtctttttttttatttgcgcctttatttttttcattattttactttgggcgcgctggggttggtggtactttttttattttgatctctttttttatattactttattctagttaaaacatttttatatctttt

SEQ ID NO: 27964 - DNA, 96 bp, Zea mays
  Clone ID: LIB3180-023-P2-M1-F6
tttttactaccagtccaccgccaccccatccaatccgattcccacaaccgggtgcgcggctcttctatagctcgacttcagcgactagcttttttt

SEQ ID NO: 27965 - DNA, 325 bp, Zea mays
  Clone ID: LIB3180-023-P2-M1-F7
tttgaaactactgtctccgtctgccactccgaagctcgctgttggtagcaagttatttattgctagtattattggtattgctgatttgctcccctctgcctttgcgatgtaaatatttatgtacccagccccagccccagccccagcttgtagtgagtagtaacaagcagtagcggtaccttcggtattaaccggcagctagctatttcgcggcattttaatccctgtaagcgtagctctgtggcgtgagatagatgacaaacactgggtatatgtatgtctgatctttctcactgaatgtaccataagagagagtttgtagagt

SEQ ID NO: 27966 - DNA, 225 bp, Zea mays
  Clone ID: LIB3180-023-P2-M1-F8
tgattactactagctacccacccatcgccggacttcgatttcaagggagcggaatcacctgataaggtgatatttgtctttgccgtgctccgtttaggctgtacgagagaaacatttatgtacccagcccacatcccagtcccagcttgtattgagtacttacaagcaatagcggtaccttctgtattaaccggcagcttgcttattttgctgcattttaattcc

SEQ ID NO: 27967 - DNA, 323 bp, Zea mays
  unsure at all n locations
  Clone ID: LIB3180-023-P2-M1-G11
tgcggagtcaggcccaggcctaacctcnaggcatcagagcagccgaacacgggcgcggcaaccgccgccattctaccccaggtcggacggacccttgccggagacgagcacacgccacagcaggaattatcgggcgtagagcagcgcgaagcgagagatccaatggcggcggcggaggggcagtgggtgctcatggcaacggggcggacgccgaccaacattgcggtgatcaagtactgggggaagcgggacgaggcgctcatgctgggagtgggcgcggggtcagcgtaacgctcgaccccgaccatttcttcgacaccacc

SEQ ID NO: 27968 - DNA, 355 bp, Zea mays
  Clone ID: LIB3180-023-P2-M1-G2
gcggtttcagtgttgccagcaactcagggaggtggggccgcagcaccgggaccaggcgatcttcggcttggtcctccagtccatcctgcagcagcagccgcaaagcggccaggtcgcggggctgttggcggcgcatatagcgcagcaactgacggcgatgtgcggcctgcagcagccgactccatgcccctacgctgctgccggcggtgtcccccactgaagaaactatgtgctgtagtatagccgctggctagctagctagttgagtcatttagcggcgaggatgagtaataatgtgtcacgcatcaccatgggtggcagtgtcagtgtgagcaatgacctgaatgaacaattg

SEQ ID NO: 27969 - DNA, 218 bp, Zea mays
  unsure at all n locations
  Clone ID: LIB3180-023-P2-M1-G7
ttagtagtatgctcgccnncgcctggagggtgtctcatcgagccgtcacgtgtcctctcctangcatcgggcgaccccaaatccgaaaccctttctccaccatggcgtctctctcgccggcagccgcctcgccgaagaggctgagggtctactcgtctgccgccgctgacggcgacggcgcggggagcggcaagcgcgtggggacccacaacggaagc

SEQ ID NO: 27970 - DNA, 286 bp, Zea mays
  Clone ID: LIB3180-023-P2-M1-G9
tgatccagcccatttcgaactctcggtagaggcttcctcggactgtgtgtgggccacttccccgtaccgtactcctcttcgcgccgtagaaatggcgctgccgaatcagcagggcgtggattaccccagcttcaagctcgtcatcgttggcgacggtggaactggtaaaaccacatttgtgaaaaggcattttactggcgagtttgagaagaaatattatcccaccattggtgtagcagttctcatttctctaatttatctatatttggggggggggggggggggg

SEQ ID NO: 27971 - DNA, 76 bp, Zea mays
  unsure at all n locations
  Clone ID: LIB3180-023-P2-M1-H10
tgggaagagcaaattccagtacaagcccaggtggatcaatgttcttgggggttantaagattctacctatggtgtt

SEQ ID NO: 27972 - DNA, 144 bp, Zea mays
  Clone ID: LIB3180-023-P2-M1-H8
ttttagaaagcacaatagtgtaccaacaatgggagccaaaatattttgcttcctgatgctccttggtctttctgcaagtgttgctaccgcaaccatttttccacaatgctcacaagcttctatagctttccttctttccccata

SEQ ID NO: 27973 - DNA, 152 bp, Zea mays
  unsure at all n locations
  Clone ID: LIB3180-024-P2-M1-A1
tgagataaatgctgatccttttaaaaacgggtgggttttaacaatggaggggggtgggctcttgngagcaaaggttctctatttgtggtgaagagaggtttagcacattcaattgttttttttgnccgcncggctttttttttttttttttt

SEQ ID NO: 27974 - DNA, 260 bp, Zea mays
  unsure at all n locations
  Clone ID: LIB3180-024-P2-M1-A10
tttctttcgcatcgtgtgctcaatcaaatcgcccgcccaaatttaataaggcccgcttggntaacatttaaaaccattacttcttcttcaacttcttgtgtgcaaattgtggcttcacccccttgcatttcggcctttttttttattcttaccgcaccggtaacaacttctaagacttattgcatgcttaataccacttctacatttcccaaaattctcttcttctgtcctctaaagattaagcccaaatttttttcttt

SEQ ID NO: 27975 - DNA, 160 bp, Zea mays
  unsure at all n locations
  Clone ID: LIB3180-024-P2-M1-A11
actttctttctgaccaactatacaactacctgcgttcgctgaaataaaaaggactcgccctgggctcaaaacccntggattaaataaggaatatgaaggcaatgttaaagccactttttatgatttgggtttaaaacaatttttttttttttacctcacc

SEQ ID NO: 27976 - DNA, 197 bp, Zea mays
  Clone ID: LIB3180-024-P2-M1-A12
atcccccttgcaagtatagtctcgggggctctagaaaacgatgggcgggggcgacctgatccaaagcggcgcttgccgcggcgagttcgcttccaaggactacacggacccttccccggcgccgcttatcgaccctgcttaacttgggtcctggtcgctttaccccgccctgatcccccagttcatcgccacccttc

SEQ ID NO: 27977 - DNA, 253 bp, Zea mays
  unsure at all n locations
  Clone ID: LIB3180-024-P2-M1-A2
tttcattttccaaagatagccacgccacctgcgtcggtaccaacacacgtgtgtcagtgactnaccacagnncaccgnctttgcgctacggcgtcatggtcgcacgcccgcagcttcccttttcccttcccagtcgatataagccttgttccaccatggcccccgcccccgtacttgccggcattctgctcgccctcgtcgcaatggcttgcgccgttcacgcacacgcgccagcccacttcccggaggcgtt

SEQ ID NO: 27978 - DNA, 299 bp, Zea mays
  unsure at all n locations
  Clone ID: LIB3180-024-P2-M1-A3
gacaaaatagaaatagcctaccagtgtcgggccaggcgccgtcccgtacgggggcgggcgtcatccgaatccgcgccgcgaccagcgaagaaggtaggaagcatccggaacggagacgcgcctcctgcctcgccttccttccatggcgccgcccctcgccgccgtctcatcgtcgtcgcccctattctctccttcatcatcccgccccatccgccgctgccatgcacctnctccttctatctaccttgggccgctcgcccacggcggcggcggcggcagcggcagcggcagcttaatcc

SEQ ID NO: 27979 - DNA, 253 bp, Zea mays
  unsure at all n locations
  Clone ID: LIB3180-024-P2-M1-A4
taaaaaaaggccccaacaagccaacaagagcggcggcaaccatggagacgatggtcggttnttactgccaccggcaacttctcctgtttctcctcgtggccgacgcgtcagccttcctctgcttcgcggcagcgcattaattcttatcttgagagggctacacaatatcttgccgcgttaagatccattgcattagcctgaaaggcttttgtctttcaacaaagacattaaacacaaaagttatacttaattg

SEQ ID NO: 27980 - DNA, 234 bp, Zea mays
  Clone ID: LIB3180-024-P2-M1-A7
ttccatctattcttttccacaaaccgcactggtcaccacctatgccggcctcgcttcgatccccaaatcccgaattgaccagcccaaatcgtcgccgcggcgcatggagtggaccgccccgaaaccccccttatttccttcccttctctgggactggggagaccacccccccacgggctcgggcttcttcagcgaccccccaacgcggggcggggggaaagagccggaggcgaa

SEQ ID NO: 27981 - DNA, 269 bp, Zea mays
  unsure at all n locations
  Clone ID: LIB3180-024-P2-M1-A8
tcttcctttttccccgacctaattttttctggagatggggcaataaaaaagacggtccggtccntnaaagcacnccagatctttgacagccgcggcaaccctacagtcaaggtcaactttttttcttaaaatgaacctttttaaattccactttttccaattgaacattaacttgtgtatattaaactcttgaatttaaggattgtggctcttactattttgggaaaggtgtctccaaaagctcttaacaaattttaattttttttatt

SEQ ID NO: 27982 - DNA, 173 bp, Zea mays
  unsure at all n locations
  Clone ID: LIB3180-024-P2-M1-A9
tctttcttttaatatgcccccnacatatccctgctcgcgaaaataaaaaaagctccgtcctcccaaataaataaaacaaacnatttgcctcaatccaaatccnacctncttattnctatatcccctccgaattccactacccttttcaccaacctacaacaaaaaccaaaacc

SEQ ID NO: 27983 - DNA, 89 bp, Zea mays
  Clone ID: LIB3180-024-P2-M1-B1
acttagctgttctccgcagacgcccaccaaacttgcgcgcttcaccaaaagggaccgttcgtccctacaacctatatatccatggaaag

SEQ ID NO: 27984 - DNA, 139 bp, Zea mays
  Clone ID: LIB3180-024-P2-M1-B11
tttcttcagcactctgctctgctcggcttgccttgtccttttaacttgccatatcgctaccaaaataatcctgtgtcgctttgtagccctcgcggctctcgcctgcctcctccgacctggcgcgtgcggcgagctccac

SEQ ID NO: 27985 - DNA, 288 bp, Zea mays
  Clone ID: LIB3180-024-P2-M1-B12
tttcttcatgcccatgtttccacctggtgggcctggaattaatcaacagctggtctgtggtcaaccaccaccagccttcatcaaccctcaagcttgatttgctttccagcaacctcttatgcctggtatgaagcctggttgttcaatgccgaactttatgatgcctatggttcaccaaggacagcaaccacagcgttcttcttgtagacctgcttgtggaaatcaacaacccattccaatgggttgtcataaacacaggtttccttaaacgtgggggggggtgggggg

SEQ ID NO: 27986 - DNA, 69 bp, Zea mays
  unsure at all n locations
  Clone ID: LIB3180-024-P2-M1-B2
tctttgttgtaaaagcattgcgaccacanacagggctgtcttaaaaaaatttttttgttttcgataaca

SEQ ID NO: 27987 - DNA, 245 bp, Zea mays
  unsure at all n locations
  Clone ID: LIB3180-024-P2-M1-B3
tttgatttgtcagggaggacttgnaatgccgtcatgacataaagaactttccgctcgcacatntncctttaangttagcaaangccaaacaacttcttttgaccatcaaccacaacttctgaacgctcgccttttgccttctctactttgaccccctttgtgagaccaaataccttattgctcttaaaaatctttttgacaatgtcatctttcaaccttacccttccctgtgccattttagaagg

SEQ ID NO: 27988 - DNA, 369 bp, Zea mays
  Clone ID: LIB3180-024-P2-M1-B4
ttaagctgcagcgaaaaaggtgaacctaggtggtattgacataataagtggcgttggcgataggtcccatgagaaggcactgccctcttggaccatgggcgccggatccggcctaggaatgtctggtattccaccgtcaacacaacaagctggtggcatcgagagcttggccaactacaacaagcatcatttcggcttcaagtaggcctcgatctttcatactggaaaatacccgtcatctgcggtttcctcctctgtcggcttgattcttacatgtgctgccctattgatttaatcaccttttgttttgttttgtttttgggtttggtgattacattacatggtgtcgaccaatcttggccccgtctt

SEQ ID NO: 27989 - DNA, 197 bp, Zea mays
  unsure at all n locations
  Clone ID: LIB3180-024-P2-M1-B5
tttgttaagcagttggagtgttatatatatgcatgggctgtaatagactaggtgctgggantncttcncatatgcacacaaagggcaggaccgcatgagcacacacctcaatgcgccagcgttctgcacctcgctagctcgttgtcttgcctgcgctgtcgacactgatccttgagatctgcagacttcatggaggc

SEQ ID NO: 27990 - DNA, 457 bp, Zea mays
  unsure at all n locations
  Clone ID: LIB3180-024-P2-M1-B7
aaaattaattttnnntaaaaaaaaattttttttttaaaaaaaanaaaaaaaanngggggttgaaaantttacggaaatgaatggaatnaaaaaaaaanaaaaaaaataaaaataanaataaaaaaaaaaanaaaaaaaatatataaattatttgtttaaaaaaaattttttttaaaaaaacgaaaaaaaaaaaaacaaaaacaaaaataaaaaataataaaaaatattatatattaaataaaaaaaaaaaatttaataaattataaaaaaatttataataattaaaataaagtaccttctataaattgtggtataaagaaaaaaaaaattaataaataaaaaattaaaaaaataaaaataatataaaaataaaaaaataaaaaaataaattaataataaataaaataaaataaaataattataataaataataaaaataaaaaaaaaataataataa

SEQ ID NO: 27991 - DNA, 164 bp, Zea mays
  unsure at all n locations
  Clone ID: LIB3180-024-P2-M1-B8
cattctacccactctttctctcacaaaacaaactaaaaactctgtccctgcaaaaaaacaaaaactctgcttcccaacataaaacaannnaaaacaattnannaccannaccatttctttttaatacataatcttttctcccgccaaacaaatttttttttttt

SEQ ID NO: 27992 - DNA, 215 bp, Zea mays
  Clone ID: LIB3180-024-P2-M1-B9
ttacacaagagagcacgctactactggtcagtcgacaacaagcagacctcgcccaagcgacactccatccactgactgaccgctcatggcgaaggtccacctctacgtcgccgcggcctgcgccgtagaactcgttcttttcaccccggccctcgccggaaaccccgacatgcttcaggacgtctgcccggatgactacccctccccgatgaaac

SEQ ID NO: 27993 - DNA, 402 bp, Zea mays
  Clone ID: LIB3180-024-P2-M1-C1
ttagatacacaccaagcgaagcacattagcggcaggctaacaacaatggcttcgaaggtattatccctccttgcgcttcttgcgctttttgcgagcgcaacaaatgcgttcattattccacaatgctcacttgctccaagttccattattacacagttcctcccaccagttacttcaatgggcttcgaacacccaactgtgcaagcctatatgctacaacaagcaattgcggcgagcgtcttacaacaaccaatttcccagttgcaacaacaattcttggcacatctaacaatacaaaccatcgcaacccaacagcaacaacaatttctaccagcacttagccacctatccatggtgaacccttccgcctacttgcaacacaagtgcttgcattaaacccac

SEQ ID NO: 27994 - DNA, 273 bp, Zea mays
  unsure at all n locations
  Clone ID: LIB3180-024-P2-M1-C10
tttcgaaacccaagtcggaagccctcaggcgtaacacatacatggcctcgaccgcactnataacaatggcagtggggggcgccatttctctcggtctcgtcgcctcctctggcgtcgcgtcctgctccctgcgcgcctgctgcgactcccggcggtttggcccccgactcgtcctcctgcggagaggaggcgccgagggggaggggacgaggacacggaattgcccaatatttcgttgtgccaataacgtggacgttgtgacccaagatgaca

SEQ ID NO: 27995 - DNA, 336 bp, Zea mays
  unsure at all n locations
  Clone ID: LIB3180-024-P2-M1-C11
ttagagatccggagcaaccaaaatccgaccggacccaaaaacgggctgcctggatatacttaccaattcctctcgtttctcttttcaataatcaaaatgagccgtcgtcgtaatgccggtggtggtcaaacatatcttgcttatctctttgcaagccgnaaaccccccaaaccagcattgccaccagctgcaagtgcttcacctttttagaaaccatcttcttcaaaaacttattctgccaaacaagtttcttattgagttaccagtcaaaccgattgcttccacaagncttattgacaaaacaatttcaactttcttaccgacccttctttaacc

SEQ ID NO: 27996 - DNA, 187 bp, Zea mays
  Clone ID: LIB3180-024-P2-M1-C2
tcggactatattttttctgaagattcaacgatggccgcgacaatacagaccgcgtctgcgcgccaaatctttgacacccccggcaaccctacaatcgaggtcgacgtgtttttctcagattgaacctttgcaagggcaactttttttattgcagcattaacttcaatatatgaagctcttgacttta

SEQ ID NO: 27997 - DNA, 201 bp, Zea mays
  unsure at all n locations
  Clone ID: LIB3180-024-P2-M1-C3
caataattttnaaannncaatnccctacctacctaaccaacccactttcctttataatctccctccccaaatccattttttttctatcatctatcaaaaacaaccaccccttttcatattctcatctctcttattttatcacattacattttcctctatcttactttctttctccaattctctatttctccccttttatct

SEQ ID NO: 27998 - DNA, 268 bp, Zea mays
  unsure at all n locations
  Clone ID: LIB3180-024-P2-M1-D1
cttcttttttttatctcacaaactcgcaaactcttgtcctgcgacatatatatacccttcctccccaaaccaacnntctncaaaacccccactttttttacgtttagtaaaaaccttcatttcttccctaaaggccaataaccttctttttttataatttttcaccacacactccatttatcatttcttatttttttattaaccctaaatttctaccatttattctttaacattaaatcatttttacttatttttcttttttttctct

SEQ ID NO: 27999 - DNA, 409 bp, Zea mays
  unsure at all n locations
  Clone ID: LIB3180-024-P2-M1-D12
ttaagaacctacaatggtattgcatgggtggatcgtataaccttggtcgtcggggaaccaattgacaggaagtcgagcgttcgggcgcaagatgcgttgtctggcatgctgatccttgaccatttgtgctgatagtatttactgttataagctgccctaaaagatgcagcaaacctttttattaaccttcgcattttcattacctgctttggatcaactatatntganattcaatgtattactaaaaaaaaaaaataannnaacggggggggggggtggggggggaaaaattaataccacttaaaaaaatctataaaaaaaaaaaaatantacatttttaaattaaaatttcctaatatatactctgcctattttttaaaactctttcttatttatcattaatcttaat

SEQ ID NO: 28000 - DNA, 425 bp, Zea mays
  unsure at all n locations
  Clone ID: LIB3180-024-P2-M1-D8
actttctgtaacataaaaagtggaatccaacggccggcgtaaaacaacaatggcggccgtgatataaaacctccttatnctccttgctctttctacatgtgttgctaacgcgacaattttccctcaatgctcacaagctcctatattttccctttttcccccataccttccatcaattatagcttcactatgtgaaaacccacctcttcaaccatatacgcttcaacaagcaatctcagcaagcaacatacctttatccccctttttgtttcaacaatcgccagccctatctttggtgcaaacattggtacaaaccattaactcacatcaacttcaacaaactcttctacctgttatcaaccaaataactttttcaaacctttcttcctactcttcttaacaacaatttgttccattcaacccac

SEQ ID NO: 28001 - DNA, 324 bp, Zea mays
  Clone ID: LIB3180-024-P2-M1-E1
ttcgcttcgccaccgccttaaacaaagaatgcatcggcgacaattaaggcggggggtgccttcccaaagagccccttaaagccaccacgcaacaagtttagattcaaagtaagaagatctattgcattaacaaggctattccaaccctttcaaataacctttaaaattcggctctgaatgaggcaaatttttagaaagcttaacttgcttgagaaaaacttgttcgtgtttgtcaaaatacccgctttaactacaaagctatttatctaccaacacccttgaaccaagccatatttccgatccaatgtcaaatttaaaataaat

SEQ ID NO: 28002 - DNA, 60 bp, Zea mays
  Clone ID: LIB3180-024-P2-M1-E11
gttgtttttgagggaaaaggattgcaaacggggcggggaaaaaaaaaggggggggggggg

SEQ ID NO: 28003 - DNA, 309 bp, Zea mays
  unsure at all n locations
  Clone ID: LIB3180-024-P2-M1-E2
tctttttgcaaacccccgaaacctatacgtgttcgttaaaacaaacgaaatccgctcaccaaaaaaaaanaaagctataattntctttttttcttttcttatttcaagtttgaaacccattatcatgcttttgctttttatattttatatctatctaatattataaacctatttcactgctttaaattacataccttaatcattgtatttatctaacctttaaannaaaatnncctattccccgttgcccttcaatatttttgngcttacttccttctgtggtgcgggcatataaaaaatccataataa

SEQ ID NO: 28004 - DNA, 426 bp, Zea mays
  Clone ID: LIB3180-024-P2-M1-E6
ttagaccaacaagcaacatagaaagtggggtgcaggggcaacaatagagcatgcgtggggaccaagatattttccctccttatgctccttgctctttctacatgtgttgctaacgcgacaattttccctcaatgctcacaagctcctatagcttccctttttcccccataccttccatcaattatagcttcagtatgtgaaaacccagctcttcaaccatataggcttcaacaagcaatcgcagcaagcaacatacctttatcgcccttgttgtgtcaacaatcgccagccctatctttggtgcagtcattggtacaaaccatcagggcacaacagctgcagcaactcgtgctacctgtgatcaaccaagtagctctggcaaacctttctccctactctccgcaacaacaatttcttccattcaac

SEQ ID NO: 28005 - DNA, 348 bp, Zea mays
  Clone ID: LIB3180-024-P2-M1-E8
tttctttagtatgtgtcacggtaccaacgtggttgtgtaaaaaaaaagtacttgtctgggcataaacttgtgtgggaagttctggaaggtggccttaagagtaagatagagattcaatggtcagatattactgctttgtattttttttgccccgaaaatggccaacgaaccttgtacgtggtgtttgccataccaccttttttcttttaagagacagatccgctttcaataaaacacacacttttgcaggctaccttatatttcacttcttttcgcgcgcgtgttcgcgggcgtgattttcttcatatcccttcaactctttttaaccattatttttacaatcttatt

SEQ ID NO: 28006 - DNA, 255 bp, Zea mays
  unsure at all n locations
  Clone ID: LIB3180-024-P2-M1-E9
acttcctctactctgctccctcaacatcaactggcgtgtgaaaaataaaacgcgcccgtcctgacaaactacactacccaactccngcgtcctccccaccgacccatccacagctcaagccaacattcatccgtatcccgcgctctctttattcgccgcatcttaacgtcaccgccatgactgcgcgtcctgcgtctcctcccgccgccgccgcacggactcgactgatgctctgccaccgctttccctcctctc

SEQ ID NO: 28007 - DNA, 264 bp, Zea mays
  Clone ID: LIB3180-024-P2-M1-F1
attggaacagatgaaggaaaatctgatattgtaggctttgaaaatgtgggcctgaatggacaagtccacaggaaaggcctcgatcttgatcactttgaagactattttgttacactgagagcatggaggctggatggtcgctgtactgaattctgtgtgaaggcgcatgccttgaagggccaatcatgtgttcaccggaggctaattgtgggggatggatttgtgacaattaccaaaggtgaaagtattagaagatttttttag

SEQ ID NO: 28008 - DNA, 160 bp, Zea mays
  unsure at all n locations
  Clone ID: LIB3180-024-P2-M1-F11
tcttcctaatttttgagagtccctctcaaactttgggtgcttacactatacatgtctgctgnggatccgaaaggattctcttatctacctgtctgttcttccatccaatcttaaaaattttggagggggggggaaacaaatttttttttcccactttttt

SEQ ID NO: 28009 - DNA, 207 bp, Zea mays
  Clone ID: LIB3180-024-P2-M1-F12
ttgagaagtgcaaggaaacaagcgggcaccgtgaataaaggacgctcgtggcggcacgtaaaactctacgtccggggcaccatcctcggatacaagaggtccaagtcgaaccagtacgagaccacgtcgctcgttcatatcgagggggtgaacaccaaagaggacgttccgtggtaccctggcaagcgcatggctgacatttacaag

SEQ ID NO: 28010 - DNA, 260 bp, Zea mays
  unsure at all n locations
  Clone ID: LIB3180-024-P2-M1-F2
ctcccaaatcagcaccacccataggggccacgggcgcgcaatgccggcctgtgccggcgcaatgccggcccccggagacgccgcgtgcgccggcgacgtgcgcttgatctcctccaaggagctccgcgagcacgcgtncgccgtcgacctctggatctccatctcgggcgacgtgtacgacgtgacgccctggctttcccaccacccgggcggcgacctcccgctcatcaccttggcggggcaggacgccaccgacgcct

SEQ ID NO: 28011 - DNA, 159 bp, Zea mays
  unsure at all n locations
  Clone ID: LIB3180-024-P2-M1-F8
tcttcctttacctctcgaggatgtacaaccttgtccgtaaaaaaaatactactccgctcctgaaactaacacttanntnatatatcccccctacangccaaggcattattatngattaacaaaacgaccgagaattggtttttttttttctttatttta

SEQ ID NO: 28012 - DNA, 289 bp, Zea mays
  unsure at all n locations
  Clone ID: LIB3180-024-P2-M1-F9
tccttcaaatacccatcccaaattccccaatcgacccacttttttttttaaatctaaatcacnaacnncctctctttttaaaataaaaaattttttgtttcgnaaaaaaaaanaanaaaaannaaaaaaannannaaaaaaacttcttcttttttttcttttatttttttttttttctttttttatttttttttttttttttctccacccttataatattctctttttattttctttttttttcttttcttattttcatttttttttttttttttatttttattttttt

SEQ ID NO: 28013 - DNA, 150 bp, Zea mays
  unsure at all n locations
  Clone ID: LIB3180-024-P2-M1-G1
ttatcttatttctcaaatccgactccacacggtggggaccatttcccagttgggttgttctatnaaattttgtttggtgtaaataaatggtgcttcatcatctactcaaatttttttctcttttttaatgaaataagttgacttataatc

SEQ ID NO: 28014 - DNA, 309 bp, Zea mays
  Clone ID: LIB3180-024-P2-M1-G10
ctcttcccccctccaccccccccccctctcctctccccctcccccccccttccctcctcccctccttctctcccccccccccctccccctcctccctctctctcccctcctctcccccccttccccccccccttccccccccccctcccccccccccccatccccccctctcaactccctcccccctccctcccttcccccctccccccccccctccttccctctccccccctcctccccccctccttcccccttccctccccccccccctccttcctcccctccctctccctcccccccccccacccc

SEQ ID NO: 28015 - DNA, 161 bp, Zea mays
  unsure at all n locations
  Clone ID: LIB3180-024-P2-M1-G11
tcttcctttgacaagacaaactgggtcatgcgcggcgacaaaatagaaggcctccgcctgctccccaccaacctcncatacacaaccggctcaaccgccgncaactccccnncnncctttaaagcttctgcttataacctttttttttttttttcttcccc

SEQ ID NO: 28016 - DNA, 370 bp, Zea mays
  Clone ID: LIB3180-024-P2-M1-G12
tcttcctacgatctgtacctattacccctggggctggacatacaaaaacgttgggtcggacaccaatatcccttacacttaacaggaaacttgtaactcctaaccataataattctttatcagcaaccaatcgcctcgcaacatcttatcaaacataccaaccctttgtattccaaactcctgctcctactcccaaacgtctgtcaataacactacattctcctacttcatttcattgtccccgcacaaacttcaactatgtttctactgaaaacttggacaattctcaaagcacaccatgaacttttatcaccaccacacttccttgtgttaatgatcaacaattaagaaatttggaacttatgacact

SEQ ID NO: 28017 - DNA, 320 bp, Zea mays
  unsure at all n locations
  Clone ID: LIB3180-024-P2-M1-G2
tttccccactccccacaccctgctncctgcggctcggcgaactactactctccgacggcgaccataaattaaacaaccctgctgacgaggaggtccaagcgcatcgctctgcgcgtttcccttgccggagccaaacccagcttttttgactgggccggcctagcgccgctggcggtggagaagatcgccgaccgcctccgggacgaggacgtggcggacttcatgcggttccgcctggtgtgcaagctgtggattgacggcaccggcatcaagaagcctcgtgagctgggcgcacgcgttatcaaccacaactttcaccc

SEQ ID NO: 28018 - DNA, 106 bp, Zea mays
  unsure at all n locations
  Clone ID: LIB3180-024-P2-M1-G5
aaaaaaaaaactgaatgttnaaaanaaaaaannnnntttttttttaacaatttttttttaaaaaaaaaaaaaaaacatgaaatcaannttacctgattgtcccgtt

SEQ ID NO: 28019 - DNA, 266 bp, Zea mays
  unsure at all n locations
  Clone ID: LIB3180-024-P2-M1-G6
tcttaattattagaccttactaagatnacaggtggcggacttataacaaaatatgtttgcagnnatgatacaatggatttcatttgacatgcacttgctcttcatagagatgatcgctatcttgatgaaccggcacttgattcttttaaaaggatgaaactatattcagagtctcttgcgcgctttcaaggaggcttgccatatatctatccattgtatggtctgggtgagctaccacaaggctttgcaccattgatttcttttta

SEQ ID NO: 28020 - DNA, 367 bp, Zea mays
  Clone ID: LIB3180-024-P2-M1-G8
tttcccagggaggcattcgaacttgctgccgggatccaaacactagaggtggggcaaccttaagaaaaccctcaattcccaagctctgatgcctactttgaacctatccagaccaagaagaagttgccactgacttttcaagaatcactaactgctgcctttgctcacattccagtctcatccttcccttatgttacagctggtctagtaattgaaattcctggcgatacttctgatattgatgctgaaaggactctatcttaacacaacataacggcagcaccaatactgaatccacaaccttgggctcctacttatttgcaaaggaagtacctctttgtcatcaattacttcgcaatcatccttt

SEQ ID NO: 28021 - DNA, 277 bp, Zea mays
  Clone ID: LIB3180-024-P2-M1-H10
tgttttgcctccttcccactaccggcgtctgaacaagcgagactgagctgtgcttaataagccatgtcgctgcgcccgagcgagcgggtcgaggtgcggcggaaccgctacaaggtggcggttgacgcggaggatgggctgcggcggcgcgaggacaatatggtggagatccgcaagagccgccgcgaggagagccttctcaagaggcgccgcgaggggctccaggcccaagtccctgccccttcctcgggggtcgagaaaaaacttgaaagccttc

SEQ ID NO: 28022 - DNA, 224 bp, Zea mays
  unsure at all n locations
  Clone ID: LIB3180-024-P2-M1-H11
tctttctaagcagctttgcaccaaaccatccgtggcgtattattaaaagcttgttttgcgcaacaacacaatctantcagtangatgtatatcagtccctctacagtancaccaatgcttctggggaaatcacaacacactctttcttactctacaacattcatgattatggcaccacagaatgcgcccgtcattggaatcacttttcaacaaccaaaataaca

SEQ ID NO: 28023 - DNA, 173 bp, Zea mays
  Clone ID: LIB3180-024-P2-M1-H12
tacgaggacgaagaggaggcccaggtcggtgtcgcccatgtacgagggcgcgcgcgccttggagggcttcaccttggccttggacggcgccgccgacttggaggacttgggcttcgccgcgggggcgttcatggtggttttcatggcggacaccgacgtaagtttttcctttt

SEQ ID NO: 28024 - DNA, 298 bp, Zea mays
  unsure at all n locations
  Clone ID: LIB3180-024-P2-M1-H3
actttcttttacgacactcccctaccattcacgtgcacggacaaatacataccgggtctggccacctatactnagagcgagaagagattgcaggcaagggtgatgggccggcaatcggcatcgatctcggcacgacgtactctttcttctgcgtctggcagcacgaccgtgtcgagatcatcgccaacgaccagggtaaccgcaccacaccctcgtacgtcgccttcaccgactccgagcgcctcatcggagatgcggccaaaaaccatgtcgccatgaaccccatcaacaccgtctt

SEQ ID NO: 28025 - DNA, 154 bp, Zea mays
  unsure at all n locations
  Clone ID: LIB3180-024-P2-M1-H4
ctaaccactttaaacaaacacataaaaaataattttttcttaaaaccacaaaccatatctctactacttattaagaccgcaaacgctacactttcattctanattctccccttctcaatcctccctccccacactccttttccttattttccct

SEQ ID NO: 28026 - DNA, 333 bp, Zea mays
  unsure at all n locations
  Clone ID: LIB3180-024-P2-M1-H5
tttatttctaactctacctcactaaacttcggtccgaacataataaaatttgcttcgttcccattacatcttctgaacncatcaacataattcaaacctccaccaaccttctctattcctaacgctcaaccttcttttattctctttaccaaatcacctactccaaaaaaccttcaaacaatcccctctcattgcccatccaggatttttacatcatttgatgacttggaactcaaccaatttgtccacaatacacttttttcattaaaccttttcttctattcaccttatcttcaacttcactttcttcccttaataaatttttttatttcc

SEQ ID NO: 28027 - DNA, 427 bp, Zea mays
  unsure at all n locations
  Clone ID: LIB3180-024-P2-M1-H7
tttggtcttgacatcaaatcgattaagaccggtgtcaactttaatatggccggtganatnnatatgcatattcaccgaattggaagaactggtcgtgctggcgataaagatggcactgcatatactctgattacaccgtttacaccaccttttcctttgccacctttcttcccacctttcctggagtctcgttttgctcttaatcttccatccttcatagccagatccatgagttcattgggtacatcctggccagcagcaatcaaactgtgaaccaatttaccagcaaaatttgccttcttttttgtaatggtctaaattcgcagcggcccgcttttttttttttttttttatttaacaacttatttaacaccccattttacccttaaccaatcttttcttaaatattaccctctctccattcttt

SEQ ID NO: 28028 - DNA, 209 bp, Zea mays
  unsure at all n locations
  Clone ID: LIB3180-024-P2-M1-H8
tttattgggttgcgacatccattccgtcctgtttcctattcacaaccggcggcgcccnnncaacccacccaatcccgtccctatcgctctccatcgtctctcccatcaacacgcaactttacccgtacccaacttctacatttccacatcgcggcggcccactcacccccccaacgccccaacgactgccgactgcttttccattgcgg

SEQ ID NO: 28029 - DNA, 128 bp, Zea mays
  Clone ID: LIB3180-027-P2-M2-A10
gctaattctacttctacttcggaatcgccgccgctcccggcgcctcggattggcaactaccgcaagaggtcccggcggcaggatccgtggtccagcgtgcgatggcggcttttcctaccgtgcggggc

SEQ ID NO: 28030 - DNA, 314 bp, Zea mays
  Clone ID: LIB3180-027-P2-M2-A6
acggttggcttctcctcccactccggttcgggttcgggttcgtgaggttctccggggttcggtttcaaggctgagcggatcgagatggcggcgtcagatgttgagtaccgctgtttcgtcggcggcctcgcctgggccacggacgaccactccctccacaaacgccttagcacctacggcgaggtcctcgagtccaagatcatcctcgatcgggagacgcagaggtcccgcggcttcggcttcgtcaccttcttcacggaggaggcgatgcggaacgccatcgagggcatgaacggcaaggagctggacggccg

SEQ ID NO: 28031 - DNA, 314 bp, Zea mays
  unsure at all n locations
  Clone ID: LIB3180-027-P2-M2-A7
ttatctcactctttcgattggactgcttgctcggtgttgaccagtgggtattcggaaccatcgagccatgncttccaagctgactcgcctccacagtcttcgcgaacgccttggtgccaccttctcctcccatcccaatgaactgatagcactcttttccaggtatgttcaccagggcaagggaatgcttcagcgccatcagctgcttgcggagtttgatgccctgtttgatagtgacaaggagaagtatgcaccctttgaagacattcttcgtgctgttcaggaagcaattgtgcttcccccatgggttgcac

SEQ ID NO: 28032 - DNA, 336 bp, Zea mays
  Clone ID: LIB3180-027-P2-M2-A8
tcggctatgcgtctcaatggatcttgtcgcgacagatcatagtaccacccagttcgtcttacgacgattctgatccggttcttccaacccaggggcagtgatggcgacgaaaaggagcgtgggcaccctcggcgaggcggatctgaaggggaagaaggtgttcgtgcgcgccgacctcaacgtcccgctcgacgatgcccagaagatcaccgacgacaacccgcatccgcgcctccgtccccaccatcaagttcctccttgagaagggcgccaaggtcatcctcgccagccacctgtgtcgtccaaaaggtgtcaccccaaagtacagcttgaagc

SEQ ID NO: 28033 - DNA, 172 bp, Zea mays
  Clone ID: LIB3180-027-P2-M2-B10
tcgccttcacgcgcgcttcctctcgctccccttggccccgaaccctagccccgccctccccgcgagcggtgcgcggcgggtgccccggtccccgtgccgccaagctcctccttgccggagaccgagtggtgcccggtgccgccggagcagcgccccgtgaagtgtgaacgag

SEQ ID NO: 28034 - DNA, 113 bp, Zea mays
  Clone ID: LIB3180-027-P2-M2-B12
tcgtgcctccattagccacctgcccgattgcggcctctctgcctggcagaagaagcggcatggccgctgtcctactatctaccgtccggaaattcaccttttgcgcaaaattc

SEQ ID NO: 28035 - DNA, 375 bp, Zea mays
  Clone ID: LIB3180-027-P2-M2-B2
gtcgcatcccatcccactaccacccatctcgtcgtccgccgattcgatccggttcttccaacccaggggcagtgatggcgacgaagaggagcgtgggcaccctcggcgaggcggatctgaaggggaagaaggtgttcgtgcgcgccgacctcaacgtcccgctcgacgatgcccagaagatcaccgacgacacccgcattcgcgcctccgtccccaccatcaagttcctcctcgagaagggcgccaaggtcatcctcgccagccacctgggtcgtccaaaaggtgtcaccccaaagtacagcttgaagcctcttgttccacgcttgtctgagctccttggagttgaagtcctgatggccaatgattgcattggtg

SEQ ID NO: 28036 - DNA, 331 bp, Zea mays
  unsure at all n locations
  Clone ID: LIB3180-027-P2-M2-B3
aggacctaggatgcggggcgtccgagaatgtctggaccggccaagaaagattttgatggagcccttttacttttttcactttctntnaggaacgtggacacggtaggcgaggctattcttaaggtgaagaaggctttttttcgcttcgacttaataattctattcaactgnacccacaatatctcctacttctacccttttattttccttacgtccccacatatatgttttttttttttgtaatgttccaatgtttttcttttctagcctccttggtttcttctaaaatgtgttatatcctcaatatttctatttttaaatccttcttatt

SEQ ID NO: 28037 - DNA, 152 bp, Zea mays
  Clone ID: LIB3180-027-P2-M2-B4
cttcctgtggccccgcccagaggggtcactttaaaccttagttcaactggattttgccttcccttcccttccggccggcttccttcgttcaattgggttccggaaaaccttaccctttaacttggcccggccgcggcattggaccccacggg

SEQ ID NO: 28038 - DNA, 185 bp, Zea mays
  Clone ID: LIB3180-027-P2-M2-B5
cggacgcgtgggtggcgaggcaaaagcattgcgaccacagacagcgcgcgctcaaaggcctttttttttttgagataacaaggaggagaggaggggatggcgctcctgaaaagaacagggaaggcttgaagtactcgtggcagctcgacaagctcaaggctgatcgtgagagaggatttaccctt

SEQ ID NO: 28039 - DNA, 269 bp, Zea mays
  Clone ID: LIB3180-027-P2-M2-B6
ctgacaccatggtcagccacgtcgccgggaagaactccgtcctgagcgacttgccggccgccgtcatcgccagctcgtatgccatctccatggaggaagctgcagagctcaagaacggtaggaagcatgagctggctgtgcttactcctgctggcagtggcagcttccaacaaggtcaagctggcagcgcccaacagtaggcacaacctcagagtgatctgcctgaataagtactcgtagactgggataattaaacaaagcttgctcat

SEQ ID NO: 28040 - DNA, 142 bp, Zea mays
  Clone ID: LIB3180-027-P2-M2-B7
cgacggtgagccgtgcgtccctcgaccagaagctcgccctcgccaagcgttgctcccgagaggcgaccctcgccggagccaaggcggcagcggtggcgactatcgcctccgcgatccccaccctggccagggtgcggatgct

SEQ ID NO: 28041 - DNA, 264 bp, Zea mays
  Clone ID: LIB3180-027-P2-M2-B8
ttattggccatgtcgacttttgcaaggggaccaccacaggacaccttatttacaaacttggaggcattgacaagcgtgtgatccagaggttcgagaaggaggctgcttaaattaacaaacggtccttcaagtacccgtgggtgctcgacaagctcaaagcttagcgggagagagggatcaccattgatatcgctctgtggaaggttgagaccaccaagttctactggacggtcattgattcccctggacaccgggactttatta

SEQ ID NO: 28042 - DNA, 133 bp, Zea mays
  Clone ID: LIB3180-027-P2-M2-B9
tcgggaaaatggacgggaagggtttccattgacttctctcagagaaatcaatatccttctatcctttgaccatccttcaattgtggatgtcaaggaagaagttgttggtggtcatgaccaaaatacttttatt

SEQ ID NO: 28043 - DNA, 158 bp, Zea mays
  Clone ID: LIB3180-027-P2-M2-C1
ttcgccagtacacaaatttcgcgcacgggttcgggggcgccagctcgatccgcggccgaaaccctaggtggtgacgacggtggtgctccgtggtggtgctggaggacaaggaggagggctggtagcgatgactttccctaggaaggacgcggggttcc

SEQ ID NO: 28044 - DNA, 338 bp, Zea mays
  Clone ID: LIB3180-027-P2-M2-C2
gtcctctgttacttctccctccgccgccactcccctgcgattcaccgccaccgccaattccataccgtgctccgccacctctgctgagagcgagaagagatggcaggcaagggtgatgggccggcaatcggcatcgatctcggcacgacgtactcttgcgtcggcgtctggcagcacgaccgtgtcgagatcatcgccaacgaccagggtaaccgtaccacaccctcgtacgttgccttcaccgactccgagcgccttatcggagatgcggccaagaaccaggtcgccatgaaccccattaacaccgtctttgttgccaagcgtctcattggcaggag

SEQ ID NO: 28045 - DNA, 224 bp, Zea mays
  Clone ID: LIB3180-027-P2-M2-C3
tcgcccttccccaccagcccccggctctctctctcttctctctgactctctctctcgtagccgcgtccacctcgcagcagcaagcaagcgcgaccaaatggcgcctctaggagacggcggagctgctgccgcggcggcgtccaacaacctggtggtgtcgttcggcgagatgctgatcgacttcgtccccgacgtggccgggctgtcgctggccgagtcgggcg

SEQ ID NO: 28046 - DNA, 291 bp, Zea mays
  Clone ID: LIB3180-027-P2-M2-C4
gcggcacacagtacatgaacacacaccgcgcccagatccgaggcgatcttccgggggccggcgagatgagccgtggcacacgcgcgggctatgaccgccacatcaccatattgttccccgagggacgcctgtaccaagtcgagtacgcgttcaaggcggtgaagtcggcgggtgtcacgtcgatcggcgtccgcggcgcggactccgtctgcgttgttacgcagaagaaagtcccggataagttgctggatcagactagcgtgacacacctgttcccgatcaccaagtacg

SEQ ID NO: 28047 - DNA, 142 bp, Zea mays
  unsure at all n locations
  Clone ID: LIB3180-027-P2-M2-C6
atagattcatttcccagagatgagatgacgacaagggctggctgttgttcacggntcagtttgacctctgtgagtccaccctacgtgtcgccaagctatcatgctgatcatattatgccagctctatccttgtctcaatatg

SEQ ID NO: 28048 - DNA, 292 bp, Zea mays
  unsure at all n locations
  Clone ID: LIB3180-027-P2-M2-C7
gggctggcttctcctccccctcttaccaagtcctcttcgggttagggttacttagggttttgtggaggggcgatggcggcggctgatgtggagtaccgttgcttcgtcggcgggcttgcctgggccaccagcaacgagtcgctggagaatgccttcgcctcctacggcgagatcctcgactccaaggtcatcaccgaccgggagacggggaggtctngcggctttggcttcgttaccttctcctccgagaactccatgctcgacgctatcgagaacatgaacggcaaggagc

SEQ ID NO: 28049 - DNA, 407 bp, Zea mays
  Clone ID: LIB3180-027-P2-M2-C8
cacctgctcctcgcccccttctctcagaggcgacgcctcgggcgctcctaccctgccccgtctccggtccccccgcgccgtcggcgaggcagccggccgtcacagaagcccgatccggaccccgcgagaaatccttgttatacctgatggctatgattgatgagcctctttatccaattgctgtactgattgacgagctcaagaatgaagacatccagttgcgtctaaactccattagaagactttcaacaattgcacgggctcttggagaagaaagaaccaggaaggagctgattccttttcttagtgaaaacaacgatgatgaagacgaggtgcttcttgcaatggctgaggaattgggtgtgttcattccgtatgttggtggtgtagaacatgctcatgttttg

SEQ ID NO: 28050 - DNA, 299 bp, Zea mays
  Clone ID: LIB3180-027-P2-M2-C9
tcgggacatcgagtttgtaccgggaaacagcttggtagtataaccactgaagatggtcagtgggaggccgcatggtgaattggactcatggttcaagagcctcatggtgacctctagcagcgagagggggcaggctgggagtggtggtccagcgccaacattaacaggatggaaggaccttccgatggagctcctggtgcggataatatccacagttggagatgataggatggtcatcgtggcgtctggtgtttgcacaggctggcgtgacgcgcttggatggggggtcactaatcttt

SEQ ID NO: 28051 - DNA, 357 bp, Zea mays
  Clone ID: LIB3180-027-P2-M2-D11
gaactgcccaagtatgttttgagtgaaccaaccaacctgatccgagacagctgaacggcagccggccgtaggaagacccaccgatgtaaaaactgtaaatgactgcagatgccgccaaattgatcccttgcttgtggtaactggagtgcctcgagtaaccttcacatttgctttgggaactttcggcaatagggttttccagttctagtgttcagataaaaaaaacttttgcgtacccccggctattggtcttggttctattgtaaacatgagtctgcttagaattctttggagcgagaatgctgctgagattgttctcgtccactatcatgatacaagctggagcatacgttttag

SEQ ID NO: 28052 - DNA, 239 bp, Zea mays
  Clone ID: LIB3180-027-P2-M2-D12
tcgctgttggggcgccgtcgtcgccccaagctggtgcttggggccgtaccgccgaccccgcccttgtttggatccggcgggaacgggtgcgaaaaaaataaaaccatttgggtcggggacctccagtcctggatggatgaaaactacctacataactggttcgggcccagcggcgaggtggttacaataaaagttattcggaatagggaaacaggacagtcagaggggtatgggttttg

SEQ ID NO: 28053 - DNA, 231 bp, Zea mays
  Clone ID: LIB3180-027-P2-M2-D3
tcgttagaactttgatacacacttcgtttccagaattatggacaaccttaggccagcggctaccaagatattatttctaacgtgcgcgtgttgggctttttgcgggcgcaacacaagctgttattcttgcacaacggccacttggtccaagtggcaattttacacagttgctccgaccaattactttaattggctttgaacacccacctgtgcaagtctataaggtacaac

SEQ ID NO: 28054 - DNA, 115 bp, Zea mays
  Clone ID: LIB3180-027-P2-M2-D4
gttctagatcgcgagcggacgccctttgttttcatttcctttagaaatataacgagataaatctaaaccaatatattgattttttgtaggaaacacatgccgctattagggcacc

SEQ ID NO: 28055 - DNA, 275 bp, Zea mays
  Clone ID: LIB3180-027-P2-M2-D7
tcttgaagcagatattgtacaagaagaggctcgcctgcacaccattgagaatgatgggctttccggcgatttcacatcatcatcttaggattccaggcaaggatggaaagcgtaaaggtttaaaatgaagatttaggtatttagagtatgtcaagctgaaatgctttgccttgtttattggaatatgtatgtttcgtttcaaacgtgggagcatagaactgtatatttcggtattccacactgttcatttccatgtctggatataaagaggttct

SEQ ID NO: 28056 - DNA, 342 bp, Zea mays
  Clone ID: LIB3180-027-P2-M2-D8
atcgacctgaacgctcagggtctggctcgctatgccatcatctgccaggagaatggtctggtgccaattgttgagcctgagatccttgttgatggccctcatgacattgatcgctgcgcttacgtcactgagaccgtccttgctgcctgctacaaggcgctcaacgagcaccatgtcctcctggagggtaccctcctgaagcccaacatggtgactccaggctccgactccaagaaggtgactcctgaggtgattgctgagtacaccgtccgtaccctccagaggaccgtccctgctgctgtgcctgctgttgtcttcctctctggtgggcagagcgaggag

SEQ ID NO: 28057 - DNA, 317 bp, Zea mays
  Clone ID: LIB3180-027-P2-M2-E4
acgcgtgtaccaaagcctcctccctacttgaccaccttttttttttacaggtcgagcaagggcggcgccggccgccgtttcttctgtaaccgggccttgcttttcccattttttcgatcacttctgtcctgtgaaaatggcggatgaactacgctcaacgtctgtgggtcaaaagttccatgggccgtccgggctttttagcaaaatctctttctattccgccatgaacaaccctgtttttaacaatgcctatttttcttacaatgtgccccaaagggcatatcatgggatgaatgcaactgctggactcttatttt

SEQ ID NO: 28058 - DNA, 292 bp, Zea mays
  Clone ID: LIB3180-027-P2-M2-E5
attagatgtaattcaataagcaatctaaaagagggcaccaccaatgatgtgttgttggtaggaggctgttgcctttgtcaaatcaagttggacaaaggtgcaacatttgttgtagtgtgaagaaaataaggaatcccatacttacattatatcttgggcctcatgccctagagggcaagccttatgatcttaaaattcatcactttccccttttttactatggccaccacagattattcttgtgccgttttctaaccgaagccctttgtaaaaaggtggaggttccccattt

SEQ ID NO: 28059 - DNA, 310 bp, Zea mays
  Clone ID: LIB3180-027-P2-M2-E7
tcgagattggtttggtaactggtgagggactgagggtctcggagtggattgatttgggattctgttcgaagatttgcggaggggggcaatggcgaccgcggggaaggtgatcaagtgcaaagctgcggtggcatgggaggccggcaagccactgtcgatcgaggaggtggaggtagcgcctccgcaggccatggaggtgcccgtcaagatcctctttaccttgctctgccacaccgacgtttacttttgggaggccaaggtgcagacttcccggttcccttggatcttttgccacgaggctggaggtttc

SEQ ID NO: 28060 - DNA, 261 bp, Zea mays
  Clone ID: LIB3180-027-P2-M2-E8
cgtctcggagacgagatccctcgcactcgcatatcgcagcgctttgcgttcatcacaaccaccgtcgaaacacccagcatgccgcatctgatgtgcgcccaagggcggagaaagaagccggctgcgaatgaagccagcggagggaggagccccgctgtccgcgaagggccccggcggggaaagaagcccaagggccgagaagtcgccttccggcggccaagtcgtccggcaaagaaagcggcgacaagaagggtaagaaga

SEQ ID NO: 28061 - DNA, 161 bp, Zea mays
  Clone ID: LIB3180-027-P2-M2-F11
caaatgggggcagggatctcccacctgagatgttgtctgagctatatcactcaatcttgccaaatgggattaaaacaacacccgggccggggttgggatattttgaaaaggctcctaatcggtggatagatctaatgcgggaggcaaaatctacctcccca

SEQ ID NO: 28062 - DNA, 304 bp, Zea mays
  Clone ID: LIB3180-027-P2-M2-F3
tcggcacaagcacaactgacggtgctcgctcctctgctctgactcatcgctcgacgacgaaaacactcgttggatgttgcgctgtgttccaatccaatccgctccgctccactccgctccgcaacccaattcccatctctgccggtgagggattcgccacaccacacgccaggccgtccctcggtcgcggaacccacttcctgctggcgcgcgccgtctttcgttggtccggacatgtgtctttgacagatcgtttcaggaggaaagaggtgcccctgtttgtccacaatggctttagctcatg

SEQ ID NO: 28063 - DNA, 193 bp, Zea mays
  unsure at all n locations
  Clone ID: LIB3180-027-P2-M2-F5
gagcgagcagaggcagcgcagcaatggcggcggcaatagtactctccggccaggtgcggccgcttccctcgtcgctgcccctgtccctgctgctgctcctcctcctgtgctgctccggcacctcgtggggatggagcacgtcccggggaggagccgccagggagtgcggcttcnatggcaagctggaggccct

SEQ ID NO: 28064 - DNA, 85 bp, Zea mays
  Clone ID: LIB3180-027-P2-M2-F9
ccctccctaaaaactcatttgagcgcccaaatttctttttctttaaccctttttggcttggggtggtttaacaatataagggccc

SEQ ID NO: 28065 - DNA, 202 bp, Zea mays
  Clone ID: LIB3180-027-P2-M2-G1
cagcgagagaagagagtccactgtccaccccaccccaccagaaaaacgcattccgcagacacgcggcgagggagtaggggaggggacggcgggtgccgaggctcggagacacgaggaagctacgcgtagccgggcgggctcgcgctgtgctgtcgctccatgtcggtcgccggcgagagcggcggggatccggcggtgtttc

SEQ ID NO: 28066 - DNA, 362 bp, Zea mays
  Clone ID: LIB3180-027-P2-M2-G6
gacctgtaccaggacgccatcatgtcgccgttctggaacttcaacgcccacagcgccatgtacggcatcaggggcagtgcaagggtccaggtcgccagcgacaacgggaccacggtgttcgacgacgtgctccgtgcggggcagctgctcatcgtaccccagggctacctcgtcgccaccaaggcgcagggagaaggcttccagtacatcgccttcgagacgaaccctgacaccatggtcagccacgtcgccgggaagaactccgtcctgagcgacttgccggccgccgtcatcgccagctcgtatgccatctccatggaggaagctgcagagctcaagaacggtaggaagcatgagctggc

SEQ ID NO: 28067 - DNA, 195 bp, Zea mays
  Clone ID: LIB3180-027-P2-M2-G7
ggccctcggtcggcatgggcgcgcggcggccatgacggctcgaacgcggtagccacggccccgacgtttcccgtcccggcgcgtaaccccgtggtgcggcggtccccatcacaaacggatctgcggacctactttttgagagccagggcgtccatggacctccggactcggaacgtgatggcttgtggggcgggg

SEQ ID NO: 28068 - DNA, 300 bp, Zea mays
  Clone ID: LIB3180-027-P2-M2-H1
gtactgtctgtgcgaaggcgaccattccttcttcgctccttcgccgccgctatggttaagtactcgcaggagccgggcaaccctaccaaatcggccaaggccatgggaagggacctgagggtccacttcaagaacacaagggagacagcttttgcgcttcgcaagctgcctttgaccaaggctaagcgataccttgaggatgttattgctcacaagcaggcaattcccttccggagatactgtggaggtgttggtcgcaccgcacaagcaaagtctcgccactccaatgggcagggtcgc

SEQ ID NO: 28069 - DNA, 76 bp, Zea mays
  Clone ID: LIB3180-027-P2-M2-H12
tttgcggcggcggcaggagtgaggcaagatgtcttcggtatacgtgcttgagccccccaccaaagggaaggtggtg

SEQ ID NO: 28070 - DNA, 118 bp, Zea mays
  Clone ID: LIB3180-027-P2-M2-H2
tctccaaatcaagaattggtggccaaggacctgcatggggttgagtggcggttccgtcacatctttcgaggtcagccacggagacacctccttcagagtggttggagtggttttgtta

SEQ ID NO: 28071 - DNA, 115 bp, Zea mays
  unsure at all n locations
  Clone ID: LIB3180-027-P2-M2-H7
gtacgaagccgacgagcagccgacgctgaagcttggtccggggagcttgagaaaaagggcggttactttaagatgcatatcttcctgaagacnntgacgggaaagaccatccccc

SEQ ID NO: 28072 - DNA, 236 bp, Zea mays
  Clone ID: LIB3180-028-P2-M2-A1
tcgctggtctgaaagccctcactccaaatgtcgcgcactgtcagctgacgccaccgcctgcgccagccctcgccaagccggtgaaaacctcgtgccctgcgccgcctccgcccgcctattccagagtaccgcggtctcatatcctcccgggacgggcatgcagagcacggctgccatcggtctcgatcggccatgcgccgtgcggccactccccacctaccctagcccacggcgcg

SEQ ID NO: 28073 - DNA, 277 bp, Zea mays
  Clone ID: LIB3180-028-P2-M2-A10
tggggacatgtgtggttttgcggctgctgcattcctccggggcgtgaatttcatacagataccaactactctgatggcccaggtggattcatctgttggtgggaaaaccgggattaaccacccactaggaaagaacttgattggggcattctaccagccacaatgggttctaattgacacaaatacacttaacacattgcctgacagggagctagctttaggcattgccgaagtagtataagaatgggcttattagggatgcaccattctttgagtg

SEQ ID NO: 28074 - DNA, 259 bp, Zea mays
  unsure at all n locations
  Clone ID: LIB3180-028-P2-M2-A11
taaaatattgccagtcccgcagtcgagatggccctacgccgccgggtcggcctcgccgtcctcgccctggcggcaaccacagccgcggccaactccggcttcgcggactccaacccgatccgtcccgtcaccgaccgcgcggncttcgngctcgagtccaccatcttcgccgctgtcggccgcacccgcgacgcgcttcgcttcgcacgcttcgccatcaggtatggcaagagttacaagagcccggcggaggtccaaa

SEQ ID NO: 28075 - DNA, 174 bp, Zea mays
  Clone ID: LIB3180-028-P2-M2-A12
ttgtgaatggttgccaccactccctccctgatggtcttatgagggccactggcgctataaacccccgcaatggcggtaaccacatccgcataccaactacggcttcacggactccaaccctatccgtcccgtcacctaccgtgcggtctacgagctttaaaacaccatttttac

SEQ ID NO: 28076 - DNA, 363 bp, Zea mays
  Clone ID: LIB3180-028-P2-M2-A2
tgcaacgactgcacctgaacttcccggaattaccgcactgcgttcaaactaatggtggcactcaaccaattggggcaactgggctaatttggtagggtggcaggctcaattaccactaccatttaaccatctgcctgaaatgtgctacagtcactttattactacacctgaagcccagaaattttttccgtcgacgagcacctgccacctacaggggtatgggaatggaggtcgttggtgcttaaacaacaccagcagacgacaaagaatatgatgataccaacctgttccaagagaaggaaacgcaaagcaactgtgaaaaaacgtggggaggcacctgtattcggtttagaaacaactacc

SEQ ID NO: 28077 - DNA, 290 bp, Zea mays
  Clone ID: LIB3180-028-P2-M2-A3
tcggtccattgctgcgacgatcttcttatagagttctggcaaatagctatggcactgttgctgaattagaactaggcgcttacatcaattcttccccgttcgagctagccttaatttatggctagagaccttagtattatcagtcctgctgaggtccagccttcgctgacaccaatgtaattgtcatctaaaatattctttcaagcagctgtgattcatcagtaagacattagttgtcatgtacaatgtacaaaatcttgctaacaagacagatctgtttcggcattact

SEQ ID NO: 28078 - DNA, 219 bp, Zea mays
  Clone ID: LIB3180-028-P2-M2-A5
tgttgctttgttcggatatgctaagggtgggaaccacaagcgtgtgattgcgttcattggtgatgggagcttccaggttacagcacaggatgtgtcaactatgctgcgatgtgagcagaacagcataatcttcctgatcaacaacggtgggtacacgattgaggtggaaattcatgacgggccatacaacgtctttaagaactgtaactacactggctt

SEQ ID NO: 28079 - DNA, 194 bp, Zea mays
  unsure at all n locations
  Clone ID: LIB3180-028-P2-M2-A6
ttcgtttttaaaatattgccagtcccgcaggcgagagggccctacgccggcgggtggggctcaccnacctagccctggcggaaaccacagccgcggccaactccggcttagcggactccaacccgatccgttccgtcaccgaccgcgcgggcttcgcgctagagtgcaccatctttgccgctgttggccgcacc

SEQ ID NO: 28080 - DNA, 271 bp, Zea mays
  unsure at all n locations
  Clone ID: LIB3180-028-P2-M2-A7
tcgcttccatttaaccaattgggcgcactgaaccccgctgcttagttgcagcggcaaatactactaccatttagccagctagctgcagcaagccgtgcttccttcttgacacagcaacagttgctgcctttctaccagcagtttgcggctaaccccgcaaccctgttacaactacaacaattgttgccctttggccaacttgctttgacaaacccagcagactgctaccaacaacacatnattggtggtgccctcttttagattgcttatt

SEQ ID NO: 28081 - DNA, 390 bp, Zea mays
  Clone ID: LIB3180-028-P2-M2-A8
tcgctctctctctctctctctgtctctctgtgtctctctctcacaggggctgaccctccctgtatccctctgacctatcggcggcgactgggcgacagccgctgtctcactacgcctggtgcccaggtatctttgccggcgacgagcacctgccagctgcaggggtatgggaatggaggtcgttggtgctgaaacagcaccagcagaggtcaaagtatctgatgatgtgaacctgttccaagagaaggaaagcaaagcaactgcaaaagaacgtgaggaggcagctgttttcggttcaaagacaactaccaatgtcactgatctggcacctccaaaggatgtgaaggatgagtggcctgaacctaaacaaacttatgccttctacttcat

SEQ ID NO: 28082 - DNA, 379 bp, Zea mays
  Clone ID: LIB3180-028-P2-M2-B10
gtgacattatagatggcttattcgtatcaatatttaaacacttgtctgaaaactgcaagaaagaactcgaatcaataaacaggcagtatccatttgaacctctgaagtatctagacaaaaccttgaagctcacttatgaagaaggaattcaaatgttgaaggaagccggaacagaaatcgagcctatgggtgacctcaataccgaagctgagaaaaaacttggtcggcttgtcagggaaaagtatgacacagattttttcatcctgtatcggtatcctttggctgtaccgtccgtctacaccatgccttgttatgacaacccagcgtacaccaattcttttgatgtcttcattcgaggcgaggagataatatctggagc

SEQ ID NO: 28083 - DNA, 252 bp, Zea mays
  Clone ID: LIB3180-028-P2-M2-B11
tcgcagacacagcctcccaccacaaaccctcctccagtgctcttttcttctagccgccgccgcaaccgcttgctagcgctctgcgctctcatcctcgcgtccgtggaagggcgtcttgacatggcctccgagacggagacgttcgccttccaggcggagatcaaccagctggtatcgctcatcatcaacaccttttactccaacaaggagatcttccttagggagctcatttcaaactcctccgatgccttg

SEQ ID NO: 28084 - DNA, 363 bp, Zea mays
  Clone ID: LIB3180-028-P2-M2-B12
tagcaacatagaaagcacaatagtgtaccaacaatggcagccaaaatattttgcttccttatgctccttggtctttctgcaagtgctgctaccgcaaccattttcccacaatgctcacaagctcctatagcttcctttcttcccccatacctctcaccagcggtgtcttcagtatgtgaaaacccaattcttcaaccctacaggatccaacaggcaatcgcagcaggcatcttacctttatcacccttgttcctccaacaaccgtcagccctattacagcagttacctttggtgcatttgttggcacaaaacattaaggcacaacaactacaacaacttgtgctaggaaaccttgctgcctac

SEQ ID NO: 28085 - DNA, 261 bp, Zea mays
  Clone ID: LIB3180-028-P2-M2-B2
tgcccgattccgccgcccggacccggggactccctcccctcctcgatccgttcgggcggccggccggcctagcttcaagtgcggggatggtgttctacttcaaggcgcggcccgaggccggcgactacaccattttcatgggtcttgacaagtacgagaacgaggacctaatcaaatacggcttccccgaggacatctggttccatgtagataagatgtcctctgcacatgcgtttgtgagattgaataaaggtcaatcaa

SEQ ID NO: 28086 - DNA, 164 bp, Zea mays
  Clone ID: LIB3180-028-P2-M2-B3
tcacataatatgtggtggaaacctagggttttattacaacttgggggggatatcaaacctaagttaacaacataatattaatggggaaaaacttttatataaaaaaccctacacccacatttaaactctttttataactcttaaaatatagattggatttttaa

SEQ ID NO: 28087 - DNA, 147 bp, Zea mays
  Clone ID: LIB3180-028-P2-M2-B4
cgaatttccggggtggcccaacccttccaaaaagggaaggatggttttttgatttttggaggaggtggcaaagaaatgccgggaataagttttgaagatttatgacacataccttcctttctttttgggggcttcaaacgatgaaaa

SEQ ID NO: 28088 - DNA, 300 bp, Zea mays
  Clone ID: LIB3180-028-P2-M2-B5
cccgaggatccacttaatgctttcctcctatgctccagtcatctttgctgagaaggcctaccacgagcagctgtctgtggccgagatcaccaacagcgccttcgagccatcctccatgatggccaagtgcgatccccgccatggtaagtacatggcctgctgcctcatgtaccgtggtgatgtggtccccaaggatgtgaatgctgctgtggccaccatcaagaccaagcgcaccatccagtttgtggactggtgcccaactggctttaagtgcggcattaactaccagcctccaagtgt

SEQ ID NO: 28089 - DNA, 436 bp, Zea mays
  unsure at all n locations
  Clone ID: LIB3180-028-P2-M2-B8
aatctgagaggaagggaggaggngggccaccggacaaccacacacgggttgtttaacaaacaaatctaacattaaattttgatatgggaatatacttaaataaatataactgattaacggtaaatacataatttttatttttattttaaaataaattaaaaaagtttttttttatatatttattttgaaattgtataataggggaaaagaaggaatgaggtgtatttttttattttattttttatttgattttaatgttatttaattaatttaataaattaagtttattttttttttttttttctttgtccccccgacaccccacccccccctcatatattttatttttttttaccaccccaaggtttttacttttttttatttttttgttttaaattcttaattaatattatactataatttatattattatatt

SEQ ID NO: 28090 - DNA, 425 bp, Zea mays
  unsure at all n locations
  Clone ID: LIB3180-028-P2-M2-B9
tcgaccaaatggaactagataagactgtcgatgcctccaaggatttgttggctcaaattatgcaccctctaatactagggcaagtgaacaacttttgcagaaggaatcctgctcgcagattacaagcctttcatgggctggaaacataaatggctttaaagaccgagagaatgtaagattcttgggtggtgggtcgcgacaataagctgggacatttactaacttatgtgcagggnactttaattagtaaggcgtcaattggccgcgttcggcgtcccttgtgcacttgtgctaggataaccattgggagtgaactggcttggctttatacaatgcaatttcccttttttcccccattcaattatttttaatggtctgttgggccttggaccatactgattttggacaagaatagatatttgccc

SEQ ID NO: 28091 - DNA, 429 bp, Zea mays
  Clone ID: LIB3180-028-P2-M2-C1
ctccaaaccagttacaaggactacgaaccctcaggtgaaactccggtgaggtctgagccgaacgtgccaagcaaaggctcgattgaatcgctgcgagccatgcccgtggagaccatgatgaatgagttccgtgagaaccatccgtatgaacatgaatcgagcaaagaatctaagttatctcagatacctcgcttgccgctcgcgacaatcaactgagacattcacttccctatgtgcagtgtacttttattagtagggcgtcaatttgccggttttggtgtcccttgtgcacttgtgctaggttaaccatggggtgtgagctgccttggctctctccagtgcatttcccttttttcccgcattcaattatctggaatgttctgttgtgccttgtacgatactgatatttgacagcatcagatatgtgcc

SEQ ID NO: 28092 - DNA, 207 bp, Zea mays
  Clone ID: LIB3180-028-P2-M2-C3
tcgaccagatactggtccaacatataaaaacagttttggcggggcttaagtcacgcataagcactcagttgactgctgttgctaaagagcttgctgtgtatggtgaacctcttgattcaaaagctggccaaagtgctaagcttttgaacatactatctaaaaactgtgaagcgttttcctcaatgggggggggagaaaatgaagata

SEQ ID NO: 28093 - DNA, 168 bp, Zea mays
  Clone ID: LIB3180-028-P2-M2-C5
cgaatttccggggtgaaccaacccttccggccgccgggaactggcttaaattttctttttcaagaagccgggcgttcccgtggacctcaatcctcccttggactggatcgaaacggaaatccacccggacctgcgggggtcctttcctttttcgcattaatgagctcg

SEQ ID NO: 28094 - DNA, 346 bp, Zea mays
  Clone ID: LIB3180-028-P2-M2-C7
tctaaaacagtagaggaggtgatgaggattgcaaataaaggagctgatcttgttagaataacagtccaaggtaggaaggaagctgatgcctgctttgagatcaaaaacaactttggttcaaaagaattacaacctttcactatggacctgaattgattttggtccttcagtagctttaaaggtggcagaatgtttggacaaattaattgaaacacacaatttcttgttgatagtgtaccttaattagaaaagctggaatttaccggctacgacttccataaagcgcttgggcttgtttaacaattggtttttaccttaatcgaatatttcacagaaatttgaattt

SEQ ID NO: 28095 - DNA, 438 bp, Zea mays
  unsure at all n locations
  Clone ID: LIB3180-028-P2-M2-D10
tcgagaacgaatacgagacaaaaaaagctggcagatactctccccggaactcgccacttcttactaaccttctgacaagacaccgatcacaataaggactncatcgcaaatgttccggtttacgaacttaaatatttaaattaaaaaatattttgttgggcaacacaaccccaaaaggaaaaccccctttttggatgataaacccgattataattgcacaaatgaagaaaaaatancacgcctttcgcaaaatgaaaggtccttttaagttggggaaaaaaggaaggggggtgaagttttaaaagtttaaaaattgggccttgaaataaaagtaggcttaaaaatttttttcccaaaattccaaaatttttggggggaaaacagtatttttggcttaaatttggaccctttcccaaattaaaaaaaaaaaaaggaaga

SEQ ID NO: 28096 - DNA, 324 bp, Zea mays
  Clone ID: LIB3180-028-P2-M2-D11
tttatcgcaatcactgagttcgagctgatcggaatgcatcccggccggcgtgggctttaagatgcacaactttgtgaaaaccctgaccggcaagacttttaccctcgaggtggacttgtcttacaccattgacaacgttaaggcccacatccaggacaaggagggcattcccccagaccaggagcggattatctttgtttgcaaacagcttgaggacgggcgcacgcttgctgactacaacattcaaaaggggagcaccctccaccttttgctccgccttaggggaggcatgcaaatctttttgaaaaccctgaccggcaagac

SEQ ID NO: 28097 - DNA, 347 bp, Zea mays
  Clone ID: LIB3180-028-P2-M2-D12
tcggccccgccggcgccgatttccgaaagtcccgtgggatcccgccggttggggggcgaacttgggggggaaaaacgcttgctttttgggggccgttgcgaacaacaaattgaacggcttccggaagcgcttcttctttttatttttaaacggattggggaacgtaaagggctcgggcggttgttccttggtttccgccggtttcaacaacttgtgccccttttttaattcgttcttgttcgggtttaatggggtttttcctcaaaagcccccttcttcttgttcttttttttcaaacccgttcttttatattagatttcgttagtccctctggggggtttttttaa

SEQ ID NO: 28098 - DNA, 314 bp, Zea mays
  Clone ID: LIB3180-028-P2-M2-D2
aaatgcatttgcaagatatgtaactcgttggaaggctaacaacccactttacggatcttcactgattgattatgcccatattgagcagtggatggactttgctgcgacagaggttgatgccagcattggaaagtggttgtacccacgtatggggttttatccctatgctgctgtgacagaagaatcagccattgctgctttgaagagagcattcggttccctgaacacccatcttgcatcaaacacattccttgttgggcattcagtgacacttgcggatattgtgctgacatgcaatctttatatgggcttta

SEQ ID NO: 28099 - DNA, 389 bp, Zea mays
  Clone ID: LIB3180-028-P2-M2-D5
aagggttaggaacacggccctaactaaaccctacctgggggaagggaaacaggaccagggatgcctccaagctccgcgagcttcgcgacttcgtcgaggcgtgcaagaagaatccttcgctcctcgccgaccccaacctctccttcttccgggattacctccagagtttgggtgccaaaattcccgccgccgccccctctttcgaaagtcccaagagatcttccatggacgacattgatgacgacggtgatgacgacgacgatttggatatgagggatcccactcctgagcgagacgagctcgatgaagagattgttgagtctgatcttgagctcgaaggagaaattgtacagtctggccatgatgacccaccacagaagatgggaaat

SEQ ID NO: 28100 - DNA, 287 bp, Zea mays
  Clone ID: LIB3180-028-P2-M2-D7
tcgcggacgcgtgggctcaaggaaacctttatccatggcccgaggtatcatactgctcctgcttgtgacccccctcgccatctccatggcactgccatccctatcaacgagaatcgaagggagtgtcataggggagagatccaacttgttctcacagctgcactccgataattctagccctacagaaaacaaactccaactaggtgaaaagtcctttgcatcggaagcatatgcggggaactggaacgaaccaccagaccaaacaatcgcaagactcccttcgagcg

SEQ ID NO: 28101 - DNA, 245 bp, Zea mays
  unsure at all n locations
  Clone ID: LIB3180-028-P2-M2-D8
tcggtcagctgacgccaccgcctgcgccagccctcgccaagccggtgaaaacctcgtgccctccgccgcctccgcccgccttttccagagtaccgcggtctcatctcctcccgggacgggcatgcagagcacggctgccatcggtctcgttcggccatgcgccgngcggccactccccacctaccctagcccacggcgcggcgccggngcgtgcagnggtgcccaacagtcgatccttgcgcccc

SEQ ID NO: 28102 - DNA, 197 bp, Zea mays
  Clone ID: LIB3180-028-P2-M2-D9
gcttctgcttgctctggggggaaggagagagagagagagcgagagagagatctagtagagaggctagtaggtggtcctcgaacgaagatgttggcggtgttcagcgggcaggtggtggaggtgccggcggagctggtggcggcgggcagccggacgccgtcgcccaagacgaaggcgttgcaattggtggggcgctt

SEQ ID NO: 28103 - DNA, 394 bp, Zea mays
  Clone ID: LIB3180-028-P2-M2-E10
gaggactttgaccagaggatcatggagtacttcatcaagttgatcaagaagaagtacagcaaggacatcagcaaggacaaccgtgctcttggaaagctgaggagggaagccgagcgcgccaagagagccctcagcaaccagcaccaggtccgtgttgagatcgagtccctctttgacgggaccgatttctcggagccgctgacccgtgccaggtttgaggagctgaacaacgacctcttccgcaagaccatgggccctgtcaagaaggccatggaggatgctggccttgagaagagccagatccacgagatcgtcctggttggtggaagcaccaggattcccaaggtccagcagctcctgcgggactactttgacggcaaggagcccaacaagg

SEQ ID NO: 28104 - DNA, 232 bp, Zea mays
  Clone ID: LIB3180-028-P2-M2-E11
ggggactgggtggggggctctggcggggggcgccgatgctgacccccttggccgggataccagcggccttccttttccgaagtaggaaccccttcacggcctaattttttctttaactttcccgacgatgcccaagcctttccggtccccgagccttcttcaagtttggccccaaacgcttggggccggttcccaacaacaaccttccggccgagggcccctttaacttccc

SEQ ID NO: 28105 - DNA, 217 bp, Zea mays
  unsure at all n locations
  Clone ID: LIB3180-028-P2-M2-E12
tcgcgcaccgagcgccgngctcgttgtcgtgcccgagtccccttcctttcccgtttccccctccctctcttttttcccacgcccgacgcccccaccacttttttgatccaaaaccagatcggcacgacgagcaaagggccccccggagcggcgcggagcaaaggcggggggataccgggcgggggacgactacgactaccttttcaaagggggactg

SEQ ID NO: 28106 - DNA, 137 bp, Zea mays
  Clone ID: LIB3180-028-P2-M2-E3
tcgggacactttaagaagaaaggggcagaagagaggggcaaactttttggggggaccaaaaagttgagcgcggtggcacaaaaaataagcgcgagttttttattttggagggaagggccggacctttggcagaaaat

SEQ ID NO: 28107 - DNA, 273 bp, Zea mays
  Clone ID: LIB3180-028-P2-M2-E4
ttttcactttataagcagaaggtaacaaaggagagggggaaacttgttgggggcaccaaggagttgaccgagttgacacaaaaagtaagcgagagttttgaattggagaggaaggtgcaggaccttgagcagaagctgcagttagcttattccaagtctgacgaacaggaagtggatactgtggagtcgagatcccgttatttatgcctggattaataaaggactttaggcaagtagtatgacaaaatttaggctgtttcaccaaacccaacc

SEQ ID NO: 28108 - DNA, 197 bp, Zea mays
  Clone ID: LIB3180-028-P2-M2-E5
gcctcggccaccggcgcgggtgccctcctcctccttttgtccgacgatccggagaggactttctctcgcctgctcgacccttccgcccccgccggccggccggtcctttttccggcccactccggtccgatcgaccatggcggttacccgccccaatggcaataccacttgtagctcccttgtggcaaccgttccgg

SEQ ID NO: 28109 - DNA, 114 bp, Zea mays
  Clone ID: LIB3180-028-P2-M2-E6
ttggcggattagttttttttgaaaattcggggatgggggggacgatccaatcggggaagggcccccaaaattttgaaagaccgggaaaccctacaatcgaggtcgaccggtttt

SEQ ID NO: 28110 - DNA, 163 bp, Zea mays
  Clone ID: LIB3180-028-P2-M2-E7
tctttcgggcccaaacaccttattcaagccgattttcaccgccgccggggagaggaccgcattaaaatccccccgatggcgttcccccccattttatatcacaacggggcgcccccccttgggcatattccggggaaagttccggaaccccccccaaggcttc

SEQ ID NO: 28111 - DNA, 284 bp, Zea mays
  Clone ID: LIB3180-028-P2-M2-E8
gaaaaacaaaaagggtaccggaagcggcgaaagcctcgccccccgccgctctcgcatcgtctccggagcgcacgtcagatcaggtgtgccgggcccccctcgcctaagctgcgacgaccatccatcgaacaggaaggatgacgggctccatggatctcccggccaagggcgggttcagcttcgacctgtgccgccggaacaacatgctggagaagaacggactcaaggtcccgggattcaagaagaccgggacaaccatcggcggccttgtctttcaagatggg

SEQ ID NO: 28112 - DNA, 383 bp, Zea mays
  Clone ID: LIB3180-028-P2-M2-E9
gcggcaaccatgcggcgcggcggcgggtgccgcatccccaagccctccttggtgcccttcaccgcggacgaggacaccccggctttggaccccagcgtcatccgaaacctcgactccgccttatgccgccgtgactccgacgccaacagcctatgtagcaggcgtcccgcttttaccgtcggggccatcctaaacttctccgaccgcgccacgcaagtcgtcgcgctccgagtcgtaaacacattcctcgcccccgccgtcacgctccgggggcctttgcccgccgcgcgcgacattcaagcggcgctccgccttctggatgaccgaatccacttgccccggaacgacgccacatttgatgatgaccttatccaagaccttcg

SEQ ID NO: 28113 - DNA, 320 bp, Zea mays
  Clone ID: LIB3180-028-P2-M2-F10
gcctaaatgtcgtacaatttcctcatctgctagaaccaattcgagagggatgcctcctatgtcgccatggcgctctctgtggggaaaacctatgatggacgggattacatggtgaaggatctgttacaagcggacttatatcgcctcaagattgatctggccgaatgacaaatgcccggcctcatggcgtgccgggccctattgggaccgtacaagccgttaggcgggactaggatcttggaacatatttacatgaccatgcagaccgacgaactaataaagaccctgacctacctcgactattagggccaatggggcta

SEQ ID NO: 28114 - DNA, 320 bp, Zea mays
  Clone ID: LIB3180-028-P2-M2-F11
tcgcccaacttttttttcaaacgtccgttcaggaaactgtccgggaacgagccggtcgggactgggcggggggcgggcaagagcgatcgggaccgcattggttgggtggttcttcagggcttcgccttccttattataaatggaacggggagaaaaacaaaggaccgggcggcggggggctccactgacattgcctaccatgggttccatgctgggccggggcatgcgggaactgcgcccgctgggggcttttgcgagggtccccagacccaactttggggagagggcaacattttttaaatgtagaagcaacttaacaa

SEQ ID NO: 28115 - DNA, 151 bp, Zea mays
  Clone ID: LIB3180-028-P2-M2-F12
tcggttggattaagggggtaccttaaaaattccgcaaaagccttgggcttctggtttgtaaaagcccaaagggccggaaaggtttggcccgcacccgccaaaaagggggggctcccagcgaaacgcctattttaaaaagaagtgaagcggg

SEQ ID NO: 28116 - DNA, 269 bp, Zea mays
  Clone ID: LIB3180-028-P2-M2-F2
gccctttgtaacttttccttccgccgccactcccttccaattaaccgccaccgccaattccataccgggctccgccacctttgctgaaagcgagaagagatggcaggcaagggtgatgggccggcaatcggcatcgatctcggcacgacgtactcttgcgtcggcgtctggcagcacgaccgtgtcgagatcatcgccaacgaccagggtaaccgcaccacaccctcgtacgtcgccttcaccgactccgagcgcctcatcggagatgc

SEQ ID NO: 28117 - DNA, 223 bp, Zea mays
  unsure at all n locations
  Clone ID: LIB3180-028-P2-M2-F3
ccggatttggggttttccttgttgtaagggatgggcaaacttttgaaatcaatagggcagggttggttttcctgaatgaccggccccaactgggtgcttttaggtgtcccatttgtaagggaacccacatcatcaacacatagctgtgagaaaatgtagccgngtgctacttgatgcatttcgcttctgctctcttggatgcaatcttagaggcttaaatatg

SEQ ID NO: 28118 - DNA, 134 bp, Zea mays
  Clone ID: LIB3180-028-P2-M2-F4
gaggtggagtcctggtcatggggagactctaacattccattaaacatgatgggccaataatttggggggatttttgagggggtgtgaactgtgatgctttccatattaatgacccccgaactgatggggttggg

SEQ ID NO: 28119 - DNA, 130 bp, Zea mays
  Clone ID: LIB3180-028-P2-M2-F6
ccccccccattattttagggatagggggggcgacgccccctccccctttttaaacatttaaaatggggggcgcggccggtttttttttttgggccgcccccggaaatggggggtccaaaggggccatttt

SEQ ID NO: 28120 - DNA, 186 bp, Zea mays
  Clone ID: LIB3180-028-P2-M2-F7
ccattagctttatttactccagagcgcagaagaacccgatcgacaccatgagggtgttgctcgttgccctcgcttttctgggtttcgctgcgagcgccaccttcacgcatacaagcggggggttggggttccaaccacccccgccggtttatttaccgccgccggtgcatttggcaccttcgggtt

SEQ ID NO: 28121 - DNA, 218 bp, Zea mays
  Clone ID: LIB3180-028-P2-M2-G1
ggactttcgggtacgttgccccagagtatgcgatgacagggcatctgcttgtcaagagcgacgtctacagctacggagtggtgctcctggagctgctgtcaggccgaaaacccgtggacatgacccagccgccggggtccgagaacctggtcacctgggcgcgcccgctcctcaccacgcgggaaggactgcagcggctggtggacccgtcgctcccg

SEQ ID NO: 28122 - DNA, 358 bp, Zea mays
  Clone ID: LIB3180-028-P2-M2-G10
cggacgcgtgggtgcgtgttgccgcatttgccttgaggctgagtctgagataggtgatgagctaatatcaccttgcatgtgcaagggaactcagcagtttgttcaccgttcttgtcttgaccactggcgatctgttaaggaaggatttgcattttcacactgcacaacttgcaaagctcagtttcatcttcgagtggaaacctgggaggataactcatggcgtaaaatgaagttcaaggtctttgttgcaagggatgttctactcgtatttcttgctggacagcttactattgctatcatcggtgcgattgcatactttttagacagggatggaaggttccggaacagttttagcgat

SEQ ID NO: 28123 - DNA, 366 bp, Zea mays
  Clone ID: LIB3180-028-P2-M2-G11
ggcttctcctccccctccggttcgggttcgggttcgtgaggttctccggggttcggtttcgtgggtgagcggatcgagatggcggcgtcggatgttgagtaccgctgcttcgtcggcggcctcgcctgggccacggacgaccactccctccacaacgccttcagcacctacggcgaggtcctcgagtccaagatcatcctcgatcgggagacgcagaggtcccgcggcttcggcttcgtcaccttctccacggaggaggcgatgcggaacgccatcgagggcatgaacggcaaggagctggacggccgcaacatcaccgtcaacgaggcccattcccgcggcggccgtggaggcggcggcggcggc

SEQ ID NO: 28124 - DNA, 220 bp, Zea mays
  Clone ID: LIB3180-028-P2-M2-G12
tcgctagatccgcgctggatacgtgggtcctgctccaaaatatgattcggctggtctggcgtgcgtgagtccagctcgtgtcgtgtgtgtctctgtgtgaggtgtccgcgggcgtgtgtatgtttggagtctttcgtcctcgatgacctctttttccctcccctttttacttttttctcttattcacccttttttttctccggtttctcttccccccttt

SEQ ID NO: 28125 - DNA, 239 bp, Zea mays
  Clone ID: LIB3180-028-P2-M2-G3
gtctctcgtttctctcctgtgaccaaagcgccttctttccggactctccccagcatctcgctccatgacaaagcccaccgcgggtagatcacagaacgccatgccgctttacgcgcgcgtgcgcgcagctagttagctagcgaacaaacccagcagaaacacacgccgccgccgacaacaagcgatttataagagcacaagaaggagcaaggtgttgcttaggaaagcgacaatggccg

SEQ ID NO: 28126 - DNA, 198 bp, Zea mays
  Clone ID: LIB3180-028-P2-M2-G6
tggcaaattttctgttaagatagagggccctggaaaacctgtgggtgagatgtgtcatactcctgaacaaaaagatagttgttctggactgtttggtgattctatcaaattgcagggcgatatatacattgaagagataagtgacatttgatcggtgatttcttccgaagataatggagaaagtggttattacgcatt

SEQ ID NO: 28127 - DNA, 75 bp, Zea mays
  Clone ID: LIB3180-028-P2-M2-H1
cgggaacgccggcaggacccggaccgaaattcccggattcccgcgacgactctcgcgttttggactagatcgcaa

SEQ ID NO: 28128 - DNA, 264 bp, Zea mays
  Clone ID: LIB3180-028-P2-M2-H11
gccagcacactctacgagtcgccatcttccactccaccgaggcagctccaagccatggccatggagaaggccgcctccttcctctcctccctcttaggcggcggcggcggggagccggcggcgactgtgaaatctatcttcatataccctatcaagtcctgcaggggtcttgccgtgtcacaggcgcccatcacctccactgggttccggtgggatcggcagtgggtggtggtgaacgccaaagggcgagcatacacccagagg

SEQ ID NO: 28129 - DNA, 205 bp, Zea mays
  Clone ID: LIB3180-028-P2-M2-H2
ttcaattcacggactaagcccccgccggaaagcactgaccttccgcgcggcccgccgcaaggaacgcgtgacctccccgccccctgttgcggctgggcgggcggcgcattcaggatctgctagggtttccccgccggcggggtcctggccatggcgagcccgcgctcgggccggcggcgacgagggcgaatctggatgaaagctg

SEQ ID NO: 28130 - DNA, 202 bp, Zea mays
  Clone ID: LIB3180-028-P2-M2-H4
aagggggggcccccgcgcggacccggcccgaaattcccgggggggccacacgagcgcacacactttcggaattcatttttgtcccccttgggaaaaaaaccaacccggtttcttcttcttggaaacccttacccttcttggcgagagaaaaaatggggttcatttggtttggcggaatcgaaaggtggtgggccaggggggg

SEQ ID NO: 28131 - DNA, 338 bp, Zea mays
  Clone ID: LIB3180-028-P2-M2-H7
cagcattcaagcttatgatgaatggtaaagctacagagaatagagcaatatccctaaaggagttgctaatgaaggaggtctcttcccgagatgctcacattgaggagttgcagaaaaagttggctggcattcaggacgaacatgcagaactaaaagctgagttgaacacacatctagctctcgtagcatcattggctgatcatgtcagtgtgttggaagaagattgccgttctctgtcaaaaccctgtagtacagaagacaaagaggaaaccgcatgtgtacatcatgttcaagagggcaatgatgggctggaatctcattgcttacccaaaggaact

SEQ ID NO: 28132 - DNA, 195 bp, Zea mays
  Clone ID: LIB3180-028-P2-M2-H8
gggcgacaacatgattgagagggccaccaaccttgactggtacaaaggcccaacccttcttgaggcttttgaccagatcaccgagcccaaaagggcttcaaacaaaccccttggtttggcccttcaagatgtgtaccaaaatggtgggattggaaccttacccggtggtccggtggagaccggtgtcattaaacc

SEQ ID NO: 28133 - DNA, 240 bp, Zea mays
  Clone ID: LIB3180-028-P2-M2-H9
tcggggcacacctgccctccccggggccgcggacccactcccatggcaaagctcccgcgtctaccctgctcgtttgccgttctcgcgctcatgtgcatcatcccgctcacagcgccgcggcctgcactgtcctcgcgcgcggccccaagggacggggtctccttcgccggcgcaggcaacacgatacatcaacttcttaaagatcacggccttcccggaggactgctcccgcgcggcgtg

SEQ ID NO: 28134 - DNA, 289 bp, Zea mays
  Clone ID: LIB3180-029-P2-M2-A10
gcctgctgctgtctgttgggccgaacgggaggcacgaggcggagagcggagaggcgttccgttccatccaagctgatggcaacgagttctccagggcgggggcgcacgggcaccttctgcctaccagaaggcctccgcaccgagctcttctcattgccaccatcaccagaaggcttccgcccctttttccagtgtctctttctctctccatcgcatggctcttgggtgcgccaattaagcgcgccggtttcttcttggttgcccggcgagatcttttcaagcccaaacc

SEQ ID NO: 28135 - DNA, 210 bp, Zea mays
  Clone ID: LIB3180-029-P2-M2-A11
cccgggccacactccgttgctccgccatggcgatccgctccaaggcctggatctcgctgctgctcgcgctgaccgtcgctctctccgcccgggcggaggaggagcccgccgccccggcggagggcgaggccctgctcaccctcgacgttgacagcttcgacgaggccgtcggcaagcaccccttcatggtcgtcgaggtctaccccccct

SEQ ID NO: 28136 - DNA, 268 bp, Zea mays
  Clone ID: LIB3180-029-P2-M2-A12
atcttggatttccggttacacaattttctttcaatcagcttctgttactctacaaaaggctggacaggaagaagattgctgatgttcttgcaatgatggaaaaggaggatgtgaaaccatctctctttacttacaagattcttgtagatgccaagggttcagttggagatatagaagctatggagaaagggattgaatcaatggagaaagatagcattgagccaaatctcacgtttaatgcttcaattgccagacacttcatatttta

SEQ ID NO: 28137 - DNA, 205 bp, Zea mays
  Clone ID: LIB3180-029-P2-M2-A4
ttacaaactgttgccacaccatgattttttttgcaagaaacctttgccactggcaatatcagatacaaattatcttcacaatattgtgggagacactgaaattcgaaaaggagaaggaatggagttggatcaacttgttcagaatgcatatatgagggataaacctgcttatattcagcccttcgatatggaaacactggggcaa

SEQ ID NO: 28138 - DNA, 259 bp, Zea mays
  Clone ID: LIB3180-029-P2-M2-A5
tttccgccacctccaccctcgaatcgttccccaccatggcgtcgcagggatcctccgttttcgccgcactcgagcaggccccggaggaccccatcctgggagtgaccgttgcctacaacagggatcccagccccgtgaaggtcaaccttggggtcggcgcctaccggaccgaggaagggaagcccctatggctgaacgtggtcaggcgcgccgagcaaatgttgatcattattccggttcgtgtcaaggagtacctacc

SEQ ID NO: 28139 - DNA, 338 bp, Zea mays
  Clone ID: LIB3180-029-P2-M2-A6
ttcaaggaaacctttatccatggctcgaggtatcatactactcctgcttgtcatccccctcgtcgtgagaattgaagggagtgtcatgggggagagatccaactcgttctcacaggactccaataattctagccctgctgaaaacaaactccaaccaggtgaaaagtccttcgcatcggaagcatatgcggtgaactggaacgaaccaccagacctgcaaatgcaagactccttcgagcgacctgagctatatcggaagcaatcagtgcaaggtgaaaagtccttcgcatcggaggcatatccggtgaaatggagcatattaccatcacttggtcagc

SEQ ID NO: 28140 - DNA, 412 bp, Zea mays
  Clone ID: LIB3180-029-P2-M2-B10
cccacgcgtccgcttcttcctccatccgcactactgagagcgacaaagctagctctctccagggatcggattcggatcaccatgccgtccaccgtgaactccgcgtccctcgaccagaaccttgagctcgccaagcaatgctcgcgagaggccgccctcgcagggttcaaggcagcagctgtcgcgaccgtcgcctctgcagttcccaccctggttagcgtcaggatgctgccatgggccaaggccaacatcaaccccgctggccaggccctcatcgtctccacagttgctggcatggcgtacttcatcgcggcggacaagaagatcctctcgctggcgaggcagcactcgtacgagaacgcgcccgagcacctcaaggacacctccttcagggcaccggccgtccgcacca

SEQ ID NO: 28141 - DNA, 204 bp, Zea mays
  Clone ID: LIB3180-029-P2-M2-B11
tcggtcagtcactggccccccattaagccggccggccttttttgggcggtggcgggagcttgctttgacccaacccccattgggaacgggattggccccattggccgcaccttcattggcttgatcccgggcggcggttcctttcccggggatctcggggtttgaacaaccccagccgtttttcccagggtggccccccgttgg

SEQ ID NO: 28142 - DNA, 251 bp, Zea mays
  Clone ID: LIB3180-029-P2-M2-B12
gcgggcggacaaggagcaggcggaggaggagctgtgccaagccacaatgggtatctcgcgtgactcgatgcacaagcgccgggccaccggtggaaagcagaaggcctggaggaagaagcgaaagtatgagcttggtcgccagccagccaacaccaagttgtcaagcaataagacagtgaggagggtccgtgttcgtggaggtaatgtgaaatggagggctcttcgccttgatactggtaactactcatggg

SEQ ID NO: 28143 - DNA, 284 bp, Zea mays
  Clone ID: LIB3180-029-P2-M2-B5
ccccgtaatggatctcgtttcaaatccatccatcctggtttcctccgtcccgcagcatttaaaccccatggccaagatcaagatcgggatcaatgggttcggcaggatcggaaggctggtggccagggtggccctgcagagtgacgatgtcgagctcgtcgccgtgaacgaccccttcatcagcaccgactacatgacctacatgttcaagtacgacactgtgcacggacagtggaagcaccatgaagtcaaggtgaaggactccaaaacccttctctttggtg

SEQ ID NO: 28144 - DNA, 416 bp, Zea mays
  Clone ID: LIB3180-029-P2-M2-B6
tggacgcgtgggtccgaattcccaggcaggcaggtcggcgaggagggcaggaagaccgaaaaccgagccgtgcgggggctcgggacgggaacgggacaggaccccaaaatctcagatccttcctgcccgcccgcccgtgcccgtcgacgcgtcgttcttgccggccgtgccccacctccgccctctcctcctccagggggatcggatacgccacaggctgcgcgatggtgctgtgggtcttcggctacggctccctcatctggaaccccggcttcgacttcgacgacaaaatcctcggcttcatcaagggctacaagcgcacctttaatctcgcttgcattgaccacagaggcacaccggagcatccggcgaggacctgcacgcttgaaaccgacgacgaggccatatgctgggga

SEQ ID NO: 28145 - DNA, 292 bp, Zea mays
  Clone ID: LIB3180-029-P2-M2-C10
tttttgttctccccgcgagcgctctcttgctctatcgactggcgacgactccgccaccgccgccgctctacgcgagacgcccaggtcttcgccaacgacgagcatccgggttagagaggaagaaattgcaaccgaaacaatggcggcagattccggcgctcgcagacaaccaagcttcaccaaggtcgaccagctgcgccctggaacccacggccacaacctcatcctcaaggttgctgactccaagatggtcgtccagagaggcacgccagggagggccccatcgaagaca

SEQ ID NO: 28146 - DNA, 228 bp, Zea mays
  Clone ID: LIB3180-029-P2-M2-C11
ctcaactgttctctcgccgccgttcaagttccgttttgccttgaggtgcacgtggcggtggaagcttcccgggcggtggcggttgttggttcatgtcaatggcgcaggtgtgctgcgactcggccgtagcggcgtgcaccgtgggccgtgccgtaggcgtatgctaggtccatggctcgcgcctttagtccacctctgcccttgttcgcacggtggcatatctcatcc

SEQ ID NO: 28147 - DNA, 326 bp, Zea mays
  Clone ID: LIB3180-029-P2-M2-C12
atccccgctaccgctagccgccgcgctgctcatctggtggcggctcgcctccctccccccatccgccgccgccggctcctcctctagctccctccttaccccgagctttaagctcgtgctacctgcctacctatccgtagggagagagagagagaggggagaaggttcggtcggtcggtcgggggctctcggatctcgccgctgcctccccgtttcttcgttgggatctcgctcgcttcgcgccatggccgccgtcgcgacgccaccggcccccgcgcccgccgtgccggcaccggcaccgtcaccggctgctgttccggctcccg

SEQ ID NO: 28148 - DNA, 350 bp, Zea mays
  unsure at all n locations
  Clone ID: LIB3180-029-P2-M2-C5
aacgcctgctttgaccactgaacagaacaagctgtgtcagtcacaaaattttcgtgaggatggcagctgccacgacgggattgaatagaggaatgctctggttgtgaagtgataactaaggctaccttcaaggcttaatgatcaagggttaatgaaactgtggtttcagccaaccaacctgcaattcctgtggtttttgtccatgttgattaactagtacgaatgccaagttccttgaaagttatacaaatccgttaatgttcagatggcattcagcatgctccatgtgctgcatgccaacatatcattcggcaaattggcaatgcaaactagaattgcttannnaaaaa

SEQ ID NO: 28149 - DNA, 263 bp, Zea mays
  Clone ID: LIB3180-029-P2-M2-C6
ttgggtcttaagaccattagctttatctactccagagcgcaaaaaaacccgatcgacaccatgagggtgttgctcgttgccctcgttctcctggctctcgctgcgagcgccacctccacgcatacaagcggcggttgcggctgccagccaccgccgccggttcatctaccgccgccggtgcatctgccacctccggttcacctgccacctccggtgcatctaccaccgccggtccacctggcgacgccggtccacctgccacc

SEQ ID NO: 28150 - DNA, 86 bp, Zea mays
  Clone ID: LIB3180-029-P2-M2-D10
ctgtatgggtccactccattgcgtgctgctgctgtgtgtttccattttgtattttgtgataaattgttcgtagccccctattggcc

SEQ ID NO: 28151 - DNA, 231 bp, Zea mays
  Clone ID: LIB3180-029-P2-M2-D11
cgacaaaaccagaccatcaaacaagtgccagcgccctctcgcagtcgccgcaatggagagcaccttcatcatgatcaagcctgacggcgtccagaggggcctcattggtgagatcatcagccgttttgagaagaagggcttctacctcaaggccttgaagcttgtgaacgtggagaggtcgtttgctgagaagcactacgccgatcttggcttcaagccctttttccaagg

SEQ ID NO: 28152 - DNA, 181 bp, Zea mays
  Clone ID: LIB3180-029-P2-M2-D12
tcgcgaaaaaggacgccacccgcccttgcttgctctccagtttgcaccctggaggcaggtgcaggtgcaggggcgctccttaccagcgggcagtcaaccggccgcgttggccattgcggaggccgggaggcggaccctttcgcttgtgaacctggcggccatcatggagcgcgcccaccag

SEQ ID NO: 28153 - DNA, 337 bp, Zea mays
  Clone ID: LIB3180-029-P2-M2-D3
ttcccgtcctcctgccccaggaaccgcggttcaggaaggaaggaaggaggaaaggcaagtgcctgccggtgccggggctcatcagcgcgcgatggcgtacagggcggaggacgactacgactacctcttcaaggtcgttcttatcggcgactccggcgtcggcaaatccaacctactctccaggttcacacgcaacgagttcagcctcgagtccaagtccaccatcggggtcgagtttgccaccaggagcatcagggtcgacgacaaggtcgtcaaggcccagatctgggacaccgccggccaggagaggtatcgggcaattacaagtgcgtactat

SEQ ID NO: 28154 - DNA, 434 bp, Zea mays
  Clone ID: LIB3180-029-P2-M2-D4
gtgggcaaggaagtttattaagcgcattctcgatcctaaccctgataccaggataaaaatcgcagaaattttggaagatgaatggttcaaaaaaggctataaaccaccacattttgaacaaggcgaagatgttaaccttgacgacgttgatgctgcattcaatgattcagaggaccgtcttgtggcagagaaaagagaaaagccagaatccatgaatgcatttgctcttatttcgaggtcacagggcttcaaccttggaaatttgtttgagaaggagatgatgggaatggtaaagagggaaacatctttcacgtctcaatgtacagcacaggagatcatgtcaaaaatagaggatgcatgtgggccacttggttttaacgtgcggaaacaaaattacaagatgaaattgaaaggtgacaaatcccgaagaaaag

SEQ ID NO: 28155 - DNA, 409 bp, Zea mays
  Clone ID: LIB3180-029-P2-M2-D6
tggacgcgtgggaatggcaggagattcctcttctgggaagatcaagagtggaagcaaggtatctaaagttggtggcagaaaagacattgtggaaagcataagtggtgatagagaaggatcgtcatcaaacaacaaggacttcccacagaagaaacggttgatagagaggaactccacaaacgagaagggtacatttgttcctgaaaaaccagtgggtaaacttaagaagcaggttcaacctaatgttgttatggatgagcacattaagtggaacaaggaaagtaaagatactacagatgttgtgtcatttactttcacctcacccttggtcaaaccgtcggcaggactgtccagactggtgggtaagtgggatacaagaagcaaccttgatatggatgcaggatgtgat

SEQ ID NO: 28156 - DNA, 188 bp, Zea mays
  Clone ID: LIB3180-029-P2-M2-D8
agttcgatccgatccggctgcgaaggcgagatggcgttcgcggtttctggggcggtgctcggtggggccgtaagggctccccgactcaccggcggcggggagggtagtctagtcttccggcacaccggcctcttcttaactcggggtgctcgagttggatgttcggggacgcacggggccatgcgcgc

SEQ ID NO: 28157 - DNA, 338 bp, Zea mays
  Clone ID: LIB3180-029-P2-M2-D9
tcgattttcagcattcagaaacacaccaagcgaagcgcactagcaacaacctaacaacaatggctaccaagatattagccctccttgcgcttcttgcccttttagtgagcgcaacaaatgcgttcattattccacagtgctcacttgctcctagtgccattattccacagttcctcccaccagttacttcaatgggcttcgaacatccagccgtgcaagcctacaggctacaactagcgcttgcggcgagcgtcttacaacaaccaattgcccaattgcaacaacaatccttggcacatctaaacctacaaaccatcgcaacgcaacagcaacaacag

SEQ ID NO: 28158 - DNA, 221 bp, Zea mays
  Clone ID: LIB3180-029-P2-M2-E10
tctgcgaacctgccgttaccgtacgcccgcagtcgccgcaaaatccggcggcacgaaccggccgtacgccaggctaccaccttcctacgcccgcctgcccgcccggaatcctgcccccgccgggatctggctgcttgcccgccacaatccaaccaccccgccgggaccgttccgggcatgccgaaaccgttgggatccgcccgccctcctaaatccgcccg

SEQ ID NO: 28159 - DNA, 120 bp, Zea mays
  Clone ID: LIB3180-029-P2-M2-E11
ctttggcgaatcgaccttgatctgaaaatggggctgttccgggcggcgtgcgtcctgtcccgtttggctctgcgaaggaacctcttgcgcgccgcggcatgcccttttgccgccggcggg

SEQ ID NO: 28160 - DNA, 390 bp, Zea mays
  Clone ID: LIB3180-029-P2-M2-E12
gcgattattcgcatcgttgcttaggtgctctaacaagccgcaattggttagagattggatcaagttccaggctttttaaaaagtgccttccagcttacttaattgactcgcatgggctttctcgctataaacgaactaaacgaagcgcctaaagagagagatccgcgggacaccagtcaataaagtaaaaagagagtattctcttatgtagtcttattccttcccacccccttgtgggtgctgctcaagcagctcaggaggcgccaaccccacaaccacaggtagaaggagttccaggtgcggcgtccagatcagggactagtggcccgtcctgttcggatgtaaaggaaagatgaaaaacttttctcaaacagtggggaaagggcccca

SEQ ID NO: 28161 - DNA, 250 bp, Zea mays
  Clone ID: LIB3180-029-P2-M2-E2
aaccggaggagcaggtggacctgtagggggacgacaacggcatggacgacgacaacgccgggtaccgtctccgaggaagccgggacgactcggaggagcccgaggtggatgacgacaatgacgagcgccacggcgaggccgacgacgacgccggtatggagccggagccggccggaagtaaaggcggtgatgacacggtcaaggggcccgacgtcgcacgttggggtcccgaggacgaggaggaaaggag

SEQ ID NO: 28162 - DNA, 347 bp, Zea mays
  Clone ID: LIB3180-029-P2-M2-E3
cctacagttgggctctactggtttggctttgggaaacaaaaaaatggggatgtttgcaaagacgttgtgttctcagctaaacaatcgttcaagcctagctgcatctgcttcggctaaaaacacttcaagacagcatggccagtcacttattgataatgcaattgtgtcaaccagttcaccaccaaatgtattggtgattgcatctttgctttgggctgcacaacagaatggtcaccctgagctcattggaaaaacaccaatagtgaggccatcattagatgttgagagacacattcttctgaaaggagcttttgataaagctgaggaaatagtcttgagaatgaagc

SEQ ID NO: 28163 - DNA, 352 bp, Zea mays
  Clone ID: LIB3180-029-P2-M2-E4
ttccaggtaagcagcatcaggaaccctagcaccgccgattccgaagccatgggtatcgacctcgttgccggtgggaggaacaagaagaccaagcgcacagcgccgaagtccgacgatgtttatctcaagctccttgtcaagctctaccgtttcttggtcaggaggaccaagagcaacttcaatgctgtcattctcaagaggctcttcatgagcaaaaccaatcgcccaccaatcttcatgcgccgccttgtcaagttcatggaaggaaaggagaagaacattgctgtgattgttggcacagtcacagatgacaagaggatccaagaggttccagcaatgaagggtactggcc

SEQ ID NO: 28164 - DNA, 279 bp, Zea mays
  Clone ID: LIB3180-029-P2-M2-E9
gcggcagcgagattcaccgggggaagtatttgcagcgaccgcgccggtccccgccacaaaatcagctacccaccaccgtccgtcagcggcggcggggagagcatggcggccatcgtggcggcgcgggcgtcggccccaggcagggcggccgtcagcaccatcgccgcgttccacagccacgcgttcccttcccgcgcgctcccgctcgcctcctcctccatcggcggcgccaggcggtaccaccacgcccccgcgtgctgcttcgccaccaagcccacc

SEQ ID NO: 28165 - DNA, 224 bp, Zea mays
  Clone ID: LIB3180-029-P2-M2-F1
gtacaataatcaggttgctttcactactgatccagggtcagggagatcctcacaatattgcacagatgtagcaaaagcattggatgctcctattttccatgttaacggtgatgatttggaggctgttgttcatgtctgtgagctcgccgcagaatggcgtcagacatttcattcaaatgtagtgggggacattgtatgctaccggcaatttggccataatgaaa

SEQ ID NO: 28166 - DNA, 162 bp, Zea mays
  Clone ID: LIB3180-029-P2-M2-F10
tcggcatgctgtgcctgttccgaagtctgagtgcaccaagactacccaggtgggtattagctccgctggtggatgcctatgctatccctcgcagcctcctccgtggcccggcgcccgctcctgccgccgcctaggcttctggcggtgagggctatggcgtat

SEQ ID NO: 28167 - DNA, 282 bp, Zea mays
  Clone ID: LIB3180-029-P2-M2-F12
tcggtgcagaggtctatgactgcaacaacatggtggagcaggagctgcctggaggcgggctcctcgtgtaccagagcttctgtgctgctgaagacgctgttgctacctcgcccaaatctgttttccactgctttgacggcgagaacgtggagagtgctcctcctcctatgaagaaggactacaaactggctaatcttctatgctgggaggaggaagcggatgccatggaggagaaggcgggagtgcttgatgagtaagacgggcttctggggtcgatttgct

SEQ ID NO: 28168 - DNA, 223 bp, Zea mays
  Clone ID: LIB3180-029-P2-M2-F2
tcggagctgcctccatatttgcattcttcaccctcgctttacgtgaccaccattgccatccaagaacaaattaagcgggacactggaaacaaagagagacatgggccttcgcgggggagctcttgccctgcttttgctcctgttcgtccaccgaggccagcgagcaccaaatgccggcggggacacgttcgtgagggtccagggcacccgctttttgcaggac

SEQ ID NO: 28169 - DNA, 72 bp, Zea mays
  Clone ID: LIB3180-029-P2-M2-F3
ggcccttctgcctggacgatgagcaggacctgctgcttggggacttcggggacgaggaactggagatcgacc

SEQ ID NO: 28170 - DNA, 106 bp, Zea mays
  Clone ID: LIB3180-029-P2-M2-F4
ttctgttagcgggcgccctttttttttttttttggggcaaacatatacatcgggggggaagccccaaaactctggactttccattaagggtgccaaatacaaaggg

SEQ ID NO: 28171 - DNA, 414 bp, Zea mays
  Clone ID: LIB3180-029-P2-M2-F5
tgcagcccgacggcgacgccctactgctcgcctcagtgccagtcgttgcggcagcagtgttgccagcagctcaggcaggtggagccgcagcaccggtaccaggcgatcttcggcttggtcctccagtccatcctgcagcagcagccgcaaagcggccaggtcgcggggctgttggcggcgcagatagcgcagcaactgacggcgatgtgcggcctgcagcagccgactccatgcccctacgctgctgccggcggtgtcccccactgaagaaactatgtgctgtagtatagccgctggctagctagctagttgagtcatttagcggcgatgattgagtaataatgtgtcacgcatcaccatgggtggcagtgtcagtgtgagcaatgacctgaatgaacaattgaaatgaaaaga

SEQ ID NO: 28172 - DNA, 463 bp, Zea mays
  Clone ID: LIB3180-029-P2-M2-F6
aaacaggcaaacggaacggaacatctcctcggctccttcctcctctggccagctgctgtcgcccctcgcccgccacggcacctcctccacttccagatcttcccgccgtcccaaaaatagtgcccgccaaaaccctaccctccccgcccgtttcctcccctccctcgcggcctccgaccccgcccttccgccgcctgactaataaaccctagcacccacctccgccgctgccatggcgggcccgtccggcgcatcctcctcctcgcgcggcgtcggcggcggcggcgttgaccgtttctacagcccgccccacgtgcgccgccagcagcaggaggagcagctgcagcggctcaagggcctggcccaggggcagcgcacgtcgtccccggcggcggggacgctcacgcccagggccgccaggcagaagacgccaccggctgagacgccccgccccgtcaacgag

SEQ ID NO: 28173 - DNA, 369 bp, Zea mays
  unsure at all n locations
  Clone ID: LIB3180-029-P2-M2-F7
gctgaaccatatgtaactggggttcgacttggtagagattttcaggcagaggtgccagaatggtctggtccatcatccagcgatgtttactttgacgagccctgtgcaattgattctgcagaactaactacatttaatttgtgcaaaatgagtaatcaaagtcattcttccattggtaattggatccaatgccgtgagaccttgaatccaggagattctgacaagcaagttgtctgtggaaaatggagaagggcacccttatatgttgtacagtcagataattgggattgtttttgttgtcttntttgggatccagtccatgctgattgtgctgttccacaggagttgaatacctatgaagttttaaag

SEQ ID NO: 28174 - DNA, 251 bp, Zea mays
  Clone ID: LIB3180-029-P2-M2-F8
ggcgaggcaaaagcattgcgaccacagacagcgcgcgcttcaaggccttttttttttgagataacaaggaggagaggaggagatggcggtcaccatcacgtgggtgaaggcgaggcaaatcttcgacaggcggggtaaccccaccgtcgaggtggacgtgggccttaacgacggcagctacgcgaggggggccgtacccagcggagcattcactggaatatatgaggccttggagttgagggatggaggat

SEQ ID NO: 28175 - DNA, 219 bp, Zea mays
  Clone ID: LIB3180-029-P2-M2-F9
ccgtcatccgtttcgctctctgccgccgccaccgcacaagaagctagctcctgcctgtaccgccccgtcatggcgatgctattccgggcaggcttcttcgggggccggggcccggtcctggcggcggctaggcttttggcggtgggggcgatgggcgtttcccttttcggccacgttgagccggggcccaagggccccattcttggggttaccgagggt

SEQ ID NO: 28176 - DNA, 159 bp, Zea mays
  Clone ID: LIB3180-029-P2-M2-G1
ccaacgcgtccgcgcgccgccgccgccggcgaaacagcacatcgctctctcgatctcagccatggcggaggtggagcagccccaggacgcggtgaagctcttcaaccgctggaccttcgacgatgtccaggtgaacgatatctcgctgaacgactacct

SEQ ID NO: 28177 - DNA, 398 bp, Zea mays
  Clone ID: LIB3180-029-P2-M2-G10
acaaccagtggctatcttggagctgaatgtcaagaagctatggactcctaattctcaaacatcgcatcatatgaaacaccaagttcagcacgtgggaatagacagcaaatatttatggagtctccagttggcttgagaccacatcttccagctgagaggaaatgggctctgggtcttaagtctcgagcacatccaaaagaaataatgtctgaagtgctgaacgctctgcaggaattaaaggtttactggaaaaggataggccactataacatgaagtgcaaatggagtcctggctttcctgctcaaatacataacattcttaacttcagtgcagggcccattgaaactgattgcctgggtgagaggttaagtttaattaagtttggaattttagtttg

SEQ ID NO: 28178 - DNA, 350 bp, Zea mays
  Clone ID: LIB3180-029-P2-M2-G11
gaatgcttgctggatcagcaactgtcttctttgcatacataggctttgatacagtcgctagtacatctgaagaggtaaagaatccacagagagatttgccattgggaattggagttgcattggctatttgttgtgcgttgtatatggctgtttctgttgttattgttgggctggtgccatatttcgccatggatccagatactcctatttcatctgcctttgcaaggcatggaatgcaatgggctatgtacgttgtgacaagtggtgctgttcttgcactctgctcgaccttgatgggctcacttcttccacagcctaaaatacttatggccatggcacgagatggtctg

SEQ ID NO: 28179 - DNA, 390 bp, Zea mays
  Clone ID: LIB3180-029-P2-M2-G12
cgctctcttcctttctcacccccgggaccctgtctcgccccttctcgcctcgccgccgcagccgatgggctccggggaggagccgtcgcagatgcggagggcgctggtggactcgctcgcgggtgccatctccggcggcatctcccgcaccgtcacctcccccctcgacgtcatcaaaatccgcttccaggttcagttagaacccacaacctcgtggggtattcttcgaagggatatatatggaccttccaaatacactgggcttctgcaagcaaccaaagatattctcagagaggaaggtttaccgggattctggagaggaaatgtaccggctttgttgatgtatatgccatatacagctttacaattcactgtcctacacaaactaaa

SEQ ID NO: 28180 - DNA, 219 bp, Zea mays
  Clone ID: LIB3180-029-P2-M2-G2
tccctgtcttatgccaacaaggctccctacgtggctaaggcagagaagctcaaggctgtgtacaccaagaagatcgacgcttacaacaacaagcagtttggagaccccacggcgtctggtgattccgacaagtccaagtccgtggtgaacgactaggaccaggagggtgacgagtgatgtatgacggatgaaactctgtccaagtgtttgcagtcaggg

SEQ ID NO: 28181 - DNA, 330 bp, Zea mays
  Clone ID: LIB3180-029-P2-M2-G3
cactgcctccctccccgttccccagtccccaccccgaccggctggtcctcctcctttccccgcgccatcctcgaggcatcgccggcgccgcaacttcgttcaggaggaagcccgcacccggccccgatccgatggccaacagcaacctcccgcggcgtatcatcaaggagacgcagcgactgctcagcgagccagcgccggggatcagcgcgtcgccctcggaggagaacatgcgctacttcaacgttatgatccttgggccggcgcagtcgccctatgaaggtggagtttttaagcttgaactctttttacctgaggaatatcccatgg

SEQ ID NO: 28182 - DNA, 304 bp, Zea mays
  Clone ID: LIB3180-029-P2-M2-G4
gtacgtggtctctccaggtgagcttctgagaaactgattgaccttcgcggtcgcacctgccgcacacggggactgcctctcttcctgcacccgttcggccggtcgcacatcctagcttcaagtgcgacgatgttgttttccccaatgattctcgggggaggcggtgaatagaacatctgaatgtgtcttgactaatgcccgatctttgaattaagtttttttaacttttccgaaggcttttgctgccatttacattttttatacttatagtattttattttggtaatcttcttacctttttttt

SEQ ID NO: 28183 - DNA, 258 bp, Zea mays
  Clone ID: LIB3180-029-P2-M2-G5
ctgcgatcccatatcaattcccgtccccactcgccgtcgacgcaggtcggactccaactccagcgcgccgcgcggtgctgttcgccccgcccatgtgacgcgagttgtgccccgccccccacagtcagcagtccgagaccccaatcctcggggccgggcggggggaaccaggagtgggcaataaaaaaccgaggattccgtcctctgtggcggggatggggcaagaggggatggggttcaccactaaggggtgaggtt

SEQ ID NO: 28184 - DNA, 273 bp, Zea mays
  Clone ID: LIB3180-029-P2-M2-G6
gtgttattggtgaaggatttcttaacgaaatctttacaataatagattgggtacccgttccacctgctcttgtttttttaatatataaaaaaaaggccattcctctttccctttttgacacttttattattcttataaacaaaatcgtccccgccttaaaattataccttattcttggtttttgtttttattcttatttttatccctcttttttttatatatattttttttttattttatatattattaattggtttattcttttcattttat

SEQ ID NO: 28185 - DNA, 240 bp, Zea mays
  Clone ID: LIB3180-029-P2-M2-G7
gccaccagcaagagaccaacagcaagggtgcgaagaaagggtggccccctagctagcctagctagagagagagagagtcatcataatactcagagagaagcacgagcacagctgcactagctagctagctactgcaaagaagcaagctctcgatcacaatggccgccattccttctctgctgcgtcgtcaactcgccattgtcgtcgccaccaccgccatgcttgtcctgcttacctccc

SEQ ID NO: 28186 - DNA, 272 bp, Zea mays
  Clone ID: LIB3180-029-P2-M2-G8
ccaatgtgaagcaagtctccctgattggcaaggctggtggtgacaagtggaagtccctgtctgatgccgagaaggctccctacgtgtctaaggcagagaagctcaaggctgtgtacaccaagaagatcgacgcttacaacaacaagcagtttggagaccccacggcgtctggtgattccgacaagtccaagtccgaggtgaacgacgaggacgaggagggtgacgagtgatgtatgacggatgaaactctgtccaagtgtttgcaggcaggg

SEQ ID NO: 28187 - DNA, 339 bp, Zea mays
  Clone ID: LIB3180-029-P2-M2-G9
gttggcttctcctccccctccggttcgggttcgggttcgtgaggttctccggggttcggtttcgtgggtgagcggatcgagatggcggcgtcggatgttgagtaccgctgcttcgtcggcggcctcgcctgggccacggacgaccactccctccacaacgccttcagcacctacggcgaggtcctcgagtccaagatcatcctcgatcgggagacgcagaggtcccgcggcttcggcttcgtcaccttctccacggaggaggcgatgcggaacgccatcgagggcatgaacggcaaggagctggacggccgcaacatcaccgtcaacgaggcccattcc

SEQ ID NO: 28188 - DNA, 366 bp, Zea mays
  Clone ID: LIB3180-029-P2-M2-H1
tttaaaaataatatctccctgcgcttttgctagccctttgtcatccaaggttccattaaacaaccggggcttttacacccccgccaagaacaggagcaacaccattaaggctcctcgaaacaatccattctaatccatggcgaagctcatgaacaagctggtcgattcgttcgagcacgacgagatactggacgtcggctgcgtgcgcgccgtgctggccgagctcgtcctcaccttcctcttcgtcttcaccggcgtctccgcccgccatggccgccggatccgacgggaagcccggcgacgctatgccgatggcgacgctggcggcggggcaatcgcgcacgcgctggccgctggcgtctgtga

SEQ ID NO: 28189 - DNA, 392 bp, Zea mays
  Clone ID: LIB3180-029-P2-M2-H10
attggagttgcacaagccgctcagcaaccttcttcttaatcttgtgcagtcctccctaccgccccgtccatcgacacagcagcttgcttgtcaccaagctagccaagcaggaggagtaagagtacacccagagagagagagagagagagagagagagagagcaccaccctgattccacccaccgttgtcccttgcttatttacaggcgttcgtgatcaccaacagctactcgtcagctagagagagtgcaacgggccgggcagagctagagagagagagagagagaaagcggccttctttttctgtgttcaccaagcaacaaccccagtccaagctctccgtgttggccgatcgtttccggcgaacagagcaagcaactcacagcccggagg

SEQ ID NO: 28190 - DNA, 303 bp, Zea mays
  Clone ID: LIB3180-029-P2-M2-H12
gagaagtggcagatttgccactggaattcccagatggtacaacccctgttccttgtcgggtttgtatatatgatagctcgacagatagcaaggttggggttggatctttgatggacaaagcaatggtacctgcactgcctgcaggcagcctgtatatggaggaggtgcacgcgaagcttggtgaagaactttggttcacaataggggggcaacatattccttttggtgcatcaccacaggatgtctggactgacttaggtcgtccttgtggtatccatcagaagcaggtggaccaaatggtca

SEQ ID NO: 28191 - DNA, 142 bp, Zea mays
  Clone ID: LIB3180-029-P2-M2-H2
cctttttcggtttggcttcttcccggcccggcccgagcccagcagagcgcaaccctatccggagcttggatggcggtccccaaacaacatcatcagcaaccccagcaggcggcatcggcagccaccggcgtgtggaaaaccg

SEQ ID NO: 28192 - DNA, 251 bp, Zea mays
  Clone ID: LIB3180-029-P2-M2-H4
tcggccaaatgctttgccactttgctccccatgctggccatcgtgatggctgcagttatggtgtgatctatggaaaaaaaaaatgctccagcttgcctccttaagacctgagatgaaaggtgaattgcgtaatgctgctggtaaccattgaagttctggttttgccatgagcagcagactagtagtagtctagtagagaggcaccttatgctgtaggaattctctggccagttaagatgtgcatcagcgcg

SEQ ID NO: 28193 - DNA, 344 bp, Zea mays
  Clone ID: LIB3180-029-P2-M2-H5
gcagccagtcagccagaggagcctagagccagtcccgtcccgtccatcagccgccacaccacaaacacccaccactctgctctcgcccgcttgctttctctcccccgctccagcttatggcggaggcggcgccagcagccggcggcggcatcggggacatcctcgccacgagcgatcgggacttcctcgtccgcaactccggcgagcaggtgaagatcagcagcgttgaggcgagccctgtggccatctacttctccgcctcatggtgcccgccatgcaggaggttcacgcccaagcttattgaagtatacgaaaaactggcctcacagggcaagagccttcga

SEQ ID NO: 28194 - DNA, 284 bp, Zea mays
  unsure at all n locations
  Clone ID: LIB3180-029-P2-M2-H6
tcgtgtaacctagcatcagcactaccagagcgctgccgagaaggaggaaggcggtggtacttgtcgcntttgtatatacgatagctcgacagatagcaaggttggggttggatctttgacgtacaaagcaatggtacctgcactgcctgcacgcagcctgtgtatgaaggattgtcccgctaagcttgttgaagaactttggttcacaataggggggcaacatattccttttggtgcatcaccacaggatgtttggactgacttaagtcgtccctgtggtatcc

SEQ ID NO: 28195 - DNA, 208 bp, Zea mays
  Clone ID: LIB3180-029-P2-M2-H7
ttggacgcacacgccggttggagacaccagggtctgcacctacccgttgttgggcaccatctttctcgggctcgtggatgccttcctgattagctacgtgtcgtacgttggatcacgggcgctgtccttggtcatcaacaagtcgcttcgaaggagggtgtacctgtttatgcttgcgggtctcttcttctttccaaccaaggggctt

SEQ ID NO: 28196 - DNA, 232 bp, Zea mays
  unsure at all n locations
  Clone ID: LIB3180-029-P2-M2-H8
tgatcgatcgccacatccaacaccacccgcctaggcgacgcgacagccgccaggaggaaggaataaactcactgccnnncngtgaagggggagaagtgtactgctccgtcgaccagtgcgcgcaccgcccggcagggctgctcatctcgtcgacgaccagtggattaatcggcatggcggctctggccacgtcgcagctcgtcgcaacgcccgccggcctgggcgttccgga

SEQ ID NO: 28197 - DNA, 54 bp, Zea mays
  Clone ID: LIB3180-029-P2-M2-H9
tttgccgccgctgcagtgtccatagccaccgggggagactgagatggggggggg

SEQ ID NO: 28198 - DNA, 342 bp, Zea mays
  unsure at all n locations
  Clone ID: LIB3180-030-P2-M2-A1
atctgttccaaaggcttttcaggcaagatcttcttgttgctagcctctttcgtaacttcttgcttgctgagagaatcatgcgatcagcaaattgttctccagtttcttatccgttgttacctccaacacatcaacaccatatgtgggatgcntgggacatggctgctgagatttgcctttccaagcttcctcagttaattgctgatccaaatgcagagtttcagccaagtccgttttttacggaacaactgacngatttnnaagtgtggcttgatcatggttcccaggacaataaactctccgaacaggtacccatatgtctttaagatctgcttagccaat

SEQ ID NO: 28199 - DNA, 393 bp, Zea mays
  Clone ID: LIB3180-030-P2-M2-A10
tgcagtcattggtacaaaccatcagggcacagcagctgcagcaactcgtgctacctgtgatcaaccaagtagctctggcaaacctttctccctactctcagcaacaacaatttcttccattcaaccaactgtctacattgaaccgtgctgcttatttgcagcaacaactattaccattcagccagctagctactgcctactctcagcaacaacaacttcttccatttaaccaattggccgcactgaaccccgctgcttatttgcagcagcaaatactactaccatttagccagctagctgcagcaagccgtgcttccttcttgacacagcaacagttgctgcctttctaccagcagtttgcggctaaccccgcaacccttttacaactacaac

SEQ ID NO: 28200 - DNA, 237 bp, Zea mays
  Clone ID: LIB3180-030-P2-M2-A11
aagaattccctcccctagccgccgccgccgttcgtctccctgagaggtgccgggaccgaggatttggccgagttctaggtagagaatcggttttacttgtctcagcccggggtctgctgcgtctggtggtggtgaaggggagaaattcgtgagatctgttccggatcaggcttgcgagctcgggaatcaggggtttaacacatagtcttcgtcgatttgaatttaatgtactaatgt

SEQ ID NO: 28201 - DNA, 110 bp, Zea mays
  unsure at all n locations
  Clone ID: LIB3180-030-P2-M2-A12
tccaaccagaagagcttgcagttactgagagtgtgtgtgagagagaggatgggtggcancnncagggctgctctgctgctggccctggtggtggtgccctttacccttcc

SEQ ID NO: 28202 - DNA, 420 bp, Zea mays
  unsure at all n locations
  Clone ID: LIB3180-030-P2-M2-A2
cggtcatcggggacggctgcctcatcgggcccgacgtcgcggtcgggccaggctgcttggtgnaggcctgtttgctcctgtcctgcttcaacgttattctcgccgtgcgctttaagcatcacgcttgccttttcagtatcattatttgttatcattatacagtttacaattgtttctgtttttatatcatctctatttctttttgatgtctataaacttatttttaatttattatatatttttatacatttctttctattttttatcatatttattaaaattttttaattttttttattatatatgtttttcatttatatatttatttattaaattttttttattttatatttttaatatttttacttatatttattcattaattattttaataatttctttctttttttaatttatatt

SEQ ID NO: 28203 - DNA, 302 bp, Zea mays
  Clone ID: LIB3180-030-P2-M2-A3
caactactaccagaagagccggttcgtgaaccgcgtcgtgtcgtccatgttcaacaccgttgccggcaagaagatcgccgtcctcggcttcgccttcaagaaggacaccggcgacaccagggagaccccggccatcgatgtctgcaagggcctgctgggtgacaaggcccagatcagcatctacgacccccaggtgacggaggaccagatccagcgggacctagccatgaacaagttcgactgggaccacccgatgcacctgcagccgacgagcccgacggccgtgaagcaagtgagctgcg

SEQ ID NO: 28204 - DNA, 320 bp, Zea mays
  Clone ID: LIB3180-030-P2-M2-A4
tccacttccacttggatcgatcgatcgcatatggcggtactgtggtggtggtcatcgtcctgcttgtcctcccgcgccgtcgctgctgcgctgctttgcctgctggtggctcacggcagcgatggaaccaggcacaacagcaacaatggcggtggtagtggtagttccagcagcagcaagagccacaagcaaggcggagggggacgagcccatgccgcgccgacgacaccgtctccgtctccgtatccgtctccggcggctggcaacaacagcagcagcgacgacgggtggttgaacgcccttgcgacatggtacggtgc

SEQ ID NO: 28205 - DNA, 417 bp, Zea mays
  Clone ID: LIB3180-030-P2-M2-A5
acgcgccctcctcccgtccaccaccgctatatatcccggcgccccttcctccctcccccgtccttccctccgcctccgcccccgcccactcctcgctgccaccactcctgtcacctcttcccgcgccgacgcagccgccatggaccccgtcgccacatgggggctaaccccgctcgcgggcgccgacccggagatctacgacctcctggagcgcgagaagcggcgccagcgtcgcggcatcgagctcatcgcctccgagaacttcacctccttcgccgtcatggaggcgctcggctccgcgctcactaacaagtactccgagggcatgcccggcgcccgctactacggcggcaacgacgtcatcgacgagatcgagaacctctgccggtcacgcgcgctcgctgccttccaccttga

SEQ ID NO: 28206 - DNA, 151 bp, Zea mays
  Clone ID: LIB3180-030-P2-M2-A6
ttttctaagaattccctcccctagccgccgccgccgctcgtctccctgagaggtgccgggaccgaggatttggccgagttctaggtagagaatcggttttacttgtctcagcccggggtctgctgcgtctggtggtggtgaaggggagaaa

SEQ ID NO: 28207 - DNA, 298 bp, Zea mays
  Clone ID: LIB3180-030-P2-M2-A8
cgcctatccgatctgccacctcctcccgtctcgcacgttccttcccaactccgcagcgtagcctctccgcggcgcgatccagatccaggtttttcagcatgggcctggtgaaggaaggcatcgacatggaggagggaacccttgagatcggcatggagtacaggactgtatctggtgttgctgggcctctggtcatattggataaagtaaagggcccaaagtaccaagaaattgtaaacatccgacttggagatggcaccaatcgccgtggtcaagtcctggaagttgatggcaaaaa

SEQ ID NO: 28208 - DNA, 154 bp, Zea mays
  Clone ID: LIB3180-030-P2-M2-A9
tgtaagaaataccttcggtacctgcaccctggaatagtttcccaacatggggtcgcaaagatccttcttactcacctcactctagcaagacccggaggaccccatccttcgaggggacgttgcctacaacaaggattccagccccctgaagggc

SEQ ID NO: 28209 - DNA, 411 bp, Zea mays
  Clone ID: LIB3180-030-P2-M2-B10
ccccgctccgcctccactcctcgcgccgctgccgcatctcctctacaggtaagaaggagagaaagagggcgaaatggtgaagcacaacaacgtcatccccaacgggcacttcaagaagcactggcagaactatgtcaagacatggttcaaccagcccgcccgcaagcagaggcgccgcatcgcacgtcaaaagaaggctgtgaagatattcccacgaccaactgctggccctcttcgtcccattgttcaatgccagactctcaagtacaacatgaagtcaagggctgggagaggctttacccttgaggagttgaaggctgcgggcattccaaaaaggcttgctccaaccattggcatttctgtggatcaccgccgcaagaacaaatcccttgaggggctgcaggccaatgt

SEQ ID NO: 28210 - DNA, 443 bp, Zea mays
  unsure at all n locations
  Clone ID: LIB3180-030-P2-M2-B11
cgtctcgcttttctaagcagcttaacatnatattaactcagtgggtgctatagagatattgccgccgacgaccccatcatatcttatgggtccctccnccttgcanctgcatnctccttcaaattcctaggtgtttggcttctcccttccttggcacctttgcttggaacccattgattgatagttacttattattgggcatggagcacgtcatctcaatggaggagatcctcgggcccttctgggagctgctaccaccgccagcgccagagccagagccagagcgagagcagcctccggtaaccggcatcgtcgtcggcagtgtcatagacgttgctgctgctggtcacggtcatggtggcggcgacatgatggatcagcagcacgccacagagtggacctttgagaggttactggaagaggaggctctgacgacaagcaca

SEQ ID NO: 28211 - DNA, 412 bp, Zea mays
  Clone ID: LIB3180-030-P2-M2-B2
tcgcattctcgcgttccgagatactgttgttctttcagggagatagatagattctgactgctcgccattggggctgccttggccgcgtgccgtccgtcgcttcgtcgagctgcgtgcggggcgctcctcgtcctcctcacgatggggggctggaaccgatcgcggtacgggacgggccaccgtgaccgctccgccggcgcttcgcgtactcctctgtctccgccggcgcctgattacggagacaagcaccagcaagtcccattatgggagagggaattctgccgccacgttggcaacatcacttgggagcagttctgtgaaaacaagcagtatgttggacaattccataaactcgagccttgggatgattcaacggcatttgattgtttccagaacgcaaaggcaaggttct

SEQ ID NO: 28212 - DNA, 160 bp, Zea mays
  Clone ID: LIB3180-030-P2-M2-B3
caaagcggcagtgcgtagagaggatcgtcgaacagaacagcatgaagatggtcatcgttctcgtcgtgtgcctggctctgtcagctgccagcgcctctgcaatgcagatgccctgcccctgcgcggggctgcagggcttgtacggcgcttgcgccggcct

SEQ ID NO: 28213 - DNA, 346 bp, Zea mays
  Clone ID: LIB3180-030-P2-M2-B4
ggtcaaggcgctgcgagccacaacatcacggccatcctggcggcgtacccggagttcaccgacttcagcgctgccctggtcagcaccggcgccgcggcggagatcgaccgccgcagcaccgtcaccgtcctcgccgtcgacaacgccgtcatggcgcggctaaaggcgcagaagctgcagctcgacgacctgcagcgcgtgatctacctccacgtcctcctggactacttcgacgccgccaagctaggcagcatccagggcggtttcgcccaggccgctagcctttaccaggcctccggcaaggcgcaggggagcgacgggatcggtaacatcaccgtgttccccg

SEQ ID NO: 28214 - DNA, 370 bp, Zea mays
  Clone ID: LIB3180-030-P2-M2-B5
tttcgtacaccaagcgaagcgcactagcaacgacctaacaacaatggctaccaagatattagccctccttgcgcttgttgccctttatgagagcgcaacaaatgcgttcattattccacaatgctcacttgctcctagtgccattattccacagttcctcccaccagttacttcaatgggcttcgaacacctagctgtgcaagccaacatgcaacaacaagcgcttgcggcgagcgttttacaacaaccaattgcccaattgcaacaacaatccttgccacatctaacaatacaagccatcacaacgcaacagcaacaacagttcctaccagcactgagccacctagccatggtgaaccctgccgcctac

SEQ ID NO: 28215 - DNA, 410 bp, Zea mays
  Clone ID: LIB3180-030-P2-M2-B6
cgcagcgcaaagaagatagaaaagcgatgttgcaggcacagttttctcagatgcgccctgctgtaccaatgacacccactctagccccgcgccttccaatgtaccctcctatggctcctcagcaactcttctatggacaagcgccacctgctatgataccccctcagccaggatttggtttccagcaacaacttgttccaggcatgaggcctgggggtcctcatatgccaaattattttgttccagttgtccaacaccaacagggccaacagggtccacgcccaggtattaggcgtggagctggagcccagggtcagcaacctgtgccaccatttcagcagcagattgttccaagaggacggatgtaccgttacccaactggtcgcaacatgcctgaagctccggcgatg

SEQ ID NO: 28216 - DNA, 406 bp, Zea mays
  Clone ID: LIB3180-030-P2-M2-B7
cctccgcctccgcctgcgccacagctgccgattcgaaagccctcgtcctgacccctcgcaaaaccctagctccaaccaccatgaagggcaaggccaacgcctccaagaaggatgagggcaggctccgggccggcggcggcggcgccggaaagcgcaagaaggccgccgcgagcggcaagcccaagcgccctccctccgccttcttcgtcttcatgtctgaattcaggcaggagtaccaggcgcagcaccctagcaacaagagcgttgcggccgtgagcaaggcagcaggggaaaagtggcgctctatgtcagagcaagagaagcaaccctatgtggaccaagctgggcagaagaagcaggactatgagaagactaaggcaaatattgagaaggagagcacaagctc

SEQ ID NO: 28217 - DNA, 382 bp, Zea mays
  unsure at all n locations
  Clone ID: LIB3180-030-P2-M2-B8
gttttatgaagtacatagctaccaaggcctcacctgattctggccagagtgacttggaagcaaattattggactcatcaaataaatgcctatctgacagcccttcacagagaaaagcatacattagatgtcaggtcttcaaaaacgacttcagtagccatatcatctctgataagctctgtagcatctgttttggtaatgcatccaaaacttggtacttctgcagcagaatctttggccatgcttggcacatcggacccaagattgggtatgccactttttgtagttatcctcttctacagcaagattctatgcagcagcggtaaattttcagcggaaatctnnctcagtttgctagagtcattgccatcacttgctataca

SEQ ID NO: 28218 - DNA, 410 bp, Zea mays
  Clone ID: LIB3180-030-P2-M2-B9
gctttatctactccagagcgcagaagaacccgatcgacaccatgagggtgttgctcgttgccctcgctctcctggctctcgctgcgagcgccacctccacgcatacaagcggcggctgcggctgccagccaccgccgccggttcatctaccgccgccggtgcatctgccacctccggttcacctgccacctccggtgcatctcccaccgccggtccatgtgccgccgccggttcatctgccgccgccaccatgccactaccctactcaaccgccccggcctcagcctcatccccagccacacccatgcccgtgccaacagccgcatccaagcccgtgccagctgcagggaacctgcggcgttggcagcaccccgatcctgggccagtgcgtcgagtttctgaggcatcag

SEQ ID NO: 28219 - DNA, 402 bp, Zea mays
  Clone ID: LIB3180-030-P2-M2-C1
gtggaaactgggctcctgaagcccggcatggtggtcacctttgcgcccacgggcctgacgacggaggtcaagtcggtggagatgcaccacgagacgatgcaggaggcactgcccggcgacaacgtcggcttcaacgtcaagaacgtggcggtcaaggacctgaagcgcggctacgtggcctccaactccaaggacgaccccgccaaggaggctgccagcttcaccgcgcaggtgatcatcatgaaccacccggggcagatcggcaacggctacgccccggtgctggactgccacacgtcccacatcgccgtgaagttctcggagctgctcaccaagattgaccggcggtcgggcaaggagctggagagcgcccccaagttcctcaagaacggtgacgccggc

SEQ ID NO: 28220 - DNA, 397 bp, Zea mays
  unsure at all n locations
  Clone ID: LIB3180-030-P2-M2-C10
gtctaaacctattcgacaccctaagatatcttctgccggagctaggaaggagcgtgctggtgcatcttgtggatccgggcctcggtatgcacatctttccagtagcttatggcctagtaaaatgggccctgaactacnctcaacgtctgcgagtcagaagatctatgggcagtccgggctgtttagcataatctcttcctattccgccatgaacaaccctgtattcaacaatgcctattctgattacaatgtgccccaaaggtcatatcatgggatgaatgcaactgctggactctcatttgttatggcaccattttctgtgtttgctttttgcccaaaaaagaaaggcttttcctagatttattatcgactttatgattggtggagtttatttttt

SEQ ID NO: 28221 - DNA, 420 bp, Zea mays
  unsure at all n locations
  Clone ID: LIB3180-030-P2-M2-C11
ccccggccggacccggccccgaattcccggtgtggacccacccttcttttttggacttttccaaaacggccaacggcggccttcttaagccggttgccgacaccagtaagccgcccgtaccaggtcccccgccgaccttcctccttcttccttttgccaacaggccactgggccggcccgggccgccctttcgggccctcaaccgacctgtgacctntnacctctgcggctccacttctccctccgaaagaccagcagccagtgcgagtgtgtgtggcatgcccgtcaagtgcggcaagtgcggcaacgcaagccttcttctccagggcgtcgtttgccaacgacaagcaccaccaggtgcttttgtgctaagatagcaatgcctatttcaaaagctccatatgatcatttgcaagcaac

SEQ ID NO: 28222 - DNA, 336 bp, Zea mays
  Clone ID: LIB3180-030-P2-M2-C12
ggtggatggacaatccaacagcaactttgtgcttgagcttgattttgagcccttcaatgcctcctttcctcgtccttccatgtcgaagtccatcggaaatggagtgcaattccttaaccgacacctgtcgtccaagttgttccaggacaaggagagtttgtaccccttgctgaacttcctcaaggctcataactacaagggcacgacgatgatgttgaatgacagaatccaaagccttcgtggtctccaatcatccctgagaaaggcagaggagtatctactgagtgttcctcaagacactccctactcggagttcaaccataggttccaagagct

SEQ ID NO: 28223 - DNA, 402 bp, Zea mays
  Clone ID: LIB3180-030-P2-M2-C2
ttgatggtgggaacatttggttaaaacttggcacctcaaggtgttgcaaccaccacaaatggggatagaaaatggtttcaaataggttgggccccattttttttttgaaggggtgggaaaaaacgtgggggaaccaaacttttaaaaagctatatctgggaaaggttaaatgaaaactacaaaatccagcccctcgatcctttgctttgaagattgggtattgcttactatcctcgcagtcacagcagtttttcaccatctaagaggctcaacccatccttatttctctgggatacactaagatactctctggtatctacagaaattgcttctcgtggtaggatgtcaagccactctgctgaatcgaagtcctgcttggagtctttgcgtggcgaacttaat

SEQ ID NO: 28224 - DNA, 408 bp, Zea mays
  unsure at all n locations
  Clone ID: LIB3180-030-P2-M2-C3
ttgcgcgctctcccgccggacgcgccgttgcccttccccgtccccgcgccgttccacccccaagcccccggccccggtgggaccgtcccggccacgcccccgaacccgacccctccgcaaccgttaacccccgccgngccgccttcctccttttcgacgcggccgccgcacccatgggagatctccgcgcgagcatggctagagtccttccccgacggacggccgcccaccgagcccgaggtcgacgcctacatcgacgtgcaccgccccgagctnccttccctcccccgctcccagctacaccagcgcctcctcgccctccgcggcgaccaggttctggatgcagaccagagcgcattcccgtacaggttccanngtactgatctatggaagcctgtgtaccagtgg

SEQ ID NO: 28225 - DNA, 403 bp, Zea mays
  Clone ID: LIB3180-030-P2-M2-C4
atggattcctacacggatatattattgccactggtcactggtatagtagtatactatgtgtgtgtgttgagcagatcatttctaaagcaagcaggattttatatatccgcttcttgttggcactagctaggatcttcttttgtgtgtaagggaagctgatctgagaatctcagatgaaggttcctgcaccaaacacccagatttgctgcgcgtcaagttaagctggtctgagaatctcagatgaagctggtctgagaaataacgaacaagtttcgaatgatggagcatcccagctgccattaaccattcctgtcgtgaacatggtcgcaattgcgctcaagacatgtcttgggctttaccttctgaagattttgagttaccgatcgtgcttacaagccacatg

SEQ ID NO: 28226 - DNA, 292 bp, Zea mays
  Clone ID: LIB3180-030-P2-M2-C5
tttcgtccttacctcgcctcgtctcctctgcgggagatctccaggggacgagcgcgttcgcgattttggccgcctccgccgccgtccgggaagatggcgggtctgggaaaggcgatgtacgcggtggggttctggatccgggagactggccaggccctcgaccgactgggctgccgtctgcagggcaagttctttttccacgagcagatttcaaggcatcgcaccatcatgaatatctttgacaaaacccctcatgtgcataaaaactcattttttgctccaagggcattcc

SEQ ID NO: 28227 - DNA, 283 bp, Zea mays
  Clone ID: LIB3180-030-P2-M2-C6
aaacctctcaaaccctagccgcctcctgcaagtttcagagctcaggaatctgcgccatggcgagtgagacggagaccttcgcatttcaggctgagatcaaccagctgctctcactcatcatcaacaccttctactccaacaaggagatcttcctccgcgagcttatctccaactcttccgatgcgctggacaagatcaggttcgagagtctcactgacaagagcaagctcgatgcgcagcctgagcttttcatccaccttgtcccagacaaggccacgaacac

SEQ ID NO: 28228 - DNA, 405 bp, Zea mays
  Clone ID: LIB3180-030-P2-M2-C7
ccaacatcaaatccctcccatctcttcccctccgccgccgtctctgctctccaagatcgcgatggcgtcagaaaagaagcagtcgaacccgatgcgggagatcaaggtgcagaagctcgtgctcaatatctccgttggagagagtggagatcgactcacccgcgccgccaaggtgttggagcagttgagtgggcagtctccggttttctccaaggcaaggtatactgtgaggtctttcggtattcgtcgtaatgagaagattgcatgctacgttacggtcaggggtgagaaggcaatgcagcttcttgagagtggcctcaaggtgaaggagtatgagcttttgaggaggaacttcagagatactggctgctttggttttgggattcaggagctcattgatcttgg

SEQ ID NO: 28229 - DNA, 393 bp, Zea mays
  Clone ID: LIB3180-030-P2-M2-C8
tcgcaacctcctctgcttccgagatctctccccacctcccggtccgctggcagatagcgggggccagagagatcgagatccggaggcgctagcgccacccatcagcgtctgcggcaatggcgggcacggtgacggtcccggggtcgtcgaaaccctccacgccgctgctcaaggacgagctcgacatcgtgatcccgacgatccgcaacctcgacttcctcgagatgtggaggcccttcttccagccctaccacctcatcatcgtgcaggacggcgacccgaccaagaccatcaaggtgcccgagggcttcgactacgagccttacaaccgtaacgacatcaaccgcattcttgggcccaaggccttctgcatatccttcaaggactccgcct

SEQ ID NO: 28230 - DNA, 409 bp, Zea mays
  Clone ID: LIB3180-030-P2-M2-C9
caacttgcaagtttcatcatccccgagaaaaggctgcaatggcaactcgagttcagctgaatgaactgggctacccactccgcctgaatgaaaaggaatgtgcttattatttaagaacagggcagtgcaagtttggaagcacatgtaagtttcaccatccacaaccatccactatgatggttgccgtacgtggctctgtttattcacctggacagtctgcaacttctcctggccatcatgcttaccagggggctgtaacaagctggcccttgtcgagatctgcttctttcattgcaagtccaaggtggccaggtcattcaagttatgcacaagttattgttcctcctgggcttgttcaggtcccagggtggagtccttatgctgcgcagattggttcttcatcctcgga

SEQ ID NO: 28231 - DNA, 392 bp, Zea mays
  Clone ID: LIB3180-030-P2-M2-D1
tccctcccaaagctcgccccgctcccagctagggtttcctcttcccatccacagccgccggggcgccgccgacgaggacagcgccgccacgatgttggagttgcgtctggtgcaggggagcctcctcaagaaggtcttggaggcgatccgcgagctggtcacggacgccaacttcgactgctccgggaccgggttctcgctgcaggccatggactcgagccacgtcgcgctcgtcgcgctgctccttcgcgccgagggcttcgagcactaccggtgcgaccgcaacctcttcatgggcatgaacctcaacaacatggccaagaagctccgctgcgctggcaacgaggacattatcaccatcaaggctgacgacggctccgacaccggcactt

SEQ ID NO: 28232 - DNA, 308 bp, Zea mays
  unsure at all n locations
  Clone ID: LIB3180-030-P2-M2-D10
ttcgtccctccccgactcaccccactgcccagccgcacgcgccgccgtgtgttcgcgctctctcccactgtgtctgtgacgactgggtaggctacagccgccgcccgtcgccaggtgccgatcccttcgccgacgaagagcatccaccaggctccggccaagggcgtgatggcggctgtagggagcttgcanccgggggtggagactctacatgtgcaggattacaaggacgcgcctccagccaaggctgtggcggccgcggtagatagcttgcagccggcgatggaaagcctacatttgcaggaatt

SEQ ID NO: 28233 - DNA, 272 bp, Zea mays
  unsure at all n locations
  Clone ID: LIB3180-030-P2-M2-D11
cttgcgccaagggaaacccttgtgttggtccagccgcccctcggcccgccggaccaatcccaccccatcccaacgctatccgctgccctcgctgcgcccccctcctcttccacctggtccgccaccttccccaatgcatgacatcccaccctaccccaccggccccgtcgccgttgaggaggaggcgtccccacccccgtccgnanaggcagcagggatctataccgggcatggagctggcgctcgccttcgcgaagccctggcctcgggcg

SEQ ID NO: 28234 - DNA, 419 bp, Zea mays
  Clone ID: LIB3180-030-P2-M2-D12
gtgaaggctacatctgatctgttgcttgtgcagtctgatctttacaccttggttgatggctttgtcatccgcaacccatccagagcgaatccagctaacccttcaattgagcttggacctgagttcaagaaggttgccaatttccttggtcggttcaagtccatccccagcatagttgagcttgacagcttgaaggtttctggtgatgtctggtttggctctggaattacactcaagggcaaggtgacaattatcgccaagcctggagtgaagttggagattccagatggagacgtacttgagaacaaggatgtcaatggccctgaggatctttaagcaatgtttatcatcaccagttttcccaaggacatgtcacaggaactgccaagcctaatcactcctactgagctctatatttt

SEQ ID NO: 28235 - DNA, 392 bp, Zea mays
  unsure at all n locations
  Clone ID: LIB3180-030-P2-M2-D3
ggaccacctggaggttaacagggcatacggcgatcccggcaggcatgcaattttgtacaatgcccctgtatctggggcaatactaagcgtatcgggatcctaggaagagcggtccgccatccttacaagtccaacacgagcgatgacgagcttgatgagctgagctccacttaccttatctccaacacctcatagacccgcttgcgaagctgaagcggatcggcaactcgaccacagcgaggtacaggcttctcatgaggtgtggaagctggatgaccagtaggacttgatcctatcaccaccatggttctcccctctgtatataggtttgnntttttgcatatgattccggctcatgtataagatttcagtctatttgttatgttatgtta

SEQ ID NO: 28236 - DNA, 370 bp, Zea mays
  Clone ID: LIB3180-030-P2-M2-D4
cacatatctactatactatactctaggaagcaaggacaccaccgccatggcagccaagatgcttgcattgttcgctctcctagctctttgtgcaagcgccactagtgcgacccatattccagggcacttgccaccagtcatgccattgggtaccatgaacccatgcatgcagtactgcatgatgcaacaggggcttgccagcttgatggcgtgtccgtccctgatgctgcagcaactgttggccttaccgcttcagacgatgccagtgatgatgccacagatgatgacgcctaacatgatgtcaccattgatgatgccgagcatgatgtcaccaatggtcttgccgagcatgatgtcgcaaatgatgatg

SEQ ID NO: 28237 - DNA, 161 bp, Zea mays
  Clone ID: LIB3180-030-P2-M2-D5
tcttctgttcccttccacgcgatcgaaaccggggcgcgaattaatcatgcgggggcagccctctccaggcgctccaccccgcgtcgaggacccccttcccgccccccgccttgtcttgttcgcgttcccctttgcccgcgtgtgcttcgtccggctgtttt

SEQ ID NO: 28238 - DNA, 410 bp, Zea mays
  Clone ID: LIB3180-030-P2-M2-D6
ccgctcccagctcgtgttccgcttcttgcagccgtcgccgcgaagcgctccagagaacttccgtcaacatggggaagacacgtggtatgggagccgggcgcaagctcaagacccaccgcaggaaccagcggtgggctgacaaggcatacaagaagagccatttgggcaatgagtggaagaaacccttcgctgggtcatcccatgccaagggcattgtcctggagaagattggtattgaggccaagcagcccaactccgctatccgtaagtgtgctcgtgttcagcttgttaagaatggcaagaagattgctgccttcgtgccaaatgacggttgtttgaactacattgaggaaaaagatgaggtcttgattgctggatttggtcgtaaggggcaccctgtgggagatatt

SEQ ID NO: 28239 - DNA, 371 bp, Zea mays
  Clone ID: LIB3180-030-P2-M2-D7
catcaatgataatgccaaacatgatgacagtgccacaatgttactctgattccatctcgcacattatacaacaacaacaattaccattcatgttcagccccacagccatggcgatctcacccatgtttttacagcagccctttgttggtgctgcattctagatataagcatttgtgttgtacccaataatgaagtcggcatgccatcgcatgcgactcattgtttaggaataaaacaagctaataatgacttttctctcaaaaaaaaaaaaaaaaaaaaaaaaaaaaaaaaaataaaaaaaaaaaaaaaaaaataaaaaaataaataaaaatattaaaaaatattaaaaataatttactaattatttaaaa

SEQ ID NO: 28240 - DNA, 333 bp, Zea mays
  unsure at all n locations
  Clone ID: LIB3180-030-P2-M2-D8
gaacttagaagggcaggcaggagaagcgacacaggaaactgacgtcgccttcggcggcctgctacttaaataaatcccctcgcctcgcctccggctgcctcttccctttttccttccgcgcaaatcactcaggtgccagttgcgcggcggagatcgcgacgaattccggacggcagggaggtggtcgttgcaactgctaagacgtgttagagccctaactgttctatccctttttttttgnnttttttccctgctttggtaaaataactagagcctagaccctatcccagggccccccttaaaaattgcttttatgggtaaccgtgcccttgg

SEQ ID NO: 28241 - DNA, 234 bp, Zea mays
  Clone ID: LIB3180-030-P2-M2-D9
ctcccctccacgcgatcgaaaccgaagcacgaattaatcatcccggttcagccctctccaggcgctccaccccgcgtcgcggacccccgacccgccccccgcctcgtcctgttcgcgtccccctttgcccgcgtgtgcgttggccggctggttccggatgagggggttgctgtcggtggaggccgctggcgcggcgttttcgtcggccttggccttggtgctcatcggcgccgt

SEQ ID NO: 28242 - DNA, 412 bp, Zea mays
  Clone ID: LIB3180-030-P2-M2-E1
gtttcagcaagatggaattcaacttatgaagggtgctagcgagtcagaattagatacaaagaggggcatctcacttgatgtttcaacaagatggaattcaacttatttaatgctgcgggatgccttgtactacaaggatgcttttgcaaggcttaagtcttcaaatcgtcatatgtatgtaaaaaattatccatctccggatgagtgggacatggcactaaaaatctttcaatgcttgaaaaaaggttatagtctcgctgaaattctctctggcacttcatatccaacagcaaacttgttctatagaggtttttgtgacataaaagtattgctagatgactggtgttctagtgatgatgccaccatcagtgaaatggcaattgccatgagtcaaaaaattgagaaatattgg

SEQ ID NO: 28243 - DNA, 320 bp, Zea mays
  Clone ID: LIB3180-030-P2-M2-E10
taaaaaaaaaaaaaaaaaaaaaaaaaaaaagaaaaaaaaaaaaaaaaaaaaaaaaggggcggccgttcgggaccaacgcgtccggggacgcgtgggaaaaactttatagttcgatgaatgggcagtttgccggggttttggaataattgggactttgtcttctttcgcttctgttggcgaaccattgtcttaatcgatttggggatttcgaagtctccttttattgccaaaagttcgcgaaaactaagtacttactccgtttgaaaatagtattagttttagctctaattttttatgtctaaatttaaatttataatgat

SEQ ID NO: 28244 - DNA, 406 bp, Zea mays
  Clone ID: LIB3180-030-P2-M2-E12
ggagcctctccttcccggtctcctccgcccgttgccttcgtcccctccatctccggctgcgacgccggcgagcccgacaccgcgaatcggatccgccgacaaggcgagagggaagagatggggctcacgttcaccaagctgttcagccggctgttcgccaagaaggagatgcggatcctgatggtgggactcgacgccgccggaaagaccaccatcctctacaagctgaagctcggcgagatcgtcaccaccatccccaccatcggattcaatgttgaaactgtggagtacaagaacatcagcttcactgtctgggatgtcgggggccaggacaagatcaggccactgtggaggcattacttccagaacacccaaggtctcatttttgttgtggacagcaatgata

SEQ ID NO: 28245 - DNA, 291 bp, Zea mays
  Clone ID: LIB3180-030-P2-M2-E3
ctcccccgttccgggaaccctagtgggtctatccaagaccacgcgaggccgttaacaaacgcccacccttttttcggccccccatcgcctacccgctgcctccgccgcggttagccatagatggattggtctccccggtgggaccctatagactggaaccaaatcgaggatccgaggccgctgccagcctggctttactacacggtggagtggtgtggaccatgtagggcgatcgcacctttagtatcaaagctttaccgccattatcccaagaatacccgtgtacaaagt

SEQ ID NO: 28246 - DNA, 90 bp, Zea mays
  Clone ID: LIB3180-030-P2-M2-E4
tcgttcttaggcgacaagcacccgccaggtacgcccatcctctggtggactccccccggtcctggtgtgcgaaacccagcacccaaaccc

SEQ ID NO: 28247 - DNA, 263 bp, Zea mays
  Clone ID: LIB3180-030-P2-M2-E5
gtagccacagccagaacaccagcagacagcagcatcagcagggaggaacacgatgagcggcgccggtccggatctgcagctgccaccggggttccggttccacccgacggacgaggagctggtgatgcactacctctgccgccgttgcgccggcctgcccatcgccgtccccatcatcgccgagatcgacctctacaagttcgacccatggcagctcccaaggatggcgctgtacggcgagaaggagtggtactttttatccc

SEQ ID NO: 28248 - DNA, 245 bp, Zea mays
  Clone ID: LIB3180-030-P2-M2-E6
gtaataatgtgtcaactagctagctagccagcggctatactacagcacatagtttcttcagtgggggacaccgccggcagcagcgtaggggcatggagtcggctgctgcaggccgcacatcgccgtcagttgctgcgctatctgcgccgccaacagccccccgatcctgggccagtgcgtctagttcctgaggcataaatgcatcccgacggcgacgccctactgtttgccttagtgccagtcta

SEQ ID NO: 28249 - DNA, 386 bp, Zea mays
  Clone ID: LIB3180-030-P2-M2-E7
aactcgcaacgttatcagggcaaaggtttaatttaaatgctcaaaacttaacattgttcacgtccactgccacttcaccgtaccaaattcctaggcaactttagcatcaaaactatgttttttgaagtacatagggagacccaacataacattcagaatcaacgaaatagagtggagatatccagagggcatcatatttatgcattttcggtcatagggtactcaaagaccacatctttcccacacagcctgcggtagaccgcagtgcaggtctccagcttgtattcagtgttgttcctctcctttgggtccaagaaaatcttgataatcttggaaccatccagacggtatctgacacgcttccccacaatcttagttgggtagac

SEQ ID NO: 28250 - DNA, 382 bp, Zea mays
  Clone ID: LIB3180-030-P2-M2-E9
catcacctccccttcgccgtgaaccctaaccccgcgcccctcgccccctccttctcgtcgtcatcgccgcccgcttttccgggcccccatcgcctcttctcttccacgagtggttcaagcatggtggtcgtgggctccgcggactccttcaacagcatcttttccaaggtgcaagatgaaaagctaccagctgtcttttactacacggcggtgtggtgtggaccatgtagggcgatcgcacctttagtatcaaagctgagcagccagtatcccaagataccggtgtacaaagttgacattgaattggaaggactgggaaacaaactccgtgatctaaacatatgttcagtgccgacgttccatttttatcacaaggggcaga

SEQ ID NO: 28251 - DNA, 410 bp, Zea mays
  Clone ID: LIB3180-030-P2-M2-F1
ctcgacttcatcgaatcaaaatgcactagcaattgtggacacattttcacagaacagcaccgttaacagcaacactcaagcagctgccccctttggtctcaatccaagttctgctattccaggatctcaggcatacaacactccaactcagcagcatttccagtcgcaacaggcgacgctgtatccgaacgggggtgctggaacgtcctatgatcaggcatcccagtttaataatgttaattcagggtggaatgatcaagctgccagccttccagcagagcaagcactgaattacgatgatcaaagtggaaaccttccgccacctccttgggaggctcagccagcggcaagcaacgaaatgccaaatggtgaattgggaggcgtgcaacctcttcctgggacagctgggc

SEQ ID NO: 28252 - DNA, 340 bp, Zea mays
  Clone ID: LIB3180-030-P2-M2-F10
aaccgaactcgcacctcgcacctcgcatcgtgttgtcgacacacctccagctccgaaaccctactccgccggcgatgtcgtcatccggcgccccggccccggcggcggcaatggccgttgacgacgcggaggacgaccagctcgcctccatgtccacggaggatatcatccgggcctcccgccttcttgacaacgagatccgtgtcctcaaggacgagttgcagcggacgaacctggagttggagtcgttcaaggagaagattaaggaaaaccaagagaaaattaagctcaacaagcagctgccctaccttgttggcaacatcgttgggatcttggaaat

SEQ ID NO: 28253 - DNA, 339 bp, Zea mays
  Clone ID: LIB3180-030-P2-M2-F11
acgatattcaaaatataaatatcctgaaggtgactggttgggtcgtgcaatatcaagaaaacttgattggtcttggtgtggatgaatcacttgcccaagtttgttctgaaagtggtgcattggatcccctcatgaacatgtatgttgagcgtatgcaggcaacaaccaagaaatggtacagcaacattttggaggctgacaaaacacaaccaccaaagagtacagaggatggaaaactatatacacctgcagcagtggatctattcagaatattgaccgagcaagttcagatagttagagacaacagcacagacgttatgctatatcgaattgcacttg

SEQ ID NO: 28254 - DNA, 169 bp, Zea mays
  Clone ID: LIB3180-030-P2-M2-F12
tctttttattcaaaatataaatatcctgaaggtggctggttgggtcgtgcagtatggagaaaacttgattggtcttggtgtggatgaatcacttgcccaagtttgttctgaaagtggtgcatcggatccccttaagaacatgtttgttgagcgtttgcaggcaataacc

SEQ ID NO: 28255 - DNA, 415 bp, Zea mays
  Clone ID: LIB3180-030-P2-M2-F2
caacttgcaacatagaaagcacaatagtgtaccaacaatggcagccaaaatattttgcctccttatgctccttggtatttctgcaagtgctgctacggcgaccattttcccgcaatgctcacaagctcctatagcttcccttcttcccccgtacctctcaccagcggtgtcttcggtatgtgaaaacccaattcttcaaccctacaggatccaacaggcaatcgcagctggcatcttacctttatcacccttgttcctccaacaatcatcagccctattacagcagttacctttggtgcatttattggcacaaaacatcagggcacaacaactacaacaacttgtgctagcaaaccttgctgcctactctcagcaacagcagtttcttccattcaaccaactagctgcattgaac

SEQ ID NO: 28256 - DNA, 267 bp, Zea mays
  Clone ID: LIB3180-030-P2-M2-F4
gaacggcgtgcacgacggcgccctggatttggaggaaggcagaggaggcggagtcgatggagcggggtgtgagagctcggagcaggacggagccggtcgtcgccccatgttctccgtgccgttcgtgcagaagatcctggcggaggcgttggggacctacttcctgatcttcgccgggtgcgcggcggtggcggtgaacctgcggacgggcggcacggtgacgttcccgggcatctgcgccgtgtggggcctggccgtgatggtgat

SEQ ID NO: 28257 - DNA, 310 bp, Zea mays
  Clone ID: LIB3180-030-P2-M2-F5
gtttgatcttctatcattgaatgatagctcatcttatgaatcgaagccaaccaatttacataattcatttatccatgcaaaaagaattgtagtttttggcagtttgttgagaaaggagatggagcctgacacatcaggggggataatgagaatgaaaagttatttagacagatcaccggccttggggagatttaggatcccagttgaagctgagaggctgagagataatgatcttgttcttgagcaatatctcttagctaattcacctggaatagctggattccggcttgattctttcaggtgtataaga

SEQ ID NO: 28258 - DNA, 376 bp, Zea mays
  unsure at all n locations
  Clone ID: LIB3180-030-P2-M2-F6
ataggaaacacaagaagaagactacgaaacccaaaacagagaagaaaaagttattatttttcaagaaagaagaaaatcaatcccctgcatatgctcttggtgaaattgatgaagctgctccaggagctgagaatgaaaaagctggtattgtaaatcaacaaaaattagaaaagaaatttggtcagtcttctgtctttgcaacatccacacttctcgaaaatggtggaaccttgaagagtgcaagtcctgcttctcttctgaaagaagctatacatgtcattagttgtggttatgaagacangactgattggggaaaagagattggctggatctatggatcagttacagaggatattctaactggtttcaagatgca

SEQ ID NO: 28259 - DNA, 355 bp, Zea mays
  Clone ID: LIB3180-030-P2-M2-F8
gacgacgacgacgacgacgacgcgagaagtcgaggcgccgctgcttgctaggaccgagcttcaggaagtctccaacggccccggcgccggcacggcctgccccgcgccgccacagggattgattgtgatcagatctattctgtagtggtcagcggctgagggtgaaccgaagatgagcgttgtgggattcgatctcggcaatgagagctgcattgtggcagtcgcgcggcagcgcggcatcgacgtggtcctcaacgatgagtccaaacgcgagacacccgccattgtctgcttcggggacaagcagcggttcatcggtacgggggtcgccttttcctaaccttgaaccccaaaa

SEQ ID NO: 28260 - DNA, 201 bp, Zea mays
  unsure at all n locations
  Clone ID: LIB3180-030-P2-M2-F9
gagccgcgcgccgccgaacccgccgtctgctccagcctacgggcacatgggagcacgacagccaatcgcaccccgacacggcggcaccggaggaaaccctccttcttggtcgtagcctccgtggcctccctcccctcaccccttccggtgttggattgagggtggagcgganatcctncatgntttgtattgntccctgga

SEQ ID NO: 28261 - DNA, 130 bp, Zea mays
  Clone ID: LIB3180-030-P2-M2-G1
ctccctttcttttctggggggcggggcgttcaaaaagtccggatgtacgtgcgcatcgggttttgggatcggattgcgccttctgcgacatagggagtataccgggcccttttggttctccaagggattg

SEQ ID NO: 28262 - DNA, 284 bp, Zea mays
  Clone ID: LIB3180-030-P2-M2-G10
atcggaaacccccaaccctagcctccgactcgagccgatcgaccccgatccgatctaatgttccccaccgtggacgacccctccgccgccggcgccatggtgtcggcctcctttcctgactccgacgcctacgggaacggcgacttcgacgacctcgacttttccgtggacccaaaccctaaccccgtgttcttctataccgccgcccccgcgttcgccggcgcgggcggggagcggcgcccactgttccagcgcctgtggacggacgaggaccagatcgtgat

SEQ ID NO: 28263 - DNA, 148 bp, Zea mays
  Clone ID: LIB3180-030-P2-M2-G11
gtccgttcggagaccgaggtcgttgccgttaaggagccgccgttgaaccaggcggggacttaattcaacgaagcttcgaccacccctccggcctcggctcaatgttgttagacttcttccctgacttcgacacctacggtaacgggga

SEQ ID NO: 28264 - DNA, 333 bp, Zea mays
  Clone ID: LIB3180-030-P2-M2-G12
gtggagcaagacgaggaggcgacagactccggacaagtggtgtggcagaggatggagaggacacatgcgagggagcgctgtaggcacgtggtttccatcatcatcgcgatgaggattgtcggcatgttcacaccgtgccgttgcagaacgttggagcctctcagaactctggaagctgcctaccatcgcgcaccctaagataggggcatatccgtgttagtcgcctgcacacatactgaatatgggcatatccaccatgtattcttctctcagttatgttggatgaggcttttattttgtcatttactgatctggtttgttttagctccatta

SEQ ID NO: 28265 - DNA, 382 bp, Zea mays
  Clone ID: LIB3180-030-P2-M2-G2
aacaaccacctcgcctgcgatctccgtagcctccgtcgcgtcgagcatcgatcatgtcggcctactgcggaaagtacaaggatgagctcatcaagaatgctgcctacattggcacccctggcaagggtatccttgctgctgatgagtccactggcaccattggcaagcgcctttccagcatcaatgtcgagaacgttgaggagaaccgccgtgccctccgtgagctcctattctgctgccctggtgctctccagtacatcagcggtgtgatcctcttcgaggagaccctgtaccagaagaccaaggatggcaagccttttgttgatgtcctcaaggagggaggcgtcctccctggcatcaaggttgacaagggcaccattga

SEQ ID NO: 28266 - DNA, 337 bp, Zea mays
  Clone ID: LIB3180-030-P2-M2-G3
ggcttgggtcggattggtttcggaaagtttggtctccagtgacccgagcactggagatgccctgtttggagcaaattccgatggcgaccggcgagaccgccgtggatcgtcgcgaggaccaccgcgacatggatttgtcaggggaggagcacgtgcggcccaaggcgcgtaagccgtacacaatcacaaagcggcgggagaggtggacggaggactagcacggtcagtttctggaggccctggagctgtacggtcatgcctggcgccgaatacaattgcacataggttctaagactgccgtacaaatccggagccacgcgcagaagttcttcacgaa

SEQ ID NO: 28267 - DNA, 348 bp, Zea mays
  unsure at all n locations
  Clone ID: LIB3180-030-P2-M2-G4
cccacccccagtcccccgcaggcgcaccaccgaaactgctccgcctccacgcccgctcgccctgaccacggngatggccgccggcgccctccgttcttccgggcgccggctcctgggccttgccccggcagcctcgtcggctctgtccgctggttcccggcccagcgccggggctgcgccgttcacgcgccccatngncgcgttctcaggtggcaacaatcctatctcatggaaactgaggcggttctacaagtcaattgaaaaacacttgcccgcaatatctggtccagagatagaatctacatttaaggatttgttggctgctagttggaatgaacttccagattc

SEQ ID NO: 28268 - DNA, 372 bp, Zea mays
  Clone ID: LIB3180-030-P2-M2-G6
gtcaaggtgaaggactccaaaacccttctctttggtgagaaggaggttgctgtgtttggctgcaggaaccctgaggagatcccgtggggttcggttggtgctgaatatgttgttgagtctactggtgttttcactgaccaggagaaggctgcagctcacttgaagggtggtgccaagaaggttgtcatctctgctcctagcaaggatgcccccatgtttgtcgttggtgtcaacgagaaggagtacaagtctgacattaacattgtctccaatgctagctgcacaaccaactgccttgctcctcttgctaaggtcatcaatgacaagttcggtatcgttgagggtctgatgaccactgtccatgccatcact

SEQ ID NO: 28269 - DNA, 410 bp, Zea mays
  Clone ID: LIB3180-030-P2-M2-G7
cctccctcgtcgtctcgccactcgcaacaccccaaaaacctcacgggctctcgacccctcgcgctcgcctcgtcgccacgccggcgtgaggggcgcccacccccgtgcctatataacgctgccggagcggaggtactcgtccctcttatcccgtcgcccagatctacttctgtttaacgccttcgtctccgcggcgtcagggcgatcccgccgaggtcagggtataagctggtatcatggcgtccagcgcagtagcaccaagatggttaaggggtaaggtgaaggctgtgacatctggggattgtcttgtaattatggggtgcacaaaggctgagatcgaacctgagaagtccatcaccttatcctaccttatggccccaaggctggctcgtcgtggtggagttgatgag

SEQ ID NO: 28270 - DNA, 330 bp, Zea mays
  unsure at all n locations
  Clone ID: LIB3180-030-P2-M2-G9
tcgcccgtcatcgantctcgtttcaaatccatccatcctcgtttcctccgtcccgcagcatctcaaccccatggccaagatcaagatcgggatcaatgggttcggcaggatcggaaggctggtggccagggtggccctgcagagtgacgatgtcgagctcgtcgccgtgaacgaccccttcatcagcaccgactacatgacctacatgttcaagtacgacactgtccacggacagtggaagcaccatgaagtcaaggtgaaggactccaaaacccttctctttggtgagaaggaggttgctgtgtttggctgcaggaaccctgaggagat

SEQ ID NO: 28271 - DNA, 119 bp, Zea mays
  Clone ID: LIB3180-030-P2-M2-H1
agaccattagttttatttactccagagggcagaaaaacccgttcgacaccatgggggtgttgctcgttgccttcgctttcctggctttcgctgcgagcgccaccttcacgcatacaagc

SEQ ID NO: 28272 - DNA, 218 bp, Zea mays
  Clone ID: LIB3180-030-P2-M2-H10
gttcgatttgagagccaccgattaacccatccatccacctcgccgccgccggagagtatggttgagcggcggtacaccgaggaggaggaggccctcgagatcaagtccctccgccgcataatcgccgcctacgccaactatcaagacgctgcagaaagggatgtcgagagatatgagcggtcattcaaaatgcttcctacagcgcacaagaaactttt

SEQ ID NO: 28273 - DNA, 278 bp, Zea mays
  unsure at all n locations
  Clone ID: LIB3180-030-P2-M2-H12
cggacgcgtgggagaaaaggggcaggaagaaatcgagcctcactcgatccatcgcctcgccgcagcacacacgaggccggcggcgccatggccatgaagctggacatgtccgcgctcgagaccaacttcgccaacctgaccgcctccgccggcgacgacacgtacttntccgccgaggcccccgacgtgccgtccatggtgctccccatctgcgacgacttcgacggcttccaggcggccaccaaggatatggtgaagaataagaaggggacgaccac

SEQ ID NO: 28274 - DNA, 401 bp, Zea mays
  Clone ID: LIB3180-030-P2-M2-H2
cagagataggcgtcttcgtactcgcctacctccgcggctcaaacctttcccccttctcccaattcccgccgccgctccatcccgtaacgcgacaccatgagggagtgcatttcgatccacatcggccaggccggtatccaggtcggaaacgcgtgctgggagctgtactgccttgagcatggcattcaggctgacggtcagatgcccggtgacaagaccattgggggaggtgatgatgctttcaacaccttcttcagtgagactggtgctgggaagcacgtgccccgtgctgtttttgttgaccttgaacccactgtcatcgatgaggtgagaactggcacctaccgccagctctttcaccctgagcagcttatcagtgggaaggaggatgcagccaacaa

SEQ ID NO: 28275 - DNA, 381 bp, Zea mays
  Clone ID: LIB3180-030-P2-M2-H3
tctagatcgcgagggccgcccttttttttttttgttttaaaaaatcctgggcaatgtatcaattattgaatcatcaacacataatagactcgacgtatagttcagacatacagtaatacaccaacatgttatattgttacacatattaagcatcatatttcaaatgtttccaacttatgagaagacaacagaccagctgatgactacaggaactcgataacatcatcgaatatgaattaccaattcaatgctcctttttagctcctcttggggtccctattcttccgtgatcgctttgctccccgggggtcatgtcgctcatcctcatctagcccactgttttctgactggcaatgcctcctccgcctgctggattgcttc

SEQ ID NO: 28276 - DNA, 272 bp, Zea mays
  unsure at all n locations
  Clone ID: LIB3180-030-P2-M2-H4
cggcgggtcccgcccgcgcgcccgccttgaagacttcactccaacccagcccgcccggctaaaaccctcccctgttctgacttctgatgttcgtcctnacagccaccaccagcaccaccacgggcaccttactttttcttcgatgccggccactccccttgcctaaaactgtaacacttgccacgcctcctgctttcctccccttctggattcggttccggtttttcggcttcggcttcggcttcggctttggattctccgtcttttcccaa

SEQ ID NO: 28277 - DNA, 395 bp, Zea mays
  unsure at all n locations
  Clone ID: LIB3180-030-P2-M2-H5
ccaacttctcatcatcagccaagtgtaaagagtgcgaagaagcagtagcaaaaggattccattctcgtgttcttggagtggtccatcgatcgagctccgtgaaagagagagagagagagcaagcaatggcgacagcagggaaggtgatcaagtgcagagccgccgtggcgtgggaggccggcaaaccgctgtccatcgaggaggtggaggtagcgccgccgcaggccatggaggtgcgtatcaagatcctntacaccgcgctctgccacaccgacgtttacttctgggaggccaaggggcaaaccccggtgttcccgaggatcttaggacacgaagcgggaggcatcgtggagagcgtcggagagggcgtgaccgagcttgcgccaggcgaccac

SEQ ID NO: 28278 - DNA, 109 bp, Zea mays
  Clone ID: LIB3180-030-P2-M2-H6
tttgcgcgcgcgtgctcggtgatccgggaagcgccgcgagatggccgggggcggaggctgcttttcctttcctaagcacgactactttattccttacccctttaaggac

SEQ ID NO: 28279 - DNA, 397 bp, Zea mays
  Clone ID: LIB3180-030-P2-M2-H7
tatttttataataaaggaagaaaaaaacggggggaaattaaacaaaaggggagggagcaataaaaataaaaaaaaaaatcagaattacaatgaccaaaaagaggaaagatcataaagaaaccaaaattaaaaataaaaaaaacaaaataacaaaaaaaaattaaaagaaaagaaaaaagacaacaaaaattaaaaaaaaaaaaattaaaaaaaaaaataaaaaaaataaatatggttaaaaaaaaaaatgatgaaaaataaaaactaaaaaaaataaaaaaaacaaaacaaaaaaaattaaaaaagataaaaaataaaaaataacaataagactaataaaaaaaataaaaaaaacaaaaaaaaaaatacaaaaaataataaaaaaataaatacaaaa

SEQ ID NO: 28280 - DNA, 394 bp, Zea mays
  Clone ID: LIB3180-030-P2-M2-H9
cttctccagcgtggcacagagctagggtttctcccacccgtcgccgccgccggctgcacccgccgtcgtccacggccggtccctccagctcccgccgcgcgcgctcccgccgttggacgctccagctcttgcacgcattctcggccgccgtcgcgcctgcacgccgctccagcttgcccgcgcgtgctcccctcgactgctctagcttctgcacgccgtcggtcaccaatcgtcgcctactacgactcggccttcaagcggcagcttcatccgcgacgtccgcgtcgccgtcttgcgccacgacctcacccgagcactctgcctactcccgaagccctcctccgcggcgcccgccccagcagttcctcctccgcagcgcccgccccatcagttc

SEQ ID NO: 28281 - DNA, 212 bp, Zea mays
  Clone ID: LIB3180-031-P2-M2-A1
taccaactgcgagatccaggacaccacccagatccacacccacatgtgctactccaacttcaacgacatcatccactcgatcatcgacatggacgcggacgtgatcaccattgagaactcgcggtccgacgagaagctgctctccgtgttccgcgagggcgtaaagtccggcgcggccttgggcccgggggtttacaacttccattccccaa

SEQ ID NO: 28282 - DNA, 137 bp, Zea mays
  Clone ID: LIB3180-031-P2-M2-A10
cccagtcgcccacgcagccggcccaagcccaaaaacctttctccatcctctactctcatccccacgatggccgccgccgccaccacgccgcactccctcctcctccagcgcgccgtgatcccggccgcgccgtctag

SEQ ID NO: 28283 - DNA, 332 bp, Zea mays
  Clone ID: LIB3180-031-P2-M2-A11
ctgggaaagggagccatagagtatgaagagtttctgaaaactggtgacccggagttcagttggaagccaccgaaggatgaatggcagagcatcgccctaggctacacttctgggactacttccagcccaaagggcgtcgtgttgcatcaccgcggtgcttatctcatggcactcagcgttgccttcgtgtgggggattgcctaagggtttgtatacctttggactctaacttttgtttattatattgattttaatcttcatttttagctcgttgttttttttttttatattttactcttttttttactaaattctgtttatattttttttat

SEQ ID NO: 28284 - DNA, 194 bp, Zea mays
  Clone ID: LIB3180-031-P2-M2-A2
atcagaacggggactcaatggacactgtgatcgggaggatattcaacaacatatcctctttaaaatccgcctacattcagctgcaggaagcccacaccccatatgaccctgacaagatccaggaagctgataaacttgtcatagaggagcttacgaggctttcagaactcaagcacgcttacagagaaaaacat

SEQ ID NO: 28285 - DNA, 145 bp, Zea mays
  Clone ID: LIB3180-031-P2-M2-A3
cttcggaggcaccggttaaatgggccgactttggccacaaggatagtttctctgaagggccctatgaatactgtgtaaggggggccaggtggctggagtgtgagggcttttttgagacaaacttcaggaggaagtttcttacatg

SEQ ID NO: 28286 - DNA, 417 bp, Zea mays
  Clone ID: LIB3180-031-P2-M2-A4
ctagtcccctgctccattctcagccgccgccaatcccttcccgtgctccgcaaccgctgagtgagaagaagagatggccggcaagggcgatggcccggctatcggcatcgatctcggcacgacgtactcttgcgtcggcgtgtggcagcacgaccgcgtcgagatcattgccaacgaccagggtaaccgcaccacgccctcgtacgtcgccttcaccgactccgagcgcctcatcggagatgcggccaagaaccaggtcgccatgaaccccatcaacaccgtctttgatgccaagcgtctcatcggcaggaggttcagtgatgcgtctgtccagagagatatcaagctgtggcccttcaaggtcatttctgggcctggtgagaagccaatgaatggtgtccagcacaagggtgagga

SEQ ID NO: 28287 - DNA, 325 bp, Zea mays
  Clone ID: LIB3180-031-P2-M2-A5
cttatacatccagccggcacggtatggttcatgatttgccacacagcagcaggcttcttgtttcctgtttagggagcagagaagctctctgccaagctgctaccatggagccagccttccatgcgcagagctcattactccagccaccgatgccgcacgagctctcgttcacggagcggacgacctccgtactcggttgcttgcagccgaactcggcgccctcgctgcaggcgagcaacaagctccctgctccacacccccccccagccatggcgtcctgctgtcctccatggcgcaggagatgccccaacgagctcccttccct

SEQ ID NO: 28288 - DNA, 106 bp, Zea mays
  Clone ID: LIB3180-031-P2-M2-A6
gtagtgctcattttgacggcacgcgggattacacttgctagaaatttcacagatgcagcctcaagcgtctcgccgagccctatccttaacgatgcgtttggggaaa

SEQ ID NO: 28289 - DNA, 130 bp, Zea mays
  Clone ID: LIB3180-031-P2-M2-A7
cacctcctcgcttccactccgctcgtctgacatctcgtcccgtcctttcgtttcgaagcctcgcgagccccgacgatggccaccgccgcggtgtcggtcgacgagaagctcgacaagcttcgcgccgagg

SEQ ID NO: 28290 - DNA, 129 bp, Zea mays
  Clone ID: LIB3180-031-P2-M2-A8
gttaattagtctctttgctgttaacttacaagtatgaagatcccgccgatggagaatcgagcagccccctttttttgttctatcaactatgctgtaatgctggctatgtatcggcaaaaacaattctat

SEQ ID NO: 28291 - DNA, 119 bp, Zea mays
  Clone ID: LIB3180-031-P2-M2-A9
tcggcagcagacacctccgccacctccaccctcgaatcgttccccaccatggcgtctcaagtatcctccgttttcgccgatctcatgcatgccctggtggaccccatcctttgtgtgac

SEQ ID NO: 28292 - DNA, 208 bp, Zea mays
  Clone ID: LIB3180-031-P2-M2-B1
ctcttctaagtacacgatctccctcttcctgtcagtagtaaagtgagagtgaggcaacaagcggcatacaagggataatgaggaaggtagctcccagcagcattacttccacaaagctcgtgcacgtaccttgaaccatggatcagcacctatgagcatggatttccatccacttcaacaaactcttcttcttgttggtaccaatgtt

SEQ ID NO: 28293 - DNA, 443 bp, Zea mays
  Clone ID: LIB3180-031-P2-M2-B10
aacatagaaagcacaatagtgtaccaacaatggcagccaaaatattttgcctccttatgctccttggtatttctgcaagtgctgctacggcgaccattttcccgcaatgctcacaagctcctatagcttcccttcttcccccgtacctctcaccagcggtgtcttcggtatgtgaaaacccaattcttcaaccctacaggatccaacaggcaatcgcagctggcatcttacctttatcacccttgttcctccaacaatcatcagccctattacagcagttacctttggtgcatttattggcacaaaacatcagggcacaacaactacaacaacttgtgctagcaaaccttgctgcctactctcaacaacagcagtttcttccattcaaccaactagctgcattgaactttgcttcttatttgcaacaacaacaactaccattt

SEQ ID NO: 28294 - DNA, 233 bp, Zea mays
  Clone ID: LIB3180-031-P2-M2-B12
gggaagaacaccggagtttgtttacagtgtgaacctaccggagaactcattcttgcagtaatggttgatcaattatcaaagaaaccagaaccgatagggaaggtttctttcccactgcacgatttgacagggcctgattctaagctctccttcgagaagtggtttgaactgaaagctcatggtgggcatgccgtttcacctcctgttagtctttgtgttgcatatttttgtac

SEQ ID NO: 28295 - DNA, 428 bp, Zea mays
  unsure at all n locations
  Clone ID: LIB3180-031-P2-M2-B2
aattataccgctaaaacaaaatataccacaaacatagactaagatagtatttatctcaattcagcatctaaaaatacaataaacttgataaaaaatataaaagtacctaattagaggcgatttggtccttccccgcctctaataacttcatcaacattagcacgtgaatttgaacctacacattgcaagttatatatttgtntaaaatgagagatacaacatgacaatataactaatgaatgcaaaaatttataagtgagcacaaaaatataccacttgaactttggagagggagctttttcatacgactcttcaattcttgaaaatggtataaaatattatcactttgaatgcttgcaaatatctctctctctctatatagcataccatgctatgattcaaccaatcattttccatcttatttctca

SEQ ID NO: 28296 - DNA, 438 bp, Zea mays
  unsure at all n locations
  Clone ID: LIB3180-031-P2-M2-B3
cccacgcgtccgcgtgaacccgccgccgacgcagcagcaggagacgcgccaaggagagcccgcaaggaggcgactatgagggccaagtggaagaagaagcgcatgaggaggctgaagaggaagcgccgaaagatgaggcagagatccaagtaggctgatggggattgtggattgtggtgtcggcatanttgtgttacgtttcttcgatgcgtgagttcatggagagatgtcacatcctagttcgtcgtcaccgtttgccatgggtccaatggctcgtcttggaaacctgcacttcagtaggccatctatcgtggtttctagctatatccagagttttgtgctaagacaaatcagtcagtcgttttgtgaacctattatgatggagctttatttgctgctaatatcgacctacctattaagtnattgcaatggtccgct

SEQ ID NO: 28297 - DNA, 384 bp, Zea mays
  Clone ID: LIB3180-031-P2-M2-B4
ggggacgccaaggtgagcttcggggagaacttttccccggcgcgggccaaggggtaccagttcgggatggtggcggtgttcgacagcgtggaggagctggacgccgtggaaggggacggcaaggtggaggaggccaaggccttggtcaggccgctgctggacgaggtgatggtcctggacttcgtcgtcggagatgctccaacgcccgcgagcctctgattacaggctgcagggtctcagtttcgggattctgagtgtgttgttgatgtcggaataatggatagatggactccctggtcctgcagctttttaacttgagatttgtgaaattgggaatgacagtgcattgatttaaaattgcttcccttgatatagatctgttcg

SEQ ID NO: 28298 - DNA, 127 bp, Zea mays
  Clone ID: LIB3180-031-P2-M2-B5
atttttttggagcagcgaatataatgtatcttcatcgtacttttacatgtgagtgtaatagcttatttcttgtggtaggaatacagctttgctgtgttttcgggaatgacatttgttgtgtaaggtt

SEQ ID NO: 28299 - DNA, 411 bp, Zea mays
  Clone ID: LIB3180-031-P2-M2-B6
aatcaatcgagaagtttaagatattcaacactaacaacttgggggtgaaccttaaagctatcaagagactcgtagaggctgaggcacttaagatggaaattattccaaaccccaaggaagttgatggtgtgaaagtccttcaactcgaaaccgcagctggtgcagctattcggttcttcgacaaagcgattggaattaatgttccccgctcaaggtttctcccagtgaaggctacatctgatctgttgcttgtgcagtctgatctttacaccttggttgatggctttgtcatccgcaacccatccagagcgaatccagctaacccttcaattgagcttggacctgagttcaagaaggttgccaatttccttagtcggttcaagtccatccccaacatagttgagcttgaca

SEQ ID NO: 28300 - DNA, 322 bp, Zea mays
  Clone ID: LIB3180-031-P2-M2-B7
tacgccacaatacagtccgaattccaggtaacccacgcgttcgattcaaaatcgagtcgggtactcgggtcgattttgacggggggggaactttataatctatcaaactttaaaaacaatccactaaaaaagaaattataaaaaccccaaggaaattgatatgtaaaactattaaatttaaacactaattgactaaatttttaaacattcacaaatcaatataattaatttatactattaataaatttttcaaattaaagataatatattaatataattataattaattttaatattttaaaaaatagattaattatttata

SEQ ID NO: 28301 - DNA, 311 bp, Zea mays
  Clone ID: LIB3180-031-P2-M2-B8
tcgaaggaatgcaaagcccgtgacgccacgcccgacacatgttcgacgttgtgcctgtccgccttccgcgagatggcaagccacggggtggcacctgacgttaaagactgcaacagggtgctccgtgtattgcgtgatgcggccaggtgggacgacatgtctgctgtgcatgccgagatgctccagtttgggattgagccaagtatttgcacatacaattctttgctggatttctttttgaaggttggttggtaagtctatattttctttgtcgctgtatgttgttgtattcctctttttttttgtttttt

SEQ ID NO: 28302 - DNA, 321 bp, Zea mays
  Clone ID: LIB3180-031-P2-M2-B9
ccctcctaagccaaaccccgaatcctccgtcgcccagcagccgccggtgacggcgacgctgggcaatggggactgaggtagcagccgtagtggacctccgggcgctgacacagtcggatctcgtggccctagctgccgcatcgccctacgccgtcgactcccgccggggccggcgccggcgccgcgatagcgagttcctctctcccccgaagatcgaccgcgccgttttcaacgagagcgcaagttcccgcaaacaaaccttttcccgtcgccgggtgggcaccaacatattccacaaactaacgcccaccaccaccgggg

SEQ ID NO: 28303 - DNA, 165 bp, Zea mays
  Clone ID: LIB3180-031-P2-M2-C1
tcgtattccaggcaggcaggccgccgaggagggcaggaagaccgaggacggagccgttcttgctttcattattctacctccttgctatttgtgcaaacgccacaagagcgacccatttatcagggctcttgctaccattcatgcaatagggtaccatgaacccaa

SEQ ID NO: 28304 - DNA, 84 bp, Zea mays
  Clone ID: LIB3180-031-P2-M2-C10
tctcggatgcgccagcgccgcctggtcaacagatttttgccctgcgctggagcgtccccacgctgtttgtactgaaagcttttt

SEQ ID NO: 28305 - DNA, 390 bp, Zea mays
  Clone ID: LIB3180-031-P2-M2-C11
atccatttgatcaggatgactggagcacttatgccaaactcactgatgagattggacagaaagtgcagattgtaggagatgatcttctcgttaccaaccccaccagggtcgccaaggccatcaatgagaagacctgcaatgctctcctcttgaaggtgaaccaaatcgggtctgtgaccgagagtatcgaagctgtcaggatgtccaagcgcgccggatggggagtgatggcaagccacaggagtggcgagacagaggacaccttcattgctgacctctcagttggcctgtctacgggccaaatcaagacgggagctccttgccggtctgagcgcctggccaaatacaaccagctgctcaagatcgaggaagaacttggtgattccgcgg

SEQ ID NO: 28306 - DNA, 380 bp, Zea mays
  Clone ID: LIB3180-031-P2-M2-C12
gccttttcgccttttcctccgccttctcgcgatggcgccgccgcgccgcgctctactcgtcctcgccgctctcctcctctccctctcccttggggccgcctccttccattccgacgagctcctcctcaacgatgacgaagagttcgagggcgtcgtcgcccgcccctccgccccctccccgccggcggccccggtggtctcctcctcccgccgcagatcagcggacgcgccgttgcccgggtcaggcgagtccaacgcagtgcagttcacgctcgagcacgaccttggcgacggcaagggcttcgtctaaactggaacctttttgggccgcctcatgaccttcgtccacggtacgccaacccttacttaaatttgctttt

SEQ ID NO: 28307 - DNA, 381 bp, Zea mays
  Clone ID: LIB3180-031-P2-M2-C2
cggacgcgtgggttcgtggtgggcgacaatatcgacaccgaccagatcatccccgccgagcacctcactctggtgccctccaagccggacgagtaccgcaagctcggttccttcgccttcgcggggctcccatccgcggcctacccgacgccgttcgtcgctccgggtgaggagtcctcccgctacgccatcattgtcggcggagccaacttcgggtgcggttcctctcgcgagcacgcgcccgtcgcgcttgggggcgctggcgcacgcgccattgttgcggagggctacgcgcgcatcttttttcgcaactccgtggccactggggaagtgtaccctctggagctcaaggacgttggggccctgaaggagtgcaagaca

SEQ ID NO: 28308 - DNA, 448 bp, Zea mays
  Clone ID: LIB3180-031-P2-M2-C3
cttcgtttttggcgattaatgccaaagggggagaaatattaagcccaaagcaaaaggaccgcaccaccaaacttcaaaatttttcgaaaatgatgatttatgtttgtcttttcaattggtatcttatgatagaaatttcttcaattgatatgatattttcaattggtatatttaaagatggaatttcaaaactagtatctaagtataagttccaattggtatctattaaaaccctcttgaaaactaagaggagaattttattcagggggagttttgtttagtcaaaggaaaagcatttgaaacagggggagaaatttcaaatcttgaaaatgctttgtgtaatcttattcatatacctttgactatttgcaaaagagtttgaaaatgattttccacaaggatctgcataaacataacaagtggtgctaatgtggtccaatatgttaaa

SEQ ID NO: 28309 - DNA, 193 bp, Zea mays
  Clone ID: LIB3180-031-P2-M2-C5
tcgggggagtagtcgacgcgccgtcactgaatcctcaaatcacgggtaggcggaattacgccactctggtgacttccggggagcaggggaacattttcctttaaccatgggccaggggaaaactcacatcaacattgggggcattgggcatgtcgactctggcaagtcgaccaccactgggcacctgatctac

SEQ ID NO: 28310 - DNA, 308 bp, Zea mays
  Clone ID: LIB3180-031-P2-M2-C6
ggggaagcggagcaaatcgagtggagcaagatccagacccctacggatgaggtggtggtgccctacgataccgtcgcgtcgcctcccgaagatctcgaggagacgaagaagctgctggataagctcgttgtgctcaagcttaacggagggctcgggacgaccatgggctgcactgggcccaagtctgtcattgaagtccgcaatgggttcacatttccttgaccttattgagattcaaattgagtcccttaacaagaagtttgggatgcattgtcccttttctttttgtgaactttttcaacacccat

SEQ ID NO: 28311 - DNA, 411 bp, Zea mays
  unsure at all n locations
  Clone ID: LIB3180-031-P2-M2-C8
ggaagaggaggagggcaggatgtcgcaccgtaagttcgagcacccgaggcacggctccctcggcttccttcccaggaagcgctcctcccgtcaccgcggcaaggtgaagtcattccctagggatgaccccaagaagccttgccatctcactgccttccttggctacaaggctggcatgactcacattgtccgtgaggttgagaagccaggatccaaactccataagaaggaaacttgtgaggctgttaccatcattgaaacccctcctcttgtcattgttgggctcgaggcatatgtgaagactccccgtggcctccgcacactcaacttctgttggncccaacattttaacgaaaaaattaggataagggtctacaagaactggtgcaagaacatgaagaaggcttttac

SEQ ID NO: 28312 - DNA, 378 bp, Zea mays
  Clone ID: LIB3180-031-P2-M2-D1
gttttccccctgctcaccacctgctggctgctgctacagtgctactgccattacgccaccacacgagcttgcgcggcgactcggcggcggtggacgaagcgggacgccatggactcccgccagggccagcagcccaactacaagatttatattaggatgatgaaaacagttctgcttgacgtgaagtccactgataccatagatcagattaagtctaagattggtgctttagaggggattgacaatagccagcaagagctcttttttgcttgaagtcatttggagaaggacaacagacttgctgattacaacatcatgacaaactcttgtgtcgacctttatgtaactgatgggatgcagatctctgtcagtttcccc

SEQ ID NO: 28313 - DNA, 330 bp, Zea mays
  unsure at all n locations
  Clone ID: LIB3180-031-P2-M2-D10
cacagagtttgtacttgctgatggagaggagacgagcagctagcatcagatgcaaggctaaaatgcttgtgttgccaaagaaatacttgtgtagggcttctacatgcaatgttgcatgatggttttgctcttgtaccatgccttatatgcacagctattgcagcagttgtgagctttccttgttaatatctattggatcgttccatagacttggttttgatatctgccgatgctgattgacctctctgtccaattgaaccggaagttgtgcagtntaataaaaaatattaatttattttataaataaatataaatataaaataattaatt

SEQ ID NO: 28314 - DNA, 390 bp, Zea mays
  Clone ID: LIB3180-031-P2-M2-D11
gaactttgctttgccttggctgatgagcatttcagagaggagccagatggtgatgggagttctgctgtccagctatatgcaaaggaaacgagcaagatgatgttggaagttctgaaaaaaggcccaaggactactgcagaactggaggcacctgtagctgacacacctcttgtgtctgctgatactgtactagatatatctggtggcaagcgtgcttttattgaggcagatgaagcaaaggaactgctgagtccacttaccaaaccaggaaattcatataaaagaatttgctttagcaacaggagctttggtattggtgctgctaatgttgctgggccaattcttggagcaagtaagaatcaactcacagaggttgatatctcaaatttt

SEQ ID NO: 28315 - DNA, 212 bp, Zea mays
  Clone ID: LIB3180-031-P2-M2-D12
gcgccattggccagctagagccaaccagaagagcttgcagttactgagagtgtgtgtgagagagaggatgggtggcagcggcagggctgctctgctgctggccctggtggtggtggccgagagcctggccgtggtgatccaggccgacgccgggtacggttacggcggtgtgtacaccctgacgccgccgttgttcacccctaccggttccc

SEQ ID NO: 28316 - DNA, 343 bp, Zea mays
  Clone ID: LIB3180-031-P2-M2-D2
ggcggtgggagatgattactttcgtggactcggctgccatggtacgggagtgacacaatcacacgagcttgcgcggctacttggtggtggcgtacgaatctggacgccttggactcccgccagggccagcagcccaactacatgatttatattaggatgatgaaaacagttctgcttgacgtgaattccactgataccatatatcagattaagtctaagattggtgctttataggggattgacattagccatcaagagcttttttttgttgtaagtcttttgtaaaaggacaacttacttgctgatttcaacttatttactaacttttgtgtctatcctttat

SEQ ID NO: 28317 - DNA, 183 bp, Zea mays
  Clone ID: LIB3180-031-P2-M2-D3
tcggttctccctctccccggctctccgccttgctgttccagtccccgcgcgcgagatcgccgccccgtgtggtccctagatcccgatggccttttgccgccgcaccctgctcaaggttataatcctggtcgatagttgatgttttcatttctttattttttagatttatttacatctgtattt

SEQ ID NO: 28318 - DNA, 171 bp, Zea mays
  Clone ID: LIB3180-031-P2-M2-D4
tcttttttcccccgacggccaccttttccagggggagtactccctggaggccgggcgctccgtcctcttcttttttttctctccttttcttttatttctattattaatcctttaattctcttactttattttttttctttttcactttttattatttctttaatttatatt

SEQ ID NO: 28319 - DNA, 425 bp, Zea mays
  Clone ID: LIB3180-031-P2-M2-D5
tcgttttgctctgggattcgtgtaaatgacgcagagaaggttgtgaagattggaggcattttgctgctctaaggtgagtggctatcgttttatggatctaccttctttttttttcttctttttttttattcttttttttaatttgcttaattttgttgaatcttttaccttacatcccttttgttgtttatatctatatcttttatatttctttatttattattttttcatttttttatttttttttattttttttatttttattttattatttcttttttttttgtttatttttttttttttttttgtattttgtattttgtttttttattcattttttattttttcatatttttttttattaattgttaatttctttatttttttttcttttttattattttttttttattttttataatttt

SEQ ID NO: 28320 - DNA, 356 bp, Zea mays
  Clone ID: LIB3180-031-P2-M2-D6
taaatgtacttgataatggtgccctcataccggcatgtgtttcctagaaataatcaatatattgattgagatttatctggatataaaaaaaaaaaaaaaaaaaaaaaaaaaaaaaaaaaaaaaaaaaaaaaaaaaaaaaaaaaaaaaaaaaaaaaaaaaaaaaaaaaaaaaaaaaaaaaaaaaaaaaaaaggggggggccgttttaaagaaccaaagtttacttccccgggcttgcaaggtaaaagtttttttatagggccacctaaattaaattaattggccgcggttttaaaacgtggtaactggaaaaacccggggtttaccaaattaattggcctggaaaaaaaaccccctt

SEQ ID NO: 28321 - DNA, 259 bp, Zea mays
  Clone ID: LIB3180-031-P2-M2-D7
ctcaataaccctagctaaaccccacgccgccgcggcgacctcctccgccggcaggatggacagcctcaggggagccaagttgccgggcgtgccgaagggcgggagtgcgctcgtgaaggtggcgctgctcggcggcgcggggctctacgccgtcctcaacagcttttacaacgtcgagggcggacaccgtgccatcgttttcatccgccttgaggggatcaaggacatggttgtccccgatagtacttacctgaggatc

SEQ ID NO: 28322 - DNA, 360 bp, Zea mays
  Clone ID: LIB3180-031-P2-M2-D8
tgatgatgtaaaaggagaagggttataccttttaaatcagctgacctgtcatctgacctgtaatgctgcaaatgatgctatgggtgataagatcgatgagcagtgtcctgtgatggaaggaaatttgtccgacaccaataaatttgttgattcaaatcctgttgtttcggaaaatgccatggagccaaatgagtgttacatcacaatggccatctttaggcatccatttctgagacgttggatattatcaaggtacaagaaattatgtgattcctgtaaacctgccgtggttctgaagggtcatcttgtttgaaagtttgagctttttgtcataaccttcccatgaaaaagttacactgg

SEQ ID NO: 28323 - DNA, 180 bp, Zea mays
  unsure at all n locations
  Clone ID: LIB3180-031-P2-M2-D9
tcgtggaggtattcaacttcactggtgctggaggagttgccttgtctatgtacaacaccnacgagtcaatccgagcttttgctgaggcttctatgacaactgcttatgagaagaaatggccactctaccttagcaccaaaaacacaatcctgaaaaaatatgatggcaggtttaaggaca

SEQ ID NO: 28324 - DNA, 405 bp, Zea mays
  Clone ID: LIB3180-031-P2-M2-E10
cctccgctcctcctctctctctctctctctccctctccgcggagtggagccggagtcgagaggcaggcagacgagacgaggaatgcttccttcttcccatgccgccgccgtccctgttcttctcctccctccctaattccagtgctctcacgtaccagatctgaggccgcggcggagcgtgacgacgacgaagtcggtcaggatgagccgcgaggataccctgaaagtgcaggtgagttcttctgtttgcctgtcattttagtcaatcaggcagggctggccgctgatcccggttcgcgctcaccctgcatgccatgtcttctcctgcggcgtttttctgtctgggcgcacagaccctcgagctcaaggtgaacatccactgggacggctgccttaaaaaagtca

SEQ ID NO: 28325 - DNA, 146 bp, Zea mays
  Clone ID: LIB3180-031-P2-M2-E11
ggttgccagccggcggttgcttcactcgctcgctgcagccgcgcggcgatgacggccaccgccagctgcttctccagccccgtcgcgtgggcgcggcctttcgccggcccctcaggtgcgagtgcggccttgctcgtggcccggtt

SEQ ID NO: 28326 - DNA, 340 bp, Zea mays
  Clone ID: LIB3180-031-P2-M2-E12
atcagcaggtgctcccctggcgtcggtgatcatctccaccatcctctccttcatctggaaatcccccagcatcagtgttattggcatcctccccaggggagtgaaccctccttcggcgaacatgctcagcttcagcggctcctatgtggcgctgacgatcaaaaccgggatcatgacaggcatcctgtccttaacagaagggatcgcagtgggcaggaccttcgcgtccatcaacaactaccaggtggacgggaacaaggagatgatggcgatcgggctgatgaacatggcgggctcctgcgccttctgctacgtgacgacggggtccttctcccggtcg

SEQ ID NO: 28327 - DNA, 217 bp, Zea mays
  unsure at all n locations
  Clone ID: LIB3180-031-P2-M2-E2
cctctttttccttccaccaatggaagctctcacagcccgctcctccgtactctcgccgccggggattgccggagacacctcgccctcccttcccctgcccctccgccgagcctccgccgcgtttcttgggcctcgcaggagcccctccgccctcgccatctccacgcgctggctgcgcgctccgcctngacgcggaggccgcctgctcgcgggggaa

SEQ ID NO: 28328 - DNA, 272 bp, Zea mays
  Clone ID: LIB3180-031-P2-M2-E5
tcgttgagaccaactagcaccatagaaagcacaatagtgtaccaacaatggcagccaaaatattttgcttccttatgctccttggtctttctgcaagtgttgctaccgcaaccattttcccacattgcttacaagctcctatagcttcctttcttccctcataccttttaccagcggtgtttttatttgttggaaaacccatattgtttttacctacagtgtctcactaggttttttttaaattggttattttacctttttttcactttttg

SEQ ID NO: 28329 - DNA, 377 bp, Zea mays
  Clone ID: LIB3180-031-P2-M2-E6
aaaaccctcctccagtgctcttttcttctagccgccgccgcaaccgcttgctagcgctctgcgctctcatcctcgcgtccgtggaaggtcgtctcgacatggcctccgagacggagacgttcgccttccaggcggagatcaaccagctgctatcgctcatcatcaacaccttctactccaacaaggagatcttccttagggagctcatttcaaactcctccgatgccttggataagatcaggttcgagagtttgacggacaagagcaagctggatgcccagccggagctgttcatccacatcgtccctgacaaggccaacaatactctgacaatcattgacagtggcattgttttgaccaagtcagaccttgtgaac

SEQ ID NO: 28330 - DNA, 54 bp, Zea mays
  Clone ID: LIB3180-031-P2-M2-E7
gcggatccatcccgggtcccgatccggggcctcttctactagtacggaggctag

SEQ ID NO: 28331 - DNA, 203 bp, Zea mays
  Clone ID: LIB3180-031-P2-M2-E9
atcgccttctccctgttgagatttcagagatggcgccgatcagctgcccggtggagtgagctggtttctttgtttttttattattagggcggattttttttttgtaagtgacttgtttttgtgttgttttattttatttttttgtttattatattttttttttattttttatttttatgattttttttatttttttttaattt

SEQ ID NO: 28332 - DNA, 359 bp, Zea mays
  Clone ID: LIB3180-031-P2-M2-F10
acctgtttcgctgctcgcccgatctcgcgctgccggcagcgatctgagatcgagcgaagctaagctttttcatcgagatggtgcttgtactgcatgctaacagtggtaacaaaaatgcattcaaaacactaattgccgcagaatacagcggtgtcaaggttgagttggtgaaggactttcaaatgggtgtctccaacaaaactccagagttcctcaagatgaaccctattgggaagattcctgtcctggagactcctgatgggcctgtttttgagagcaatgcaattgcaagatatgttactcgcttgaaggctgataacccactttatggaacttcactgattgattatgcccatatt

SEQ ID NO: 28333 - DNA, 248 bp, Zea mays
  unsure at all n locations
  Clone ID: LIB3180-031-P2-M2-F11
gttccccccaaccctcaccgccatggcgaccaccgaggactccgccgccgcggtcaatgcccgactcctgttcgccctccttgagtcccagcagcaggtactctctgactgccacggggcctggtcgagcgccctcgcacactttgcctcgcgcgaggaggacctagcctcccgctccgttgcactcgacgaagccctagccngccgcgacgtttccacttccgagactttggcagcgctcgaggccc

SEQ ID NO: 28334 - DNA, 208 bp, Zea mays
  Clone ID: LIB3180-031-P2-M2-F2
tttattttgccgatcagttcgcgccaaatgctaaacaaagttcaaaagcgctgtcttcattgcctaccaagatattatccctccttgcgcttcttgcgctttttttgagcccgaaagactaattgaatatgccctggttcccatgattgctaggggtgttttgcttggagcagaccagcctgttattttgcacatgcttgacattccg

SEQ ID NO: 28335 - DNA, 239 bp, Zea mays
  unsure at all n locations
  Clone ID: LIB3180-031-P2-M2-F3
gctggatcttgcttctggcctcggagggaagatcaacaaggtggaagtcaagtcgnccttctatgantatgagaaatatcatggatactatggagggatggaggaagccaggttgtccaacttttcttttttgttgttttaaatacttttgatcttgtcaattactttttatattttggtttggttatattttttcaatttttttattttctgttgtttttttgaatattctttatttt

SEQ ID NO: 28336 - DNA, 268 bp, Zea mays
  Clone ID: LIB3180-031-P2-M2-F4
gccaggtcttccggcttttctcctgacgcggcgcccatccgatgcctgacgccgcggtctcctggtccttttccttgtcggtttcgttgctgtctccgccggagtgaacccttcttacggatacttgctctttgtcggtgggtcattatcttcgctggttattatgtttgttgtctttttctggtatttgtgtttcttttgtatttttgggtcttttgttttaattttatttgtttattttgtttattttgttttggttcgggaacat

SEQ ID NO: 28337 - DNA, 214 bp, Zea mays
  Clone ID: LIB3180-031-P2-M2-F5
tcggtcgccgcaagccgtccgccttgcccttcacgaaggcttggtcctcctggttgtatctccactccccccttcacagatccgttcctccagctagggttagcgttcctctgcagcgatggcgatcaagcggaccaaggcggagaagaagatcgcgtactacatgaagctgttcatcctggtcgatgagttcaccaagttactcaatttcctt

SEQ ID NO: 28338 - DNA, 203 bp, Zea mays
  Clone ID: LIB3180-031-P2-M2-F7
tcgcgcctccgacgacttctacccgcgcgacccggcttcgcacaccgtccacgtcgcctccgtcgcgttcaacaccgtcttcctcggtgagttcatgcatcccgtttgggacttgttccatagcttgcttccggctgtttggttttccttctgttcgtgtgttgtcttatattctttttttttcttattttttatcatttttt

SEQ ID NO: 28339 - DNA, 342 bp, Zea mays
  unsure at all n locations
  Clone ID: LIB3180-031-P2-M2-F8
caaagccactcccaaacccccgcttccagaaccttctcgaagctccccgccgcctcctccactcgcaccgatggcgaaggaaccaatgcgcgtgctcgtcactggcgccgcaggacaaattggatatgccctggttcccatgattgctaggggtgttatgcttggtgcagaccagcctgttattctgcacatgcttgacattccgccagcagctgaagcccttaatggtgttaagatggggttggttgatgctgcgtttcctcttctgaaggcagttgttgctacaactgatggtgtggaagcctgcactggggtcaattgaggccgtcaaggtntggtggt

SEQ ID NO: 28340 - DNA, 406 bp, Zea mays
  Clone ID: LIB3180-031-P2-M2-F9
ctgaaaacccgccgccgcccagccgcaggaaacaggaggaagatgccggcggggcacgggcttcggtcacggacccgcgacctgttcgcgcggccgttccgcaagaagggttacatcccgctcaccacgtacctgcgcacctacaagatcggcgactacgtcgacgtcaaggtgaacggcgccgtgcacaagggcatgccgcacaagttctaccacggccgcaccggtcgcgtctggaacgtcaccaagcgcgccatcggcgttgagatcaacaagcaggttaatggccgcatcatcaggaagcgtatccatgtccgtgtggagcatgtgcagccctcccgttgcacagaggagttccgcttgaggaaagccaagaacgatcagctcaaggttggtgccaaagacc

SEQ ID NO: 28341 - DNA, 207 bp, Zea mays
  Clone ID: LIB3180-031-P2-M2-G1
gtgcactacctaagggagatgcgcatcgcgcacttcgtggtgaaggagccgagggtgatctgaccccactgctcggtcgattcttatgatttgtctaactgccactatctattcttcatcggccaccttacttcttttcctgtgccggtcactttcttaatttaaaactgtttcacttgccacgctttttgttttcctacctttttg

SEQ ID NO: 28342 - DNA, 338 bp, Zea mays
  unsure at all n locations
  Clone ID: LIB3180-031-P2-M2-G10
acagaatggaagatgaggatttggtttctgctggtttctcaaaggatgcttatgtactctgcaaaattttcaagaaaagtggccttggtccaagaatcggagagcaatatggggctccatttaatgaagacgaatgggataatgcagaagtcgaaacttctctgtttcctttgacttgttcagaagtgaatccaacagagggacaacgtgctcagcctactgtcctggctggggctcttctggaacccgaaccacctctacataattaatnttttacatgtgctggagaggaatcatcatttggtcttgccactgctgaggacttaacttttatccat

SEQ ID NO: 28343 - DNA, 287 bp, Zea mays
  unsure at all n locations
  Clone ID: LIB3180-031-P2-M2-G11
gtcggatcgaagatcattgaagttgacggcagtttgagagaggatggtgctcttcttaatggtttccaaacgctgcttggtttcttgatcgtttttgtgttcccccccccccctcctcccgtttgttttgttttgttattttaatttttttattttattttatttatttttttttattatcatatccttttaattttttttatttcaatgttcattctttttgaattagtttaaatttaattttttctttaccctaatttaagattaatatgaaataaaaanaaaat

SEQ ID NO: 28344 - DNA, 501 bp, Zea mays
  Clone ID: LIB3180-031-P2-M2-G12
tgtcaagaccagccaccgtctcggggtgcgccccgtcattgaaatgggcgcgaatctttacaccaaaaacgcccttcattttagctccacaatcggtgtaaatagcaaatttccccttttttttttttttttttttcccccccccccccacgcagaaatatataaaatatatttttatacttttctatataatttatatagtacaaattttatatttattttttttttttattttttcttcccctcttttttttcccgattataatgaaaaaaaaagaccccactttattattctgccccccccttttttttttttttccctcgtttttttttttaaataattttaataaataagaaaaatattaataatatttatagtatattatttacgattcatatttaaaattcatatattatattttatataaaataattattaataaaatttaattaaatataaaataatataattaattattcccccccccacccccccttttt

SEQ ID NO: 28345 - DNA, 116 bp, Zea mays
  Clone ID: LIB3180-031-P2-M2-G2
gtaccagaagagcacggagctgctcatccggaagctcccctcccagggcctcgcacgtgagatcgcccaggacttcaagacggtcctggggttccagttctaggccgtggtggggc

SEQ ID NO: 28346 - DNA, 366 bp, Zea mays
  Clone ID: LIB3180-031-P2-M2-G4
gtcgaagactaatacttgatggcctaaagagtctgttgaaggggtctccgaacatgaatacgctggttggtttaggtgctttgtcatcctttgcagtcagctcaattgcagccttcattccgaagctggggtggaagacattttttgaggaaccagttatgttgatagcttttgttcttctagggaagaatctggagcagagggcaaaacttaaagctaccagtgatatgactggactgcttagtattcttccatctaaagcacgcctaatggtggataatgatgctgagaaatcatcattgattgaagtcccatgtgatactctagctgttggggactatgttgttgagctacctggggatcaca

SEQ ID NO: 28347 - DNA, 177 bp, Zea mays
  Clone ID: LIB3180-031-P2-M2-G5
tcgttccaacatacagctaactggcgagccgtggacgctcgtccagctttggtggcctactaacgatggcttctttttctttcaatgtcatcttggtccaaaaattgaaaagcattattgatttcaatttaatgaaaataaattatattaaagaaaaaagaaacttattaggtcctt

SEQ ID NO: 28348 - DNA, 176 bp, Zea mays
  Clone ID: LIB3180-031-P2-M2-G8
cccgtccggcctttgcgtcacccggcggtttataccctagtgcccatgcgatcttcttttccgctccgccgccgtcgatggagttctggggtctcgaggtcaaacctggatccactgtctagtgtgagcctggacatggctttttcctgcacgttttccattctgtccttgttgaa

SEQ ID NO: 28349 - DNA, 405 bp, Zea mays
  Clone ID: LIB3180-031-P2-M2-G9
cttatttgcaacaacaacaactaccattcagccagctatctgctgcctacccccagcaatttcttccattcaaccaactgacagctttgaactctcctgcttatttacagcagcaacaactactaccattcagccagctagctggtgtgagccctgctaccttcttgacacaaccacaattgttgccgttctaccagcacgctgcgcctaacgctggcaccctcttacaactgcaacaattgctgccattcaaccaacttgctttgacaaacccaacagcattctaccaacaacccatcattggtggtgccctcttttagatttcttatgagttatagttcaataataaagttttttggctgatgtttgaggcttcccagaaataagaaagtacatttctagatt

SEQ ID NO: 28350 - DNA, 353 bp, Zea mays
  Clone ID: LIB3180-031-P2-M2-H1
aagcaatctaataaagattcatttcctcccagctttactgtgcccctcacaatgaagtctacacttcgctatggtgagaatcctcatcaaaaggctgccttttatggtgacaggagtctttctctagtaaatgctggcggtattgcaacagcaattcagcaccatggaaaggaaatgtcctacaacaactatctggacgcggacgctgcgtggaactgcgtctcggagtttgagagcccgacttgcggtcggggttaagcacacaaatccgtgtggcgtagcgtctcggcacgacatcctggaagcgtacaggttagctgtgagggcagaccccgtgagcgcgttcggaggca

SEQ ID NO: 28351 - DNA, 307 bp, Zea mays
  unsure at all n locations
  Clone ID: LIB3180-031-P2-M2-H4
gcttcttccaaagctccaactacgacgagaaccgccactcctcgaaatctccaaggattttttgcggcgaacccgtacgtttcctatcgctgttttcgcttgttcgcgggccgcncaaaccaattcatccccttccccccatccgccccttggatttgcagcttcgtgacgtgacccattgggagaggcctcgcctgctttcgccatggtcgttatcgagtggataggtcacttgttccccctttttttttttccctcccccccccttccctttttcccccccttttttttttttttttttattttg

SEQ ID NO: 28352 - DNA, 236 bp, Zea mays
  unsure at all n locations
  Clone ID: LIB3180-031-P2-M2-H5
gcttcttcttccttagcgccttcctcttgtacggagatccacatttcctgtgctgctagattcttctagtgtctttctctagtatctgatcacctgcttgctgtctatcctatattctgtctcaaatcatagtttgtgttggagtgaattgagtgtgagttcgncctcgagattgagtgctgttaacaattggtttcagaggagtcgattctcggttagctccaatgcatcccgtt

SEQ ID NO: 28353 - DNA, 276 bp, Zea mays
  Clone ID: LIB3180-031-P2-M2-H6
tatatctcctaccccccccgcttcgggttcggtttcgagaggttctccggggttcgttttcgaaccggaaccactattgaattcatccgattattattaaaaaaagccccggatacataaatgtgaaaaccgttgaagggtgtatttacagcttttagcctttagctcgtccttgccccaacccaagtttaaataatactcttacaaaaaaaggcttgaaaagctctttatttattttcctcctccatttccatttaacccttttactaactcctt

SEQ ID NO: 28354 - DNA, 169 bp, Zea mays
  Clone ID: LIB3180-031-P2-M2-H7
gtcgcgcgtgtctcctctctcgtcgtatgtcataaacgtgtgcaccggtgccgcgcgcacgcagggaggatgcaccaccatgacaagggcggcggcggcctggcggcggtggcgctcgcgcacgcccttgtgctcgtggtcgccgaggggtgcgccttcaacatttccg

SEQ ID NO: 28355 - DNA, 241 bp, Zea mays
  Clone ID: LIB3180-031-P2-M2-H8
tctttctccataacccgaggcttccaggcctgggagccatctccaccagcgtggtgtcctcctttcctcccttttcccactcctaccctctcagctccgcctccactgtatcttcctccattcatagcctattcttgctcttctttttctagtccataattttacttccaatcttttttcttttttttttatctttttattttttacttctaatattattttattttattcttatttcttt

SEQ ID NO: 28356 - DNA, 209 bp, Zea mays
  Clone ID: LIB3180-031-P2-M2-H9
tcgcccacgcgtccggcgggaccggagcctggccgctcgcgttcggtggaatcgccttcccgtcgacaccgagcgagggaagcgaggccgtttctgatgctccagtccctttcataattcctcggatgccgtactaaattaataaaccatttgcttctacaagggaggtacttgtccaggttacacatttaatgccatcctacaagata

SEQ ID NO: 28357 - DNA, 247 bp, Zea mays
  Clone ID: LIB3180-032-P2-M2-A1
cgtttcaaatccatccatcctcgtttcctccgtcccgcagcatctcaaccccatggccaagatcaagatcgggatcaatgggttcggcaggatcggaaggctggtggccagggtggccctgcagagtgacgatgtcgagctcgtcgccgtgaacgaccccttcatcagcaccgactacatgacctacatgttcaagtacgacactgtgcacggacagtggaagcaccatgaagtcaaggtgaaggac

SEQ ID NO: 28358 - DNA, 154 bp, Zea mays
  Clone ID: LIB3180-032-P2-M2-A10
tcgtccggggatacagttcctcaccgacgcgtgcgttgtgctcttgaccaagcagatcccccacatacttagttagcccttggtcatccatgtattggccgtcgtattctcgaacaacggaggctgtggatattgggtcgctgattggatctgc

SEQ ID NO: 28359 - DNA, 275 bp, Zea mays
  unsure at all n locations
  Clone ID: LIB3180-032-P2-M2-A11
tcggccagcgggtaccctttcgccgttatgggttttttctaggggtggggtggtgnttttaatatattttttatatttttatttattatcttatattttttttatattatttatttttctttaatttattattattttttttttatatatttatttattttatttttttttataatatttatttttttatatatttataattgtttttttattatttcttttatttaattattcttttttttttttttattttatattttttatttttttagctt

SEQ ID NO: 28360 - DNA, 271 bp, Zea mays
  Clone ID: LIB3180-032-P2-M2-A12
tcgggaaagggaaggaagcatgttcgggcaccaccacggccacggcgggcaccaccaggccccgccgccgcacgagcagacgctgttcaggatcttttgccgtgctgactaggcttactgttttatcgtgcgttacgatcttctgttttcttttttcttattaattttttatttttgtgtctatttttgtttcatttttttttttttttattttatattttattgttttttttattttcttttctatattgtttattttttttacattgtt

SEQ ID NO: 28361 - DNA, 269 bp, Zea mays
  Clone ID: LIB3180-032-P2-M2-A2
gcgaggtggaggagaacatggcggcgtggctggttgccaagaacaccctcaagatcatgcccttaaagctcccgtccgtgggtccattatgattgccgtgtgcgcatgaaggctttgacgtttctagtgatcatgtcgtctttctgatcttggtatcttttggtataggtcttgttgaaggtgatttttttttattctctgtttttaatattgttatttttcgttcttcatttattaggctaagttctacctcatttttgttttttttt

SEQ ID NO: 28362 - DNA, 157 bp, Zea mays
  Clone ID: LIB3180-032-P2-M2-A3
gtgaggcaacctactgcgcgccgacctcgaggcggcactggcgcgcatctccgcggaagcgtgtggcggaagcgaaggtggcgagggggtcgtggataaggaggaccagaggtggagggaagcgcttgacaggaaccgagacatcgctgatgcactg

SEQ ID NO: 28363 - DNA, 347 bp, Zea mays
  Clone ID: LIB3180-032-P2-M2-A4
ctcgctcccgcgcacttgcccttgagttttgagaactcgcctccgtgacctagcaattccgccgcattctttgctagccctcggtcatccatgtataggccgccgcatccccgtacaacggaggctggggatattgggtcgctgattggatctgcagagaggcttcttccttcccagtttgtgccaggacgcctggaacaagagccaggtagaggtagggacgaggtcgactggatgccagacgatgtgtccaattctactccatttcacggttgttggacaaatatggggggcggtttcctgaggaggaggaagggggagagtatttatactttttttttttacta

SEQ ID NO: 28364 - DNA, 348 bp, Zea mays
  Clone ID: LIB3180-032-P2-M2-A5
ctcgtctctcagatcgggaggcgaaaccaaggcatacatatacatatttgtagtggtaccatcataacaagtaaagatggtgaagttcacggctgaagagctccgtgccatcatggacaaaaagaacaacattcgtaatatgtctgttattgctcatgtggaccatggcaagtctacacttacagattcccttgtggcagctgctgggattattgcccaggaagttgctgatgatgttctcatgactgatactcgtgcagatgaagtcgtgcgtggcattacaatcaaatttactggtatcttttttttattatgaagatgactgtttgatttatctgaaaaattttc

SEQ ID NO: 28365 - DNA, 317 bp, Zea mays
  Clone ID: LIB3180-032-P2-M2-A7
ggcatattcccccgaggccccgaaccaaaccaaaccaaaccaaaccaaaccagcccagatcagcgaaacacactccgctctcccgagaccggacacatggcggcggcggcggtgacgtccaacggcggcgcagtggccgcaaatgggccggcgcccggccggctggcctccgtgtacagcgaggtgcagacgaaccggctcctgcacgcccttcccctcccctccgtcctccgctccaactttctcggtcgtcgtcggccccgccagctccgccgtgggcaaccccgatgagatcgccaagcttttccccaacctgt

SEQ ID NO: 28366 - DNA, 300 bp, Zea mays
  Clone ID: LIB3180-032-P2-M2-A8
atcccccgacgtcctcctgttcatctcctcttctccctctcctcctcctcctcctcctcgtcccccttcctcgggttggaaattggaatggaggcggcgacgatggcgtggacggcggcggtggtcggggcggggctggtgtactggttcgtgtgggtgatgggcgcggcggaggtgaagggcaagcgggcggtggatctcaagatgggatccatcacgcgggacaaggtgcaggacaagtacacccaggactgtgccttcttccgccggcccaaggggacggcaaccacgggggggttg

SEQ ID NO: 28367 - DNA, 51 bp, Zea mays
  Clone ID: LIB3180-032-P2-M2-A9
ttgagcgacgtatttaattaattagggggggggttaatgaaagaggggggg

SEQ ID NO: 28368 - DNA, 237 bp, Zea mays
  Clone ID: LIB3180-032-P2-M2-B1
gtcgccacgcgttcggccgccgccgttgtcacgccgcctgttgccgcagacgccatgggggcgtacaagtatgtgtcggaactatggaggaggaagcagtcggacgtgatgcgctttttgcaccgcgtgcgctgttgggagtacaggcaaaagccgtccattgttcgccttaccaggcccacccgccccgacaagggccgtcgtttttgttacaaggccaaacagggatatgttgtc

SEQ ID NO: 28369 - DNA, 202 bp, Zea mays
  Clone ID: LIB3180-032-P2-M2-B10
tcgctgggtcttcagaccattagctttatctactccagagcgcagaagaacccgatcgacaccatgagggtgttgctcgttgccctcgctctcctggctctcgctgcgagcgccacctccacgcatacaagcggcggttgcggctgccagccaccgccgccggttcatctaccgccgccggtgcatctgccaccttcggttc

SEQ ID NO: 28370 - DNA, 271 bp, Zea mays
  Clone ID: LIB3180-032-P2-M2-B11
aattaaaccgccggcgcctccacttcgcgttctcgcctcatctcctcccgctcaggatccggcggcgaaggtaaggcaagatgtacaccgcgaggaagaagatccagaaggataagggccttgagccctccgagttcgaggactccgtcgcccaggctttcttcgacctggagaacggtaaccaggagctcaagagcgacctcaaggacctttacatcaacggtgctatccagctggatgttgccggtagcaggaaggttgttgttaacca

SEQ ID NO: 28371 - DNA, 102 bp, Zea mays
  Clone ID: LIB3180-032-P2-M2-B2
caccccttgaacgcgatataagcgttttccattcggagccctaaacctctctttccatactcgcggaagccaccaccaccggcaggggaagcggaaggggag

SEQ ID NO: 28372 - DNA, 290 bp, Zea mays
  Clone ID: LIB3180-032-P2-M2-B3
gtcgccttctccaacgggaaatagccattaccgaaggaggcccgtcagcagggtcggggcaaaaatttcaccgcgcgcgatcaagcgattgatgcccccgcatggcgtccgtgccgttgccctcgccgtccaagccgtcctcttggtcccctgttccggtctggccccgccttttgtgtatttcttttttcggtttgttttgctgctttctggcctcttttttgtcgttttttatttgttttttttttctttcttttttttggtttttgatgtttttttgtttttttttt

SEQ ID NO: 28373 - DNA, 271 bp, Zea mays
  Clone ID: LIB3180-032-P2-M2-B4
tttttcatctgcgtacacggtctccctcttcctgtcagtagtagagtgagagtgaggcacctatctttaacacattgcttaacatgatttagatttctttcttcttccttttttatatttttttatttttacttatttatatattattcacttatctataatctttatctatatttattattactattttttttttatttttttcttattcttttttaatttttctttatttttatctatttctcatttatttctaacttttttttttcat

SEQ ID NO: 28374 - DNA, 188 bp, Zea mays
  Clone ID: LIB3180-032-P2-M2-B5
tcgtcgtcctaccgccttcttttcttgtctcgtcctcctcgcgactatggccgccgccgccgaggtaaaccccagccccaacccgccgccaactacagccttcggcctctccaagaacaagacgcgggaggccgaccgccgccgacgccgtctgagtaaggccaagaagaacaagtccgttactgagg

SEQ ID NO: 28375 - DNA, 173 bp, Zea mays
  Clone ID: LIB3180-032-P2-M2-C1
gcccgacggcgacgccctactgctcgcctcagtgccagtcgttgcggcagcagtgttgccagcagctcaggcaggtggagccgcagcaccggtaccaggcgatcttcggcttggtcctccagtccatcctgcagcagcagccgcaaagcggccaggtcgcggggctgttggcg

SEQ ID NO: 28376 - DNA, 70 bp, Zea mays
  Clone ID: LIB3180-032-P2-M2-C10
tttcgcaggacaggagaagcttgggtctccgatcctccccacccctctgtgggtcttttccccaccgcgt

SEQ ID NO: 28377 - DNA, 312 bp, Zea mays
  Clone ID: LIB3180-032-P2-M2-C11
tcggtctcctcctcctccgccgccgccgccgccgcttccctcgtctccgcccgccgaagccatgccgtcgcacaagaccttccggatcaagaagaagctggccaagaagatgcgccagaaccgccccatcccctactggatccgcatgcgcaccgacaacaccatcaggtacaacgccaagcgcaggcactggcgtcgcaccaaactcggattctgagcggtggaagaaattcttgttaaagactcctatatgttattgttctcttcatgtttataattttgtttaaaatattaatttaattatatatattt

SEQ ID NO: 28378 - DNA, 498 bp, Zea mays
  Clone ID: LIB3180-032-P2-M2-C12
tcgctcggagcggaagggtacggtccgtcggatgttcttatttggcaccgccggctacttctattataacttctttctctttcctacttctaatttacctttttcttttttctcatttcaatattttttctatttaaatctatttttactttaatttataatttatatattttaatattaataataaataattatttatttaaattttatcatttattaaaataatttattattttataaatttaatttaatttttttttttttatattttactataatataattatttattttatcttataaatataatacttacatattatatattctatatttaatttctatatatataatttaataaataattttcttttcaatatttatataatatattatattcattaatgtcattattattttatatatataatattcaatataaattaatatatatattattattattatataattattaatatatatttatattatata

SEQ ID NO: 28379 - DNA, 158 bp, Zea mays
  Clone ID: LIB3180-032-P2-M2-C2
cggacgcgtgggcgtacacggtctccctcttcctgtcagtagtagagtgagagtgaggcagcgagtgggagacaaggggaaatggggaagggagcgcaagggagcgatgcggcggcggcgtgcggcgaggtggaggaaaacatggcggcgtggctggt

SEQ ID NO: 28380 - DNA, 136 bp, Zea mays
  Clone ID: LIB3180-032-P2-M2-C3
gccaatcgcccttggctatgctactggatggttcatccacttgctttgctggatgaagcacttgatgatgatcttgagaatgatatcatagacttcttagctcgatgtcaggataaagatggtggataaggtggtg

SEQ ID NO: 28381 - DNA, 308 bp, Zea mays
  Clone ID: LIB3180-032-P2-M2-C8
ctattctctaggaagcaagggaatcacatcgccatggcagccaagatgtttgcattgtttgcgctcctagctctttgtgcaaccgccactagtgctacccatatcccagggcacttgtcaccactactgatgccattggctaccatgaacccatggatgcagtactgcatgaagcaacagggggttgccaacttgctagcgtggccgaccctgatgctgcagcaactgttggccttaccgcttcagccgtgccagatgccaatgatgatgccaggtatgatgccaccgatgacattgatgccgatgcc

SEQ ID NO: 28382 - DNA, 110 bp, Zea mays
  Clone ID: LIB3180-032-P2-M2-C9
tcgcacaggggtcaggtcagtcgcctacgaaattcaatagcacagcgagagccaaggaagaagaagaagcaagcggagcgccatggcggcgtccaacggctagggccacg

SEQ ID NO: 28383 - DNA, 160 bp, Zea mays
  Clone ID: LIB3180-032-P2-M2-D1
gtcgggagactcgatggggaactgagcggagcgagggcattgccgggagccgttcggctccgccagccggagcgccggccgtgtcttgggctgtccagtttgcttgcgccgcgagcggttagacgcgagaacgcgacagggcttttggatcccctagagg

SEQ ID NO: 28384 - DNA, 165 bp, Zea mays
  Clone ID: LIB3180-032-P2-M2-D10
tcggcaacggggagctgtaccgctacatttgtgataccaagggcgcattcgtgcagcctgcgttctacgaagcgttcggcctgactgtgatcgagtccatgacgtgcggtctgccaacgatcgcgacctgccatggtggccctgctgagatcatcgtggacgggg

SEQ ID NO: 28385 - DNA, 213 bp, Zea mays
  unsure at all n locations
  Clone ID: LIB3180-032-P2-M2-D11
tcttttttttcgttccatttccccatctcccagagccaattcacgagttctggcggggtttcctacaagattctcttatttnataaaattttttataataatttttatatatatatattatttatttataattatacttaatattaatttataatataaatcttaatatattatatatattattattattaacattctatattttttaaataa

SEQ ID NO: 28386 - DNA, 153 bp, Zea mays
  Clone ID: LIB3180-032-P2-M2-D12
tcggcttcgctcccagtatgcctcgcagacgtccaaacagaacccgggcgctaaccagcagctggagatcgagatgaccgctgagaaggctcgccgcctcatcacatctgattgtagaggcggaggtggctattccattttcatggcttttgg

SEQ ID NO: 28387 - DNA, 276 bp, Zea mays
  Clone ID: LIB3180-032-P2-M2-D2
tcgtgtagagggataatattttggtttggggggggttacaaaattcttggggggggggtttaaattattttagtttctttagtgtctttttattttttattatttatttttttttttttatttgttttttttgtttttttattttattttttttttttttttttttatttatgtgtttttatagtatttttttcttttttttgttgtttttattttttttttttaatttttttttttctattttctttttttttttttgtattttatttttttttt

SEQ ID NO: 28388 - DNA, 317 bp, Zea mays
  unsure at all n locations
  Clone ID: LIB3180-032-P2-M2-D3
ctttagtacatgtgtaaattataattctaaacatgggaagttttgatccaaatattcaatcgtggcagttgtattgggagtcggtggaagggacatatcgaagataaaattctgtattggatttgcaggacatgcattgcaatggtgtagtatgactggcaatccttatcatgtaataccacctagacagggataatgttgntnaatgtcagaaaatgatagatatttcccagttattgtcgttatttatcacactaatccttttattatttgttctgttaataataggtattattgatataattttgctatttttt

SEQ ID NO: 28389 - DNA, 143 bp, Zea mays
  Clone ID: LIB3180-032-P2-M2-D6
tcgttttttaccattcctccccaaaacacatgctgcgatcctcgaagcctccgccgagcatcgatcatgtcggcctactgcggcaagtacgcggatgagcttatcaagattgctgcctacatcggtacccctggcatagggta

SEQ ID NO: 28390 - DNA, 64 bp, Zea mays
  Clone ID: LIB3180-032-P2-M2-D7
tcggtccaaagccgacgaggataaagaggggcccgactgcgcgggggggggggagaggaatcat

SEQ ID NO: 28391 - DNA, 354 bp, Zea mays
  Clone ID: LIB3180-032-P2-M2-D8
ttcgttcggttgccacggggcttgaagctttggggtatatttatcttcgttggtgttccttcttttttttttttcttcaagctctttttattttatttttattatttttttttttttcttttttttttatttcattatcttttttttttttttttatattttttttttttatttttttttttttttttttttttttctttttttttgtaatttttttttattttattttttttttttatttttttttctttttccttttttttttttttttttttttattttattttttctatttttttttttttttttttttttttttttctttctttatctttttttttatttttttttttt

SEQ ID NO: 28392 - DNA, 312 bp, Zea mays
  Clone ID: LIB3180-032-P2-M2-D9
ttcgttcggttatttccctccgctgagcaggcgcggtgtttaaccgtcgggggggcggtacatcatcttttctataattttttttttttgttcattccttattattcattatatttatcttttaatttttttttattttttttattctttacaaaattattattattatttctattttttttatatatttttaattttttttatatatttttatcttatttcttttttttattattttcttaaatttttttattattatatatattttatttttatatattttgtaattttttttttacctatatatttaat

SEQ ID NO: 28393 - DNA, 94 bp, Zea mays
  Clone ID: LIB3180-032-P2-M2-E10
gtacacgagcgttgccgccgggagagtgctcaacggagtcgcgtactggacgttcagggacttccctgtgcgtgagggtggagcggaccttaac

SEQ ID NO: 28394 - DNA, 435 bp, Zea mays
  Clone ID: LIB3180-032-P2-M2-E12
ctcgtgatgaagaagtcaagtgctcatgacggacttgtgaagggtctccgtgaggctgccaaggccatcgagaagcacgccgctcagctttgcgtgcttgctgaggactgtgaccagccagattacgtcaagctggtgaaggcactctgcgctgagcacaatgttcacctggtcactgttcctgccgcgaagactcttggcgagtgggccgggctttgcaagattgactctgagggcaaggcaaggaaggttgtaggctgctcctgtgtcgtcgtcaaggactacggtgaagaatctgagggccttaacatagtgcaggagtatgtcaagtcgcactagatgtgtgacctggttcagtgatacttttgatttggacctgggcttaaaattatgcttttgcatttggggcttggcttggagaatagaacattttac

SEQ ID NO: 28395 - DNA, 176 bp, Zea mays
  Clone ID: LIB3180-032-P2-M2-E2
ttttgtgctaacattttgaccaccaccctatggttctttatgtagacagctgtttctattgttcctggctttctccttggctgttgaagcattacatgcatttatgcaagatgaatcggagcacaagcattatctgattgtttctgctgtcaccaatcttttggttaatttacttt

SEQ ID NO: 28396 - DNA, 468 bp, Zea mays
  Clone ID: LIB3180-032-P2-M2-E5
tgattaatttattggttgccaatgttgaatcaatgattaaagcagaccggaggatcacatcattgaaacaacttcagggtcatatttggaggattggattttataataaagagtttcattgtgtttgttttctttttactattcttattttacttttttaatatttttctttttttttttatatattattattttatttctttttcttcttaattttttcatattatatatttattatttttttcttatctaccttttatttatatttctttttatttttataatgtattttcatcttttatattttttctttttatcttattattctcttttatttaacgtatatttttttatttctttttctattattctttttatacatgctattttatttttcttttatatattatactttcttaatattaattaatttatatttcataatattcttatttttaatttatttat

SEQ ID NO: 28397 - DNA, 251 bp, Zea mays
  Clone ID: LIB3180-032-P2-M2-E7
gcggcggcaccggcaggcggcggccctcgggcattgtcccagcgggagcaggacatccagatgatgctcgccgccgatgtccacctcggcaccaagaactgtgacttccaggtggagcgctacgtgtacaagcgccgcactgatggtatctacattattaaccttggaaagacctgggacaagcttcagttggccgccagggtcatcgttgtcattgagaatccgcaggacattatcgtgcattctgttag

SEQ ID NO: 28398 - DNA, 386 bp, Zea mays
  Clone ID: LIB3180-032-P2-M2-E8
ctccttcgaaccagaggcatatcgggtgaaatggaacaaatcaccaccaccactccagcaatcccaagactccttcgagccagaggcatatcgagtgaaatggaacaaatcaccaccaccacaccaacaattgcaagactccttcgagccggaggcatatcgggtgaaatggaacaaatcaccaccaccactccaacaatcgcaagactccttcgagccggaggcatattgggtgggatggaagcaacatgcgcaaggagaaacagacgttgctgatgggacgacgccagcacgcggccatggcctgcatgtcgcgaccgggatgcttttcacgaggaagagcttgcttccagggacagccctaccggatggcaccaggttcagcg

SEQ ID NO: 28399 - DNA, 131 bp, Zea mays
  Clone ID: LIB3180-032-P2-M2-E9
gcgtccagcccgtacgccgcgcagccaacccagcggacacgatgcaggcccacggcatcgccatccgcgcccgcgggccggtggcggcgacgcaggcccccgcgcgccgacggcaatgccgcgtgtctgcg

SEQ ID NO: 28400 - DNA, 92 bp, Zea mays
  Clone ID: LIB3180-032-P2-M2-F1
tggaccaacccttccgttaggaggttaagggcttgtgcttcctcaggtggtacttgaattgatgggggttcccaaaagttggttgattccaa

SEQ ID NO: 28401 - DNA, 184 bp, Zea mays
  Clone ID: LIB3180-032-P2-M2-F10
ctctcttcctcctctccctccccacaccaattcccattcccaattcgccctcctcaaatccggcgcccgcattcccgaccaccccgcagatctgggatccgccaccgccggatccctcgctgcccgcggcgccccgggacgcgcgtgatcctacccacaaccgtcaagttggcgccccagcgaa

SEQ ID NO: 28402 - DNA, 358 bp, Zea mays
  unsure at all n locations
  Clone ID: LIB3180-032-P2-M2-F11
cgcggcgtcagggatggccgtggacgacgagtgcaagcgccggttcctggagctcaaggccaagaggacgcaccgcttcatcatctacaggatcgacgagaagaagaagatggtggtggtggagcaggtggncgagcccgtgctcggctacgacgacttcgccgccagcctccccgccaacgagtgcaggtacgccatctttgactacgacttcgtcaccgaggagaactgccagaagagcaagatcttcttcatcgcctggtctcctgacacggcgcgcgtgaggagcatgatgatctacgccagcttcaaggagaggtttaagcgggagctggacggtattaaggtggagctccag

SEQ ID NO: 28403 - DNA, 388 bp, Zea mays
  Clone ID: LIB3180-032-P2-M2-F12
cgacctcacacgtcccccggatccgacggccaacagagcgcgtggcccctctccgccgccacctctgtacaaaatacccgccccaccaggccaccaccacgccgaatccgccctctagtgactagttcacgtcagttgctgctccccccaccttctcctcctgctcctgccctcggtttctgatcagcgaacatgggaacccgcggcgtcgccctgctgctcctcggcgcggtgctgctcctccaggcgctccttccccggtcgtcggagggcctggtgcgggtcgcgctgaagaagcagcccgtcgaccagaaacggccgtgtcgccgcgcgcctctccggcgaggagaggcagcgccttcttctccggggcgccaacgccctgggc

SEQ ID NO: 28404 - DNA, 219 bp, Zea mays
  Clone ID: LIB3180-032-P2-M2-F2
gcgtacacggtctccctcttcctgtcagtagtagagtgagagtgaggcagcgagtgggagacaaggggaaatggggaagggagcgcaagggagcgatgcggcggcggcggtcggcgaggtggaggagaacatggcggcgtggcttgttgccaagaacaccctcaagatcatgcccttcaagctcccgcccgtcggtccttatgatgtccgcgtgcgctt

SEQ ID NO: 28405 - DNA, 207 bp, Zea mays
  Clone ID: LIB3180-032-P2-M2-F3
ttccaaacaccacctggcttgcgatctccgaagcctccgtcgggtcgagcatcgatcatgtcggcctactgcggaaggtacagggatgagctcatcaggaatgctgcctacattgccacccttggcaagggtatccttgctgctgatgagtccactggcaccattggcaagcgcctttccagcatcaatgtcgagaacgttgaggag

SEQ ID NO: 28406 - DNA, 196 bp, Zea mays
  Clone ID: LIB3180-032-P2-M2-F4
cccgttcttgcttgcacatttgtaagtttctctagccaagcgtcaaacaatgatacaacacctcacttacaaaacatgacctttaacgctaccactatatgagcgagaacgaggcaggagaaatatatagtgagaggaatcaataccaccatactgtgacgttctctcctttgatgagaaagagatgatgagggag

SEQ ID NO: 28407 - DNA, 319 bp, Zea mays
  Clone ID: LIB3180-032-P2-M2-F5
caagtgttccgaggcattgaacagacaattcaatatgggggtcactgctactcaagttgaaagacattacaggcattataaagagaattggaagtttgttgctgcagccttaagcaagagtggtaatacttttgacacaacaaggtctatggtactcatatctgaatcagagaaagctaacctaaaggatagggcaaggaggctcctttctaagcctatcaagtttttcaatgagatgcaggagttgtttattgacagcagtgctgatggttttttagcattggatgttccatcctgcatgaatgaatctcatcctgga

SEQ ID NO: 28408 - DNA, 200 bp, Zea mays
  Clone ID: LIB3180-032-P2-M2-F6
ataagacagtgaatggcagttttgttcgaccatccaatgctgggggcgatgtttatcctgtggaatcttacgagagctcacctaaccaagaacttgatgctaactggggtgttctgtataatgacaatgcaactgaacttttgttgcataccctttccattcttgctaatgactgccctggtggattaaacatctgtaac

SEQ ID NO: 28409 - DNA, 334 bp, Zea mays
  Clone ID: LIB3180-032-P2-M2-F7
tcgttcacgctcaggtcgccgtcgcgactggctagccgctacgttatgtacgtcgccccggtacctcccatgagatgagagccgcatccttattcatattcatagtctccgctctcattgcccctgttttttagtttattatctgttactcattccttttcattatttaatatttcttttctttatttttttcatatatatattatttttttatactactttctttttttttttttttaattttatatttattgatgatatcatttttttagtttactttctaatcttttgccccccctttacttctttctttcttactttctttttttcattt

SEQ ID NO: 28410 - DNA, 350 bp, Zea mays
  Clone ID: LIB3180-032-P2-M2-F8
ctctcatctgcgtacacggtctccctcttcctgtcagtagtagagtgagagtgaggcagcgagtgggagacaaggggaaatggggaagggagcgcaagggagcgatgcggcggcggcgggcggcgaggtggaggagaacatggcggcgtggctggttgccaagaacaccctcaagatcatgcccttcaagctcccgcccgtcggcccttatgatgtccgcgtgcgcatgaaggcagtggggatttgcggcagcgatgtgcactacctaagggagatgcgcatcgcgcacttcgtggtgaaggaacccgttggtgatcggccacaagtgccccggcgtgttctaggaggtg

SEQ ID NO: 28411 - DNA, 330 bp, Zea mays
  Clone ID: LIB3180-032-P2-M2-F9
gttcggagcgcacacacacacaaccagatctcccccaaatccacccgtcggcacctccgcttcaagatgcagatctttgtgaaaaccctgaccggcaagactatcaccctcgaggtggagtcgtctgacaccattgacaacgttaaggccaagatccaggacaaggagggcatccccccagaccagcagcggctcattttcgctggcaaacagcttgaggacggtcgcacgcttgctgactacaacattcagaaggagagcaccctccaccttgtgctccgcctcaggggaggcatgcagatcttttgtgaaaacccttgactcgtaaag

SEQ ID NO: 28412 - DNA, 190 bp, Zea mays
  unsure at all n locations
  Clone ID: LIB3180-032-P2-M2-G1
ccaggtttaggggtcgcaaaggcggccttcaacaagcttggtggccttttaagggacaaagctcttgtgagcgggattactggggggtcttttcctgcaggggtcaaaggttcacggcttaagtttacccaactttttattggggggctttgctggggggagnaaaacccaaaaccaaaaatattttttt

SEQ ID NO: 28413 - DNA, 326 bp, Zea mays
  Clone ID: LIB3180-032-P2-M2-G10
cacctcgcctgcgatctccgtagcctccgtcgcgtcgagcatcgatcatgtcggcctactgcggaaagtacaaggatgagctcatcaagaatgctgcctacattggcacccctggcaagggtatccttgctgctgatgagtccactggcaccattggcaagcgcctttccagcatcaatgtcgagaacgttgaggagaaccgccgtgccctccgtgagctcctattctgctgccctggtgctctccagtacatcagcggggtgatcctcttcgaggagaccctgtaccagaagaccaaggatggcaagccttttgttgatgtcctc

SEQ ID NO: 28414 - DNA, 349 bp, Zea mays
  Clone ID: LIB3180-032-P2-M2-G12
gtgaaatggaacaaatcaccaccaccactccaacaatcgcaagactccttcgagccggaggcatattgggtgggatggaagcaacatgcgcaaggagaaacagacgttgctgatgggacgacgccagcacgcggccatggcctgcatgtcgcgaccgggatgcttttcacgaggaagagcttgcttccagggacagccctaccggaaggcaccaggttcagcggccacggcttccccgatccgcagaggttcgcgctacgggcagacgcggacgccatccccttcagctacagccagctcgacgcgaacctaaggatgttccggatccctcgagggtccaagaaggcgg

SEQ ID NO: 28415 - DNA, 221 bp, Zea mays
  Clone ID: LIB3180-032-P2-M2-G4
gatcagcaaagcggcagtgcgtagagaggatcgtcgaacagaacagcatgaagatggtcatcgttctcgtcgtgtgcctggctctgtcagctgccagcgcctctgcaatgcagatgccctgcccctgcgcggggctgcagggcttgtacggcgctggcgccggcctgacgacgatgatgggcgccggcgggctgtacccttactcggagtacctgaggcag

SEQ ID NO: 28416 - DNA, 329 bp, Zea mays
  Clone ID: LIB3180-032-P2-M2-G5
tcttttagggttcgggcgcccattcgtctcgggtggggaactagtttttggggggaaggttattttttatatttattttttttttgtaatattattttttttttttttattttgtcttttttttttgtagtatttttgtaatttttcttttttctttttttattttattttttttttctattttttttttatgtttttttttttttttttttttttttttttttgtttattttattattttttattttttttttttttattatttgatttttatattttttatttatttttttatttcttcttttttttttttatatttttattttatt

SEQ ID NO: 28417 - DNA, 108 bp, Zea mays
  Clone ID: LIB3180-032-P2-M2-G6
tcgagccaattccgctggagaggagtacacgcctgattacgcccatccacgtgctcgcctcgccccatcgcggacctttcctcggcggcgttgccatctaatcggcgg

SEQ ID NO: 28418 - DNA, 292 bp, Zea mays
  unsure at all n locations
  Clone ID: LIB3180-032-P2-M2-G7
tcggccgngctcttccgttgaactaggggggccttnttncggggggggggggtgcggntntncctttcnntttttttttttttttttttttttttttgttttttctcttttttttttttttttttttttgttttttttttcttttttttttttttttttttttttttttttttgtttgtttttttttttcgtatttttttttttggttttttttttttgttttttttttttttgtgtttttcttttttttttttttgtttgttttttgttttctttttctgtttttttcttt

SEQ ID NO: 28419 - DNA, 110 bp, Zea mays
  Clone ID: LIB3180-032-P2-M2-G8
tcgcaagaatcaacacatccatcaaagcttttttcgcaaagcttcgattagattctcgttgacaagaagactagaaccgaacctgaccatgtcgctgatccgccgcaaaa

SEQ ID NO: 28420 - DNA, 344 bp, Zea mays
  Clone ID: LIB3180-032-P2-M2-G9
aacgaatcgacaacaccggccgctgccggcgactgccacatgccactggaactctggtgccttggtgccttcgccggcgccgacctagatctggacgcgggcgaccgggcgtgacgaccaccggctgtcggcgcgccgcacgcggttgatcggccagctcccagcttctccaatctctaggctccgacgacaagcacactagattgctaagtgatggaacctttatcggttcattcagttgtggcagcgaaacggaggagcgaaatagacgagactgattcagagagcaactccttcgacaagaatgatgacatgttttgaggatgagaagacagggcttggtg

SEQ ID NO: 28421 - DNA, 100 bp, Zea mays
  Clone ID: LIB3180-032-P2-M2-H11
ttgttcgccactacaactgcagcagcaataaggcctagagctgtccctgaaggtaggaaggcgacccttgctcgatttttggagaaaaggatggaaaggg

SEQ ID NO: 28422 - DNA, 98 bp, Zea mays
  Clone ID: LIB3180-032-P2-M2-H12
ttgggataaccacggcacccgcccgcccgcccgccggtaagcgaaagcgaagcgagcaaacccagccatggagaaggcgatcgatcggcagcgggtcc

SEQ ID NO: 28423 - DNA, 62 bp, Zea mays
  Clone ID: LIB3180-032-P2-M2-H2
cttcccttagccgccgccgccgttggtttccttggggggggccgggcccggggttttgcccg

SEQ ID NO: 28424 - DNA, 119 bp, Zea mays
  Clone ID: LIB3180-032-P2-M2-H4
gcgaatcctctcttcgtccagttattcgggtcacaaaggccgaagcttaaatcacctccggttaggatctcatcagtctaattcctccttgtccttgttcgtttctggcagggctagtc

SEQ ID NO: 28425 - DNA, 179 bp, Zea mays
  Clone ID: LIB3180-032-P2-M2-H7
tcgccagcactgcacccggctacatggcggccgcctccaccctcgcgttcgggcacccaaaaaccctagccgccgccggcgccaagcccctgcccgccgccacctccacgtccgtttcctttccggccacccaccagcccgcgtgcctgttttcctcgcccgcgcccggttttttgttt

SEQ ID NO: 28426 - DNA, 321 bp, Zea mays
  unsure at all n locations
  Clone ID: LIB3180-032-P2-M2-H8
gtcccccggtccccccgcgtgctctccgcctgcggcctctgtatcccgcaaccaaaaactaccccccaaaaaaagaagaaaaccccaaatcctcgagatctatcagtatcgagcgacttaccaatccgattgctagggtttagtttcgaaaaaatctgaaaaaaaattctggtcgaggggaggaggcgatgtcggcgcaagtggcggtggtgcctaatgggggcccgggcgctgntcccgcgtggtgtcgccgggagctgtcggcgtggcttagcccctcccgaccacgtcgttctacgtgggcgacctgtagggggccgt

SEQ ID NO: 28427 - DNA, 177 bp, Zea mays
  Clone ID: LIB3180-033-P2-M2-A1
tcgcgtccccaacgctcccggccgcctcttggttctccaatccaccccgttccggaaccctagcagctcggcatccgccgctcgagcccaatccttccgcgtaccacccctccgcctctcgctattccgacgcatggctgggcgctcgctgacggtgatcgcaggcgcctccggcgg

SEQ ID NO: 28428 - DNA, 89 bp, Zea mays
  unsure at all n locations
  Clone ID: LIB3180-033-P2-M2-A10
tcgttcgtgagaagaagangcgcatancnggggggggtgnttntgnngggggggggggttttnatttttnnttattttntttttttttt

SEQ ID NO: 28429 - DNA, 264 bp, Zea mays
  Clone ID: LIB3180-033-P2-M2-A2
ttcggttcttggacaaagcgattggaattaatgttccccgctcaaggtttctcccagtgaaggctacatctgatctgttgcttgagcagtctgatctttacaccttggttgatggctttgtcatccgcaacccatccagagcgaatccagctaacccttcaattgagcttggacctgagttcaagaaggttgccaatttccttggtcggttcaagtccatccccagcatagttgagcttgacagcttgaaggtttcttgggatg

SEQ ID NO: 28430 - DNA, 320 bp, Zea mays
  Clone ID: LIB3180-033-P2-M2-A4
gccccgcggcacgtcggctgccgaggcgctggtctcgccgagggcccagatgcaggtgctctcctctaccaacctcgccgctgacttctcccgcgcgctgccgcccggggcacccatccccatgctccgccgtgaggtgctccactccttcctccgccgtcgaggccgtgctcgtccagggcctcatcacctccgccgggaggtgctccactccttcgtcttcaagctctcgccccaggggtgcgctagtgccaggtgcggcgagccagcagatcaaggaaaccggccgtggccgccccaagcgttacatttgcactggc

SEQ ID NO: 28431 - DNA, 421 bp, Zea mays
  Clone ID: LIB3180-033-P2-M2-A5
tcgtggaaatgatacgcagtgtgttcgaaggagctaatgcactgtcacaggcgtggaatgaagcaccatgaaagttgtggttttttgccattttaatgaactattttttttgtaacctattcttgttcattaaggtttggtgtgttttttttttttactgactcatgaccttcattaataaggtgtttttttttacttattctgtaatatttttaaatttttatctgtttgtaaacatatattcatattcatggttgtcattttcattttttatttatctattctttttggtgggtttcttctttgtattatagttttttttattttttttttcgtttttattcttctatattattattttactttttttcttttttttttctttctgtttttttttttattattattgtttatttaattt

SEQ ID NO: 28432 - DNA, 195 bp, Zea mays
  Clone ID: LIB3180-033-P2-M2-A7
tcgagcagcagcagcagccgccatggaagccggcagcaagaagctccaggcgtgcatcctcacgctgttgctggtgctctccaccgccgtgactcccatcctctcgctgtcagtgccagacgacgaggtaccctgcgactgtaataaacctaaggctcccaagccgtcgtacccgcccatgaccaagccctctcc

SEQ ID NO: 28433 - DNA, 365 bp, Zea mays
  Clone ID: LIB3180-033-P2-M2-A9
tgttcggtgcttggggtcgaggtgtttagggagagtattgttggaaatatcggggtggttagttactgttctttttttaacaggggtgttttattactatttatttatttctttttttattagttttttaaatttttatatattaatttttataatttattttttcattttcttatttttttatataatatttttttttttttttttatatttattttttttatttatatttttttatttgatttttttttttatttttttttaattaaatttattttttttaatattttttttttattttattttttttttatttattttttttttttttatttaatttttaattatagttttaatattttttt

SEQ ID NO: 28434 - DNA, 144 bp, Zea mays
  Clone ID: LIB3180-033-P2-M2-B10
tggttacggctgctcaaaagttcggcgtcatcagagcactcgtcgagcatgcacattttgaaatggcatatgtgcccacttggtcccggatatatccttgatgttactccagagttgtttgatataatgcttcttccatccatt

SEQ ID NO: 28435 - DNA, 192 bp, Zea mays
  Clone ID: LIB3180-033-P2-M2-B11
tcgctccggtcgcgtttgcatccgcatgcgtcagatccagattcgagcgccagccccgcttcgagatccagctagctctctatcaagcatccggcggagcgagcagcggggggctcggcgagagagaagatgaagcggtagatcctgaatatgatcattgtatggtcactgtctctggttgaaggggttttt

SEQ ID NO: 28436 - DNA, 313 bp, Zea mays
  Clone ID: LIB3180-033-P2-M2-B12
tgtctatttcatcgagcagggtaagaaagaatgctttgcttcttgcctcttcatttgctacgacctgatccggccggatgttgctcttgagcttgcatggatgaacaacatggtggactttgccttcccgtacctgttgcagttcatccgtgaatacactagcaaggtggacgatttagtgaaggacaaaatcgagtcacagaatgaagaaagagccaaagagaaggaggagaaagatcttgtggctcagcagaacatgtatgcgcaactgcttccttttgctctgcctgctccgccaatgcccggcatgggt

SEQ ID NO: 28437 - DNA, 123 bp, Zea mays
  unsure at all n locations
  Clone ID: LIB3180-033-P2-M2-B2
tcgtcctccgccacctccaccctcgaatcgggccccaccatggcgtcgcaggggtcctccgttttggccgnacttgagcaggccccggaggaccccatcctgggaggaccgttgcctacacag

SEQ ID NO: 28438 - DNA, 239 bp, Zea mays
  Clone ID: LIB3180-033-P2-M2-B3
tcgtagagaaatcattcggaacaacaaaggataggatgctttacattgagcagtgtgccaattccagagctgtaactatcttcattcgtggtggaaataaaatgatgattgaggagaccaagcgcagtcttcatgatgctctttgtgtggcaaggaatctgatccggaacaactcaatcgtgtacggcggtggcttatcagatattattttgcttaattgctgttgaaactgttgctta

SEQ ID NO: 28439 - DNA, 233 bp, Zea mays
  Clone ID: LIB3180-033-P2-M2-B4
tcgtttagacattgatgaattgaatgaacttgaagcaagcctgtcgagaacttccatccaaattcgagagcctggcgagggaacatcatcttgagcagtactacaatggaagattgttgcgaagttgctctccatttttgcgcttccatccgatctagtcgcttttgcaaacaaagaaccgtggagctcagttgcaagtggaatagatcttttagccttgttcactagctatt

SEQ ID NO: 28440 - DNA, 149 bp, Zea mays
  unsure at all n locations
  Clone ID: LIB3180-033-P2-M2-B5
tcgattttctgatgatgtgccagttaggatactcaataactggacactgtacaatgcagattccaggcttatatctttggaattgatccctatgaaatcaggggcagaaaatgatgtggttgnntttggattttggttttatgataata

SEQ ID NO: 28441 - DNA, 111 bp, Zea mays
  Clone ID: LIB3180-033-P2-M2-B8
gttctagatcgcgagcggctgccctttgttttttttttggagggggggaggaaccgaatgaaatgaaagttgctggtacataaagtctcgactggtattacatgaatgcag

SEQ ID NO: 28442 - DNA, 158 bp, Zea mays
  unsure at all n locations
  Clone ID: LIB3180-033-P2-M2-C1
tcgttttcaagaggggatcatcagattgggcttattattccttattactccaggcaaggatcggagttgctctgaattgactgaaccatggcggcgacaatggcagtgacgacgatggtgacgaggagcaaggagagctgttcgttattgnaggtccc

SEQ ID NO: 28443 - DNA, 97 bp, Zea mays
  Clone ID: LIB3180-033-P2-M2-C10
tcgcgggacgggagtccgccttaggttgtaggctccgttcgatcataagcggcacaacacccttccgtttgcgtcgctccttcggcctcccctccct

SEQ ID NO: 28444 - DNA, 244 bp, Zea mays
  unsure at all n locations
  Clone ID: LIB3180-033-P2-M2-C11
actgggtcttcagaccattagcttgaggtactttagagcgcagagggggcctatctattctattagggttgttttcntttttatgtcaaatgtttgtttatattttttatccctctttatatttttttatttttatttttctattttctttttttttttttcatttactgacaattttttttttttttttttttattttttttttttttatattttcattttttactttttatattttttttat

SEQ ID NO: 28445 - DNA, 225 bp, Zea mays
  Clone ID: LIB3180-033-P2-M2-C12
ccggagctcgacgaggacgaccgacgacgcacgcagagatccggcgtactgcaaattttgaaaactgaactgtaagatggcatcagcagagctttcccgtgaggaaaatgtgtacatggcgaagctcgccgagcaggcggagaggtacgaggagatggttgagttcatggagaaggttgccaagactggttattcttatgagcttactttgggggatctaatcct

SEQ ID NO: 28446 - DNA, 253 bp, Zea mays
  Clone ID: LIB3180-033-P2-M2-C2
tcgtgcttttttccagactgaatctcatgggactaagctccattgctcccacgagtctgtgaaatcgatggttcctgttgatggggacatgcagacgttccattgcacataaccccagagctaagctttaagcaggacgacagctcggaactgaggctagctgagaacaatcttgaatacctgaaggcagtactttgtggatcatattggcctatctgcttatatggaaatgtatctttctccattttgaatc

SEQ ID NO: 28447 - DNA, 251 bp, Zea mays
  Clone ID: LIB3180-033-P2-M2-C3
tcgtcggcgtccgatctttcctttccttttggcgcttttctcctgcccaccacgcggccacaaccctttcccttctctgcttgcttgctgctgcagtgctgcctccccctcgcccagcagcagggagcagccatgccaggggaccacggctccaagggcgacatctccttcgccggacgcttcacggccagcgccatcgcagcatgcttcgcagagatatgtaccatcccgctcgacacggccaaggtcag

SEQ ID NO: 28448 - DNA, 131 bp, Zea mays
  Clone ID: LIB3180-033-P2-M2-C4
ataagactaggcttgttgctgacaccggcccttggtacaccgcacttttgctaggagccctctggctggcccagacagtactagcatgtacattagcggcagcttgaacgctgattttgtttagctgtgtt

SEQ ID NO: 28449 - DNA, 409 bp, Zea mays
  Clone ID: LIB3180-033-P2-M2-C5
attgttgcgaaaaggctagggcataggctctcagataaccactgggaacttagggacttctctgccaatttggttgccttggtatgtcagaggtttggtcatgtctatcacaaccttcaaaatcggttaactaaaacattgatccatgcatttcttgatcctgccaaatcactgacacaacattatggtgctgtccaagggatatctgcactggggcccagcgcgattagactcctccttttgcccaaccttgtgacatatatgcaacttctggagccggaactgcagcttgagaagcagaaaaaccagatgaaaaggaaggaagctcgccgtgtttatggtgccttgctgtgtgcctgaggcaaatgctttgatgaccggtgaaaccttttttctggttggttttctc

SEQ ID NO: 28450 - DNA, 185 bp, Zea mays
  Clone ID: LIB3180-033-P2-M2-C6
atcagcaaagcggcagtgcgtagagaggatcgtcgaacagaacagcatgaagatggtcatcgttctcgtcgtgtgcctggctctgtcagctgccagcgcctctgcaatgcagatgccctgcccctgcgcggggctgcagggcttgtacggcgctggcgccggcctgacgacgatgatgggcgccg

SEQ ID NO: 28451 - DNA, 167 bp, Zea mays
  Clone ID: LIB3180-033-P2-M2-C7
cggtgatggtcacgctgctgttcctgacgccgctgttccactacacgccgctggtggtgctgtcggcgatcatcgtctccgcgatgctgggcctggtcgacttgggggccgagctgtacttgtggttcgtttacaaggtggatctttttgtatcctgtgtctatctt

SEQ ID NO: 28452 - DNA, 115 bp, Zea mays
  unsure at all n locations
  Clone ID: LIB3180-033-P2-M2-C8
tgcgttcggccgctgccgttcgatttgagagccaccgattaacccatccatccacctggccgccgccggagagtatggttgagcnncggtacacctaggtggaggtatntntttt

SEQ ID NO: 28453 - DNA, 278 bp, Zea mays
  Clone ID: LIB3180-033-P2-M2-C9
acattatatagcccttaatatatttttaccaggttctaagattaatgagagctcccctcaagaagcagtagcaggccacagcaggtgagtgaagccagaggtgaagcttgcattttcaggacatttgatattcagtttgggtcaaacttgatttttttggcattgttacaagatatgagcaagggtttcagcataatggttggcctatctttgaactgcaggcacctccatgttcaaagatgtttattgctttattttgatgttatttgtctggtttg

SEQ ID NO: 28454 - DNA, 202 bp, Zea mays
  unsure at all n locations
  Clone ID: LIB3180-033-P2-M2-D1
tcggtaagggcgcgaacctggcggagatggcgagcatcgggctgtcggtgccgccggggtttacggngttttctnttgttttnttttttttttngttttccttttctttttctttttttccccttgctcccgctttttcaagctcttcagcccgtacgcgcggcgccgcaccgctttaccccctggtacacccatcataccc

SEQ ID NO: 28455 - DNA, 305 bp, Zea mays
  Clone ID: LIB3180-033-P2-M2-D10
cgcttgatctaggtctcgtctagacgaaaagactcatcttctctggtactctggttgcggcagaacggtcggatctcccccaccgatggccgcctcccagtcacccacgctcctccttctcgccgtcgtcctcgccgccgtcgcaccaggcccctccagcgcgcgccacgtcatcaatttcgccccttcccgcgccgtcaaccccgcgtccctcgcttgggaccctacggcgcagcacttcgtcggtgtaggcggcggtgatgccggcctttgcggttccgactcttcttctctctgagtttttt

SEQ ID NO: 28456 - DNA, 254 bp, Zea mays
  Clone ID: LIB3180-033-P2-M2-D11
caccatagaaagcacaatagtgtaccaacaatggcagctaaaatagtgtgggcctccttatgctccttggtctttctgcaagtgctgctacggcgaccattttcccacaatgctcacaagctcctatagcttcccttcttcccccgaacctgtcaccaactggggtcttccgtattgtcaaaaccccatttttctaccctacatattcctagtttctttgctggtatctttcttacctttattatccttttctt

SEQ ID NO: 28457 - DNA, 319 bp, Zea mays
  unsure at all n locations
  Clone ID: LIB3180-033-P2-M2-D12
ccccgtcaccccactcactccgtaacaacctgcaccaactcctgtgaaagataaagggatcggtatatgggnnnnaactgnncctcaaattncaatgaaaccccatatagttctctaaccacattactttgttccagatgccctattttctcatccttttcaacttcatttgttccatttttacaatttcactacttctcttgttcaactnctaattttcctccactttctttcttttttttttcttcttcatcatctttttttcctctttattatccttgttatcttttccatattatttctttcttttttatttttt

SEQ ID NO: 28458 - DNA, 269 bp, Zea mays
  Clone ID: LIB3180-033-P2-M2-D2
ttctttatttggagctttcagaaccacaccgggcgaagcacattagcaacagcctaacaacaatggctaccaagatattatccctccttgcgcttcttgcgctttttgcgagcgcaacaaatgcgttcatcaccgcacaaggctaaattgctccaaggtccataattacacagttcctcccaccagttacttcaatgggcttcgaacacccagctgcgcaagcctataggctacaacaagcaattgcggcgagcgtcttacaccaacca

SEQ ID NO: 28459 - DNA, 266 bp, Zea mays
  Clone ID: LIB3180-033-P2-M2-D3
tcgtgcagtgaacagcatccggtttcaagtcttagtagcctcttatatgctcagggaaaatacgtctatgttgatggcgacggatctgttcccgcagaatcagcaaaggctgacggatttaatgcagtggcaagggttggggttgctgctgaccaccgaggaatcgtgtgctgtcacctcgtgtttcgtatcgtccatcattggctgtacgctggagaacttgacctgtttttcaatcctattttcgattattttttactcctatc

SEQ ID NO: 28460 - DNA, 279 bp, Zea mays
  unsure at all n locations
  Clone ID: LIB3180-033-P2-M2-D4
cccttctgcagcgccctcgaaactcgaaagcgtcctgtagttcaagctccgccggccaatactcaggtactcgctaatctccgccggtcacgtcgcaatggcgccaggcgctccgcgagagtatgccctcgaggggggcgaagcggcgcaggacgaagcgcccgagtcaccgcaggaacgggaagaagcgagtcagagagaagaggatggcggcnttaaggaggccgnnnnctacntggaagctcccacttaccttccggtcgggccatcttccgagct

SEQ ID NO: 28461 - DNA, 125 bp, Zea mays
  Clone ID: LIB3180-033-P2-M2-D6
gcagcttctgcttgctctggggggaaggagagagagagagagcgagagagagatctagtagagaggctagtaggtggtcctcgaacgaagatgttggcggtgttcatcggtcaggtgggggaggt

SEQ ID NO: 28462 - DNA, 349 bp, Zea mays
  unsure at all n locations
  Clone ID: LIB3180-033-P2-M2-D7
caccattccgccgttcccaccacgccactcgccagttcgtcactccctcctgtctccccccttgccgagacggcgcggacgccccgtcgcccaccccgatggcttccactctcctccacgccgccaccgcctcgctccagagctcctcccagcccgcacgcgcgggcgccgccaccgcctttcaccccctcgcgtccaccccatccatacgcctcgcgcgctcctcgttctcgtccaatcgccgccttgaggtttcactccgggcggtttcggccggtcaccggttcgcggggaggggagcaccccggngccgcctggtcgtcgccgccctagcaggggagcaaactga

SEQ ID NO: 28463 - DNA, 457 bp, Zea mays
  Clone ID: LIB3180-033-P2-M2-D8
ctaggcgcagccgttctcgctccagaggcagaaaccgctctaagtcaagaagcagaagccacagccactcgtactcaagaagcagaagctgcagttatagcaagagtaggagcccaagatctagatctgcttcagagtcaaaatcacctgttaaggcaagatcaccatccagatcccctcctgtttctccccggcgtgacaagtctgcaagcaggagtcctgccaggagcaagagtctgccccgatcttgttctccggcaaaatcagagtgaatcggattctgcacttgaaacgttcagaaaggcagagctcgagctaaaagattgctgtacggattatgagcactgtgctagtagcaatgctgtcccttccatatttttacaaatacttctgtttttgaggagatcactgtatggctctactctgtacctgacattgatcaaacgttgttggtttt

SEQ ID NO: 28464 - DNA, 248 bp, Zea mays
  Clone ID: LIB3180-033-P2-M2-D9
tcgaccacacctcctcgcttccactccgctcgtctgacatctcgtcccgtcctttcgtttcgaagcctcgcgagccccgacgatggccaccgccgcggtgtcggtcgacgagaagctcgacaagcttcgcgccgaggacgccaagcttgaccagatcagcgagaacgagaagtccggttttattagccttgcgtgacgctacttgagtggagaagcgagtcatatctggtgcatgaggattcatacct

SEQ ID NO: 28465 - DNA, 137 bp, Zea mays
  Clone ID: LIB3180-033-P2-M2-E11
tgttcggccaccgcgcagccagatggtctcttgctcctcgtgcccgttcgcccccgggacaagcgggtgcaagcccaggacgacgcggaccagcggcgtcgggttcggagtcgaagcaatggcgcggagcgtgttgt

SEQ ID NO: 28466 - DNA, 255 bp, Zea mays
  unsure at all n locations
  Clone ID: LIB3180-033-P2-M2-E12
aaccctagtaaagatacgatacgaagcgcaaacgcttgcctgagcctggaattcaccatggcgatgcccaccacctagtccgcttccccatgccaggcaccggngcccgccgggctgcccatttcccctggcgcccgcgctaccatcctntccttcagccgccgcctccgccggccccatggcgccatcatttctgcgcccactggttgcctgtttcttggtcttcccaagtcgtgctgttttatcacagccttt

SEQ ID NO: 28467 - DNA, 152 bp, Zea mays
  Clone ID: LIB3180-033-P2-M2-E2
tcttcaacttagaggaatgcctcaccctaagaactacaccacacgctacggagggtgcccccctaagcaggcaccaccaagaggtggcatgggctgtaaccagaggcagggccctccaccccatccttcgtaccagggtggtgcttattatt

SEQ ID NO: 28468 - DNA, 230 bp, Zea mays
  Clone ID: LIB3180-033-P2-M2-E3
tcggttcctgctctatatctcagctcctccgttctgtcctgtggccccgagctgagctgccaaggatacgtacgtacgtacgtcttgagggaggttgccgatattccttttctttccttttccttttttatcttattctgaggactttatatcattttatctcttattttaattaatttttatttatatttttttatttatctcctcttttttttacttcactattattt

SEQ ID NO: 28469 - DNA, 115 bp, Zea mays
  unsure at all n locations
  Clone ID: LIB3180-033-P2-M2-E4
ttgggcatgtaaaggtaaatgaaccggggacaagagatacaaagcgagaggggtcaacaagtccgcggnctggtggacaactccatggccgagtcaacatccgacctccaaggct

SEQ ID NO: 28470 - DNA, 112 bp, Zea mays
  Clone ID: LIB3180-033-P2-M2-E6
cagagtacttgtgaagatcaagacctctgaggctaaatctgatggagggattttacttccagtatcagttcagacaagaccacaaggaggggaaattgttgcggttgtagaa

SEQ ID NO: 28471 - DNA, 218 bp, Zea mays
  unsure at all n locations
  Clone ID: LIB3180-033-P2-M2-E7
tcctccttatattacttgtnaaactcacacccccccctcctaaccccccggcgccctttttacttttttttttantttatctttttcctcttttcaacccccccccctcctcccccatttccccttcccttcttttacttttttcccctctccccctctcatactttccttccaccctcccctttataaccctccccctactctcccccccccccccc

SEQ ID NO: 28472 - DNA, 137 bp, Zea mays
  Clone ID: LIB3180-033-P2-M2-E8
tcgggtgaggccaagagcaatcctgaattccagaaatccatgaaggagttcagcgagaaacttgatgtggtgaaggaagatctcaaagtaagaactaagaaaacgactgagacaatatacaagcgtgttgtttatgt

SEQ ID NO: 28473 - DNA, 225 bp, Zea mays
  Clone ID: LIB3180-033-P2-M2-E9
tgttcggcaccaccagatctggatccaaacggcggctctgtttcgtgcgctggcccgtctccctccgtctcgtcagcttcgtgccgtgcgcccgtgcccgtgcgtgccgttgccaacccgttccagctttgcccgtggccgcggccgctaccattgaaccaacttagcaaaggtcgcgttccacgttgccttggttccccaaccctgatgtttccatcccttctt

SEQ ID NO: 28474 - DNA, 385 bp, Zea mays
  Clone ID: LIB3180-033-P2-M2-F1
caacaactacaacaacagttgctaccaacaatcaatcaagtagttgcagcgaaccttgctgcttacctccagcaacaacagtttcttccattcaatcaactagatggggtgaaccctgctatctacttgcaggcacaacagctactaccatttaaccaacttgtcgggagcccttatgccttcttactgcaacaacagcttctaccattccatctgcaagctgtggcaaacattgctgctttcttgagacaacaacatttgttgccattttacccacaggttgtgggaaacattaatgcctttttgcaacagcaacaattgctaccattctacccacagaatggggcaaacattgttgccttcttacatcaacaacaattgttgc

SEQ ID NO: 28475 - DNA, 268 bp, Zea mays
  Clone ID: LIB3180-033-P2-M2-F10
cttcacccccccctcttggccgccaccccctttttctcccccttggctggacgccccctccccctatggcagccatcctccattgcttcctcccccaagatctccccctacgcagcaaggatcgagaaaaggaggggcacgttgaattgaagaggaagagaggatcaaggagatgttctttcccatgtcctcttgaagatttcttggggaaaccctagcaggtggctacactccagatcatgtctagtacatttcttcttcttcgatg

SEQ ID NO: 28476 - DNA, 246 bp, Zea mays
  Clone ID: LIB3180-033-P2-M2-F12
caaagaattccctcccctagccgccgccgccgttcgtctccctgagaggtgccgggaccgaggatttggccgagttctaggtagagaatcggttttacttgtctcagcccggggtctgctgcgtctggtggtggtgaaggggagaaattcgtgagatctgttccggatcaggcgtgcgagctcgggaatcaggggtttcacacatagcttctgcgattagaattgatgtactaatggagtctaagg

SEQ ID NO: 28477 - DNA, 175 bp, Zea mays
  Clone ID: LIB3180-033-P2-M2-F3
ttcgccgtctcatcgcaaaacccagcgcctcaaagcgaccccaccgaagcgtcccagcccgaccggaatggcgatggcaccgtgcgcacccgcctccgtctcctccttccccgcccgcccagtgcgggccccttctgctgtccggccgcgcgccgccgtgatccgtgccactgtg

SEQ ID NO: 28478 - DNA, 154 bp, Zea mays
  Clone ID: LIB3180-033-P2-M2-F6
tcgtttttttttttacacacacataaatggggaacgattttatagtggtgggaggtgatttttattcctttctataacctatttcattatataattaagctgattcaactacactaaatacaatggattaatataaataaatttcaatattatt

SEQ ID NO: 28479 - DNA, 247 bp, Zea mays
  Clone ID: LIB3180-033-P2-M2-F7
gtctcgcctcgccgtcagcagcagcagcagctgcacctccattccacggcttccgtcgtgcgcttcgtctgcacccacaaaggcgacggcgacggcagggggaggagatgaagctgaagcagctggagggccttttgggtggcctgacccagttctccgaccccaagctggagctggagcattatgcgacgggcccttacatcagtgtttggatgttttacatggtagtgaattgtttcaatgactt

SEQ ID NO: 28480 - DNA, 241 bp, Zea mays
  Clone ID: LIB3180-033-P2-M2-F8
tcgcatctttcctggcgcacagccagccccccacaggagcttctctgaggaagttgctgcacttaaccgctactttggcggcctgaaatctggtggtaatgcttatgtgattggagatccagcaagacctggacagaagtggcacgtcttctacgccactgagtacccagagcaaccaatggttaaccttgaaatgtgcatgactggtctggacacgatgaaagtttctgatttttttaag

SEQ ID NO: 28481 - DNA, 211 bp, Zea mays
  Clone ID: LIB3180-033-P2-M2-G1
gcattcctggtggtttctcctcccatcctccgtcctcgatctgagcgggggctgcttccctgcctccctccctccccttgcccagatggccgccttccgtgtcttttaaatcttccgccgcatcaagcttccctcacctgtcggctgtcctgctgctgctgctgccaatggcgaccaagggaggcatcgcgaggggcgttctggtggggtt

SEQ ID NO: 28482 - DNA, 245 bp, Zea mays
  Clone ID: LIB3180-033-P2-M2-G10
tcgctaatattcccctcacctatcggccgccctcgtttgactgcgtgggaggtgccaccaccgacgattctgcctatttttgtaaactgcaaggatcttacttattacaatggccaaatgctctcttttgatgttgttaaaatcgtgcaagcttttaaaaatgagattttgccacgacatggacttatcaaagtgtgtgaattcacattgtcagagtatggagcattttgtggtcccataggaca

SEQ ID NO: 28483 - DNA, 349 bp, Zea mays
  Clone ID: LIB3180-033-P2-M2-G11
cttatgttccagacatctattggccccactggtcttagcgtggggtatatgcgaccagagaccgcacagggtatttttgtaaacttcaaggatctgtactattacaatggccaaaagctcccttttgcagctgctcaaattgggcaagcttttagaaatgagatctcgccacgacaaggacttctcagagtgcgtgaattcacattggcagagattgagcattttgtggacccagaggacaaatcacatccaaaatttgttgatgttgctgatttggagttcctgatgttttcaagagagttgtaactttatgtggagtcagcaagctaatgaagcttggctaagcaat

SEQ ID NO: 28484 - DNA, 268 bp, Zea mays
  unsure at all n locations
  Clone ID: LIB3180-033-P2-M2-G12
tcgcttatgttccagacatctattggccccactggtcttagcgtggggtatatgcgaccagaaaccagaacagggaatttttggaaacgtgcaaggagctgttctatcacaacgaccaaaagctcccttttgcggctgctcaaaccgggcaagctttgagaaatgagaacccaccacgactcggactcncttagagtcgccggaattcacattggcagagattgcgcattctgtggacccagaggtcaaatgacattcaaaattcgtt

SEQ ID NO: 28485 - DNA, 302 bp, Zea mays
  Clone ID: LIB3180-033-P2-M2-G3
tattgagaccaactagcaacatagaaggcacaatagtgtaccaacaatggcagccaaaatattttgcctccttatgctccttggtctttctgcaagtgctgctacggcgaccattttcccgcaatgctcgcaagctcctatagcttcccttcttcccccgtacctctcaccagcggtgtcttcggtatgtgaaaacccaattcttcaaccctacaggatccaacaggcaatcgcagttggcatcttacctttatcacccttgttcctccaacaatcagtagccctattacaacatttacctt

SEQ ID NO: 28486 - DNA, 290 bp, Zea mays
  Clone ID: LIB3180-033-P2-M2-G5
tcgctatatgttccagacatctattggccccactggtcttagcgtggggtatatgcgaccagagaccgcacagggtatttttgtaaacttcaaggatctgtactattacaatggccaaaagctcccttttgcagctgctcaaattgggcaagcttttagaaatgagatctcgccacgacagggacttcttagagtgcgtgaattcacattggcagagattgagcattttgtggacccagaggacaaatcacatccaaaatttgttgatgttgcttgattaggagttcctg

SEQ ID NO: 28487 - DNA, 258 bp, Zea mays
  Clone ID: LIB3180-033-P2-M2-G6
tcgcttatgttccagacatctattggccccactggtattagcgtggggaatgtgtgaccagagaccagaacaggttttttttggaaactgcaaggatcagttctattacaacgaccaaaagctcttttttgtgggtgatcaaattggtcaagctatgacaaatgagaactcaggacgaaaaggactcctcagagtgagggaaatcacagtggcagagattgcgcattctgtggacccagaggacaaaggacatccaaa

SEQ ID NO: 28488 - DNA, 129 bp, Zea mays
  unsure at all n locations
  Clone ID: LIB3180-033-P2-M2-G7
tcgcgcgcgcgtacgccnncgncgngctggccttaccgaaccctaaacgggggccaccgccctcccccggaggtttatcagttcgtgtgcaaccttatgctatattcatggcctttttcgctatttttt

SEQ ID NO: 28489 - DNA, 190 bp, Zea mays
  Clone ID: LIB3180-033-P2-M2-G8
tcggcgctgcttctctttcccgtcgcacctgcaacgctgccgccgcggcagattaatccaacaccgggccgggatacgtgacaggtttctgagctcgcagctttacgccagcgatgccggagacggcggtgccgatcggcctgtcatgggcgcccaagcttcctttctttgcaacgaccatgcgtggtag

SEQ ID NO: 28490 - DNA, 77 bp, Zea mays
  Clone ID: LIB3180-033-P2-M2-G9
tttcggtgatcgtcgccggtgaccacgggagggagtccaaggacagggaggagcaggcttattttaagaagatgtat

SEQ ID NO: 28491 - DNA, 137 bp, Zea mays
  Clone ID: LIB3180-033-P2-M2-H3
tacaaacgccggcgcaaactctcgcccgagcccgacagatcttcaattccccattccgcccaccgatcgaccttcacgccagtctcggtctcttccgaaggcgtcgcgcgcggttgtttgagaggagaggaggaaga

SEQ ID NO: 28492 - DNA, 103 bp, Zea mays
  unsure at all n locations
  Clone ID: LIB3180-033-P2-M2-H8
tacctatacacatctttctcctggggggggtccttttccgggcgggggggcttncttaatacnccacccctataccttcacacctgttcgcctttcgctcttt

SEQ ID NO: 28493 - DNA, 99 bp, Zea mays
  Clone ID: LIB3180-034-P2-M2-A1
cctgaccgccgcggaccgcctcgcaggggctagccacgagacggcacattgtcgaccgtgaccgagcgtcattacggcggcgcccacgccacctacggg

SEQ ID NO: 28494 - DNA, 274 bp, Zea mays
  unsure at all n locations
  Clone ID: LIB3180-034-P2-M2-A10
tcttctcttctgtaccttgaggccgctaaagcagcgttgttccaagctgggtggggaggttatncatcttctttcctttccactttatctatttgttttatcccattattttcttcttttttccttnntattttttttatttatatttttttttttttaatttattattttatttttttattattttttaaatctccttttattataattctttctttattttataataatattactatattatctttattctatttattttattcttaacttt

SEQ ID NO: 28495 - DNA, 77 bp, Zea mays
  Clone ID: LIB3180-034-P2-M2-A12
ttgccaaggttgacatctttggtgtgggggggggttttttaatgggggggggggtttttttttttttttttttttta

SEQ ID NO: 28496 - DNA, 124 bp, Zea mays
  Clone ID: LIB3180-034-P2-M2-A3
ttatttgcgttcggctttgctacttggctgctagactataaaagaatgtgcgcggaagggaatagtctacgtgcccacggcccggggtagtttttcaatttctttatagggtgggatatttttt

SEQ ID NO: 28497 - DNA, 331 bp, Zea mays
  Clone ID: LIB3180-034-P2-M2-A4
ggaaacaccaaatatatttgcatgtatgatgttggagaacaggtgctgttgcgtaggttccagatcactcgcaatctctcattggatggagttcttgattttctgaactcaaagaagatgacagatggtggtgcactagatcttattgacgatgaagacagtgatgttgaagaaggaattgatcgacatactagaggaaacttagggcttggtttacctggatcaatggcaaatcgtggaagacccatggctcggacaaaatgtgttaagtttgctccaactggaagatcgtttgcttgcacgaccactgttggtggtttattgtcctcag

SEQ ID NO: 28498 - DNA, 222 bp, Zea mays
  Clone ID: LIB3180-034-P2-M2-A8
tcggtggcaagattgagactgagctgaccaagatctgtgatggcatggtcaagctgcttgagacccatcttgtgccgtcttccactgcccccgagtccaaggtcttctatctcaagatgaagggtgattactacagatacctcgctgagttcaagactggagctgagagaaaggacgctgctgagaacacgatggtggcatacaaggctgcccaggacattt

SEQ ID NO: 28499 - DNA, 150 bp, Zea mays
  Clone ID: LIB3180-034-P2-M2-A9
tcgctttcattcgccgccgccgcctgctctctgctgccgtcgccatggggagaaggcctgcgagatgctatcgccagatcaagaacaagccataccccaagtccaggtactgccgtggtgtccctgaccccaagatcaggatctacgatg

SEQ ID NO: 28500 - DNA, 253 bp, Zea mays
  Clone ID: LIB3180-034-P2-M2-B1
ccagtttgccctcggttgcttgatgcatatgtgtgaccagaccaatctgatatccaaaaacttcttgccataataaatgaggctatcctagaaaaaagacaacaaacctttatcctgcacaacgctctaaacattagacctggtgaacataaatggccaatcaaccattctgtatttatcttgtaacacatcgaaccttactgacaggaaaccacgttgtgtttggtcagagacggcaccaacatcatatgac

SEQ ID NO: 28501 - DNA, 177 bp, Zea mays
  Clone ID: LIB3180-034-P2-M2-B11
tcgcttaaagtaggggagcacgacaagaccatgggcgcaacaggtgacattaatgttttcgctcagatgattgacgacgcggaaggcctggaaaaaatcgagaacctacagagccatgataataatgaaatctatgaaaaagctgtgaagcttcttgagacttactggatggaggag

SEQ ID NO: 28502 - DNA, 287 bp, Zea mays
  Clone ID: LIB3180-034-P2-M2-B12
gtgaaccgcttgaataagacaaaggtggaacggaaacctgatttaaaggctgaaagagaggctattagtgctgctgaaaaggcagaaagaaaggcacagcttagagacaagaaacgtagggaagagatggagaggcttgagaaagagaagcaggctgatatcaggagctacaagggtctaatggtccaagagaagatgacttccaacaagcaaatcgtttttggcagaatgaccttgcaggtacttgaatgaattctctacagtattatgcggactatttttaattc

SEQ ID NO: 28503 - DNA, 159 bp, Zea mays
  Clone ID: LIB3180-034-P2-M2-B2
cataagtccgcccccctctccctcagtaaacccctctcttcttcccgcggtctgctcgttcgatctgtgcagcagatctgaggtctcgagcgaccgtgaagcagcttcaatcgtcggcatggcgctcgtattgcatagtggggctggaaacaagaatgc

SEQ ID NO: 28504 - DNA, 90 bp, Zea mays
  Clone ID: LIB3180-034-P2-M2-B4
tcggtcgaggcaaaagcattgcgaccacagacagcgcgcgcttcaaggccttgtttttttgagataacaaggaggagaggaggagatggc

SEQ ID NO: 28505 - DNA, 165 bp, Zea mays
  Clone ID: LIB3180-034-P2-M2-B5
catcggcgccgccgggatgaagcgctccgccgacgcgatgactgagccggtgaagcctgtgttcctcaccaaggcggagcgggagcgcctcgcgcttgagcgccgccaggccgccgttttcgaccagcgccgtaccgagctcgacctaatccagtccctgtcctg

SEQ ID NO: 28506 - DNA, 257 bp, Zea mays
  Clone ID: LIB3180-034-P2-M2-B6
tcggctactctgaactcccttgaaaaggctgaacatgattatagagtaatgagagaacttaaaggacaagctgaagctgcagatatagcaaaatctcagtttctagcaactgtttcccatgagattcggactccaatgaatggtgttttagatgctaatggacactgaacttgatacaactcagcaggattttgtagtcacccgttcaagaaagtggaaaggttttaataaacttaataattgaagtccttgacctg

SEQ ID NO: 28507 - DNA, 141 bp, Zea mays
  Clone ID: LIB3180-034-P2-M2-B7
tcgggatgcgcttgttttttgctggcaagggatagagccttctgctgagaatggtatttagacgaattgtgcgctggttctatctagggtttatttatctcgctgttggtcgttggtctagagctttgcttatttttgatt

SEQ ID NO: 28508 - DNA, 148 bp, Zea mays
  Clone ID: LIB3180-034-P2-M2-B8
tcgcccagacacagagctcgaccccccctggccttccttcgctcgtgcagccgtgaccacccgcatccccgtcagtcatggcagcggcagcaggcggaggcgcggtgctttctcttgcccaaaaggagcaggacatacagatgatgct

SEQ ID NO: 28509 - DNA, 105 bp, Zea mays
  unsure at all n locations
  Clone ID: LIB3180-034-P2-M2-B9
tgcgttcggaactggctgtatggtagcaatggttggtgctgtangaaggcagggaccgatttnttaggcactgttagaggattaagtttctggtgtgttgttgta

SEQ ID NO: 28510 - DNA, 161 bp, Zea mays
  Clone ID: LIB3180-034-P2-M2-C10
acaattttccatgggattgattgaggtccagctttttagctggcaggtcttaaggtttcagagtttttcctttcaattcatcaaggactaggccaacaatacatcgcaatgaagtacatgaagctcgtttcaaaacctgatactttctataccgaagaagc

SEQ ID NO: 28511 - DNA, 91 bp, Zea mays
  unsure at all n locations
  Clone ID: LIB3180-034-P2-M2-C11
tcgccccttctcgccaaaggggaagccctgcccgtacttccgttgcgggcgctactaagctttgacggttcctntgatctccacctttgaa

SEQ ID NO: 28512 - DNA, 135 bp, Zea mays
  Clone ID: LIB3180-034-P2-M2-C12
tcggcacccaacacccggagtgagcggcggcgagggatcggatcgtcggcggcgatggaggacgaggtgcatagggcagcggtgagcatttaaacttgcttgtttataggtgaattttgggtattgttttttttt

SEQ ID NO: 28513 - DNA, 132 bp, Zea mays
  unsure at all n locations
  Clone ID: LIB3180-034-P2-M2-C2
aagaattccctcccctagccgcggccgccgttcgtctccctgagaggtgccggtaccgaggatttgtcctatttctatgtagagaattgggttttnttattttaatctaatttatattagtttttaaataat

SEQ ID NO: 28514 - DNA, 216 bp, Zea mays
  Clone ID: LIB3180-034-P2-M2-C5
catctggaggccaatagaatcgctcgcttgcgttatcttgttcgcctcgtcagttgttgtttcctcccttcccatcccccactgctcagcagtcagtcagcactcgccacccacacgcctccgttccgcccacggttccactccaactctccgatctccaggaatccgcggctgaggcgcccggcgatggcggctccaatggtctactcctattac

SEQ ID NO: 28515 - DNA, 379 bp, Zea mays
  unsure at all n locations
  Clone ID: LIB3180-034-P2-M2-C7
tcggaagccgccgccgctgcagtgtccatagccaccgcaggagactgagatggggggttttntttttttttttttntttttttttttttttttntttttttttttttttttttttttttttttttttttttttttttttttntttttttttttttntttttttttttttttntttttttttttttttttttttttttttttttttttttttttttttnttttttttttttttttttttttttttttttttttttttttttttttttttnttttttttttnttttttttttttttttttttttttttnttttttttttttttttttttttttttttttttttnttttttttttttttttttttttttttttttttttttt

SEQ ID NO: 28516 - DNA, 75 bp, Zea mays
  Clone ID: LIB3180-034-P2-M2-C8
tcggccgatacaaacttggacaaggggaagagagctcgtcaagctttggggggggttttatagttttaccctaat

SEQ ID NO: 28517 - DNA, 344 bp, Zea mays
  Clone ID: LIB3180-034-P2-M2-C9
caacaccacctcgcctgcgatctccgtagcctccgtcgcgtcgagcatcgatcatgtcggcctactgcggaaagtacaaggatgagctcatcaagaatgctgcctacattggcacccctggcaagggtatccttgctgctgatgagtccactggcaccattggcaagcgcctttccagcatcaatgtcgagaacgttgaggagaaccgccgtgccctccgtgagctcctattctgctgccctggtgctctccagtacatcagcggtgtgatcctcttcgaggagaccctgtaccagaagaccaaggatggcaagccttttgttgatgtcctcaaggagggaggc

SEQ ID NO: 28518 - DNA, 408 bp, Zea mays
  Clone ID: LIB3180-034-P2-M2-D2
cactaccacccatctcgtcgtccgccgattcgatccggttcttccaacccaggggcagtgatggcgacgaagaggagcgtgggcaccctcggcgaggcggatctgaaggggaagaaggtgttcgtgcgcgccgacctcaacgtcccgctcgacgatgcccagaagatcaccgacgacacccgcatccgcgccttcgtccccaccatcaagttcctcctcgagaagggcgccaaggtcatcctcgccagccacctgggtcgtccaaaaggtgtcaccccaaagtacagcttgaagccttttgtttcacgcttgtctgagctccttggagttgaagtcgtgatggccaatgattgcattggtgaagaaattgataagtttgttttccgttttcccattatggagtttttt

SEQ ID NO: 28519 - DNA, 412 bp, Zea mays
  Clone ID: LIB3180-034-P2-M2-D3
ctgcgtacacggtctccctcttcctgtcagtattatagtgagagtggggcatcttgtggtatacaagggtaattggctaagttatctatacttttctaaatttgtttaattattctttttcaattatattatatttttattaattaattccttattattatttttcttcttttttatctttttttttttttattattatattatttatatttatatttatttatttttattttttttattttttttgtatttttttatatttttatttttttatttttttatatttttataattttatattttttattttttatttttttttatatataattttattttttttttaatttttttttatttatatatttttttattttatttatctttttattttatttttatatttattttt

SEQ ID NO: 28520 - DNA, 336 bp, Zea mays
  Clone ID: LIB3180-034-P2-M2-D5
tcgtatcagtacagcagagcaaagcaaagaggaacaccatttcccttgcctggtgtgccaacccaccaccaccaccaccaccacccacgaaggcagcagcaacccagcaccaccgatccatccatccactcgtcattcctccgccccgccgctcgccttcacccatctccgaccccgctccgccaccaaaccctaggctaccagctcttcccaccccgtgtgctccgctcccctgagggcggttcgcgcgccatttttccgtccgatttcctaaaaccgtactcccggattcgggatcggcccgcaacgggtcctcttcttgcttttagtttttcc

SEQ ID NO: 28521 - DNA, 147 bp, Zea mays
  Clone ID: LIB3180-034-P2-M2-D7
tcgtaaaaccctagcggcaaaaccttcgccgtcgcctgctcccgtccggccaccacatccgcccaggagctcgccgtcggggaggctgctcgaggagccgcgctgtctctcccgcgccgtgaccttcgtccttgccgtcgtcatgat

SEQ ID NO: 28522 - DNA, 132 bp, Zea mays
  Clone ID: LIB3180-034-P2-M2-D9
tcgtcgccgactttcgatgagcttgagagggtggggacctctggtgagggggtgggggtgttcctgcttaatttcctctattagttcgagtacagacaataggctaatttattgacattttgagtcttttat

SEQ ID NO: 28523 - DNA, 89 bp, Zea mays
  unsure at all n locations
  Clone ID: LIB3180-034-P2-M2-E1
tcggcgctctcactagcctngcattccgtccctgcagtgcatgggcaggccggggaggtcttttataggttgtttgttttttttttttt

SEQ ID NO: 28524 - DNA, 92 bp, Zea mays
  Clone ID: LIB3180-034-P2-M2-E10
tctcactcctcgtttctctgactgtatcctctccttcctctcctcaaaaggctgtaaaaaaatttgtttattttctatttacctactactat

SEQ ID NO: 28525 - DNA, 72 bp, Zea mays
  unsure at all n locations
  Clone ID: LIB3180-034-P2-M2-E12
tcggtcttcctgncagtagtataggggggggtgttttttaagggggggggggtgttttattttttttttttt

SEQ ID NO: 28526 - DNA, 223 bp, Zea mays
  Clone ID: LIB3180-034-P2-M2-E2
tcggcgagaagcccagaaggtgagaagatagatagagagagagagagtgatcggtacaaggatcaccgctgtgcctgcgcgtgctgcttcaccgaatcgagtcagaccctgtccgaatccgagccaaggtatggcaaccgttagtgaggcctctaaggctgctgaggctgtggtttacttgcttaaacaggacagcttgtggatgcttcatgcggtttaccgt

SEQ ID NO: 28527 - DNA, 227 bp, Zea mays
  Clone ID: LIB3180-034-P2-M2-E3
gttaatcctttccgactcaggccttatcgatacactcctcaacaaaaaaatgagattgagaaacagattaaggaaatgttggaaggtggaattatccagcagagttccagtcccttcgcttcaccggtgctgttagtaaagaagaaggatggagagtggaggttatgcctggactacaggaaactcaatgcttatacggtgaagaataggttttccatgccagtttt

SEQ ID NO: 28528 - DNA, 211 bp, Zea mays
  Clone ID: LIB3180-034-P2-M2-E5
gtagagatggagtcggaccagggcaagcttttcatcggcggcatctcctgggaaacgacggaggagaagctgagcgagcacttctccgcctacggcgaggtaacgcaggccgccgtcatgcgcgacaagatcaccggccgcccccgcggcttcgggttcgtcgtcttcgcggatcccgccgccgtcgacagagcgctgtaggaccccaaca

SEQ ID NO: 28529 - DNA, 262 bp, Zea mays
  Clone ID: LIB3180-034-P2-M2-E6
tcgtttgagaccaacaagcaacatagaaagtggaatccagtagcaacaatagagcaacaatggcgaccaagatattttccctccttatgctccttgctctttctgcatgtgttgctaacgcgacaattttccctcaatgctcacaagctcctatagcttcccttcttcccccataccttccatcaatgatagcttcagtatgtgaaaacccagcttttcaaccctataggctccaacaagcaatcgcagcatgcaacatacc

SEQ ID NO: 28530 - DNA, 140 bp, Zea mays
  Clone ID: LIB3180-034-P2-M2-E7
tctttacaagtctgacattaacattggctgcaatgctagctgcacaaccgacgaccttactcctcttcctaaggtcatcaatgacaatttcctttacattttttcatttacatactatctctacatttatatcctaatat

SEQ ID NO: 28531 - DNA, 238 bp, Zea mays
  Clone ID: LIB3180-034-P2-M2-E8
agaatgccctttttgattaacagatggggagatctatagggtaggtacagcaaaacgaagcgagcatgtaggccacagcagtcagctctgttgtgcggaaagatgtgtatatatgtattagcaacatgtttgttctgatgacctttttaatgcttttcaatggttggcctgttctatcaagttattaacttttcttcttttgtttcattttttttatagtttttttgtatttgttatt

SEQ ID NO: 28532 - DNA, 83 bp, Zea mays
  Clone ID: LIB3180-034-P2-M2-E9
tctttctctgacgcgtgggttcattaacggagggggatacaaagtgactatgtgcgggggttgccaattccctaaacagcatt

SEQ ID NO: 28533 - DNA, 216 bp, Zea mays
  Clone ID: LIB3180-034-P2-M2-F1
tcgcctgaatgaaggacaggttcccccttcagatgttgtggaggtcgttgtcagccctccttatgtcttccttcctgtggtcaagagccagctgcgccaagagttccatgttgcggctcataactgctgggttaaaaagggaggtgcttttacctgttaattcatagctatatgctttccaacctatttgattcttggttatttttattacactct

SEQ ID NO: 28534 - DNA, 338 bp, Zea mays
  unsure at all n locations
  Clone ID: LIB3180-034-P2-M2-F10
cactccacgaagcggcgaagtcgatgggtttntgctggggggggggggggggttcatttttcntntttctttcttttctttttttttctttttttctttttttacacttgtttgggttattatgttgttttgttattttttttttttttatttttttattttttttcctttttttattttatttttttttttgttttttgtatttttttttgtgtgggtttttgttattttttatttttattttttgtttttttattttttttgtgttttatttcttttttttgtttttttgtttgtttattgttttagttttgttatttttttttttgtttttttta

SEQ ID NO: 28535 - DNA, 184 bp, Zea mays
  Clone ID: LIB3180-034-P2-M2-F11
gtcaaggctcatgttagtgctgggagtgatgagatgcaagcgctacgctgcgattttttccaggggataatccctgtaccattcgatcgacttgaatgccaaaacagtgtactccatcgggaacaaagttgatcctcttgaaactcacttgacccttacaccagtaatataaggatattcaaca

SEQ ID NO: 28536 - DNA, 294 bp, Zea mays
  Clone ID: LIB3180-034-P2-M2-F2
gtttcatataatgcacattagtggaccaacactggcagccaaaatattttgactccttatgctccttgttatttctgcaagtgctgctacggcgaccattttcccgcaatgctcacaagctcctatagcttcccttcttcccccgtacctctaaccaggggggtgttagagatgtgaaaacccaattcttcaaccctacaggatccaacaggcaatcgcagctggcatcttacctttatcacccttgttcctccaacaatcatcagccctattacagcagttacctttggtgca

SEQ ID NO: 28537 - DNA, 338 bp, Zea mays
  Clone ID: LIB3180-034-P2-M2-F3
tcggtcaaatccttgggttagctggaattgatctgtttaccccttgtgatgggggcgatttaagaatttctcataaattttttttacatcattcattttctttttttatatatcctttttaataattgtattatttccttttttttacttctttctactattctttttgttatctttttttttattcttttttttttataatttatactatttatttttttttatttttatttttacattatttttactatagttaaattataatttttatatttttgatatttatttttttattctttttttcttttttattttattataaatattattaaaattta

SEQ ID NO: 28538 - DNA, 253 bp, Zea mays
  Clone ID: LIB3180-034-P2-M2-F4
caccaagcaacatagaaagtggaatccagttgcagcaatagagcaacaatggcgaccaagatattttccctccttatgctccttgctctttctgcatgtgttgctaacgcgacaattttccctcaatgctcacaagctcctatagctttccttcttcccccataccttccatcaatgatagcttcagtatgtgaaaacccagctcttcaaccctttaggctccaacaagcaatcgcagcaagcaacatacctt

SEQ ID NO: 28539 - DNA, 330 bp, Zea mays
  Clone ID: LIB3180-034-P2-M2-F7
gatcaagacaaatgtcatgggaactttgaatatgttgggtctggcaaagcgaattggtgcaaggtttttgttgactagcacaagtgaagtttatggtgatccgcttgagcatccacagaaggagtcatactgggggcacgttaatcctataggtgttaggagctgttacgatgaggggaagagaacagcttagactttaactatggactatcatcgtggagttggtgttattttttatttttaatattaattttttttttcttattcttcttgtattggttccttgatcttttatatttttatattttatatatcttcattcttttattt

SEQ ID NO: 28540 - DNA, 170 bp, Zea mays
  Clone ID: LIB3180-034-P2-M2-F9
gtgaggttctccggggttcggtttcgtgggtgagcggatcgagatggcggcgtcggatgttgagtaccgctgcttcttctgcggccttacctggtccactgacgaccactccctctacaacgccttcagcacctacggctaggtccttatatccaagatcatcctttatc

SEQ ID NO: 28541 - DNA, 317 bp, Zea mays
  Clone ID: LIB3180-034-P2-M2-G1
gaaacaccaaagtttggaggtgtcactgtctactatgacatgtgagatctacagcatttcaccaataaaggtcagaacttcagattactttccactccctcccttcttacatgtattccacattgtaaatattaagtttttacagacgttctttgcttcttgcaccagattttcagcgaagtcgtccagtttgcgcctcttggactgatcgacatgttcaactccggtggtgcaccttgacaatatttcaagcgttgcagattcttcagctacgacagttcatataagatgccgaggcccaggccggttgggggcgt

SEQ ID NO: 28542 - DNA, 342 bp, Zea mays
  unsure at all n locations
  Clone ID: LIB3180-034-P2-M2-G10
gcgtccgatttttatggaggagaaaaccccgtgtttgcgtggagaaggcaggtcggtcaacgctcgtcggatgttcatagcgatgcacaaatgggaatcgccatcgtccttaccaactccgattgggtttgtttatttaccgagagatgattattgagcccttttatgtgnttcctatttttttatggctttttttgtttccttatgnttgcttctctttatctggttttttatttttgtatagtttcttatttgttcttcattttttttttttgttgggtaggtggggaggtttatttaattgttatttttatatatttgtttttttatatatcttttttt

SEQ ID NO: 28543 - DNA, 229 bp, Zea mays
  Clone ID: LIB3180-034-P2-M2-G11
tcgccccactccctctcgtcgccgtcctgtgccgttcgcaacgccacgctccccaccgccgaaatggccccgaagcgaggtggcagggcaccggtgccggccaagaagaagacggataaagtgacgaaccctctgttcgagaaaaggccgaagcagttcggcatcggcggcgcgttgcctcccaagaaggacctgcaccgattcgtcaagtggcccaaggtcgtgcgca

SEQ ID NO: 28544 - DNA, 59 bp, Zea mays
  Clone ID: LIB3180-034-P2-M2-G12
ttcccggtcgacccactcgttcggttctagatcgcgagcggccgcgctttttttttttt

SEQ ID NO: 28545 - DNA, 234 bp, Zea mays
  Clone ID: LIB3180-034-P2-M2-G2
tcgttcaccagttacttaatccattggtaggggctaacccattggtcgccggcttcctacagcagcaacaattgctgccatacaaccagttctctttgatgaatcctgtcttgtcgaggcagcaacccatcgttggaggtgccatcttttagattacatatgagatgtactcgatattggtgccctcataccgacgtgtgtttgctagaaatatatattttattgactgagatt

SEQ ID NO: 28546 - DNA, 120 bp, Zea mays
  Clone ID: LIB3180-034-P2-M2-G3
ttttcttcttaaccccgtttcttcgtgcgcaccgcttcttcaacagggggccccaaaaccctccttaaattttcccttaattcccccaataaaacttgccggccggcaatcttcaaggga

SEQ ID NO: 28547 - DNA, 237 bp, Zea mays
  Clone ID: LIB3180-034-P2-M2-G4
attttgagcatccagaaacacaccaagcgaagcgcactagcaacatcgtaacaacaatggctaccaagatattatccctccttgcgcttcttgcgctttttgcgagcgcaacatatgcgtccattattccacaatgctcacttgctcctagttccattattccacagttcctcccaccagttacttcaatggccttcgaacacccagctgtgcaagcctataggctacaacaagcga

SEQ ID NO: 28548 - DNA, 195 bp, Zea mays
  unsure at all n locations
  Clone ID: LIB3180-034-P2-M2-G6
tcgccctccccagccgtcgaaagtcgaaaccctagccccgcctcaccgccggcggtggtggcagcctcagcagtcagcaccggcacacagcccgccgtacctntcctngtacgctccctcccggtgtgccgtcgccccctcgatcggtccatctttcgtcggctcggtagccgccggatcgggatcggccggcgc

SEQ ID NO: 28549 - DNA, 335 bp, Zea mays
  Clone ID: LIB3180-034-P2-M2-G8
atgaccgcaagtatagtaggatgaagtatatgattgaccgttggggaataaataggtttcgggctgaagttgaaaaatattacgggaagaagtttgaaagttttctaccattgccagagtggtatttttacatttaccttggctgtcattatcaggttgatgtgtaatttttctattgagttcttgtatttaatattatttttgttgttatttataaatatctatttttatgtttttttattttttttttttgtttgggggggggggggggtgtgttttttttattattttttataattttatttattgttttgtttataattattttatttttt

SEQ ID NO: 28550 - DNA, 256 bp, Zea mays
  Clone ID: LIB3180-034-P2-M2-G9
tcgcaaccagatcacacgaaccaaaccaccgcttcctcccccgaccggagaggagcctcaccgccggcgcccatggcgacacgctacttgatcgtgtcgctgcccgtgcagtcgcccggcgccaccgccagctccctgtggtcgcgcctccaggactccatctcccgccactccttcgacaccccgctctaccgcttcaacgtcccggatctccgcgtcggcacccttgactcgctccttgcgctcagtgacgacc

SEQ ID NO: 28551 - DNA, 117 bp, Zea mays
  Clone ID: LIB3180-034-P2-M2-H10
tcgctcattcggcgccgcggcaccccctagtcgtaactcgcgatgggccggagcaaggtgcacgagctgctcggaaagagctagacggatctgcatgcgcattttaaggagctttaa

SEQ ID NO: 28552 - DNA, 210 bp, Zea mays
  Clone ID: LIB3180-034-P2-M2-H12
tcgggcgcagcgtgctggtagaacggcaacaactgcaacaattgctgccattcaaccaacttgctttgacaaacccagcagcgttctaccaacaacccatcattggtggtgccctcttttagatttcttatgagttatagttcaataataaaggtttttggctgatggttggggcttcccaaaaataagaaaagacatttctaggatttt

SEQ ID NO: 28553 - DNA, 122 bp, Zea mays
  unsure at all n locations
  Clone ID: LIB3180-034-P2-M2-H6
cgcgccgntgccgcatctcctctacaggtaagaaggagagaaagagggcgaaatggtgaagcacaacaacgtcatccccaacgggcacttcaagaagcactggcagaactatgtcaagacat

SEQ ID NO: 28554 - DNA, 155 bp, Zea mays
  unsure at all n locations
  Clone ID: LIB3180-034-P2-M2-H7
ggttaatttgcttgaatgcaggcataaatgctgtttaccggcggggttttcnactgantctcaaatttctttaaacaaaagcttattttacaaaatctttggtgtcccccttaaaagttaatccaaacgctcactttgcttactttgctctttat

SEQ ID NO: 28555 - DNA, 291 bp, Zea mays
  Clone ID: LIB3180-034-P2-M2-H8
tcgcaacatagaaagtggaatccagtagcagcaatagagcaacaatggcgaccaagatattttccctccttatgctccttgctctttctgcatgtgttgctaacgcgacaattttccctcaatgctcacaagctcctatagcttcccttcttcccccataccttccatcaatgatagcttcagtatgtgaaaacccagctcttcaaccctataggctccaacaagcaatcgcagcaagcaacatacctttatcacccttgtttcaacaatcgccagccctatctttggtgc

SEQ ID NO: 28556 - DNA, 280 bp, Zea mays
  Clone ID: LIB3180-034-P2-M2-H9
tcggcccccatttaggctgcccctgcctctgtccaagacgctagcagctcccaaatggcgcctagattttttccagtcatctccatggccgagcagcagctctgctcgcccccctccttctttttcccttgcgcagcagcaagaagcccctgctcgtagccttggcgtccaacttcgctgcgcagcggtgccgatccaaaacagcgtccccggatcccctccgcactgagtgctttaccgtatctgcgcagccccaacattgacgccgttcaccttggtg

SEQ ID NO: 28557 - DNA, 174 bp, Zea mays
  Clone ID: LIB3180-035-P2-M2-A1
gcaacatagaaaggggaatccagtagcaccaatagagcaacaatggcgaccaagatattttccctccttatgctccttgctctttctgcatgtgttgctaacgcgacaattttccctcaatgctcacaagctcctatagcttcccttttttccccataccttccatcaatgata

SEQ ID NO: 28558 - DNA, 381 bp, Zea mays
  Clone ID: LIB3180-035-P2-M2-A10
ggatagcatcgtcatcgcaaaatgcaggctctcctgctccccgcgcgggccgcgccgccgacgccggcgatgcttcggcagcgtgcggtttctgcctccgcgtgtgcgtcgcaggtttgccgccccctattcggatctttcctatgctttattgttttataaagttcgaaagttttttttttattttattttatatttatttcatctttttttcaccgtaataatattattttttttttcttttatacttatatttaacacaatcgtaagaattacctttttttttgttggggtgggggataattacatattttttttatatatttttatttcttattttttattgttactttatatatcatataacttaaagtatatttc

SEQ ID NO: 28559 - DNA, 328 bp, Zea mays
  Clone ID: LIB3180-035-P2-M2-A11
cccaagcgcgcacccatcttctggcctttccagccgccaagccttctagaagcttcaagagctcgattcgatcggaaccctcgccatggccgacgaggcgaaggcgaagggtaacgcggcgttctcggccggccgcttcgaggaggcggcgcggcacttcacggacgccatcgcgcttgccccagacaaccacgtctctactccaaccggtcggcggcgctcgcctcgctccaccgctactccgatgctctcgccgacgcgcagaagaccgtcgagctcaagcccgactgggccaagggctactcccgcctcggcgcggcgcaccttg

SEQ ID NO: 28560 - DNA, 377 bp, Zea mays
  Clone ID: LIB3180-035-P2-M2-A12
gcccccctctccctcagtaaacccctgggttcttcccgcggcctgctcggtcgatctgtgcagcagatctgaggtctcgagcgaccgtgaagcagcttcaatcgtcggcatggcgctcgtattgcatagtggggctggaaacaagaatgccttcaaagcacttattgctgcagaatacagtgggatcaaggttgagtgaccaaggattttgagatgggtgtctccaacaagacccctgagtttcttatgatgaacccccttgggaaggctcctggccgggaaactcctgatgcccctgtttttgagagttatgctatcgcacgctatgtttctcgtatgaaggatgacaaccccttttttgggtcttgccattattg

SEQ ID NO: 28561 - DNA, 370 bp, Zea mays
  Clone ID: LIB3180-035-P2-M2-A2
ctcgcccgcctgcaccgaccggtacttactggctggaccgacccatgcgtcttgtttgatacccacgtattcatttgatgctttcctcatatgcccatgcaatatctgctgagaaggcctaccatgagcagctttgtgtgcctgaaataaccaatgctgtatttgagccctcaagcatgatggccaagtgtgacccatggcacggaaagtacatggcttgctgcttgatgtaccggggtcatttgttcctaaggatgtcaacgctgcagttgcatccattaagaccaagagaactgtccagtttgtggactgatgccccactggattcaagtggtgcatcaactatcacccaccctctgttgcccctgga

SEQ ID NO: 28562 - DNA, 422 bp, Zea mays
  Clone ID: LIB3180-035-P2-M2-A6
acccgtcctttggagaccacctggcaccttagaaggcgcgttagtgtcccaacattggcggccaaaatattttgcctccttatgctccttggtctttctgcaagtgctgctacggcgaccattttcccgaaatgctcgcaagctcctatagcttcccttcttcccccgtacctctcaccagcggtgtcttcggtatgtgaaaacccattcttcaaccctacaggatccaacaggcaatcacagctggcatcttacctttatcacccttgttcctccaacaatcatcagccctattacatcagttacctttggtgcatttattggcacaaaacatcagggcacaacaactacaacaacttgtgctagcaaaccttgctgcctactctcagcaacagcagtttcttccattcaaccaactagct

SEQ ID NO: 28563 - DNA, 316 bp, Zea mays
  Clone ID: LIB3180-035-P2-M2-A7
tcgttctgttctcaaagacatggattgaagtttctggttcatcagcaaaggatgttgctaagcagctcaaggaacaacaaatggtgatgccaggccatcgtgagtcaaacttgcagaaggaacttaaccgatacatccccactgccgctgcatttggtggtgtatgcattggcgcattgaccgtcctggctgattcatgggtgcgattggttcaggaactggtatattgctcgctgtgacaatcatataccaatacttcgaaacctttgagaaggaaagggcgactgagcttggtttcttttggtttttgattagt

SEQ ID NO: 28564 - DNA, 220 bp, Zea mays
  Clone ID: LIB3180-035-P2-M2-A8
gtcgtctccgacccactcagtcgagggccggacccccatcaactcgccgtggcccaccaccgttctactatcaccctacgtggccgcaccccaaccctccaacgccttccgcctcctgctcctactcaccgaggccgtctccgccggtactgccttcgtcctgcttcgcccgcccatcaccgtctggaccgtgattcctgcaccgtgcgtacgatcttca

SEQ ID NO: 28565 - DNA, 380 bp, Zea mays
  unsure at all n locations
  Clone ID: LIB3180-035-P2-M2-A9
ccggcggctccggcgacggtgagtcgccggcttccatgacaccggccggggtttgtttcnctcagaaccatctccatatgctgctaccgcccctttttctttcacccttccatttgttccttatgtacaccgacttcctattcttcttttatttgccttatctgcttctgtgtgctatcttttttaatcccctttttatttatgttaccattcatctatctttaaattagtcttcttctattattttttttatttatttctaaaataacttcttactttattatcggccttattttcatttttctttctttatatatatatttttattttacctaattttttatatttcttttctactttattaatagatattcttattt

SEQ ID NO: 28566 - DNA, 352 bp, Zea mays
  Clone ID: LIB3180-035-P2-M2-B1
tttcacctcccccctcctttttagggagagaaagcaacgaaacgccgagagaggcgtgcgagcgggagcaaggagatggagcgggcggcgccggttaggagctcccacacctccacggccgacctactcgcgtggccgcagccccagggccccgccccagcaacgccgtcgccgccgcgccggcccggtcagccgcggaggctatcaggaaggtggtgttcgggggtcaggtcaccgaggaggaggccgacagcctcaccaagaggaagccgtgctccgtgcccaagtggaaggagatgactgggagcggcattttcgctgccgggagcaatggatacgctggggaggcagc

SEQ ID NO: 28567 - DNA, 372 bp, Zea mays
  Clone ID: LIB3180-035-P2-M2-B10
gctagatctcgactccgctccgcttccccccatctcccacctagatctcgccgcgatgggcctcgccgctgccgcccgcgcggtccttctcctcctcgccgtcgccggggtcctcctccgtccggcggcggcggagatcaagcaggagtccttcaaggacgactcccgcggttccattctcttcgagaagttcggctcggcccccacggcatggtgtcaatctccgtcaccggcgccaaggcctcctccgcgctcgctaagcccgatccggcacagctcggcttcttccttctctccgacgagtcgctcttcgaggccatctacgatcagccggcacccacggatctgaaccccaacccggagtccttcccg

SEQ ID NO: 28568 - DNA, 272 bp, Zea mays
  Clone ID: LIB3180-035-P2-M2-B12
cttggtgccgcctcaccagcttgccaaatctctaaccctaggtgcagcggcggagatggcccccaagcgctcggctccacctccgccgcctccgcccccggctgcctgctccgaggagaccgcctctggttcgggctccgaggaggaggaggaggaggacgactgcccgcctccattcgctgggagaacaactgtccgggctgtcagccttgcggggactatagatgacctggccctccgtgtgccacagcctaattaagcccttgccgaca

SEQ ID NO: 28569 - DNA, 408 bp, Zea mays
  Clone ID: LIB3180-035-P2-M2-B2
ttttagagaaatgcttttgatatagtgtttggttccggagtatggtgggacagctcctaattttttgttgtttggattggttccatgtagtatagagttttccaaaaaaggaaaattatgctcaaatgtcggaccatcccgctctgcaaaatctctcggacggagccgctccctggaatgtagcctttctatccaattggctccggaaccaatcactactgttagttggttggtatccgctgctcttcgtgagaattatgaaaacgttatatgcctgtatttggcatagcctgatgcaatttatttgaattggcaaagtagcgtggcgttgtccgcatctagcgtttattaatacctacttttaagatcaatggatgactaagtgccctagcttttgcagtgccagga

SEQ ID NO: 28570 - DNA, 346 bp, Zea mays
  Clone ID: LIB3180-035-P2-M2-B3
gtgctgctagtttcaacatcattcccagcagcactggagctgctaaggctgttggcaaagtgcttcctgtccttaacggaaagttgactggaatgtctttccgtgtcccaaccgtcgatgtttctgttgttgatttgactgttaggcttgagaagtcagcaacctatgatgagatcaaggctgcggtcaaggcgaggcagaaggtagcctcaagggcatcctgggttacgttgaggaggaccttgtttccaccgatttccagggtgacagcaggtctagcatctttgatgctaaggctggcattgccttgaacggcaacttcgtgaagctcgtgtcctggtacgac

SEQ ID NO: 28571 - DNA, 443 bp, Zea mays
  Clone ID: LIB3180-035-P2-M2-B4
gttacctacaagaatcgtaaacgcctttacctatctgaacagaccgatgggagtgtgcctaatactctggttatcgcaaactgtgaagttgtgaaaccaagggttgcagctgctgaacatatctcgcagtttaacgaggaagcacgatcaccttttgtaaagaagtacaagactatagttcatcctggtgaagttaaagaatcagggagcttccacagaacagtaagatcatagccacacacactgacagtccagatgtacttgtttgagatgttgaagcacaaccaaatagacatgctgtcttaggagcttctgaatctcgtcctgatctgatattaacgggacaccaggaaaatgcagaatttgcgcttgccatgtgtccagcagaaccatatgtcctgtcaggaggaaaggacaaatttgttgtcttgtggagcatccaa

SEQ ID NO: 28572 - DNA, 205 bp, Zea mays
  Clone ID: LIB3180-035-P2-M2-B5
taaaacagaagcctgagcacccgaggagactgcgtgcgaccgaagccagagccggcggaaccgaacggaagcgagacccccggcggctagcgagatggacggcggcgccggcgaggaggggaagcaggagcggcacctggtgctggcccacaagctcttccttctatcccaaccctccgttgatgaccttttcaaggtcgccttc

SEQ ID NO: 28573 - DNA, 261 bp, Zea mays
  unsure at all n locations
  Clone ID: LIB3180-035-P2-M2-B6
acccttccgtttgttttttttgggccacctgtccagggcgggtttttgccaggagatgtgaaagatgtcgttcttctggatgttactccattatctcttggtttggagacattgggtggagtgatgacaaagattatccccaggaataccacactgccaacctnaaaatcggaggtattctcaacagctgcagatggacagacgagcttgagattaatgttcttcagggagaaagagagtttgtttgggacaacaagtccc

SEQ ID NO: 28574 - DNA, 323 bp, Zea mays
  Clone ID: LIB3180-035-P2-M2-B7
gtggtcccctggctccagtagatgcccactgttctttcctggtgaagcgatttggtctgctgtgttataggttttattcaactaggcgtttgggcacaacttcgtctgaacaaaagttgtgtcttcgcgtatacctgtgtttcagtgtgtcaccttcagcaaagctaaatgttgcacccgagtcagagtcggtttcttttagcattttgtgttggtacttcgaaattctcttgctgcgctggccaacatgggtttgcttatatggctttggaatgatggacaaaatagtgcttgttagttgtggaattgtccatttaggcaac

SEQ ID NO: 28575 - DNA, 393 bp, Zea mays
  Clone ID: LIB3180-035-P2-M2-B8
caacgtaccattcatttgtaccatggactgcctcggtgcaaaggagctggccaaggattttgttgtttctggaacagcatcagaatctttgtatggtgcttgtgaatccatgtacaagccggacatgcaacctgatgaactcttcgagactatatcccaagccctgaattcatcagtagaccgtgactgcttagcggatggggtggctatgtgttgattgtgacaccgactgaagtgagggagcatgtgattaagagcaggatggactaaataatggccactagaattattagctggtttccaatgcttaagaccaatgttgtgtttgtattctggagtaacattgtatcatcacagttggtatgagaaggaaccgttgttttctttatctct

SEQ ID NO: 28576 - DNA, 243 bp, Zea mays
  Clone ID: LIB3180-035-P2-M2-B9
gtcttctgccccgccccctcctcgcaaaaaccctaacccctcgacctctcaagatggcgtcgccgccgccgcctcccgccgcagccgcagccccagccgccgcggcgtccggaccgccgccgccggcgcaagtggtgggcaacgccttggtgcatcagtactacaacatcctgcaccagtcgccggagctctttaccgcttctaccaggagtccaagccgcttgggcgtcccttcgggaccgg

SEQ ID NO: 28577 - DNA, 301 bp, Zea mays
  Clone ID: LIB3180-035-P2-M2-C10
gaccaaagcagaccacattccttcctaccaatcgcctacccaaatcggcggtccacccggaggcggggatggagacgtagcatgcaaaccttgacaagatgcatatcctccatagctaccggatcgtttggtacaccgacgtgacgaacgccatccaggccgacttcccctactgatgactgacgctgaggtggtgaccatccatcgaccctgcctagcaaatctcaccttcacacgtttctgcggcctttgattctgcatcccatagccttccgtagatccgaggacacttaatttgacc

SEQ ID NO: 28578 - DNA, 352 bp, Zea mays
  Clone ID: LIB3180-035-P2-M2-C11
attagctttatctactccagagcgcagaagaacccgatcgacaccatgagggtgttgctcgttgccctcgctctcctggctctcgctgcgagcgccacctccacgcatacaagcggcggctgcggctgccagccaccgccgccggttcatctaccgccgccggtgcatctgccacctccggttcacctgccacctcggtgcatttcccaccgccggtccacctgccgccgccggtccacctgccaccgtcggtccatgtgccgccgacggttcatctgccgccgccaccatgccactaccctactcaaccagcccggcgctagccttatccccagccacacccatgcccgtg

SEQ ID NO: 28579 - DNA, 351 bp, Zea mays
  Clone ID: LIB3180-035-P2-M2-C12
ggagtggtgcaagggcgagaaccagagctggaagatcctgccgtggggtcccgaggccaactccgccgcggcccacgcggtaggcccgcacgccgtgcgcgtcttctgcaaggccggcggcgaggactacagcctcacggtgcgcaacggcacggcgtgcctggcgcccaccaacccgcgggacgagtaccagcatgggtcaaggacatgcgccacagcacccggttgcggtacgaggagggctacccggccttcgtgctcgtcaacaaggtcaccggcgaggcgctcaagcactccacggggcagggccaccccgtcaagctcgtgccctacaacccggactaccaggac

SEQ ID NO: 28580 - DNA, 215 bp, Zea mays
  Clone ID: LIB3180-035-P2-M2-C2
tttggcaacaagctcctttgcggcaaaccactagaagtggaatgcgacagctcggggtcgccgcgcaccggcatgtcgaccatgatgaagatcgccatcgcgctcatcatccttggcgtgctgctctgcgtcgcgggcatcaccacgggcgccctcggcagccggaaaaggaagccgaggcgcgcggcctccttaggcttgcaggctttctcctg

SEQ ID NO: 28581 - DNA, 420 bp, Zea mays
  Clone ID: LIB3180-035-P2-M2-C3
tggacgcgtgggtacgagccgcacttcgactacttccacgacagggtcaaccaggcccggggcggccaccggtacgccaccgtgcttatgtgcctgtccaccgtccgcgagggaggcgagaccgtgttccccaacgccaagggttgggagtcccagcccaaggacggcactttctccgagtgtgcacacaaaggttggcagtgaaaccggtgaaaggcgacgccgtgctcttattcagcctgcacgccgacggcacgccggacccggtcagcctccacgggagctgcccggtgatccggggcgagaagtggtcggcgcccaagtggatccacgtcaggtcgtacgaggacgaaccccaggcagtactcgtgctccccgaggaaaccgacggcgcgcgggtgcccccataggagcgagcgc

SEQ ID NO: 28582 - DNA, 255 bp, Zea mays
  Clone ID: LIB3180-035-P2-M2-C4
caagtccaagaccgcgagcggccgccctggtttttttattacagggggggggaggcccccggaggccaccattacaacaccttgctcatatacctgtccaccgaccataaggaagacaaaaccgatttccccaacgccaagggttgggagtcccagcccaaggacggcactttctacgagtgtgcacacaaaggatggcagtgaaaccattgaaaggcaacgccatgcactatttcagcctacaacccaactgca

SEQ ID NO: 28583 - DNA, 439 bp, Zea mays
  Clone ID: LIB3180-035-P2-M2-C5
cggacctggtgctcaagatggcttgcgagggctgcggcaacacgtcggatctctacggcacggggtgcaagcacaccactctctgcagtgactgcgggaagtccatggcacgctcccgtgcccgctgcctcgtctgctccgcgcccatcaccaggctcatccgggaatataatgtacgagctaattctgttatggatagacatactctattggacgatttgtcactggtttacctcctttctcgaaaaagaagaatgccgagaacaagtggtctctccataaggagggtctgcaaggccgtcagatagccgagaatatgcgggaaaaatacaacatgaaaccatggattttggaagacgaaacaggccaatatcagtatcaaggtcaaatggaaggatcacagtcagctacagcttcatattattttgtaatgaggcac

SEQ ID NO: 28584 - DNA, 445 bp, Zea mays
  Clone ID: LIB3180-035-P2-M2-C6
gggccccacccttcctaacttgggtccagttggaagctggggttgttccctacccaccaccaacggggtagcaaaacgtttacagtacaatgcgctggtgaaatgagtctaacaatcgcaggatagatttatacttgagtttactgctgcagcgaataccaaacatgtcggcactcaaaaaggttttctgtttcttgtttcttggcagaaaatgtaactgatctgtacagaagttttgcaactaatttggtatccaatgtaggggttgagctgttgcttgtgaactttagtaccctagagaatgttagttccaggatgaaactgtttacgcagactctagctggacctgaatctgccgatgacaattagttatcttctacagtaaggcagttgtccgcgtaataagaaagtttctcagttagttacagttaacttgggcggccgt

SEQ ID NO: 28585 - DNA, 419 bp, Zea mays
  Clone ID: LIB3180-035-P2-M2-C7
ctcccgtcatcttcttcctcgcagtgccggcgctccatcttccgctccctcccttgctcgtgctcggcacgcaggcgacggcggctacgttcgggatcgggctctcagcaaccgcgtcagcggctgcccctcccgcttctcgccagtcgccccgtgccctcgcctccggtcctcagcacaccagccgtgacctgcgtcataacagcggtacaagggtgaacaaagaacatcgagaggaagacaatatgccgaagaaggggactaaatctaataaggagaaggtggacgatgtgcccaatgaacgagaaaataagcttccagactacctggagctccagcgcacacgtgtcgtctgcaatgctgatgcccccattcatactcaaggtttccaatactcgggtgcatttgctgctatggga

SEQ ID NO: 28586 - DNA, 280 bp, Zea mays
  Clone ID: LIB3180-035-P2-M2-C8
ctcagcatataagaatactgtagagagcatcactggaattatatcgaaaactatttcaaagaagggtatgcttgaagtgtataactctctgactgaagaaggaaagaagcagtttattgaggcctatagtgcagcatattacccatgcatggacatattgtatgagtgctatgaagacgtctcttctggaaggagattagaagtgtggtgctggctgggaggagattctttgagagggaagggctccctgctttccctatggtaaaaattgatcaaacac

SEQ ID NO: 28587 - DNA, 429 bp, Zea mays
  Clone ID: LIB3180-035-P2-M2-C9
atcaaactggattttatagagtgaagtatgatgatgaacttgcagctggacttgtaaatgcaatcaaagcaaagaagctctcattaatggataagattggtatcgtggaagattcatatgcgctatctgttgcttgcaagcaaacactaacgtcattgttgcgactgctgaatgcttataatgatgagtctattacactgtactttcacatgtaacctctgtatgtttaagcatttctaaaataacagttgacgctactcctgacttgaacaaagatatcaaacagcttttgatcaaccttcttctcccagctgtcataaagttaggctgggaccccaaggatggtgagagtcatcttgatgtaatgcttagatcactgctcttgactgcgctggtcagacttggacataatgaaactataatgaaggg

SEQ ID NO: 28588 - DNA, 383 bp, Zea mays
  Clone ID: LIB3180-035-P2-M2-D10
aggaggacctttagcccttcaaactgcggaggccagcctccaacgtggcaacctcttacgaccgttttgaaggctcaaacaatcacactggaggttgcagcatcaggaataatccagtgcagaacaagctgatgaacggcgaaaatccaatcaacattaaccacgctcaaaccgcaggccttggcgtgaggcttgcactagctcttcctcgagagatccttcaccatcagacgaagacatggacggagaagtagagattctggggttcaagatgcctaccgaggaaagagtgaggaaaataaaggaatccaatagagaatcagccagacgctcgagatacaggaaagccgctcacctgaaagaactggaggaccaggtagcac

SEQ ID NO: 28589 - DNA, 274 bp, Zea mays
  Clone ID: LIB3180-035-P2-M2-D11
gaaacgtggtgatattcctcttcaaccggggctatgagaaccaggactggtccaaggacatgcgcttcaagacctaagtaacggacgtggagggtagccttgctttggacctgttcaacaagggcagtttgttagacatgaagcactacctagatcagtacgacccttggaaggtggtgccgttcaaccagttttactgcacgagtctttgctgggtaccctgagcgaccacttgttcatgggcttacgatgcatgcgtatggtgaacaacatg

SEQ ID NO: 28590 - DNA, 229 bp, Zea mays
  Clone ID: LIB3180-035-P2-M2-D12
tcgcgttgatcgcctggggtcaaaccctaagcagggagttgatttatccgctgcagccatgagtaagttgcagtctgagtctgtcaaggatgccatctcccagattgttggggatgccaaggagaagaataggaagtgcactgagactgtgcaacttcagattggcctgaagaataatgatccacataaggacaagtgctcaatgtcttttttaagtggccccattatc

SEQ ID NO: 28591 - DNA, 310 bp, Zea mays
  Clone ID: LIB3180-035-P2-M2-D2
actcctgcacgcctccgcaaccgcaaccgcgtggtctgcgtgcgcgatcccgagaggcccagccatcagcttccttggcggggtgtgtatgcgcgtacgtcggccgtgaccagatcggctgagccaaggccatggcggaaccggccctcctcccgccggaccccttcgcggacctccccttccccgaatttcagggcccatcgacggcgacagcttcgcgcttgaggacttcgatctggaggatctggacctggacgtggacttcgacctcgacctcttcggctcggacgggcaaccctttgaaccgccc

SEQ ID NO: 28592 - DNA, 515 bp, Zea mays
  unsure at all n locations
  Clone ID: LIB3180-035-P2-M2-D3
caacgcgtctcgctcaatattctaaannagttaaggctagganngaaggctataacnnttcttggcttaccaagacacctattgctcgaggtaaagcattgtgctcatgatnaatatggcacacttgtttgagcgaaggtagaaagaaagcttctcgaggaagggctgcgtgcctgcttttcctgggtatcattgncctgtcaaagatattcggaaagatctgaagaggtctttgcgaaaagattcnntggttcctccagaagctatatagatttgacctcaactgggaccccttaccttctggaagtgaaccgcactgagagaaggtctataatatgatanntcaatggaggaaggaagcttngcgcccttaatttttgcacctatcccaaaggttattgtgattggccttcttcaacttcttgcaccaaataagctttttgggaagttacctgggttgacacctgcagattgggcttggcttccgatcttggcacaagttgatgtcaaaattt

SEQ ID NO: 28593 - DNA, 445 bp, Zea mays
  Clone ID: LIB3180-035-P2-M2-D4
gcccacctagcaccatagaaggcacaatggtgtaccaacaatggcagctaaaatatttggcctccttatgctccttggtctttctgcaagtgctgctacggcgaccattttcccacaatgctcacaagctcctatagcttcccttcttcccccgtacctctcaccaacggtgtcttcggtatgtgaaaacccaattctcaaccctacaggatccaacaggcaatcgcagctggcatcttacctttatcacccttgttcctccaacaatcatcagccctattacagcagttacctttggtgcatttattggcacaaaacatcagggcacaacaactacaacaacttgtgctagcaaaccttgctgcctactctcagcaacagcagtttcttccattcaaccaactagctgcattgaactctgcttcttatttgcaacatcaacaac

SEQ ID NO: 28594 - DNA, 360 bp, Zea mays
  Clone ID: LIB3180-035-P2-M2-D5
acccttcttttcgcctaagggagtagcggacccagccgccaccaccacttgttcaatgtgtttcctttcccgtctcgcctcccggagcgcaagaaaagctcggattcctggtggtttctaccatcctccgtcctcgatctgagcgttgcctgcttccctgcccccccgctcagatgtccgccttccgtgtcctgtaaaatctttcgcgcgcagcaatcttcccccacttgtcggctgtcctgctgctgctgctgccaatggcgaccaagggagggaacgcaaggggcgttccggtggggcgctgctggaggccgcgctcctacttagctccttggttcccacctccgcgtcctggtaccc

SEQ ID NO: 28595 - DNA, 302 bp, Zea mays
  Clone ID: LIB3180-035-P2-M2-D6
cccttccttaaaaccatggaacccgttccggaagagcgtgtccttaaccggcgctggcggtttcgtcgcgtcggagctggtgaagctcctcctttcccggggccaatacgcggtccgtggcaccgtgcgcgaccctggtgctagcaagaatgcccatctcaaggtgctggaaggagctgaggaaaggttgcagcttctcaaggctatctgatggactacaacagcattgcatcagcagttgccggttgtgagggagacttccatgtagccaggcctctcctttcccattgacccttcaaccc

SEQ ID NO: 28596 - DNA, 344 bp, Zea mays
  unsure at all n locations
  Clone ID: LIB3180-035-P2-M2-D7
tcgcgccccgccccgcccctcaggtcccagctctcgctctccagtctccaccggcggttcggtgctcccttccgggattcccctccggcgagcttggtcaacttcgctccaggtttccacgtcgtccatggcgcttgtcgtgatgtgtgggcagccgtgcagcggtaaaacagcagccgccacttgccttgctgtgggctgcactcctnctngcctgacctcactgtccgaatcatcgatgagtcatccctccatctcaggcgcaacgatagctacaaagatatggttggggagaaaaacttgagagggcttcttagatcagaagttgacaggtctgtgtcacg

SEQ ID NO: 28597 - DNA, 279 bp, Zea mays
  Clone ID: LIB3180-035-P2-M2-D8
ttcttttacctgggacatttatcgactctggagggatagtcataaactaaatctccatatgcccaagagctgagctggtaaatataggatcacatgttaacactgatgccatggataccgtcgcgtggtgtgcactgccttgcaaggggaaatcaatggccaccacttgccttgccttattctggaattcttattggctgacgtgactgggcaaatcattgttacaggacccccccattttacgcgcaacaattgctacaaagacttggagcttcaaaa

SEQ ID NO: 28598 - DNA, 367 bp, Zea mays
  Clone ID: LIB3180-035-P2-M2-D9
cttcagaccattagctttatctactccagagcgcagaagaacccgatcgacaccatgagggtgttgctcgttgccctcgctctcctggctctcgctgcgagcgccacctccacgcatacaagcggcggctgcggctgccagccaccgccgccggttcatctaccgccgccggtgcatctgccacctccggttacctgccacctccggtgcatctcccaccgccggtccacctgccgccgccggtccacctgccaccgccggtccatgtgccgccgccggttcatctgccgccgtcaccatgccactaccctactcaaccgtcccggcctcagcctcatccccagccacacccatgcccgtgccaaca

SEQ ID NO: 28599 - DNA, 279 bp, Zea mays
  Clone ID: LIB3180-035-P2-M2-E1
tgggaaacgaggtattggaaaatctcctgcacctagccttaaggggaagggtcatgactcaaaggacccatcagcttcagaagttgatctccctggggcaaaagttgggaaaggctgcgttcgttttgccccaaagcctataggttaccttcatattgggcatgcaaaggctgactattgaacaaatactttgctgaaagatatcaagggcgcttaattgttcgatttgatgacccaaacccttcaaaagaaagcaatgaggttggtgagaatcttttg

SEQ ID NO: 28600 - DNA, 383 bp, Zea mays
  Clone ID: LIB3180-035-P2-M2-E10
gtacccactcacccgttgcctccaaacgcatttctcccgagcgccgccgggagcctttgttccagcttcgttcatggcttccctcaccggatccgctctctcctttgctaggcccgtcaaggcaatcagcattaagtctgtctctttctctggtctaaggaaggataatgtagccttccgcttgcagccagtgcccaaagattcgctgtctgctgtcctgctaaaaaggagactgtggatcgggtttgtgatattgtcaagaagcagcttgcacttcctgagggcactgaggtctgtggctcctctaagtttcaagacctcggtgctgattcgttggacactgttgagattgtttagggccctgaggaggctttcaagatcac

SEQ ID NO: 28601 - DNA, 337 bp, Zea mays
  Clone ID: LIB3180-035-P2-M2-E11
gcaagccaattcgctctgtgcctgtgccgctgcctaccgtcgcgcgagacgggcgagctcctctcccggccgccgacgccgcgggggattccttttccccggaatgctctgccgctccgtccgggcggaagaggagcactaggcggcggctcggatggggcgcccggggtacatcacggtgccgatactctcggtctcgccgcgatcggctatgtctactacaccacggtgttcctggcgatcccccgcggagctggggctctccacggtgaccgtgctcgccaacgccgtggtctttaccgcgctcgccgccgactgcgtcggtacctacgccgtg

SEQ ID NO: 28602 - DNA, 329 bp, Zea mays
  Clone ID: LIB3180-035-P2-M2-E12
atggtgtatggtttcattccccatgtcagctgagttgggatgcaaattaaacggtttcatattttttgacacctaaaaacaggttcataatttgagggtgtaaattaaactgcactttcaggtgacagggcagatggttttttgtttcaatttagaaaggcgcatggaagcttcaatattatagaagaatttgcttcttactgtttttttattacatattgataacatatgctttcatttgaagcattcacctttgtaaatatttatcattggccatctttggtccttggtactaattctttactttgtcaactaacatactgtcatgc

SEQ ID NO: 28603 - DNA, 370 bp, Zea mays
  Clone ID: LIB3180-035-P2-M2-E2
gtcaagggctgggagaggctttacccttgaggagttgaaggctgcgggcattccaaaaaggcttgctccaaccattggcatttctgtggatcaccgccgtaagaacaaatcccttgaggggctgcaggccaatgtccagaggcttaagacatacaaggccaagctggttatcttcccaaggcgtgctcgcaaggtaaggctggtgactctactctggaggagcttaccactgctacccaggtacagggtgactacatgccaattactcgcggtgagaagcgctctgtagaggttgtgaaggtcacagatgagatgaaggcgtttgcggcctatggcaagctccgacttgagcggatgaacaagaagcacc

SEQ ID NO: 28604 - DNA, 401 bp, Zea mays
  Clone ID: LIB3180-035-P2-M2-E6
acgcttcgtttcgtctaaaacaaccttgtttcgaattggggatctttccaaaggtccgtatttcgctcctggttggccccaaaccctctttttatggcagggccgacgaaggaggcgactgataccttcatgagcatcacgggggcggacgaggccgtcaccgtacgcaaactcgaggaacatggtggtgatcttaatcaagcaaaaattcacatttcaatgatggagacagcatattgaacggaatcagtcaaaacgccatgcctgctagtcgtgatgatatgatggacctggatggaccacttgataatacatttcaaagatctttgttgccagagtgttttcgtgccccttttgctctaatggatccaaatttccaggaccaatttgttgacagaatt

SEQ ID NO: 28605 - DNA, 437 bp, Zea mays
  Clone ID: LIB3180-035-P2-M2-F1
gtagagagaaggaaaaatatccccaaaccctagctcccgatctcgatggcgaaccctcgcgtcttcttcgacatgaccgtcggcggcgccccggcgggccggatcgtgatggagctgtacgccaacgaggtgcccaagaccgcggagaacttccgcgcgctgtgcacgggcgagaagggcgtgggcaagtccgggagccgttccactacaagggctccaccttccaccgcgtcatccccgagttcatgtgccagggcggcgacttcacccgcggcaacggcaccggcggcgagtccatctacggcgagaagttccccgacgagaagttcgtgcgcaagcacaccgcccccggtgtgctctccatggccaacgccgggcccaacaccaacggctcccagttcttcatctgcaccgtcgcgaccccttggctcgacggc

SEQ ID NO: 28606 - DNA, 333 bp, Zea mays
  unsure at all n locations
  Clone ID: LIB3180-035-P2-M2-F10
tagcgaccctggtccctgccgccctgcgttcgtggctccctgcccagtgcccctgcgtcagcgtcactgcactctccgaggtggaggtggttctcaaatctcaagtccatccacggcgctactaccctcgcctcaatggagttgaggaggcctgcaccctctcctctcgtcgacaactacgtagtacctggtgacgcgtcctggacctctccgagatgaacaaccagaccattaaactcggcgcgggcctgcgtcaggagtgtgacaccatccaggcgactagtgcntggaagctgcggcagttgaaacccaacaagtattggattgaaaact

SEQ ID NO: 28607 - DNA, 250 bp, Zea mays
  Clone ID: LIB3180-035-P2-M2-F11
gttctagatcgcgagcggccgccctgggttttttttttcctgcccagagcccagaagagagtaataccatactgtccatcgatctacacccagcgcaacagccagattattgaagcaaacacggacataagctgaagacggtaagagggcatgcatgaaacattaattctactcatgatcgaccacgacacacaaaattgatcacccatgcaagctggttctttttattcataaaattccgaggagcggt

SEQ ID NO: 28608 - DNA, 240 bp, Zea mays
  Clone ID: LIB3180-035-P2-M2-F12
tcccacacgtccggttctagatcgcaagcggcctccctatatttttatgaaatttaaaatatttttactaaactttccaagagataaaattttttaaaatattaaaaaaattcaaatcactaataacatatctttatatttatttagaaagtataaaacaaacaaatataaacactaactacttattacctattaaactaataatcaacctttcatagattaacaataaaaccataaaac

SEQ ID NO: 28609 - DNA, 308 bp, Zea mays
  Clone ID: LIB3180-035-P2-M2-F2
tcatgactgcgtcatgcatgccaattaattagccaccactccatcgaaaggacccgatcaaactttagtctactcgtcctcctcttctcgcagcagccagcagaccaatcgggacaagcaaactcccccgattagtttaagcagcccgggcccggcgacgaccagctccgttccgcgcggggatttaaacgcgcgagcgagaaggcacgcagcaggcggcagcggcaagcaacgaacgcgatcgcgcgccgacgacgacgcgcggtgccggcgcctggtggggccgtgttgcggactccgctgcatcg

SEQ ID NO: 28610 - DNA, 394 bp, Zea mays
  unsure at all n locations
  Clone ID: LIB3180-035-P2-M2-F3
tcgtcctaacacacgcgaagaaaaggagatagagtacagtttacagacaggcagagagcaaagatgtgtggtggtactatcctctccttctcattctgtccacgttaccattcctttttgtaaacttctccgttttgttttttcatcccggacccggagaaaaccaaanacgaaccacgcgggggttttaacnctttaaggagttgtttctttttttttcttcttcttatttgtaacgaacacgaanngcgcgccgaaaatctacacgctggacccgatactggtgttgtgctattttttttttttttctctcttttttttaacacaacttttttctctttttttatctattaaccaaagtatttttttatgacgatatgtgtaattattcatc

SEQ ID NO: 28611 - DNA, 394 bp, Zea mays
  Clone ID: LIB3180-035-P2-M2-F4
tggccccacccgtttttttttttatttccaaggcttccgtgttgggcttccagtgagatcaaagaatgctcgtggccagcaaggctcatatccaattaagctgttctacacttcaaacatgcccatcattcttcactctgcgctgattaccaacctctattttatatcccagcttctctacaggaagtacagtggaaacttccttgttaacctcttgggaagtggaaggagtctgaatactctggccattctattcctgttggtggtcttgcttactatgtaactgccccatcaagtttggctgatgtccttgcaaatccattccatgcactgttttatgtggtcttcatgctgtcagcctgtgctctgttctcaaagacatggattgaagttt

SEQ ID NO: 28612 - DNA, 404 bp, Zea mays
  Clone ID: LIB3180-035-P2-M2-F6
ttcaggccccgcgatggaggctctccagggggagatgcccttcgacctggacttccacccgtcgtatccgttcgtcgttacctgcattatcaccggagagctctgcctgttccgctacggcccggagtcgcagcctgagaggttacttttgttaaaagcccacagggagtcatgcacagctgttcgttttgcggactacgaaaagcgattttgccagggtcagctgattgctcagtaattgccttagatgttgaatcagccaaggccattgccggctaggaggatgcacatgagaatgccataaaccgacttgtgtgtcttactgaacatacacttgccacacgtgctgttgaaggctgcattaaggtatgccttacccgttagcgatctagctgcaacatttt

SEQ ID NO: 28613 - DNA, 384 bp, Zea mays
  Clone ID: LIB3180-035-P2-M2-F8
gatgcaaccgcagatcatcctgctcaaggagggcacggacacgtcgcaggggcgcgctcaggtggtgagcaacatcaacgcgtgcacggcggtgggcgacaccgtgcggaccacgctggggcctcgggggatggacaagctcatccacgacgacaagggcggagtcaccatctccaacgacggggccaccatcagcgcctcctcgacatcgtgcaccccgccgccaagatccttgtcgacatcgccaagtcgcaggactccgaggtcggcgatgggacaactactgtggtgcttttagctgcagaatccttaaaggaagcaaaaccttatatcgaggacggtgtgcacccccacagtctaatttgcagttatagaactgcaggc

SEQ ID NO: 28614 - DNA, 346 bp, Zea mays
  unsure at all n locations
  Clone ID: LIB3180-035-P2-M2-F9
cctctctctcctatcagtcctcccaggtccagctaccacagcagccgggtggcttaaaggaggagggagaagggggcggggcgagcaatgtcggagcagcagcagccattgccgcagcctcggagcagcatgcgggaggctctggagaaggaggacaaggagaaggctgcggctgctgcggcggccaaggagaaggggccgtccccaagaacggcaacggcggcaagaatggcggcggcgccggcagcggcaacgttggagcgcccccgcagtccggggaggagacggctcgcgagatccaggtggtcagggaggtctaccgccgcgagacggccgngccggccta

SEQ ID NO: 28615 - DNA, 330 bp, Zea mays
  unsure at all n locations
  Clone ID: LIB3180-035-P2-M2-G1
tcccgtttctacccacccgccctgatctagatcgcgagcagccccccttttgtttttttttttatgacagatagtactcctccatttaaatttcaacctcaaacagatctacattagatacatttnnnntaaccaacacctgcatgttccatacgttatttcaaataaagcaaatcggggcaagcaatatacctttatcgcccttttcgtgtcaacaatcccaaccctaactctactgcaatcattcatacaaaccatcttttcacaccatctccattaactcaggctacctaggatcaaccaagaacctatggcaaacctttttcctta

SEQ ID NO: 28616 - DNA, 218 bp, Zea mays
  unsure at all n locations
  Clone ID: LIB3180-035-P2-M2-G10
tcgttcagtcggntgccgcanactggtagggacctttcgccatcaccggagcctcanatcanctncnagcanataccacaccactctactgacgcccgacgagcagtgtaacattttccttcagccatgggtaaggagaagactcacatcaacattgtggtcattggccatgtcgactctggcaagcctaccaccactgccacctgatctacaagctt

SEQ ID NO: 28617 - DNA, 310 bp, Zea mays
  Clone ID: LIB3180-035-P2-M2-G12
tcttctttccaagaaaccaccgccgagcccaagctgacaatcgcgcgaggcagagcagagagagaggcggttagcaaaacaatggaggggaaagaggaggacgtgcgcctggtcgccaacaagttctcggagcgccagcccatcggagacggtgacgcagtgacgcacctgacgacaaggactacatggatccccgaacagctccatgttatagcccgctgagctcaactaatgatcatctaccgctcggtcatcaccaagttaatgagcaccttgctgtgcgtggcataaccatgctaacggccatggt

SEQ ID NO: 28618 - DNA, 389 bp, Zea mays
  unsure at all n locations
  Clone ID: LIB3180-035-P2-M2-G2
tttcccaacccttcctgcttaaaatgccactggatcataaaaggagtgatgttgtaaaccaaatcgggggcgtgcctgttgactgggcattgggtgctttcattgtgcagacgacgatgaacagaacagacattgtccattctaaggtggagaaaacctcgtctgaagacgatctacgatatggagaaaggcaggtacatcataacaagggtcaccaatgagtcgcgcacatcagcgttgggagtggtggactttctgcagcggagcactattgaccatgtatgtagattttcctaaattgatttcttacttagtggccaactacctccatcatgttgccttgcggagtcaacttgttgagnnngagcagcaacccctgtatatgatag

SEQ ID NO: 28619 - DNA, 241 bp, Zea mays
  Clone ID: LIB3180-035-P2-M2-G3
tttcccaacccttcctgccatttaaccttgtgggaaaggaaagcagcaggttactaaggtagtagacagaggaaaactatgccaaagaaaatgagagaacaaccttcttagcttctcctccagtctctctccaccaccgctctatctcctcggtaggaagaagagcaagcaagataggagcaagctagctagcggtacaagggatagtgagcggctaagggacggaccaatttaaaaacac

SEQ ID NO: 28620 - DNA, 369 bp, Zea mays
  unsure at all n locations
  Clone ID: LIB3180-035-P2-M2-G5
tttcccaaccctcctcgtatcctgaggggctgttatttaaaaaggcggctctacccaatggtcacgggttcaattttggnaatcctgacaatgaggttacggttagggagttggcccaaatgatgacagatgtctatgcaaacgtctcaggataggcgccgcttgatgagcctatgatcgacgtgagttcgagtcagttctacggtgaaggatacatgacagtgataagagaattcctgacatgactataatcaacaagcagctaggttggaacccatagacacctttcaaggatctgctgatgacaacattgacgtaccagcacatgacatacaaagaagctgcgaagaggcaaatgtcgcatgcttc

SEQ ID NO: 28621 - DNA, 376 bp, Zea mays
  unsure at all n locations
  Clone ID: LIB3180-035-P2-M2-G6
cttcttccttcttccttccagcgcctttaaaaaggccaaatgcggcagccaccaccnttcgttttcctgtgcggggaacaggagagaaggggagagaccgaaagagggggaggcgcgacgtccgccggatctgctccgacccccgacgcagcctgtcacgccgtcctcactctcagccagcgaaaatgggtccggaggcaggatgaccgataaggagcgggaggagcaggagcaggagcaggtctcccgtgctaccagcggtggcgcaggagtgcaccgttcgccgatggagaagccaccgttcacgttgcggcaaatcaagaaggcgatcccgccgtactgcttcaagcgctccgtgctgaggtccttcttgtac

SEQ ID NO: 28622 - DNA, 266 bp, Zea mays
  Clone ID: LIB3180-035-P2-M2-G7
tcggtagctgtcatttatacgagtaagaagaacttcttttcagatttgtaaagaggctacacaccatgagggaactcgatccgtgtgctagatgcttgcatttgcttgcatgaggagagcgaaagagatttggtggagtttcaagctccagcatctgaaaattgctacatatgatttgtcagcgtgcaagaaattagtcttcatggtgatctccgacccaagaaataacggcaggagcaactacaaaagctgctctcgctatccac

SEQ ID NO: 28623 - DNA, 258 bp, Zea mays
  unsure at all n locations
  Clone ID: LIB3180-035-P2-M2-G9
ctccatggccatggggtcggcatcggctccgtnaccagggccatcgggtgagtgatgcacggcggcggccagcaggcggagcagcaccggcggccggacgacgacacccgcgtcgtggattacctcggcgtcgacgaccagcggacctgcttcagcggtgtgagcccctttgggcctcacataggcccatgggcttagtcctatgtaacctgcctgtgcctgtttcccttcctcatgcaaaagcaaacttactaccct

SEQ ID NO: 28624 - DNA, 387 bp, Zea mays
  Clone ID: LIB3180-035-P2-M2-H1
ttctcccaaccctccctgggttttaaacccattacctttatctactgcagaccccaaaaaaacccgggggacaccataagggtgttgctcgttgccctcgctctcctggctctcgctgcgagcgccacctccacgcatacaagcggcggctgcgtctgccagccaccgccgccggttcatctaccgccgccggtgcatctgccacctccggttcactgccacctccggtgcatttcccaccgccggtccacctgccgccgccggtccaccttccaccgtcggtccatgtgccgccgccggttcatattgccccgccaccatgccactacccttcttaacctccccgttcttattcttatccccagccacaccaatgcccgtgccaac

SEQ ID NO: 28625 - DNA, 323 bp, Zea mays
  unsure at all n locations
  Clone ID: LIB3180-035-P2-M2-H10
ncttccaacaccacctagcctgctatgtcgatagcctccgtatcgtcgagcggcgatcatatcnncctacttcnaaaagtacaaggatgagctcatcaagaatgctgcctacattggcacccctggcaagggtatccttgctgctgatgagtccactggcaccattggcaagcgcctttccagcatcaatgtctagaacgtgaggagaaccgccgtgccctccgtgagctcctattctgctgccctggtgctctccaatacatcaacgttgtgatcctcttcgaggagaccctttaccataagaccaaagatggcaagccttt

SEQ ID NO: 28626 - DNA, 134 bp, Zea mays
  unsure at all n locations
  Clone ID: LIB3180-035-P2-M2-H11
atcaaagcggcagtgcgtanaganaagcttctttcagaacagcatgaggatggtcatccttctcgtcctgtgcctggctctgtcagctgccaacgcctctgcaatgcaaattccctgcccctgcgcggggcttc

SEQ ID NO: 28627 - DNA, 414 bp, Zea mays
  Clone ID: LIB3180-035-P2-M2-H2
ctcccaacccttccctaatgtcctgcttgctccctgttacccatgaggttttctaaaccatcggggggtgccttccaagcttactcccctccacagtcttcgcgaacgccttggtgccaccttctcctcccatcccaatgaactgatagcactcttttccaggtatgttcaccagggcaagggaatgcttcagcgccatcagctgcttgcgagtttgatgccctgtttgatagtgacaaggagaagtatgcaccctttgaagacattcttcgtgctgctcaggaagcaattgtgctccccccatgggttgcacttgctatcaggccaaggcctggtgtctgggattacattcgggtgaatgtaagtgaagctgctttggaagaacttaatttttcttgaatactttgcatttca

SEQ ID NO: 28628 - DNA, 376 bp, Zea mays
  Clone ID: LIB3180-035-P2-M2-H3
aattttaatgttttaagcaacattccctgtaactgttaaggagtttaaggacaaatatctgcctaaaccttatgtgattaaccttatggacgaacttacactgaagggaattacacagttctatgcttttgtggaagaaagcagaaagttcactgtctcaacactctcttttccaagcttcaaatcaaccagtcaataatattttgtaactctgtaaatcgtgttgaactattggcgaaaaagatcacagagcttggctattcttgcttctatattcatgcaaagatgctacaggaccaccgtaatagagttttccatgatttccgtaatggagcatgcaggaaccttgtttgcactgatcttttacaaggggaat

SEQ ID NO: 28629 - DNA, 255 bp, Zea mays
  unsure at all n locations
  Clone ID: LIB3180-035-P2-M2-H5
tttaccaaccctccctgagtccggagacagaccaccggtccggccgaccgctcgcggatccgttggcagatccctcctcgcggccaagcttcnaggagtgaccatgcaggagcccacggagaccaggccagctggtgcggaggatctcgcgaacggcgcgcgagacggggagggacctccgccgcaggttgaggaggaggatgtggaggaggagcctctngatcggcgacggcaaatcatgaggaggcgactgcg

SEQ ID NO: 28630 - DNA, 363 bp, Zea mays
  unsure at all n locations
  Clone ID: LIB3180-035-P2-M2-H7
tcgtttacgcgtgggttggactgcttgctgcctgttttccattgggtatggggaaccatcaacccatgncttccaagctgactcgcctccacagtcttcgcgaacgccttggtgccaccttctcctcccatcccaattaactgatagcactcttttccaggtatgttcaccagggcaagggaatgcttcagcgccatcgctgcttgcggagtttgatgccctgtttgatagtgacaaggagaagtatgcaccctttgaagacattcttcgggctgctcaggaagcaattgtgctccccccatgggttgcacttgctatcaggccaaggcctggtgtctgggattacattcgggggaatgtaag

SEQ ID NO: 28631 - DNA, 412 bp, Zea mays
  unsure at all n locations
  Clone ID: LIB3180-035-P2-M2-H8
tcgttagatgatgatgaaaaaggcnagagagagaatggtaactttaggaggggtcaaaggtaaagcaaagagccatatgtggaggacccagatgatgaagaagataataaaagacctaagcatggacaatttgggagggagttcagcagagctaacacataacgtccacagcctcagacatttatgtttcagagttcaatgttacatatggtggtccaaatggagcctgttatacatattcaacaactaggaggactggtgcacatggatttacgctggaagaaaataaataggctgacacaactactggtaaagtcactcacaggatttcacgtggcattggcattacagggcactcgttaacatgaaatcttaattctgttgggcgtttgaacaccctttaaactttaca

SEQ ID NO: 28632 - DNA, 270 bp, Zea mays
  unsure at all n locations
  Clone ID: LIB3180-035-P2-M2-H9
tttcgtccacaggcaggcaggaggatcggacagantctcttggaagctgcctgcgttcatataaagagagttattaagatggcgttgcttcggctgcttgccatctccctgctcttcgcagtggccactcctgtcagggacatctcccacgatgcctgctcgtcagaagtgaaggatttccagcacctgaacaacagctcgggctccacctgacgctgcaccacccgcagagcccctgctccccggcgcctgtgcccgcctacctcccct

SEQ ID NO: 28633 - DNA, 199 bp, Zea mays
  Clone ID: LIB3180-036-P2-M2-A10
tgagcgttcaccgtcgcagtcacacaagcacgaccacgcacacgcggtaaacacgcgcgcgctcaaacagttcgaaatggcgctcgccgccgccatcgtcgtcgtcttcctgcttcctggccttttcctcacggcgatggcggccacgccgtaccctcacggtcggggcggcgacgctcttgtgggcgcgtccaataag

SEQ ID NO: 28634 - DNA, 277 bp, Zea mays
  Clone ID: LIB3180-036-P2-M2-A11
acatcagtagttcaaaaaacccaacaaattattgcgggactgcaaataatgccggtgcgatcttggttttgggtagagatcttgtggttgcgccaaaactaatccatcctttgcccctggcaattacgtcacctgaggcgtcgccggatcatatggaggacacatggatgcaggagctatatgctaacagaccaccaacttcgaccagggggcgtccccaagcagtagctaatgacacgggttctcttgcctggatatagtagattgaccacacatt

SEQ ID NO: 28635 - DNA, 332 bp, Zea mays
  Clone ID: LIB3180-036-P2-M2-A12
gaagaagaaggcccgacgctctcaccggtgccaccaaaatcgcacgcgagccccaagagatccccaaaccctacacctgcccgccggcgcactcggggaccgtcgaatcgagcaggttgacggaggagagggagcctcgaagatgttccggaaccagtacgacaccgacgtgacgacatggagcccccaggggcggctgttccaggtggagtacgccatggaggccgtcaagcagggctccgcctgcgtcgggctccggtcgagcacccacgccgtcttagccgtcgtcaacaagcccgccttcgagctcttcttctaccagcggaaggtgt

SEQ ID NO: 28636 - DNA, 244 bp, Zea mays
  Clone ID: LIB3180-036-P2-M2-A2
agccctgcagggatagcggacgcacacggcgaacccgttaacgacccacgcgttcgccaaagaagccatgattccaccttattttcgcacatacctggatgcacaacaggaaagcatacaaccgaaaaaccaatcacaaaagctgtttcatctaaccgtacaaaggcaacaccgatccagtcctttaagcagggtgtgggagttgatgtgtgtgcaaggtgtcttcaaggttttttttgttacc

SEQ ID NO: 28637 - DNA, 246 bp, Zea mays
  Clone ID: LIB3180-036-P2-M2-A3
cttccaccctgcagcccctgccgtccgtggcgctggcgaccagggacagaatggcgcgcagcatccccgggcggtgagcatgatgggcctcctggaagtggcgaaccggccccttgataactacatgaagcagaacggcctgacgagcctggcgggggagcaaggaggtggcagttccagcacggccacggtcccgccggctccagtggagagaggggatcttcctttcaagagggacccgttatt

SEQ ID NO: 28638 - DNA, 250 bp, Zea mays
  Clone ID: LIB3180-036-P2-M2-A4
ctggatattagcctatccggcaggaaggtaaattagttggagattctaacgacggctgctggcaagttcgtcatagactggaaaacaaaggacggttgtttgaagattatgatacttaagcgagtaaagggttggttgtaagatcaatatgttcatgagcacaccagtggggaggcaaacaacttcacaatggatctttttgcaccgtatgatgtccaaaggtattggcaacacattggaaaagcctttt

SEQ ID NO: 28639 - DNA, 119 bp, Zea mays
  Clone ID: LIB3180-036-P2-M2-A5
tcgctccgtttcggtttcccttccattccgcgtctctcccccgggcttttccgcttctcttccctcgttcgaagaagctcgcagcagccgcctaatccagcggcagttgaggatggctg

SEQ ID NO: 28640 - DNA, 418 bp, Zea mays
  Clone ID: LIB3180-036-P2-M2-A6
ctcaaatggagtttttgaggtatctctgcgtaaccttcaagggaactcatggtggaaacgttttctgaatcactctttttttcattgtggaaacatcttctgaattacacactgttctgatttgattctatgtattgctactcaggtcaaagcaacaaatggtgatactttcttgggtggtgaagattttgataatacactattggagttcttggtgagtgatttcaagaaaactgagggcatagatctgtctaaagatagattggccctgcaaaggcttcgtgaagctgcttagaaggcaaaggttgaacttttcgtgactttttagacagaaatcaatctgccattcataacagctgatgcttcatgggcaaaacatttgaacatcacacttgcaaggtcaaaattttgaattttt

SEQ ID NO: 28641 - DNA, 335 bp, Zea mays
  Clone ID: LIB3180-036-P2-M2-A8
cgcaagggcccggatggtccacgcacaggtgtttttccaaaaagcttctcctgtccggaataatctatgatattccgaacagtcgacttagagtagttgtagatgaacttatccacctgacaaatgatcaactgggtaaactagttagtccataaggtttgtgatggtcgtcaaacaccaaaatcgattataggaaatgttgaggccatttccctttcaagaggaaaccgtgattcggttgtagctatccaaaaccaagtcggttccatagatccaataaacatgcaccagattaggatgtggatgatccgcaccacataaggatctcacaataa

SEQ ID NO: 28642 - DNA, 378 bp, Zea mays
  Clone ID: LIB3180-036-P2-M2-A9
ataaataaatattccaggtagtataaggtaatcaggttgcaatgcaagtcaaaagaaatccgatacaataaagtaactctgatagttcgctattggaaaactgggacttcgtgatacagagttaaaaagctcatggttgctggaaaaagccctctaatcagataaaccagccttgctcttcaagtgtgccttgaaatccatgatatcaccttcccaccttgtcaccgcctgattctcacacacccaaatctcttgagcaacctggttgatcagcctgaaatcatggctcaccaagaccaaaccaccatcccactcattcagtgcctccgccagggagtcaatggtctcaatgtccaaatgatttgtcggctcatcgag

SEQ ID NO: 28643 - DNA, 262 bp, Zea mays
  Clone ID: LIB3180-036-P2-M2-B10
tcgcactgcccccgctctgctgcaactccacgtcggcccggccgccctttccacccaccttgatcctccgatccgttggtgcttgaccgatccatggacacccacatcggatccgtgaacggggcggcgtcgaaccagacggttggctgcccggcgtcggcgccggggtgcccgatggcgttcacgccggcgcagcccgcggcgaccctgtcggcgggggagtgtataaaatattttttatttttactgtttttttgttctt

SEQ ID NO: 28644 - DNA, 407 bp, Zea mays
  Clone ID: LIB3180-036-P2-M2-B11
tgctccctgttgaccattgggtattctgaaccatcgagccatggctgccaagctgactcgcctccacagtcttcgcgaacgccttggtgccaccttctcctcccatcccaatgaactgatagcactcttttccaggtatgttcaccagggcaagggaatgcttcagcgccatcagctgcttgcggagtttgatgccctgtttgatagtgacaaggagaagtatgcaccctttgaagacattcttcgtgctgctcaggaagcaattgtgctccccccatgggttgcacttgctatcaggccaaggcctggtgtctgggattacattcgggtgaatgtaagtgagctggctgtggaggagctgagttgttctgagtacttggcattcaaggaacagctggtggatggac

SEQ ID NO: 28645 - DNA, 222 bp, Zea mays
  Clone ID: LIB3180-036-P2-M2-B12
gctagctgctcgccacaactggcgcgcgtcactcaccgggccagttacgccacgctcgggctcgatcggcatcgattcccccaatgccggacccgcacccgcacaccaactcggaatccctagcactagcaccgccccggcggcaggcaggcagggggggttgccggaggccgttcgtagcacggaaggtgttcggatcgatccatggagcgcgcgaggagg

SEQ ID NO: 28646 - DNA, 360 bp, Zea mays
  Clone ID: LIB3180-036-P2-M2-B2
ggtagtagtaaaaccaggtaggtgtggctggctcgtgcagcggcggcaggcggcagtgagagcgattagcgcggcggcggctagctcggtcaccaagttcatcaagtgcgtcacggtcggcgatggggccgtcgggaagacctgcatgctcatctgctacacctgcaacaagttccccacggattatatccccaccgtatttgacaacttcagcgccaatgtttccgtgggtgggagcatcgttaacttgggcctttgggacacggcaggccaggaggtttacagcaggttgaggccttttaattacaggggtgccgatgtgttcatcctttccttcttcctggtcagcatggctagctt

SEQ ID NO: 28647 - DNA, 243 bp, Zea mays
  Clone ID: LIB3180-036-P2-M2-B3
gccgtctgaagtatgagatgaggtcttacaatgagatgggggtgattcagatgaaacaaatgggttaaaaccaccaacaacttaattaccttaaaaaccagattggtaaaaacaaaccaccaattaaaaccagtaaaaaaataattgggtgttgttacccaaaacttcctggggcttttggaaaaaatttttttttgttgggagtaaagcaaatgaaagccccttggggtcctggtaaaaatt

SEQ ID NO: 28648 - DNA, 303 bp, Zea mays
  Clone ID: LIB3180-036-P2-M2-B4
ccattattccttttcacgcttcacacgcaccgcccgcaggccgtcatcccacgcattcgcatccttccccgctctcgctctctcagccgcagagccactcgtgtcggtgacggcggcgaaggcaatgtcatccctccgcccgtccctcctgctcgtggtgtcgctgctcgcggcggctctgcttgcagcggcgccgtcctccgcgtttcgcgacctccgcccgctccaggcgagctttgttgtgcgcggtcgcttttggtgccgacaactgccgtgcgggctttgtgacccccttatccacct

SEQ ID NO: 28649 - DNA, 389 bp, Zea mays
  Clone ID: LIB3180-036-P2-M2-B5
gcaaaacgtctttagcgctcgtccgtctaaactgtggtcggtgtacttccgctcactttttgagcggcgtcttgacaacaagagcaagaaagtatcaaaacccgagagcaatggaggcggtggggaagagcgtgtgcgtgaccggcgcgggcggcttcatcgcgtcatgtctggtgaagctcctcctctgccggggccaatacaaggtccgtggcaccgtgcgcgaccctggtgctagcaagaatgctcatcttaaggtgctggaaggggctggggaatggttgtagcttgtcaaggctgatttgttggactacagcattgttgcatcatcatttgccgtctgtgagggtgttttctatgtagctagccttgtcctttccgttcggtct

SEQ ID NO: 28650 - DNA, 378 bp, Zea mays
  Clone ID: LIB3180-036-P2-M2-B7
ccaatcccaatcccgagctccaagcaaacccacctcccgggctgtcccccactcgccgatccagatctcctccactccaaccggacgcctccgccgccgctggcatcggtcgagccacacgcgcacgccgttgaggaacccggagcgggcgccggcaatggagcagctgcggacgatcgggcgggagctggcgatggggtcgcagggcgggtgggggcagtccaaggagttcctcgacctcgtcaagtccatcggcgaggcgcgctccaaggcggaggaggaccgcattatcgcgcgcgagcttgagcacttaaagcgccgtcttgccgaccccgacgtgcctcgccgtaagatgaagggagttccttcttcgtcttg

SEQ ID NO: 28651 - DNA, 336 bp, Zea mays
  Clone ID: LIB3180-036-P2-M2-B8
taaccattcctcccaacaccacctcgcctgcgatctccgtagcctccgtcgcgtcgagcatcgatcatgtcggcctactgcggaaagtacaaggatgagctcatcaagaatgctgcctacattggcacccctggcaagggtatccttgctgctgatgagtccactggcaccattggcaagcgcctttccagcatcaatgtcgagaacgttgaggagaaccgccgtgccctccgtgagctcctattctgctgccctggtgctctccaagacatcagcggggtgatcctcttcgaggggaccctgtaccaaaagaccaaggatggcaagcctttttgt

SEQ ID NO: 28652 - DNA, 390 bp, Zea mays
  Clone ID: LIB3180-036-P2-M2-B9
tcggtgtacccttcccatgcccgccgttctgtctctcttttcccactctcccgcacttcctccattgttccctttttctctcgcggagtagcggtgatccagacaccgagtgtcctacgcgtcacggaccgtgcacatggcggcggggtcgatccgggtcaccatggaggtgggcgccgacggcgtcgcgctcataaccatcgccaacccgcccgtcaacgcgctccaccccatcatcatcgccgggctcaaggacaagtacgcggaggccatgcgccgtgacgacgtcaaggccatcgtgctcaccggtgctggaggcaagttctgtggaggatttgatatcaacgttttcacaaaggttcaccagactggggatgtatcacttatgcc

SEQ ID NO: 28653 - DNA, 346 bp, Zea mays
  Clone ID: LIB3180-036-P2-M2-C1
cttcactagttgagtgtttgataaacgagctatcctcatggaagctggggagttggaacgcctcacaggccagagccgtgtccgaccctgatcttctgtaacgggttcgagtttgagaacctctttggctacccgaaagatggaaaactttacctgagcgtgtcgaaatcagattaaactgtggtggaggttttaagcgatacttacttgcaaattgtttgactgacttgggtttaggggcaaatgactaatttaactatttattaactggttcctttggaggtttacctaaagatagctgaaactcacacgatttttatcgcttaaaagcaatgattagaggcat

SEQ ID NO: 28654 - DNA, 184 bp, Zea mays
  Clone ID: LIB3180-036-P2-M2-C10
tgcaccaagaaatccatcgagaggccgtcgacaggggaattaatggcgttgtcgtctagcagcatccaccggcgcctcatactcgcagccgtcgtcctgctctccgagctcgcgactgccagcgccagccccgatacctcctgcgtgccgcggtggtccatctcgcacaacccgctcctgagct

SEQ ID NO: 28655 - DNA, 408 bp, Zea mays
  Clone ID: LIB3180-036-P2-M2-C11
gggagtgtttgagttcgagaagtttgcagctggcactgaggcgattgccaagaagctagctgagcttacaaccacgaagggtgtcactaccatcatcggcggcggcgactctgttgctgctgtcgagaaggctgggctggccgacaagatgagccacatttcgaccggcggcggagcgagcttggaactcttggaaggcaagactctacctggtgtccttgccctcgatgacgcctagatccgctgctgctgctgctactcaggttctgccagctttgcgtgtcatcttgtttcggaccttggtgtagcactgcaaggctaaggtttactcctccgcacatggacttttggggataggcttgccaccgtgttttggtagatgagtcgtggaataagcttttaacttct

SEQ ID NO: 28656 - DNA, 375 bp, Zea mays
  Clone ID: LIB3180-036-P2-M2-C12
ggcggtcaatccccacaggccacaatggcgtcgctgcggggcctcccctcgctgctttccccgtccaagcccctgctccggcgccggttccctgatccgaggttcgcgttttacttctgatgcagtgtaaactgttctggccttataagatttgctcctttacatactgttgttttttctagcttgtttctcttgtatgtttagtattctctctgttgttctttgtccttttaactctatatttccgcttctatcttttttttctgagtgttcttttctttttacttttttttatttttttttttttatccttttataatactttttccatagtttcttatgtttatttttttttttattaatgttctttctttt

SEQ ID NO: 28657 - DNA, 387 bp, Zea mays
  Clone ID: LIB3180-036-P2-M2-C2
gagaccaactagcaacatagaaagcacaatagtgtaccaacaatggcagccaaaatattttgcctccttatgctccttggtctttctgcaagtgctgctacggcgaccattttcccacaatgctcacaagctcctatagcttcccttcttcccccgtacctctcaccagcggtgtcttcggtatgtgaaaacccaattcttcaaccctataggatccaacaggcaatcgcagctggcatcttacctttatcacccttgttcctccaacaatcatcagccctattacagcagttacctttggtgcatttattggcacaaaacattagggcacaacaactacaacaacttgtgctagcaaaccttgctgcctactttcaacaacaacag

SEQ ID NO: 28658 - DNA, 227 bp, Zea mays
  Clone ID: LIB3180-036-P2-M2-C3
tcgggtagatgcggcagtgatgtcgactacgttgtgagctgccctcccctgctactttgggtgggggtttagatccgctatagttatggcggatctcgccatggaccattaggagttcaatttggtcaaaggcgaaaggagcttgcctcgtagctgcaaagtctttaaagagcattgtttgggagctgaaagacattagggacgagcatcttgtagcatgctacaga

SEQ ID NO: 28659 - DNA, 379 bp, Zea mays
  Clone ID: LIB3180-036-P2-M2-C4
tgccgtcacaatgctgtgcctcgtgtcgccctcttcctcgccgactccggttccgccgccgcggcgctctcgctcgcatgctgatcgggcggcaccgccggggatcgcgggtggcggcaatgtgcgcctgagtgtgttgtctgtccagtgcaaggctcgccggtcaggggtgcggaaggtcaagagcaaattcgccactgcagttactgtgcaagaagataaaactatggcaactgccaaaggcgatgtctaccatttccccatatacgacctggaccccaagctggagatattcaaggaccatttcaggttccgtatgaaaagattcctagagcatcaaaggattaatttgatgaaaattagggatgtctttaatctt

SEQ ID NO: 28660 - DNA, 396 bp, Zea mays
  Clone ID: LIB3180-036-P2-M2-C5
tcggtttgactgttgctgaacatttccgtgatgctgaaggacaagatgtgcttttgtttattgacaacattttccgttttactcaggcaaactctgaggtgtctgctcttcttggacgtatcccatctgctgtgggataccagccaacccttgccactgatcttggaggactgcaagagcgtattacgacaacaaagaagggttctattacatctgtgcaggccatctacgtgcctgccgatgacttgacggatcctgctcctgttactacctttgcccatcttgatgctacaactgtgttgtcacgacagatctttgagcttggtatttatcctgctggtgatccactggtttcacatcaagaatgctttcttcccacgtgctgggtgtggttca

SEQ ID NO: 28661 - DNA, 317 bp, Zea mays
  Clone ID: LIB3180-036-P2-M2-C7
gatagagaaagagagcctgtcagcccaggaaaaggttcctcccctccttccccacctcgccctcagccctcatcatcctctaacatccgattgtgccctgtgctctgcggttctcggatccaagatttcgccggccggccgccggcggtggctccggcctccgggagcgggagaaagactggatttttcgggccatggagatgtggcctgatccgttcaggcccgggcggtggggtggcttcctgagcaggtctgattcgtatcggttcaaatgatctcggcggcttgattggtcggttccgcttccgccgtggtat

SEQ ID NO: 28662 - DNA, 257 bp, Zea mays
  Clone ID: LIB3180-036-P2-M2-C8
cggaagcttgtgtgaattgtagtttttgtattagattacagtatttaaactgatagtttcctggttccaaagtttttcgccagaaatactggagatgttcttgcctcacataatctgtacattttaccctgttggacctggaaattttcattttgttataaaaaaaaaaaaaatatactgaaatatattaaaatactaaaatataactttattaaataaaaaaataaaatataaaaaaaaaattaaaaataaataag

SEQ ID NO: 28663 - DNA, 186 bp, Zea mays
  Clone ID: LIB3180-036-P2-M2-D1
gggacattttttccagcgattcagcgcgggatcctgctggactggcctgatccctccgtgctggtgtcggcgagcatgcaaggaaggatgcgaggcgcgcggcggatcgcgcgcggggaatcgttccggaaggcggttggccgcgaggtggagccattcacgctgtgcggcgagatgtcccatttt

SEQ ID NO: 28664 - DNA, 318 bp, Zea mays
  Clone ID: LIB3180-036-P2-M2-D10
attccgcctctctagctggcctgtcgaggaccctcgccatcctccccaggcgcaccaccaaacggtccaaacccccagcggcggcgctaggatttgagtctcagcgcgccggcaccgccaccgccaccggcggtgatggcagggcaggagcgtaggacaatcgatctggaggagggatgggcgtttatgcagaagggtatcaccaagctgaagaacatcctcgagggcaagcccgagcctcagttcagctccgaggactacatgatgctctacacgacgatatacaacatgtgcacgcagaagccgtcgcacgacttc

SEQ ID NO: 28665 - DNA, 393 bp, Zea mays
  Clone ID: LIB3180-036-P2-M2-D11
gccaggccggattcgccgccgcctgtagattctcctatccgaccgcggcgcctcgagccgcaccggcaacctcggacctgaatacctgatacactgcacttcttcagtccgcaggaccacagcacgcacaattgttcttcaatctgcaggactgcagccgcgcacaagccgtagctgtttccttggaactttgagctttggaagatgccaaggagaacaggaaatgctgctccaaccaaatcagttgaattggtcaaacaagaccaattggagtttgatgatcctgacgaggtagatgaagaggaagaagttgagtatgaagaaattgaggaggaggttgagtatgataaggtagaggtggtgttggagttattagttttttttatttttttt

SEQ ID NO: 28666 - DNA, 237 bp, Zea mays
  Clone ID: LIB3180-036-P2-M2-D12
ggccactgcagcagacggaggacggcgacggtggcggcggggaagagccgaagaggaggacgagggatagaacggcgagggagaagctgtctctcttcacgctcgggatcgttaaccgtagctgacaaccgtgcggaaacaccggattgtgagggccgaggagagaggtgcggcgaggcctctcgaggaggcgggggcgggatggcgactccgggtaagggaggggctgttcggatt

SEQ ID NO: 28667 - DNA, 365 bp, Zea mays
  Clone ID: LIB3180-036-P2-M2-D2
catttacggatggaacagtgaaatatactatgacttcaatgaatgtccctgaacctgtgatgtccttggcagtttcacctatatctaaagactctggaggacagttttcaaaagctctgaatcgcttccaaaaggaggatcctactttccgtgtgggtttggatgctgagagtggccagacaattatttccgggatgggtgagctgcatctggatatatacgttgaacgtattaagagagagtacaaggtggatgcaaaggtaggaaaaccttgtgtttactttagggaaacaattacccatcgtgctgaatttgattatttgctcaaaaagcaatctggcgtgtaaggttagtatggacgagtt

SEQ ID NO: 28668 - DNA, 428 bp, Zea mays
  Clone ID: LIB3180-036-P2-M2-D3
tcgccaacaagcatcatagaaagtggaatccagtagcaacaatagagcaacaatggagaccaagatattttccctccttatgctccttgctctttctacatgtgttgctaacgcgacaattttccctcaatgctcacaagctcctatagcttccctttttcccccataccttccatcaattatagcttcagtatgtgaaaacccagctcttcaaccatataggcttcaacaagcaatcgcagcaagcaacatacctttatcgcccttgttgtgtcaacaatcgccagccctatctttggtgcagtcattggtacaaaccatcagggcacaacagctgcagcaactcgtgctacctgtgatcaaccaagtagctctggcaaacctttcttcctactctccggaacaacaatttcttccattcaaccaac

SEQ ID NO: 28669 - DNA, 365 bp, Zea mays
  Clone ID: LIB3180-036-P2-M2-D4
ggaatgcgctttgcaaacacaccccaatgctgcactcattggggaagaggttgctgcgaagaaagaaacccttaagaatgtcacaaactacattactgatatcatctgcaagcgtgcagatcttggttacaactatggtgttatccttataccagaaggcctgattgatttcatcccagaggttcaaaaactcatcgcggaattgaatgaaattttagcacatgatgttgttgatgaggcaggggcctggaaaagcaagctttaagctgaatcaagggagctgtttgagtttttgcccaaaactatttaggagcatcttatgcttgtaagagatcctattgcaaatgtcaggttgcaaaaattga

SEQ ID NO: 28670 - DNA, 276 bp, Zea mays
  Clone ID: LIB3180-036-P2-M2-D5
ctcgctttggatcgattggtttcgtaactggtgagggactgagggtctcggagtggattgatttgggattctgttcgaagatttgcggaggggggcaatggcgaccgcggggaaggtgatcaagtgcaaagctgcggtggcatgggaggccggcaagccactgtctatcgaggaggtggaggtagcgcctcctcaggccatggaggtgcgcgttaagatccttttaacctcgctctgccacaccgacttctacttttgggaggccaaggggcatac

SEQ ID NO: 28671 - DNA, 316 bp, Zea mays
  Clone ID: LIB3180-036-P2-M2-D6
aagctggatgcccttgaaattgagttgggatattatgaggagcaggcagctgaagctgctgctgctgaagagaatcataaggttaaatttgatgaagcttcacagaagataaaaatcttggaggaacaacttgcagagacacagagcaagttggagcatttccttatagagaaggaaagcttgactcaaacaaatagtactttgaatgaggagttggaagttcatcagaacaagttgaacgatttacaacttgcacttgctgctgtattatcagaaaaggaggaggcatctgaagagattcattcgctgcataaaa

SEQ ID NO: 28672 - DNA, 271 bp, Zea mays
  Clone ID: LIB3180-036-P2-M2-D7
tcgcggcgagtacttctcccgcgtgggcatgggcagccccgcgcggcagctgtacatggtgctggacaccggcagcgacgtcacctgggtgcagtgccagccctgcgccgactgctaccagcagtccgacccggtgttcgacccgtccctttccgcctcctacgccgccgtttcctgcgactcccagcgctgccgggacctggacaccgcggcgtgccgtaacgccacgggggcctgcctttactaggtggtctactgcaacggtttttac

SEQ ID NO: 28673 - DNA, 297 bp, Zea mays
  Clone ID: LIB3180-036-P2-M2-D8
tcgcaaaaaggcagaacatgtcttggatatttttgcgaggcagataatcacggaaaaagctaaaagcacacgtgaactgtttgatgatgtttgttgagttgaccctagttagaaaaaaaacgtgagcgaatatcattgaaaggaaattgtgtccgcaatgtatccttgttgaaatggaattgtgttcccaattgtaagtagtattaggtctatcataagtcaaacttttctagctttaatcgaattaacagaaaactgtagaaaatatgtacagcatcaaataagattcattgtatc

SEQ ID NO: 28674 - DNA, 386 bp, Zea mays
  Clone ID: LIB3180-036-P2-M2-D9
ctcaaagcgatgcgcagctccgtaaccacttcgtcctcacttctcagtgcaccttcccgccgcaaccacttcaccacctcctcccagtcccagcaatggagctagtagcgtggctcgtcttcgtgtcctcagtctccctcgctgggctcctgccagtggtctcggcgtcgacgacgacaccgcagcagcaatgtggcggcaataatgtcggacctgccggagtgagagcaggctactggtcgccgtcctcgaaccgctactccgcggtcggcagcatcgacgcgtccctgtacacgcacctttactacagcgcggtgaccatcgacgagacgagcttcgcggtcgttccgcctccgccgacggccgaagacgcctcgttgttcgcc

SEQ ID NO: 28675 - DNA, 291 bp, Zea mays
  Clone ID: LIB3180-036-P2-M2-E10
ctcgctgttggtagcaagttatttattgctagtattattgttattgctgatttgctcccctctgcctttgcgatgtaaatatttatgtacccagccccagccccagccccagcttgtagtgagtagtaacaagcagtagcggtaccttcggtattaaccggcagctagctatttcgcggcattttaatccctgtaagcgtagctctgtggcgtgagatagatgacaaacactgggtatatgtatgtctgatctttctcactgaatgtaccataagagagagtttgtagagt

SEQ ID NO: 28676 - DNA, 387 bp, Zea mays
  Clone ID: LIB3180-036-P2-M2-E11
ctcgtgaagagagatgagctgactcttgagggtatcaagcagttctatgtgaatgtggataaggaagactggaagctggacacactgtgtgacctgtacgagacccttgccatcacccagagtgtcatctttgtcaacacccgccgcaaggtggactggctcactgacaagatgaggagcagggaccacactgtttctgccactcatggtgacatggaccagaacactagagacatcatcatgagggagttccggtctggctcctcccgtgtgctcatcaccaccgacctgcttgctcgtggtattgatgttcagcaggtgtccctggtcatcaactatgatctccccacccagccagagaattacctgcatcgcattggtcgtagt

SEQ ID NO: 28677 - DNA, 328 bp, Zea mays
  Clone ID: LIB3180-036-P2-M2-E12
ctgatttgtctgggagggaaactctggttcggatcaccggtggcatgaaggtgaaggctgaccgtgacgagtcgtcaccttacgctgctatgcttgctgctcaagacgtcgcacagcgctgcaaggagcttggcattactgcactgcacattaagcttcgcgccaccggaggcaacaagaccaagacccctggacctggtgcccagtctgccctcagggcgcttgctcgttccggaatgaaaatcggacgcattggtaaggaggtcctggatctttcaagaggacgttaccccggtccccactgacagcacttgcagaaagggcggta

SEQ ID NO: 28678 - DNA, 422 bp, Zea mays
  Clone ID: LIB3180-036-P2-M2-E2
acgatcctagtaagaacagcttggcgccgttagtccagtgcacctcacacatgtgcccggtaagggtgcactggcacgtcaaggtcagctacagggagtactggagggtgaagatcacggtcaccaacttcaactaccggacgaactactcgcagtggaacctggtcgcgcagcaccccaactttgacaaccttaccaccattttcagcttcaactacagacctttcaacccctacggagtgatcaacgacacggcgatgctctggggcatcaagtactacaacgatctgctcatgacggccgggccagacgggaacgtgcagtccgagcttttgtttcggaaggagccgtccacgttcaccttccacaaaggatgggcctttccgagaagaggttactttaacggagacaactgcgtgatg

SEQ ID NO: 28679 - DNA, 363 bp, Zea mays
  Clone ID: LIB3180-036-P2-M2-E3
tttgagcattcagaaacacaccaagcgaagcgcactagcaacaacctaacaacaatggctaccaagatattatccctccttgcgcttcttgcgctttttgcgagcgcaacaaatgcgtccattattccacaatgctcacttgctcctagttccattattccacagttcctcccaccagttacttcaatggccttcgaacacccagctgtgcaagcctataggctacaacaagcgattgcggcgagcgtcttacaacaaccaattgcccaattgcaacaacaatccttggcacatctaacaatacaaaccatcgcaacgcaacagcaacaacagttcctaccagcactgagccacctagccatg

SEQ ID NO: 28680 - DNA, 388 bp, Zea mays
  Clone ID: LIB3180-036-P2-M2-E5
ggccgcttctgtctcctcttcttcccccgcctcggagcgccagcggcttcatccgatctccttctcacctcctcacctcaggcgcacaccgatcactctcttccctcctccagcagtccagctcacacccaccgccccaccccttccactcaaatccagggacatcgcagatccaccggctctccgatccgttcgcctccgcacccgcccgatcggatcccgcaggtgagccccctccccctccattgtccccggcgcgccgtgctccgttcgctcgcatctgctgctgctactcatgctgctggtaggttttgtgcccgccacgagttagatggtttacgatggcgccgtgaaggaccaggaccaggagaccgtggcggtgagcact

SEQ ID NO: 28681 - DNA, 427 bp, Zea mays
  Clone ID: LIB3180-036-P2-M2-E6
aagaagaagaagcacaagtccaaggatctccccgccactgacccgccatcgttcgccgaggctgaggagaagactgatggctacctaatcaagccccagtccctggtgccgtccctggacacctcgacctggccgctcctcctcaagaactacgaccgcctcaacgtccggactggacactacaccccgctcccctccggccactcgccgctgaagcgccccctcgccgagcatctccgctacggcgtcatcaacctcgacaagccgtcgaacccgtcctcccacgaggtggtcgcctggatcaagcgtatccttcgcgccgagaagaccggccacagcggcacgctcgaccccaaggtcaccggcaacctcatcgtctgcgtcgaccgcgccacgcgcctggtcaagtcgcagcaaggcgccggca

SEQ ID NO: 28682 - DNA, 382 bp, Zea mays
  Clone ID: LIB3180-036-P2-M2-E7
tcgtcaacacagcacaggcagttctagagagagagagagagagagagagataaagatgtcgtggttcgggcaccaccaccacaaccagccggctcccccggcgtcgggccccaaccaggtgttcaagatcttctgccgcgccaacgagaactactgcctggccgtccgcgacggcgccgtcgtgctggccccggtcaaccccaaggacgaccaccagcactggtacaaggacatgctcttcagcacccggttcaaggactaggaaggcatgccggcgttcgcgctcgtcaacaaggccacggggctcgccatcaagcactcccttggccagtcccacccggtcaagctcgcgccttttaacccggaccaggaggactcgtct

SEQ ID NO: 28683 - DNA, 405 bp, Zea mays
  Clone ID: LIB3180-036-P2-M2-E8
attaaataccaaacgagtgtgcgagcgcgcaaagctaatgcaccaatgggggtgcgaatagaactctccggccaggtacggcctgtttcctacattctgccccagtcctactggctgctttatgtcttgtgcaactgggaaaaatgtgggcgttgaaacacggccgaacttgaaagcaagagcagctaaggagctgtacttaaacaaggatggctcagctatcaagaagctccagactggagtcaataagtttgcaaacctagtcggagttacacttggaccaaagggaaggaatgttggtttggaaagcaagaatggacctcttaaaattgttaacgatggtgtttcagtttccagatagtgttatcttaatatccttgtttagaaacattttgcttaaatttt

SEQ ID NO: 28684 - DNA, 413 bp, Zea mays
  Clone ID: LIB3180-036-P2-M2-E9
agatgatttgctgctgcaacaagatggatgcaaccactcccaaatactccaaggcacgttatgaagagattgtgaaggaagtctcatcctacctcaagaaagttgggtacaaccctgataagattgcctttgttcccatttctggttttgagggcgacaacatgattgagaggtccaccaaccttgactggtacaaaggcccaaccctgcttgaggctcttgaccagatcactgagcccaagaggccttcggacaagcccctgcgtctgcccctccaggatgtgtacaagattggtggtattggaactgtaccggttggtcgtgtggagactggtgtcatcaagcctggtatggtagtcacctttggtccaactggcctgactaccgaggtgaagtctgttgagatgcaccac

SEQ ID NO: 28685 - DNA, 411 bp, Zea mays
  Clone ID: LIB3180-036-P2-M2-F1
ggccacagacctgatcgatcgatgagcgagaggtagcactcgaagtgtcgggtcttttcctctcgccatttctttctttttttcccttcccgggggcgaaaaaaagagtctagtttccctaggctacaacacgtacgctgctgctctttgcttcaagagttaaatttacctacctcgtcacgggcttggtccatcattgatccggatgtcgcttttttagtcctcgcatggactgttagtagttcgcgtcgcgtcaagggagacctaccaatgacggggctggttgaattcaataagctgagcgctaagcttatctttggcgctgacagccctgctattcaggagaatagggttgctaccgtgcagggcctatcggttactggttctttaagagtcggagggtaatttttt

SEQ ID NO: 28686 - DNA, 400 bp, Zea mays
  Clone ID: LIB3180-036-P2-M2-F10
ccgaagtgcaaagccccgtagcctatccgtggtcgggaaggcaggcgaaaagcacgcaccaaaaaaaaagaaagctataattttctttttttcttttcttctttcgggtttgaaacccattatcaggcttttgcttttgatattctatatctatctaatattataaagctatttcactggtttgatttacatacctcagtcatgttatttgtctagccttcaatcagaatagcctctccaccggttccgaagattctttcggcatcaatgtgcttttggaatcttcctatgaaacaaataacattcaggaactgtttaggacagaacaggccgcagatcagtagaaagcgagcttttttcgcgtatagccaagccaacctcgaagcccaattagcgcacg

SEQ ID NO: 28687 - DNA, 407 bp, Zea mays
  Clone ID: LIB3180-036-P2-M2-F11
ctactggatgcgtgttatcctcgcatcaaaccgtggcactgtgatggagttgggtattactccaattgtgacctctggtatggtaatgcaacttcttgtcggatcgaagatcattgaagttgacaacagtgtgagagaggatcgtgctctgctgaatggtgcacaaaagttgcttggtatcttgatcgctattggggaagctgtggcatatgtcctgtctggaatgtatggcagtgtaagccaacttggaacagggaatgctattctcattatacttcagcttttctttgctggcatcattgtcatctgtttggatgaacttctccagaaaggttatggtttgggatctggtatttctctgttcattgctaccaatatctgggagaatattatctggaaggcattta

SEQ ID NO: 28688 - DNA, 402 bp, Zea mays
  Clone ID: LIB3180-036-P2-M2-F2
gagaactcgaagggttcaagctgccaacatgggcatatcagaatcaagacaaaagcaagtctaccttatttcactgataaacaaaggcagagttgtggccaaagggaagttagtgactacaaatagccaaagagaaatattaggagcaaagcttggaccaaaatattgtggagttcttgttgaaggccttgaaaatattgaacttggcaatattatagatgaggaggtacctagaccatctaatcagattcgtacactaattgatgctattggctatgttattccttggccaattacacatgtgaagcatgctagaagctcatcttgtacccgcaacgagttggtacctgtagcacgtggacaaagctagatgggaagcctagtttaattggaaagtgaatc

SEQ ID NO: 28689 - DNA, 212 bp, Zea mays
  Clone ID: LIB3180-036-P2-M2-F3
aaaaaactagaaaaaatcccaaaaatcaccacttgattggagatggcggcgcaagggcaggcggcggctggatccgcgtccgagtctggcggctcaccggctgcctaagctgctgcagcggcggcggctgcgttcccggcgacttctttctacgtgggtgacctgcacgagagcgttcaggacgcacagctctttgacgtctttagccaggt

SEQ ID NO: 28690 - DNA, 415 bp, Zea mays
  Clone ID: LIB3180-036-P2-M2-F4
gaagattcctctttaccagcacatcgcaaatcttgctgggaacaaaactctggtgctccctgtacctgcctttaatgtgattaatggagggtcacatgctggaaacaagcttgccatgcaggagttcatgatcctcccaactggtgcctcctcgttcaaggaggccatgaagatgggagttgaggtgtaccacaacctgaagagcataatcaagaagaagtacggtcaggatgcgacaaatgttggggatgaaggtggttttgcacctaacattcaggaaaacaaagaaggccttgaactattgaaggcagccatagaaaaggctggctacactggaaaggtggtcattggaatggatgttgctgcttttgagttcttcggtgagaaagacaagacttattatttttattttaag

SEQ ID NO: 28691 - DNA, 206 bp, Zea mays
  Clone ID: LIB3180-036-P2-M2-F5
tcggcctcacgcatcaaacatgccttgttgcagcttccgcggaccgcctccatgccgtggctgcgatggccttttcctccacgtttacggcaactgcaagcaaccactgatccagcccgttctgtgtcccggcgaatggagactaaccaggacccggaggcggcagtcccaggggcaggggcgacggtagatccgatgcggctagc

SEQ ID NO: 28692 - DNA, 271 bp, Zea mays
  Clone ID: LIB3180-036-P2-M2-F6
ggcgagggcagtcccgccgagcgttagtcacagttgttgcgtgcctaccaggcggctctaactcgatccgtgcagcagacgccgagtcgcggcaaggagtagctaggaactaggaaggaggaggcagggaaaggccaggccatggcgctcgaagctgtggtgttcccgaaggagcacccggggtgtacggcggtcaaggcgcgcccggcgtcactgggctgcggcttccacaccgaggagctcgaggtctagtacaagggcttcttggttt

SEQ ID NO: 28693 - DNA, 344 bp, Zea mays
  Clone ID: LIB3180-036-P2-M2-F7
gtttattcgcaacagtttgcttgggtctgttcgtcctggtggctgattcagtatccttgttgcaggaacgatgacccggcggaacggctgtacgatctacgtgggcaacctccccggcgacatccgcgagagggaagtggatgatcttttttacaaggtgagtggttggttgggtcgattacataatttccctcattaatttttatgggtttttttttttaaatttttatatcctattttttggtcgtttattgtttctcttttttattgtttttctaattttatttgatagattgtggtgatattatttattattttatcatctaaatattattagtatacta

SEQ ID NO: 28694 - DNA, 247 bp, Zea mays
  Clone ID: LIB3180-036-P2-M2-F8
gttttagatgctatgccagaaggcatcaggcaaaatagggctcgaactatattacagcatcttagtgaggcatggcgttgctggaaggcaaatatcccatggaaagtccctggtctacctgtgcctattgagaacatgattcttcgttatgtgaagtcgaaggcagactggtggacaaacgtcgctcattacattcgtgagcgcatcaggcgttgagctacagtttacataattgttttatttaaca

SEQ ID NO: 28695 - DNA, 350 bp, Zea mays
  Clone ID: LIB3180-036-P2-M2-F9
gctgccgcctcggtcgcgattcctaaaggcggcgatggccatgacgcggcgttctgcttcccatctcctatccgccttccggcccttctccctcctcctccagccgcacctcgtcgactcttcgccggcggccgcgtcggcgaggcgggcgatgtcgtcggcgtcggccctgcgtgcacgggacgagaaggatgtggcgcggtggcggtagtctatgggccggatgcggaatatcggtatctccgcgcacatcgactccgggaagacgacgctcacagagcgagtcctttactacacgggtcggatccacgagatttacgaggttgccgtccgagacggcgttggttcta

SEQ ID NO: 28696 - DNA, 424 bp, Zea mays
  Clone ID: LIB3180-036-P2-M2-G10
tcgcccacgcgtacggtctacacaagcctttacaaattgtcctcttagctttactcttaatctaactatagccctagccaaatccaagactaatgccagccctagggacaccaaccagcttggcagcgaccatggggaacccggagaagctgttgaatcagatcttcaacctcaagttcacctacaagtcgctgcacaggcaggcgcgcaagtgcaagaaggaggagatggagcacaagctcacggtcaagaaggcgatcgtgaagggcaccatggtcggcgcccggatctacaccgagaacgccatccggaagctcacctagctcatgaactactttcgcctcgactctggcctggacgccgtcgtggcccggctcgacacgcaggccatgatgcaggtcatgggcaagatcatgcagtccat

SEQ ID NO: 28697 - DNA, 358 bp, Zea mays
  Clone ID: LIB3180-036-P2-M2-G11
ctcgcgtcgcgtccgtttgctgcgcgcctgcgccctccgccgccgccgccgccgccgtaatgatgcagtcgcatctgccctccccggcgaggctggggctcacagcctcgtcgccgtcgctcccgcccaatccggtccccttgaatcccacatcctcgccttcacacggtagcctgccctggagcgcagccgttggcaccagtgctgccccaaccctaacgacctcgccatcgctgctaccgctcctgccgccgctttcgcgcgcgcaatcgctgttccagcttatatcgtcgctcgcttccaacctcttggaactctcggcgaaccgcgccgcgtggatcttagcataccgaggatc

SEQ ID NO: 28698 - DNA, 365 bp, Zea mays
  Clone ID: LIB3180-036-P2-M2-G12
ggcaagctggaggccctggagccgcgcgacaaggtgcagtctgaggccggctccgtccagtacttcagccggttcaacgaagccgaccgggagctcacctgcgccggcattttcgccgtccgcgtcgtcgtcgacgccatgggcctcctgctccctcgatactccaacgtccattcgcttgtctacatcgtccaagggagagggatcattgggttctcgtttccgggatgccaagaggagacccagcagcagcagtatggatacggatatggatatggacaccatcaccatcagcatgaccaccacaagatccaccgattcgagcagggcgacgtggtggccatgccggccggcgcccagcactg

SEQ ID NO: 28699 - DNA, 155 bp, Zea mays
  Clone ID: LIB3180-036-P2-M2-G2
gcgccattggccagctagagccaaccagaagagcttgcagttactgagagtgtgtgtgagagagaggatggttgtcagcggcagggctgctctgctgctggccctggtggtggtggccgtgagcctggccttggtgtttcaggcctactcctttt

SEQ ID NO: 28700 - DNA, 367 bp, Zea mays
  Clone ID: LIB3180-036-P2-M2-G4
gaattttacagcgtcgcaacagctgcagcagtgaaagttattgattttggatcagcgtgcctggagggtaaaacagtttactcgtacattcagatatactactgcgatcgacatgtggtcattcggctgcatagttgctgaactgtttctaggcttgccattgtttcctggagcaacagaatatgatgtgcttcagagaatggtgaaaattctcgggggccaaccaccagatgaactgctaagggaagctaaaaacactgtaaggttttttaaacatgttggaagtatatatgctggcaatgcggcgcctattggtctttttagtgcatacagaattttaagtgaagaagaggttgaagcgagagat

SEQ ID NO: 28701 - DNA, 373 bp, Zea mays
  Clone ID: LIB3180-036-P2-M2-G5
cactcgcgaactccatttcgatcccatttgaaatcaacccatcctcgtttcctccgtctagcagcctctcaccctcatggccaagatcaagatcgggatcaatgggttcggcaggatcggaaggctggtggccagggtggccctgcagagcgacgacgtcgagctcgtcgccgtgaacgaccccttcatcagcaccgattacatgacctacatgttcaagtatgacactgtgcacggacagtggaagcaccatgaggtcaaggtgaaggactccaagacccttctttttggtgagaaggaggttgctgtgtttggctgcaggaaccctgaggagatcccatggggttccgttggcgctgaatatgtggttgag

SEQ ID NO: 28702 - DNA, 435 bp, Zea mays
  Clone ID: LIB3180-036-P2-M2-G6
tcttatcatagaaagttcaatagtgtaccaacaatggcagccaaaggattttgcttccttatgctggttggtctttctgcaagtgttgctaccgcaaccattttcccacaatgctcacaagctcctatagcttcccttttttccccatacctttcaccagcggtgtctttaatgtgtgaaaacccaattgttcaaccttacaggatccaacaggcaattgcaacaggcatcttaccattatcacccttgttcctccaacaaccgttagccctattacagcagttacctttggttcatttggtggcacaaaatattagggcacatcaactacaacaacttgtgctagcaaaccttgctgcatactctcagcaacatcagtttctttcattcaaccaactggctgcattgaactttgttgtttatttgcaacaacaa

SEQ ID NO: 28703 - DNA, 353 bp, Zea mays
  Clone ID: LIB3180-036-P2-M2-G7
ccacaacctgaagagcataatcaagaagaagtacggtcaggatgcgacaaatgttggggatgaaggtggttttgcacctaacattcaggaaaacaaagaaggccttgaactattgaaggcagccatagaaaaggctggctacactggaaaggtggtcattggaatggatgttgctgcttctgagttcttcggtgagaaagacaagacttatgatcttaatttcaaggaggagaacaacgatggctcaaacaaaatttcaggctacagcctgaaagacctgtacaagtcctttgtttttgagtaccctatcgagtcgatcgaagatccattttatcaggatgactggagcactt

SEQ ID NO: 28704 - DNA, 416 bp, Zea mays
  Clone ID: LIB3180-036-P2-M2-G8
ggagctagcagcaagatcttagcacaagcgaccacaccccacaggctgatggaatcactccaagactaatcaaacgaacgcttagctaatagcgcgcgatctttttttcccctccccctcttgagcgtgcgagaagagatggcgctgaacggcggcaagacgttggtgcaggacgaggagaagcagcagcttctcctagagaagcacaccgagaagcacttcaccgccggcgaggtggtccgggacatcatcatcggcgtctccgacggcctcaccgtgcccttcgcgctcgccgcggggctgtccggcgccaacgcctcctccgcgctcgtgctcaccgcggggctcgccgaagtggccgccggcgccatctccatggggctcggagggtacctggcggcgaagagcgaagctga

SEQ ID NO: 28705 - DNA, 147 bp, Zea mays
  Clone ID: LIB3180-036-P2-M2-G9
caccactccatgaacgggaacgaagtatgcatcagttagaaaagtgcacctataattttggttgcttataactttctatttgtcagagatttaactcgaaggacctgtaactaggaaagttaattttgcttggaagaacattttgat

SEQ ID NO: 28706 - DNA, 255 bp, Zea mays
  Clone ID: LIB3180-036-P2-M2-H1
atccaaactacactgagttcagattcatgcaacggatttcctcacgtgtgggagtaccaacaacctttattatctcaacaagttgatccacagcactttcgccaggaaagagaggctggccaagaagcagctcaacaggaacacatccagctgaccaaatattaattgatgttgtgtactcgcttgtcccaaatatgaactttggagccccgtataaacgactgcatatctataaaatggttccattcaaattta

SEQ ID NO: 28707 - DNA, 303 bp, Zea mays
  Clone ID: LIB3180-036-P2-M2-H10
ggagaccacaccacaccgcctcctccgcccgccgattcgtcgagctcgccctcccgctcgcctagctcccctgccttttcccttcctacccacctcctgccccgcgaacgtgctcccgcatgccaccgcgctgacgcgcgcggcggacgacggggtcgggatcatggacaagtacgaggctgttcgggacatcgggtcgggcaacttcggggtggcgcggttgatgcgcaaccgcgagacccgtgaactcgtcgtcttcatgcttattgaacgaggccaccgtatcgactagaatgtgttccg

SEQ ID NO: 28708 - DNA, 409 bp, Zea mays
  Clone ID: LIB3180-036-P2-M2-H11
ctcggagaagaggagcagcacggcacggcagctgtggcgaggaaggctcctgtcccatcccaacccagttagcagccgcccaaggaggaggagatccaatcggcgtgcgggcgtccgcggtccatccatcgatccaattccaatctgcaggttatactcaaactgcacacagtagcatccttctggtacagtaacaaaggatttggaacccagccctctgttctccaccaccgcttcgaagatgccgcaggtaatggtggtggcacggaacttcatggatatgggggctgctcttcctgcgggcaagcttgatatgctctatgactcagcctttatttgtgaggcagtactcaagtcactttccccactggcaaagaagtatgcactgcagatgttgtttgtgctggca

SEQ ID NO: 28709 - DNA, 404 bp, Zea mays
  unsure at all n locations
  Clone ID: LIB3180-036-P2-M2-H12
tcgatcgcgagcggcgccctttttttttttttttttttttttttttttttttttttttttttttttttttttttttttttttttttttttttttttttttttttttttttttttttttttttataaaaatgaaaaaaattcttttttttttatgtgtgttacctcttttctttttttttttttaaaaattttttccttttatattcccttttttttttttttaaacattttctttttttttttttttttaaaaggttttttttttttaagtggttttttttttaccttttttttttattttttaaatttttttttttgtataaattatttcctcttttgtttttttttggtgtttcttttttattttttttattttgctataatatttttttantttttttttt

SEQ ID NO: 28710 - DNA, 117 bp, Zea mays
  Clone ID: LIB3180-036-P2-M2-H2
ggtcgcgctgccgacccggccatggccaccaaggggaagctcggggagctagtgtgggagcaccgggtgcaggcggccgcagcggtggctttcgtggccgtggccgtcgtcttgatt

SEQ ID NO: 28711 - DNA, 416 bp, Zea mays
  Clone ID: LIB3180-036-P2-M2-H3
gtcaggacggcggacgacatcgaacccttcatcaagaagagcaaggtgaccgattgtaccgtcaccaccaccaccacccatgcgccaccggcatcctagaaggcagccgccgccgagcccgtcaaggacgagctgtgagcatccaaggtgtggacggctgtggctgcgtaagcatgggaggaaaacctggcgctaacgtgcctccaacgcctagtttttgcggtaccagagggagagagagagagggacggttttagagagagaggggatctgcgacgtgttttgctctgcggcggcatttttgtgtttcccattgaggttatgtaccacaatttcaccgtcggttggtgtgttttatttatgtttatattcataagtgttctatttatggatcctttttgttttttaatttttct

SEQ ID NO: 28712 - DNA, 353 bp, Zea mays
  Clone ID: LIB3180-036-P2-M2-H7
atcgaccggatcctcggcgtcatcaagagccaccccaggatcgacccctccaaggtgaccccggaggcgcacttcgagaaggatctcgggctcgacagcctggacaccgtcgaggtggtcatggccatcgaggaggagttcaagctcgagatcccagacatggaggctgacaagatcgactcactccctctggccatcgagtacgtcgccaaccaccccatggttggctgagcctctgctcgcccgataggaggctagttgaggtgaggcttcgtttggttttgttttctagggcatatattttgcttgtgtgttacagaaatacatgtttttgtttctttaaaattatttta

SEQ ID NO: 28713 - DNA, 223 bp, Zea mays
  Clone ID: LIB3180-036-P2-M2-H9
gcaagctataattccaaggcaccgccgccgcatcgatctcgggaatcgaaactcgaaaggcgcacgcggtccacgcccccggctcgcccagctcgagaagccacctgcactcctcccttctagaagcttccatttccttaggccatggaagacgactacgacttcccggcggctggcgggtacgaccccatgggaatgatggggatggggatgggaggcttcg

SEQ ID NO: 28714 - DNA, 380 bp, Zea mays
  Clone ID: LIB3180-037-P2-M2-A10
gctgactactctcacaaacatcaggggggtctattcaaccaactaggggcatacaacgcccactagtgtaccaacaatggtatccaaagtattctgcctacatatgctccttgaactttctacaggggctgatacggctaccattttcccgaaatgctcgcaagctcctatagctaccattattgccccgtacctctcaccaccgttgtcttcggcatgtgaaaacctaattcttcaaccctacaggatccaacaggcaatcacagttggcgtgttacctttatcacccttgttcctccaacaatcatcagccctattacatcagttacctttggtgcatttaatggcacaaaacattaaggcacaacaactacaacaac

SEQ ID NO: 28715 - DNA, 303 bp, Zea mays
  Clone ID: LIB3180-037-P2-M2-A11
gtacttgggagcgtggtacagttgggggggctctacgtgctgcatatagagaaccctgagagagctatagactacctgtattctggaattcctgagaatgtggaggctccgcctgttgcccgagcacctgctgctggccaacaaacaaatcagcaggctccatcaccagctcagccagcagctgcaccaccagtgcagtcatctgccgcctctgcaaggcctaacgcaaatcctctgaacctttttcctcagggtgtcccaagtggtggggccaaagcaggggttgttccagctgcaggatct

SEQ ID NO: 28716 - DNA, 399 bp, Zea mays
  unsure at all n locations
  Clone ID: LIB3180-037-P2-M2-A2
tctttcgccgccaccatatagaaccacttgtgaggaaccgccgccatcacatgcactgcctcaactagtgttaccacctatggttcattgttgtgtctgcttcttgtagcactgttggtctacaaacattcatatttctctcaacatctggcacagcatgccgccttccaaagcacgccgaaagaggtcacttcgtgatatcactgccaccgttgccactgggactgttgccaactcgaaacctggctcatcatcgacnaacgaggggaagcaacaggacaagaaaaaggagggtccacaggaaccggacatcccaccattaccgccggtggtggtgaatatagtcccacgacaaggattaggatgtgaagtagtggaagggctactcgtgcctagtcg

SEQ ID NO: 28717 - DNA, 329 bp, Zea mays
  Clone ID: LIB3180-037-P2-M2-A3
tttacagccgcccgaactccacctccagttgggtacttcttgactcttgaccggatctaatcactccgctccaggtccacctacaaaaacacctccacgccatgtcgaagcccgcgaatcagcaatcgtcgcacatgcatgtctacttatccatcgccaaggagaagccttccatcagattctccatcaacatgcttaagctcatgacggaagcacagatccagcatgttcttccccagtaccactacactcgaaacctgagatactgctctgcacgactcagaaggctatacaagtttatcaagtttttgcatggccgaggtaaatac

SEQ ID NO: 28718 - DNA, 405 bp, Zea mays
  Clone ID: LIB3180-037-P2-M2-A7
tcgcagacccttgttctttcttcgacgggggcccgggcatggcgaaccggggggttgccatgggcttggccctcgcgttcgtggccatgaccgcgctctgttgcgcgccgggcgccgcggagttgccccggctggagcactcggccaggagcgacggatcgctgaagctgctcgtcgtcggggactggggacgcaaggggactcacaaccagtcccgggtcgccgaccaggtaagtaacggcagcgccatcttatacattcctagttccgagcttgggttgactggaagttagtgcgtacttcaaacaccttggcctttaacgccgttactgttcatccaagtagaacatttgtttggcttcggcttatgccgattaatctttgtttatttgcacctggaacgcc

SEQ ID NO: 28719 - DNA, 198 bp, Zea mays
  Clone ID: LIB3180-037-P2-M2-A8
tcggccgtccggaggacgccttgtgcggcggcggcggcattaggtggaggtgtggaaccataatccacggaccggtaggcgcccaatcggcatgctcttaagcggctggcgctgctcgcgcttggctgctgctcttcatattcctcattatcttactaattccttatttctatctttatattatatctattaacacta

SEQ ID NO: 28720 - DNA, 256 bp, Zea mays
  unsure at all n locations
  Clone ID: LIB3180-037-P2-M2-A9
tcgttcgcaggccgcaatctcgcaaacacggaccgtctcggaatccgggtcgccagantcctcacggatggcctcgccagcgatggtcccgctgcggcagctcttcgtcgacggcgagtggcgcccgcccgcgcagggccgccacctccccgtggtgaaccccaccaccgaggatcacatttgctagatccctgcgggcacagtgaaggacttgcactcgtagattcatatttaaacgtattttttaaaataaatt

SEQ ID NO: 28721 - DNA, 426 bp, Zea mays
  unsure at all n locations
  Clone ID: LIB3180-037-P2-M2-B1
ttatgtctgcgagggcgccggcggtcaaggggtccgggcatctcgtccgcaggggcaccgnagggaggtcttctgtgagtggaattgtagccacggtgtttggagctactgggtttcttgggcgctatcttgtgcaacaacttgccaagatggggtctcaagtgcttgtcccattcagaggttgtgaggattctcctcgtcacctgaagattatgggtgacttgggtcagattgtgcccatgaagtaccatccgagagatgttgattcaattaaggctgtttatggccaatcaaatgtggttattaacctcataggacgagagtatgaaacaaggaactacagcttcgaagaagtaaaccaccatatgcctgaacagcttgcaacaattgctaaagagcatgggggtattataagatttattcagg

SEQ ID NO: 28722 - DNA, 340 bp, Zea mays
  Clone ID: LIB3180-037-P2-M2-B10
ccgaagctcaatcaattcactcaaacctcttccccaaatcttcgattagattctcgttgacaagaagactagaaccgaacctgaccatgtcgctgatccgccgcagcaacgtgttcgatcccttctccctcgacctctgggacccctttgagggcttccccttcggctccggcagcagcagcagtctcttcccctcgttcccgcggaccagctcggagaccgcggccttcgctggcgcgcggatcgactggaaggagactccagaggcgcacgtgttcaaggcagacgtaccggggctgaagaagggagaggtcaagggggagggcgaggacggcaacgt

SEQ ID NO: 28723 - DNA, 348 bp, Zea mays
  Clone ID: LIB3180-037-P2-M2-B11
ctagtcccctgctccattctcagccgccgccaatcccttcccgtgctccgcaaccgctgagtgagaagaagagatggccggcaagggcgatggcccggctatcggcatcgatctcggcacgacgtactcttgcgtcggcgtgtggcagcacgaccgcgtcgagatcattgccaacgaccagggtaaccgcaccacgccctcgtacgtcgccttcaccgactccgagcgcctcatcggagatgcggccaagaaccaggtcgccatgaaccccatcaacaccgtctttgatgccaagcgtctcatcggcaggaggttcagtgatgcgtctgtccagagtgatatcaagct

SEQ ID NO: 28724 - DNA, 373 bp, Zea mays
  Clone ID: LIB3180-037-P2-M2-B12
catttccggggtttaatattaataaaaaactccgaatccgccgggcgcgccccgtcctggtcgccggcggaggcgcccgccaccgcccacagcagcctatcgccggagaaggaacgccgcggggagcttttccactgccatctcccgtctgacccctccgagatcggaagcggcggccatggcgatcccgctcgtgctcgtcgtgctcccgctcggcctcctcttcctcctgtccggcctcatcgtcaacaccatccaggccatcctatttgtgacaataaggcccttttccaagagcttgtttcgccggatcaacaagttcttggccgagctgctgtgggttcagcttgtctgggtggtggactggtgggca

SEQ ID NO: 28725 - DNA, 233 bp, Zea mays
  Clone ID: LIB3180-037-P2-M2-B2
tcgtgagcggccgctcgcgatctaaaccaaggcgtccgacattgttgtccaaacaggaccagttcttatcacggtggcctatctcgtcgttctaacaaggccacatattccttaacctagctagctaacagttgactagttagatcgatccatcagatggcagtcattattatgatcaggatagtactgtgccagttcttcgtttgactcctgtttacggatacagtcttttt

SEQ ID NO: 28726 - DNA, 202 bp, Zea mays
  Clone ID: LIB3180-037-P2-M2-B3
tcgttgccaacgccctctttcgcaccgttccagggaacggaatcatccaccaccgggcaccggcagtcacagcgcacctcactgaaattggaacagagaacatggcggccgccgcgcccgcgtgccacgtccatatcgaggccctgcagacggcgctgccgactcgcgcgtaggatcctcggtcgtttatttatattttttt

SEQ ID NO: 28727 - DNA, 251 bp, Zea mays
  Clone ID: LIB3180-037-P2-M2-B4
tgggtcttcagaccattagctttatctggtccagagcgcagaagaaccggatcgacaccatgagggtgttgctcgttgccctcgctctcctggctctcgctgcgagcgccacctccacgcatacaagcggcggctgcggctgccagccaccgccgccggttcatttaccgccgccggtgcatttgccaccttcgggtcacctgccaccttcggggcattttccaccgtcggtccacctgccgccgccggtc

SEQ ID NO: 28728 - DNA, 420 bp, Zea mays
  Clone ID: LIB3180-037-P2-M2-B5
cgcccaacccgtttggtttgatccttataaaggaagctggggggtccgccttctggaacttggggttttcaatcctactgatgtcgttttttatgttgatgttgctgtgcatttggatgacacggatgtggaccaagaagtaatttcagacggggatgctgcttgtcacaaaactagaattgatcgggactactctgccagagttctcatacctcttgagaacttcaaattgcctgttcttgatgcttccttctttgtaaaggcaagtagtagtgatgaaccttttggatccagggccgcccccatagcaaaaaggaatgcccaggcagagcttaatgcgtctatcaacaatttgatttcaaaaatacaagttgaatggtactttgggagaaataggttcagttaggctgatttttaaga

SEQ ID NO: 28729 - DNA, 297 bp, Zea mays
  Clone ID: LIB3180-037-P2-M2-B6
cgaatttcccggttcgcccaacccgttcgttggcttttcctccccctctaaccaaggcctcttcgggttagggttacttagggttttgtggaggggcgatggcggcggctgatgtggagtaccgttgcttcgtcggcgggcttgcctgggccaccagcaacgagtcgctggagaatgccttcgcctcctacggcgagatcctcgactccaaggtcatcaccgaccgggagacggggaggtctcgcggttttggcttctttaccttttccttccagaactccatgctcgacgctattc

SEQ ID NO: 28730 - DNA, 441 bp, Zea mays
  Clone ID: LIB3180-037-P2-M2-B8
cagaaacacaccaagcgaagcacattagcaacaacctaacaacaatggctaccaagatattatccctccttgcgcttcttgcgctttttgcgagcgcaacaaatgcgttcattattccacaatgctcacttgctccaagttccattattacacagttcctcccaccagttacttcaatgggcttcgaacacccagctgtgcaagcctataggctacaacaagcaattgcggcgagcgtcttacaacaaccaatttcccagttgcaacaacaatccttggcacatctaacaatacaaaccatcgcaacgcaacagcaacaacaattcctaccagcactgagccacctagccatggtgaaccctgccgcctacttgcaacagcagttgcttgcatcaaacccacttgctctggcaaacgtagttgcaaaccagccacaacaac

SEQ ID NO: 28731 - DNA, 434 bp, Zea mays
  unsure at all n locations
  Clone ID: LIB3180-037-P2-M2-B9
cgtggctttcaacaacgagaaaggaggcgtaattgagtatctcaaggatgagaaaattgttgacttgaactcaaatcacccaaatatttcatccaccactgtgctagacacgaaggccatggtttcgtcctggcttgctaatgctttgctgtatgaactctgggtggttagtgatggaagcattgcaaatgatatctacttctctgatctcccttggcccattggaaagatactccattggaataaaactagacatgtgaagcagctacttggtataacaaagctcaatgctgcagaaaaagaagaggagatataccagaaggcaagtgctgcatatgagtcattgtctttcagattaggggatcaagtctttctatttgataatagccctacagatgttgatgctcttttccttggacatgtnctttttgttc
